United States Patent Application Publication US 2011/0183924 A1 - sequence listing, part 8

SEQ ID NO: 18301 - DNA, 1012 bp, Homo sapiens
ggcctttgtctcgctccagccagagctcagggtccatcttcattgcttagtatcctctgctctagtagttcccggtgactgtcgcagcctctgttgccctctgacttgcagatgctgtgagatccagagctaagactccacgacatcccggaagccgaaaaatggaactgttgacattcagggatgtgaccatagaattctctctggaggagtgggagtttctgaaccctgctcagcagagtttgtataggaaagtgatgctagagaactacagaaacctggtctctctgggtcttactgtttctaagccagaactgattagccgtctggagcaaagacaggagccctggaatgtgaagagacatgagaccatagccaaacccccaggctagattacagccttaccattttgtgtaaaaagaagagcaacatattaataagtttccctagtattatatgaggagtcatgagaattgttgtaaattcaacatctattcattggtggatgtatattttctttttgtgagagaaacacttgtgatttgaagctatgtcttctcattacactgaagaccttttgccagaacagtgcatgcaagattcattccaaaaagtgatactgagaagatatggaagctgtggacttgaggatttacacttaaggaaggatggggaaaatgtggtgtctgtatgaaagcatgtggtcaatttctgctgctcggggtttgagaagttctatattaggatgtcatttacatacttttcaacagaagattgaggacactgaaatatgaggtgtgtgaagaaagtacacagagaaacttttgtggttgacttataaaacttgtaagtgctgcatgagatagatgttcagagtaatagtcttgtgcattattcaaattttagtaaattgttttaccaattgcacattagatagtatagtggattttgtaatgcttttcttagactgtgtgaacttagtttcaataaaacaattatttttaatgtgtta

SEQ ID NO: 18302 - DNA, 716 bp, Homo sapiens
ggcctttgtctcgctccagccagagctcagggtccatcttcattgcttagtatcctctgctctagtagttcccggtgactgtcgcagcctctgttgccctctgacttgcagatgctgtgagatccagagctaagactccacgacatcccggaagccgaaaaatggaactgttgacattcagggatgtgaccatagaattctctctggaggagtgggagtttctgaaccctgctcagcagagtttgtataggaaagtgatgctagagaactacagaaacctggtctctctgggtcttactgtttctaagccagaactgattagccgtctggagcaaagacaggagccctggaatgtgaagagacatgagaccatagccaaacccccagtgtctgtatgaaagcatgtggtcaatttctgctgctcggggtttgagaagttctatattaggatgtcatttacatacttttcaacagaagattgaggacactgaaatatgaggtgtgtgaagaaagtacacagagaaacttttgtggttgacttataaaacttgtaagtgctgcatgagatagatgttcagagtaatagtcttgtgcattattcaaattttagtaaattgttttaccaattgcacattagatagtatagtggattttgtaatgcttttcttagactgtgtgaacttagtttcaataaaacaattatttttaatgtgtta

SEQ ID NO: 18303 - DNA, 313 bp, Homo sapiens
ctaagagggaggggaataagtcattcagtgtttcttctctttctcacaaaaataatctctttggttggttcctagatgggagttgttccagttttcacttgggtgaaaaaaaaggagagctggagactgatcaaccaattactttcatttcatatggcgattagaaaaacagatgaggcaatcataatctctgcaatccaggaactgtgtctgtggcaaatgaataaatggctgaatttcacaccatggagtcagtacaaaaaagggacgtgtgcaggggatttagggccactttccttatgttgggaactct

SEQ ID NO: 18304 - DNA, 415 bp, Homo sapiens
cattgataagtggcacatgacggtatctcagtcataagagggttgcatgattcctttgaatgtttgatttggaaaagcctagtcttgtctctcaagagcatctcagacccagaacattctctagtagtgcactcagttaaacagggcaagtgcttcactgcatggaaaacactttgaagagacaaaaaagaaatcttatttcttttttgtagcctttctgatatttacaataataccactaactgttttctttatcgatagcaaagaacgatactttttgcaatgtaattagacgttctatagtgctacaaggaaatgccttccaaaaggaggctcatgtataatactcatttacaaaatatataattacgcaaataaattttaaatataatcaataataaagactgttctgtgg

SEQ ID NO: 18305 - DNA, 979 bp, Homo sapiens
aggtgtgcaccaccacacccagctaattttgtatttttagtagaggtgaggtttcaccatgttggccaggctgatctttaactcctgacctcaggtgatccacctgccttggcctctcaaagtgctaggattacaggcatgagccatcatgcctggccaaatttcttaatttcagatataccctatggcacagatattttaaggcaaaacataggtatattatgccatacataagtgtattggatgaagctgacagagaaaagtatataatcattctgagaaaagaagcctcgatatttacatttcggtgaaaagggggagaaaattactgttttgcgaatcaaccaaagtactccatagtcattacagaagcatgtacttacctgtaattttttgtggaattgttcaaagtttattgtttaacacttattgacaatcactattatgctggatactatgggagcaagtttatgcaagctaatcccctgctgtgttaatctagggaaagaatggaacagtgatcaaatttgcaaggttagaaatgctaaagctcttgctttctgtcagaaaactccagctaggtattcaaatttagtcgagatccaatatcagaaagcctttattatttattgaagcatctgctctttctactttttccatttggcttctgtgctctgtggttactattctcaggtaattgggggtatgacttcagtcacttttgaaatattgggaactaaattctctcattggagattcagcacattcaggcattttaataaaactctagtatcttgaattctggaaatttaattagtatacttacactttgaattttttcttgcctgaaccattacacatttttacagaacaaatatttaatccttaagatttcataaccaagggatttaaagattagctttgaaaataggtcagggaaaatatccactttggttaaaagctaatcatgtaaagaagt

SEQ ID NO: 18306 - DNA, 696 bp, Homo sapiens
aataagtagaatggcatctgtctcaacacctagactggattgaaaatccaagcgattgaatataatcattacctaattgccatttcccagggatctatgtaggtatgtcagtttggttctataatgtttgtaagggtcctctcttagacgttggaatactcagttatacctactggctcatggaacaggtgttcttaggaagaaactagaaggttacttctagcctcatgttaattttactgctggatcctaggtttaccatgttcatgctctagaaagaagtaagaggcatgagccatcatgcctggccaaatttcttaatttcagatataccctatggcacagatattttaaggcaaaacataggtatattatgccatacataagtgtattggatgaagctgacagagaaaagtatataatcattctgagaaaagaagcctcgatatttacatttcggtgaaaagggggagaaaattactgttttgcgaatcaaccaaagtactccatagtcattacagaagcatgtacttacctgtaattttttgtggaattgttcaaagtttattgtttaacacttattgacaatcactattatgctggatactatgggagcaagtttatgcaagctaatcccctgctgtgttaatctagggaaagaatggaacagtggacgggatcctctagaacacagac

SEQ ID NO: 18307 - DNA, 309 bp, Homo sapiens
agctacatcagtcttacttttgagagtccttttttaatgtttggtttttctaaatgttctttagtgctagacccactaattgcttccttatggcagctgcttttgatttaagactgatcatgggcacatatagtcccttgttcagggctcagatggacatcacaaaaaaccttatagttatgatcttactgtggaaaatgcccagaaaataatagccataaaaatttgttttctagtaagtgaggctggttttgatattttaaaagtttctgtttatacccaccccctctgcttggtctcttttaatct

SEQ ID NO: 18308 - DNA, 478 bp, Homo sapiens
ataatatttcatgctatggatgcattatagtttatttgactaatatcttgttgaaatgcataccgtttccattttcactattataaggatttgcaaacaattgttctacatacctttttatatagcctgtggtcatatttctaaagcacagattcagagaagtgggaatactggctgggcgtggtggctcacgctggctcactatgacatctgtaatcccagcacttcgggagggtgagatgggcggatcacctgagatcaggagtttgagaccagcctagccaacagagcaaaaccccgtctctactaaaagtataaaaatcagctgggcgtggtggtgtgtacctgtaatcccagctactcaggaggcagaggcaggagaattgcttggacttaggaggtggaggttgcggtgggccgagatcaagccactgcactccagcctgggccacagagcgagactctgtcttgcaaaaaa

SEQ ID NO: 18309 - DNA, 803 bp, Homo sapiens
actattgagaacttcactccactgtcagcatttgatcgtctaaacagaaaatcaacaaacactggatttaaactgcactttagaccaaatggacctaacagacattttcagaatcttttatccaacagctgtagaacacacattcttctcatcagcacatggaacattctaaagggtaaaccatacattaggccacaaaataagtctcaacattttttttttttagacacggtctcgccctgtcatccaggcaggaatgcagtcctacagctcactgcagccttgaactcctgagctcaaattatcccctcttcagcctcccaagtaacaaggactataggtgcacaccacaatgcctagctaattttcaactttttgtagagacaatgcctcactatgttgcccagtctggcctcaaattcctggcctcaaacaatcctcccacttgaggatcctcagattccaaaatactaggattacaggcgtgagccaccaagcctggcctcaacaaatttttaaaaattaaggctgggtgcggtggctcatgcctgtaatcccagcactttgggacaccaaggcaggcggatcacaaggtcaggagttcgagaccaggctaacacagtgaaaccctgtctctactaaaaatacaaaaaattagctgggcgtggtggtgggcgcctgtagtcccagctactcaggaggctgaggcaggagaatggcgtgaacccaggaggtggagcttgcagttagccgagttcacgccactgcactccagcctgggcgataaagcgagactccgtctc

SEQ ID NO: 18310 - DNA, 584 bp, Homo sapiens
gcccccaggaggaatgtgttgtaatctctagcagcaaagaggcccttagatatcgtgcaatataatgaataactgatcccaaagcatctaaatgatttcaagcgtgctactgctctcaagaatttatgacccagacaacagtggctggggtcagggctcgcccctggccaggttaccagggcttgcctctgcaatggagtagagccctttattgttcttttgtctaggaatggagtttcagatcagaagaaatccaaatactcaaaaacctcttgccccaagcataaaggactaattccttggcgtagagcaggaactcaccaaagactataaggtctgacaatgcacgacaggggaaagagagagaaagatgggaatgtccacagtctcattacttcgacaaacacccgcaaggccccacccggtcaaaggtaaggcctggagcagccgtgcccacacaatgagatgactggactggttcatctgtttattggcaagctcaggacagggtatgagcagtggtggagaccggcaaatgtcaaatgaatgaacataaaaacaaggaagatttgaatctctgcagg

SEQ ID NO: 18311 - DNA, 468 bp, Homo sapiens
attttataaagaaatgtctttgttaagatgctgtttattttagaaagtgaacctgagaatcttcttgttataacaaagtgtcttattaagttaactcaaaaactggttgctttaggagattatgggactcagtatcataggggattgagtcagaagacacaagttgtggagttggacctgaggccctagcatagagttctttaggacagtaactccatgaagagaaaaatctccacttatatgaggaagtttgtctctacctgggctcttctctgaaaaaacccggattttttttttttttgagatggatcctcattctgtcacaggctggagtgcagtggtgcgatctctgctcgctgcaacctctacctcctgggttcaagcaattctcctgcctcagcctcccaagtagctgggattacaagtgcgcgccactatgcccagctaatttttgtatttttagtagag

SEQ ID NO: 18312 - DNA, 423 bp, Homo sapiens
tgggacgtttgattccttctccaactttcctgaccacaagggacactgggcccgaccacagggcacattttcacagtgacccatggctgtttccctacacttctgtgatgtccagaatgccacttttattttgttagaattttaaccacattgctattttgttaatacttttttttttgaacgtattcctttaaatatatctggatacttttttttttctttttttttgaggtggactcttgctctgtcgtccaggctggagtgcagtggtgcaatctcggctcactgcaacctccgcctcccaggttcaagcgattctgcttcagcttctgaagtagctggattacaggcatgcaccaccacacctggctaattttttggatgcaatttttttaaattattattttaattttttgagacgga

SEQ ID NO: 18313 - DNA, 244 bp, Homo sapiens
gctcttgctctagtctccaccagggtgacaccagccagtcgtctggccattcaggcacttgtttgtcctgctcttgctaattgggttggcatttggcttgtcaccaggtatttgggatgctcgcagggaaagtgtggagaaatacaaaccatcaccttaataattggtatgatatttcaggatctctgaatttcttcctttgtgtgatatttctggagagaaaaatccactaataaaccttttt

SEQ ID NO: 18314 - DNA, 381 bp, Homo sapiens
agctctagcccctgttttgtacaacccagggtccttgcagagagattgatctgccagcagtggcatcagcagcaatagtagcagcagcaaagccctggacagtcctggcccccagtccacaacttagacacagcacatggcctaattcacccacagaagcagccactgtgaagccctgtgtctccccagactccatccagtggcataaggagacccaggccctgcagcttcctccccatcatggaaggctgtccatctacagagtttccaaacataataagcactaaggaaacaacataacatgatatgccgaaaaaaaaaatcacaattaaatcaaaatgaaacatcaaaaaatgtccaagtaaaccacaggaaggcaag

SEQ ID NO: 18315 - DNA, 335 bp, Homo sapiens
caaattcaaaagatcccactcattatcaatatgtggtccttctacagttttgcatagtataacatattcttaaaatgggatacatagtgactttgtagcatcaactatttaaattttctagctcctgagtccttttcttgctgtgaaatgtgttcattttattgtgtgatgatattaacatatatcaagaatataagtgaaatattaaatcttgtcatgttcagggttttagggttcttaaaaatgtgtaaaggtgtttttacactgtgtaaaaaaaaactttatatgtttgtgagattttgagttacctaattttataaactaaattactttgt

SEQ ID NO: 18316 - DNA, 727 bp, Homo sapiens
aaaaaacaatgtaaaccatattaaatgttttgaacttgatcctaagggtaataatcagccattatatgtaacaggcatagcagggacataataatatttcatatcctccttagaatgatcactgtttgcgtgtggaaaatagattggtgtctcagaccagtctgtttgtcacagtggtctaggtaggagaagacaatggcaaaggggatgagaagtggattgatttgagagatatttaagcaatagaatcaatagaacttgattgatcagatacatgagatatgaaaggaggaaggaatggtcagttttctggctcaaatagctgggtagatggagctcctcccaaaacagtttatcaaattatttattatatattgtgtttgatatatttaatcacattatagaaatgaactcaccactaattcagcctcatacccagccaggcacggtggctcatgcctgtaatcccagcacttcgggaggctgaggacggtggatcacttgaggtcaggaattcgagaccagcttggccaacatggtgaaacactgtctctgctaaaattacaaaaattagctgggtgtcatggcaggcatttgtaatcccagctattcgggaggctgagggaggagaatcacttgaacccgggaggcggaggttgcagtaagccaagattgcgctgctgtactccagcctgggcaacagaggcagactccatttcaaagaaaa

SEQ ID NO: 18317 - DNA, 480 bp, Homo sapiens
aaaacattttaaaaggcatcagacacctggaggccagaaggaagtgacataaaacttttcaagtgtcacttttcaagaaaataactattaacttagaatcttttatccagtgaaaatattcttcagtaatgaagggaaaattgagacattctcaaagaaaggaagaatgagagaatttattgcctgcagatctacccttaaataatggctaaaggaagttcttgcattaatttttaaataaactgtgagatttaggtcgaagtttttctttttttgctttggatgtccaaatgctccagcattgtttctcgaaaagactatccattgaattgcttttgcacctaaaaattggtgggtatatttgtgtgggtctatttctgtgttctctcttctttcccattactctatgtaattttccctcccccagtactacatggtcttgattactttatgtaataagcatgaattaatatcaattat

SEQ ID NO: 18318 - DNA, 502 bp, Homo sapiens
caaacttgctttgtttaggaatcagcacattttaaagcataatttgtatattatagttaaaaggttttaaatttttaaccgtcaaagctagaaagtattgaacacagaattggagacacttatttaagaatggagaaaataatgttacgataaaacatttgaagttactgatgttttgcatatttaagagtgtctggtttagaaaattacctgagcagggtgtggtggcttacacccataatcttagctacttgggaggttgaggcagcaggatctctcgaggccaagagttcaggaccagcctgggcaacatagtaagactcgtccctaagaaataaaaaaaaattagccaggtgtggtggtgcacacctgtagtcagtcccagctcctcaggaggctgaggtaggaggatcacttgaacccaggagtttgaggctttagtaagctatgattgcaccactgcactctagcctgggttacagagtgagaccttgtctcttag

SEQ ID NO: 18319 - DNA, 567 bp, Homo sapiens
ctttcctgattaacctgcttctcacctatcctctgtccttcggaatctttttctttgtatggctgtctcaactcagcctaactttctttcaaagccctgctgagaagaactttaaaacattttgtatgccaggcacagttgtgcacgcctgtaatcccagcactttgggagactgaggcaggtggattgtttaagcccaggagttccagaccagcctgggcaacacggcaagaccccatctctacaactacaaaaaaatgtatctgggcctagtggcacgtgcctgtgcttccagctgcttgggaggctgaggcaggagaatcgcttgaacccgggaggcagaggttgtagtgagctgagatcacgccactgcactccagcctggcgacagagcgagaccctgtctcaaaaaaaaaaaaaaaactgacgcaagatctggtgaagcattttatcaaagaaaaatacaaaaaaaattattatcttttatttgtaaaaaaaaaaatacatgcctgtttcactataacaaggatggcgaccatggaaccaaagtgataaagaacctgaatg

SEQ ID NO: 18320 - DNA, 298 bp, Homo sapiens
ataaaaggcatatataggaatgaatatttttttcattgctttgtttatactaacaaaaaaataaaaatcccaaatttctataataaacaggataattgataaactgtggtatatttaaactctgaaaaaaaatttttttttaagatacagtctcgctctgtcgcgcagattggggtgccagtgacatggtcccagcacactgtaaccactgcctcccaggttcaagtgattcttgtgcctcagcctcctaagtagctgggattacaggcatgcgccagtacgcctggctaaatttttt

SEQ ID NO: 18321 - DNA, 350 bp, Homo sapiens
gacacaatcttaccttccagttccaccagaaaaacctagggggatgtttaaaatgcagtagttgagcattaaattgtgaggaggccctgctgaaggctaagacctgcactgcaccagttccatgcccatgaagccagccctgcatgtactcaagtctcagttgtttcagaaatggcctgagttacagtcacgcgaaagaagaggagagataatgttgatgaggatatttctacttgagccacagggaatatgttctgcatagtaaagagagttctgtgttgcttgacaggcaaagtcaagaagttcttcactagaacttactcaaaaacttgggcagtcatttgagaaaa

SEQ ID NO: 18322 - DNA, 1164 bp, Homo sapiens
ccatgatgaggtcacagttcccctgcactatctcttgatgtgtgatgtcccaccgaggcccacaggtgggctgtgtccctcgatgtctggaacatacattgaggtcacagggttctgccttcccggcgcccccttctagatgttgccacgtggtcaatggataagcagacagcacccgaggagctgctgaaacacagcgtctatcccgagctttctcttccttagtgctacttgctcaacactgcctgtgcctcatgtctcgctctctctcccctgggtgggagcacagggagaccactctgtgaagctctgggttcccgacagcctcattagaaatgaagccaaaaagcacaggcacagatcaggagaacagggttgtgacccctggaaatgacacgtctgtccctggaggtggcgtccttccccatgcttcttcccaagggcggaggaaacccagctccagggtgacccacagccacttggatctccgggtatcagaagactggcgccaggcccatagccgggttttcacaccggaggaggtgggaggggttttcattttgttttgttttgttttgttttaataaagtcatgcttgattaaataaaatgagagaaaagtaaatttaaggaattgtgagggagaagaaagagcagattgttgtgaacagttggtgggatatctatgcagatagacagtgcacaaaaattataggacacagctactgattttttctctgttctccttttaaaggaccagtgcgtagatatctgggtcacagccctggggagaaatacaaaaacattcacgcatgatatggagagaaaataaagaatagaaatatccatgactggctgaaaacacatgaagaacaaacacagatgcacgatttatgtgttctggaagcaaaaccattcctgcctaatgcagccatttattcagctttattattctagcaagtaaaaaacacaaaactgcgctttgtgaaatatccggagggaagcagaggaggaaagtgctgcctgtgatgtcctggggtcagcactggccacgttatctgcagagacgactggggtcatggtgtgaagttccatcgtggaggaagctgacaggcttgttagtgcgcccctcatagtcagcggtcaccacaccctgtcacccacg

SEQ ID NO: 18323 - DNA, 545 bp, Homo sapiens
  misc_feature (22)..(22): n is a, c, g, or t
gagctcggtacccctggtacgngagtggaaagagcagattgttgtgaacagttggtgggatatctatgcagatagacagtgcacaaaaattataggacacagctactgattttttctctgttctccttttaaaggaccagtgcgtagatatctgggtcacagccctggggagaaatacaaaaacattcacgcatgatatggagagaaaataaagaatagaaatatccatgactggctgaaaacacatgaagaacaaacacagatgcacgatttatgtgttctggaagcaaaaccattcctgcctaatgcagccatttattcagctttattattctagcaagtaaaaaacacaaaactgcgctttgtgaaatatccggagggaagcagaggaggaaagtgctgcctgtgatgtcctggggtcagcactggccacgttatctgcagagacgactggggtcatggtgtgaagttccatcgtggaggaagctgacaggcttgttagtgcgcccctcatagtcagcggtcaccacaccctgtcacccacg

SEQ ID NO: 18324 - DNA, 207 bp, Homo sapiens
catataccattacccaatttccctccatgggaaaataacattttgcataactttaggacagtatcaaaatcaggaaattagcattgatgcaatctgcagtgcttattcagattgaaccagttttacatgcactcatgtgtgtgtgtgtgcgtgtgtgttcgttctatgcagtttttatcacaagtggagatttgtgtgaccaccact

SEQ ID NO: 18325 - DNA, 377 bp, Homo sapiens
ctaaacatcccatagaatatcttagacaaagaaaattacagtaagtagagaaatggatcaaagagtggctattcttggactctctactttccaggtctttttggctagagaactctttttctaactttgttgcctggctcttggcagtcaatgtccaaagtagtgcattgagctgccccccaaaaggggcacagtttgtaaggaaaccatatgccctatgggacctcatgggatgacactcagttagtacataaggatctcttggaagggagctgcctttatgtcctctaaaccaggtcatctcttatcagttaaatcctggtgctgactagtacagctatatgagcctggacaaatcacttctgagcctgtttttc

SEQ ID NO: 18326 - DNA, 239 bp, Homo sapiens
gatgagaagatcgcatgaggccaggagttcaacagcctggacaacatagcaagatcccacgtctacaaaaaatttcaaaaacaaaattggccaggtacggggtggtgtgtgcctacagtcctaactactcaggaggctgaggcaggaggactgcttgaatccaggaggttgaggctggagtgatccatgattatgacactgcactccagcctaggcaacagggtgagatcctttctcaa

SEQ ID NO: 18327 - DNA, 428 bp, Homo sapiens
gggttattagctgaatactaaaatcaatcgttcaatgtcccaggattttatcaattagatttaactgtaatttaagacagtcattagcttcctaaattcttaaactttcagagcttataaaagcaacacagcctggctgtgtaatttcaatcaccaagtagagtcaaaacgtgtttcaagagatcactaaaatgcctgctggaactgaggaagggaaaaaacaagataaaaacaaacactagcaaaaccgataccctagtcacctaataagcttttagacaacagatctccctccagattcttgcaagatttcttctttgacctgactccctttaggatataataatttatatgggtgcccctactatcaggggtttaaggtgaggtcatcgcttttggttctctatatgtcaaaagcactcagtacc

SEQ ID NO: 18328 - DNA, 398 bp, Homo sapiens
acagggccttggtcagcaaagaacaaacccgggtggtcttagtccaaacatacccctgaataaccaagtggcctccaggtttgacagctcataaccttttaaaaagtggtaaaatacaatttcgcacaaagtctggctgcagttggcaaaccaggtgcactgcatgaaatgttcatgtgaaacccaagcagtagggcaggcagctggaacaatcgctgtctaagcacagttaacgcccacacagccccagggaagggcagctctgcacaaagggcatgtctgaaggaaaacagcaccaacatgtttgtttatggcagagaaaaaccaagctgcttctttcttcctcttccccttcccctcaatctgtattaataaagagactttaatataataaagaa

SEQ ID NO: 18329 - DNA, 446 bp, Homo sapiens
gcaagtttcctcacctcattgcacctcagcgttttcatctgtcagatggggataagaattttgctcacctcacattttacttgtgataattagattatgtgacacatataaaactcttggtgcgggcccagtatttacatgggttcttcctcacaaatgaatgttttttattcttgcacttaattgtgttttcttttctgcaggaattctgagagaaatctaggcacctgagttagtccttggcaccgtttaggcagtaaccaaatatttcctgatgaatgaataaatgaaactgtaaagaaatgaatgctttcattcatatattgctttgtatactaattaattactttcaagtataaggatctctttcataggtctaaaacttttagcagacctctggaccaattgcaaatcctagctgttcttagaatatgtttcaaatgaga

SEQ ID NO: 18330 - DNA, 318 bp, Homo sapiens
ctgaacagggccctaaggagcgagttgacctcagttctagctggtgaacaggcccccggtgagcccacctgcggtgagggtgggggtcgctggccagcgcaggggtcagcgtgcttccctgacaggcgctctcaggaccaccattttgagcctgtggaaggacctgccttggagctcctggtgggggcaggacgttttcacttcgtgacttagttgcgtttctgccaatcagaacccaggtctccatccctagaccacaggacaagccagcttctctctgggcccaagggagagtcacagggatgccagattgcgggg

SEQ ID NO: 18331 - DNA, 2445 bp, Homo sapiens
gccatggccgccggccccgcgccgccccccggccgcccccgggcgcagatgccgcatctgaggaaggtgcgaggcggatggagcgggtggtcgtgagcatgcaggaccccgaccagggcgtgaagatgcggagccagcgcctgctggtcaccgtcattccccacgcggtgacaggcagcgacgtcgtgcagtggttggcccagaagttctgcgtctcggaggaggaggccctgcacctgggcgccgtcctggtgcagcatggctacatctacccgctgcgcgacccccgtagcctcatgctccggccagacgagacgccctacaggttccagaccccgtacttctggacaagtaccctgaggccggctgcagagctggactatgccatctacctggccaagaagaacatccgaaaacgggggaccctggtggattatgagaaggactgctatgaccggctacacaagaagatcaaccacgcatgggacctggtgctgatgcaggcgagggagcagctgagggcagccaagcagcgcagcaagggggacaggctggtcattgcgtgccaggagcagacctactggctggtgaacaggcccccgcccggggcccccgatgtgctggagcagggtccagggcggggatcctgcgctgccagccgtgtgctcatgaccaagagtgcagatttccataagcgggagatcgagtacttcaggaaagcgctgggcaggacccgagtgaagtcctccgtctgccttgaggcgtacctgagtttctgcggccagcgtggaccccacgatcccctcgtgtcggggtgcctgcccagcaatccctggatctcagacaatgacgcctactgggtcatgaatgcccccacggtggctgcccccacgaagctccgtgtggagagatggggcttcagcttccgggagctcctggaggaccccgtggggcgggcccacttcatggactttctgggaaaggagttcagtggagaaaacctcagcttctgggaggcatgtgaggagcttcgatatggagcgcaggcccaggtccccaccctggtggatgccgtgtacgagcagttcctggcccccggagctgcccactgggtcaacatcgacagccggaccatggagcagaccctggaggggctgcgccagccccaccgctatgtcctggatgacgcccagctgcacatatacatgctcatgaagaaggactcctacccaaggttcctgaagtctgacatgtacaaggccctcctggcagaggctgggatcccgctggagatgaagagacgcgtgttcccgtttacgtggaggccacggcactcgagccccagccctgcactccttcccacccctgtggagcccacagcggcttgtggccctgggggtggagatggggtggcctagtggacctggcccatctgccactctagtccctgcagctcaacgtcctgcgtgaatgcagcagccacccccgtcttggcccaggtcctgggggctgctgaacccagcaccagtgtccccttgtgcccagggggcccagtcttctgtggggtgcacagcctccctccctccagcaagccctccctgcccagaaggaatgggtccaggtgtggattcccagggagggggttcattggctcagcttgggtcagggcagagcctgttacctgaagagaggtgagaccaaggccacagggagctccaccttctctggtcttcagtccagcactgggtgcccatccccatctctaaaaccagtaaatcagccagcgaatacccggaagcaagatgcacaggcgggcggcttcccacacacccgtcacaagacgcggacatgcaggtctcggcgcgagctctgccccgtccaagagcctctccgctgtcgcccagtgtgagcctggaagaggacccaagagagtgccgtgctgaggctgcctcgaggtcactgccttccggagctgcgcctattcctccctcgccaaacgcgttccagaatttgtccacaggtgcgccggcacctgctttcccacctcgaggccgcggcctcccccccgatttatagacaactctgacattgtcaccccactgacgaggcccgattccatagggtggatccttgccaggcgtccctgatcctccctgcccaagtcttccttcgtgagctggccttgctccccatcccccaagtgcctcaccagtcccccagactgggtgaaggtacagctggctcctttcgggggtgcagcttcaactctctcggcggtagggcggtgccatccccacccatagggctggctcacatccagtcactcccaacagcgtccagcacacaaataaaagacccttgggccctggaaaaaaagaccacaaagaaacaatacaacaaaacagacaccacacacaaaaagggggggcggcctaaagagttccc

SEQ ID NO: 18332 - DNA, 2412 bp, Homo sapiens
gccatggccgccggccccgcgccgccccccggccgcccccgggcgcagatgccgcatctgaggaaggtgcgaggcggatggagcgggtggtcgtgagcatgcaggaccccgaccagggcgtgaagatgcggagccagcgcctgctggtcaccgtcattccccacgcggtgacaggcagcgacgtcgtgcagtggttggcccagaagttctgcgtctcggaggaggaggccctgcacctgggcgccgtcctggtgcagcatggctacatctacccgctgcgcgacccccgtagcctcatgctccggccagacgagacgccctacaggttccaggtcaggctcgggggtgcagccatctacctggccaagaagaacatccgaaaacgggggaccctggtggattatgagaaggactgctatgaccggctacacaagaagatcaaccacgcatgggacctggtgctgatgcaggcgagggagcagctgagggcagccaagcagcgcagcaagggggacaggctggtcattgcgtgccaggagcagacctactggctggtgaacaggcccccgcccggggcccccgatgtgctggagcagggtccagggcggggatcctgcgctgccagccgtgtgctcatgaccaagagtgcagatttccataagcgggagatcgagtacttcaggaaagcgctgggcaggacccgagtgaagtcctccgtctgccttgaggcgtacctgagtttctgcggccagcgtggaccccacgatcccctcgtgtcggggtgcctgcccagcaatccctggatctcagacaatgacgcctactgggtcatgaatgcccccacggtggctgcccccacgaagctccgtgtggagagatggggcttcagcttccgggagctcctggaggaccccgtggggcgggcccacttcatggactttctgggaaaggagttcagtggagaaaacctcagcttctgggaggcatgtgaggagcttcgatatggagcgcaggcccaggtccccaccctggtggatgccgtgtacgagcagttcctggcccccggagctgcccactgggtcaacatcgacagccggaccatggagcagaccctggaggggctgcgccagccccaccgctatgtcctggatgacgcccagctgcacatatacatgctcatgaagaaggactcctacccaaggttcctgaagtctgacatgtacaaggccctcctggcagaggctgggatcccgctggagatgaagagacgcgtgttcccgtttacgtggaggccacggcactcgagccccagccctgcactccttcccacccctgtggagcccacagcggcttgtggccctgggggtggagatggggtggcctagtggacctggcccatctgccactctagtccctgcagctcaacgtcctgcgtgaatgcagcagccacccccgtcttggcccaggtcctgggggctgctgaacccagcaccagtgtccccttgtgcccagggggcccagtcttctgtggggtgcacagcctccctccctccagcaagccctccctgcccagaaggaatgggtccaggtgtggattcccagggagggggttcattggctcagcttgggtcagggcagagcctgttacctgaagagaggtgagaccaaggccacagggagctccaccttctctggtcttcagtccagcactgggtgcccatccccatctctaaaaccagtaaatcagccagcgaatacccggaagcaagatgcacaggcgggcggcttcccacacacccgtcacaagacgcggacatgcaggtctcggcgcgagctctgccccgtccaagagcctctccgctgtcgcccagtgtgagcctggaagaggacccaagagagtgccgtgctgaggctgcctcgaggtcactgccttccggagctgcgcctattcctccctcgccaaacgcgttccagaatttgtccacaggtgcgccggcacctgctttcccacctcgaggccgcggcctcccccccgatttatagacaactctgacattgtcaccccactgacgaggcccgattccatagggtggatccttgccaggcgtccctgatcctccctgcccaagtcttccttcgtgagctggccttgctccccatcccccaagtgcctcaccagtcccccagactgggtgaaggtacagctggctcctttcgggggtgcagcttcaactctctcggcggtagggcggtgccatccccacccatagggctggctcacatccagtcactcccaacagcgtccagcacacaaataaaagacccttgggccctggaaaaaaagaccacaaagaaacaatacaacaaaacagacaccacacacaaaaagggggggcggcctaaagagttccc

SEQ ID NO: 18333 - DNA, 488 bp, Homo sapiens
cccgtctctattaaaaatacaaaattagctgggcttggtggcgcatgcctgtagtcccagctactggagaggctgaggcaggagaatagcttgaatccaggaggcggaggttgcggtgagccgagatcgcaccactgcactccagcctgggaaacaagagtgaaactgtctcaaaaaaataataaagaaaaaaaaatgacatattacagttgcaactttgagaacctgaggttccgtggaatattccacagatcgccagaccttaggcccccagaggtctcctcgaaagatccctgattggaagaaggggctccaaggggcgggactgggggcctgggccaccatctctgccagatctatggggcaggggctcagcctggggaggtgccctcctgctggggattttggaccccagcaggggacctgcatctaactgcagcccacctatccccttctagaccaagagtgcagatttccataagcgggag

SEQ ID NO: 18334 - DNA, 424 bp, Homo sapiens
ttagtgtatctcagcacccgcttataggcagcacagctgttgggtctcagtgcccttttttaccttctgaacaagggaataatgaagagactatttcgtctgttgatgaactgaaaattcccaaagactgtgatcgttatgatgatctttgttcatatatgtcatggaagacacgaaaagatacacagtggcctgaaaacaatttagctgataaagatcaagtttcagttgcaacttcatttgacataactgatgaaaacatagctactaaaagaagtgaccattttgatgctgctcgttcatatgggcagtattggacacaggaagattcatctaagcaggcagaaacatatttaaccagtaagtaccctgattctttttcagattcatctgacacaattgataaaaataaaattcccaaggg

SEQ ID NO: 18335 - DNA, 276 bp, Homo sapiens
gtaaaattaatgaaaaatctattaaatgttactgtaaataacatgctttcaatgaaaataactgtatttccaaaacaaaaaatagtgagaacagtgacattgctttgcatgtgtgaaaaatctctttaatataaagcttgatagaagttagtagaattctcatatctgtttctgtattcaatctgttgaaatatgttgttttggttaaaatatatgaagaaaatttgccttcacagaggtatgaaactaaaggaaaaatatttctatagactttta

SEQ ID NO: 18336 - DNA, 701 bp, Homo sapiens
gccaaggacaggaaatgcactgatgggtaatgtcctccctatagtagatgaaagtctctactgccttcccttaatgcttgttccttggctctgctgacaagttgggagccagggtatgaacttggtgggtggcgacacatctgctgacctcgggtctgctgggaagaatacagggcaggacctatgtttggtgtcagaatcatctggaggtaggttggagccactccccttttttctccattctatccccattctctgaaaaccttcgctggctatagggataatcaggctgacaggaaaacttttaaattcatttatttgaattttagagaaaactagaagacagaaaaccacaactgtgggattgaagtcaacagaaaaggcctgacaagacagtattagaatgagtggcctgcctggctgggcacaatggctcacacctataatcccagcactttgggaggctgaggtgggcagattacctgagtttgggagtttgagaccagcttgaccaacatgaagaaaccccgtctctactaaaaatgcaaaaattagccaggcgtggtggtgcatacctgtaatcccagctacttggaaggctgaggcaggagaatcacttgaacccaggaggcagaggtagcagtgagccgagattatgcctttgcaccccagcctgggcaacaagagcaaaactcatctca

SEQ ID NO: 18337 - DNA, 213 bp, Homo sapiens
tttaaatatttctattctaaagttccaaaataatcagtggaatttgagattagagcaagaaagatagctctatctaattgtttttgtagcagctgaaactaaaataatttgagtgctgaaaccttagttatgctttgttagagatcatttgaaaatattccacacttaagcattcattgtttgaagaactagacagtttgtactcaggtactt

SEQ ID NO: 18338 - DNA, 578 bp, Homo sapiens
cattccttggtttaatggtttggatggatggtggtggtctttgttgacgctagatatacaggagtagaaaagccactaaaaaaacccacacacatttctgttttatgtaggcatcttgtataggacagactaacaaaaatgaaactgtttcttaaatttaattgaaatacaatcagcaattttctcattataattttacttaaccctgtacagttcagtctacaaaaataagtattggtagaatagccaggtgcagtggtgtgtgcctgtattcccaagctgctctggaggctgaggcaggtggatcacttgaacccgggagttcgagtgcagccagagcagcatagtgagacgctgtctctaaatattaaaaaaaaaaaaagtttttttgtactaaagtgaatgtctgatatctgcacaccccacagaatgtacagtggaattctaatgccttatctctgaacttactatatataacattgatataaccttttctattgtttttgacgcctattttattcagttagcattatttcccttggcatccttatagccaggcaatcccttatgatgaaatt

SEQ ID NO: 18339 - DNA, 431 bp, Homo sapiens
tcttaatttgcatcatttagatcataacccatgattagtttaaagcgatttggattataaatgctatcccatactttcaacatttgaaaatatcattcagggttggttaaaaaaatatgattgcacctccctttgggcctcacagtaaggcattcgttgccttggtaatttgactgtgtctggtgtagggtctgtcactcagctttgccaactcagaagtctgatgttgtcagcactcagagggcagatccgtctctctcgggtgaactcacattaactacattcatgaggctaataaaaccagaatgccaaattattcgcttaccattagaaatacaatcacacagatggaatgcttgtcttagcaagactcaaacattctttttcaaaatgaagagccagattacacttagaaggggcccagtgagcct

SEQ ID NO: 18340 - DNA, 395 bp, Homo sapiens
ttagagacagggtcttactctgttgcccatgctggagtgcagtgactcaatcacagctccctgcaacctttaactcctgggctcaagtgatcctcccaccacagcttcccgagtagctgggacctcaggcatgcgctactgtgcctaatttttttttttcagagacagtgtctcacagagttgcccaggctggtccgtgaacctgcccgggcagaggccttgacaggttttttgggttgtttggttccaacggtttgcctttgtgggggctcctgctgtgccggagacttctgacagctcctctttccggggtggggggcttcgggtggggcccggggggctttgctggagcttttagggggaggatctttggattcagaatgctcctgactcgt

SEQ ID NO: 18341 - DNA, 326 bp, Homo sapiens
gaaactcatttatcatggttctgaaggctgcaaagtccaagatcacggcaccagctgattctcttcctagggagagctctcttcctggcttgcaggtggcccttttcttgctgtgtcctcatgtggcccttctgtggtgtgcacacacacacagagagagaagctcttctttttcttataagaacacccctcccatcatgaaggcccagccctcatggcctcatctaaccctcatcacctcccaaaggcccagtctccaaataccagcacattggtggggtgaggaattagagctacaacatgtgaattttggagggagacaaaca

SEQ ID NO: 18342 - DNA, 495 bp, Homo sapiens
gttctttaagttttgacagccatattcagtcgtgtgtccaccatcacagttgtattagtccggtctcatactgctataaagaaattcccgagactgggtaattaataaaaaaagtggtttaattgtctcacagttcctcatggctggggaggccttaggaaatgatatggtggaaggggaagcaggcaccttcttcacaaggtggcaggagagagaggaatggaggaggagcttctgagcacttacaaaccatcagatctcatgggaactcactatcacgagaacagcatgggggaaccatccccatcattcaatcacctcccaccatgtcctctctcaacatgtggggattatggggtttacaatttgagatgaggtttgggtggggacacagaagcaaaccatatgggcaatcaagatgtgaagcattttcataaccctacatgttctctcatacctctttataatcaattcctccctgtcttcaccccctgt

SEQ ID NO: 18343 - DNA, 436 bp, Homo sapiens
attcccctaaaaatcatttactactctcctaaaatcatccctacttccccatcaccctttcccctgagaagaagggtatataaccatcagcaccccactatgtggtggattaatcactctgggattcttccctgtgtgtgttaataaatttgtatgccttttctcctattaatctgccttttgtcagttgattttcagtgaaccttcagaaggcaaagagggaggcttgcccttggcccctacgatacaagtttcctggcttggttgttgtactatatggttttataaaatgcaaccatggagaaaactcggtgacgagtacacaggatctttctcagctatctttgtaacttcctgtgactctataattattccaaaataaaaatcaatggcagttatgtaacatgaagctacatgcaggtaatggtacttttgc

SEQ ID NO: 18344 - DNA, 440 bp, Homo sapiens
cgatcctggatttgatcctggacttgtaaaggacgttaaagggacagttggcacaatttgtttaggatccatggattagatattattattgtattgatgttaatttcctgattctgattgttttgctacagatacataggaagatgtcttagtttttagaaaatattcactgaaatattaaggagtatcctatctacaacttactctcaaatgattcagaaatgtacatacagagagacagagaacaataaacaagaaagagaatgtaaaatgttataattggggaatctgggtgaaaagtgtacctgatttctctatacaattcttgtaccttctctgtaagtttaaaatcatgttaaaataaaagtttaaaaaattgttatccttaaaatgtaattactgacatacctgttaacaaattaaaacaatgtgttttaaat

SEQ ID NO: 18345 - DNA, 224 bp, Homo sapiens
ttatttcatcattactaaaacttagctgacaatttttattttttcattactaaaacttagctggatgtcagtttctgcctttaaataaaatatccaaatccaggattattctcaattgcaaaaatgcagctggtctcaactattccttttatattttctttcacatagggtagaaaatggtgaatcattgtactttcatataataaaaagatgtcttgaatttt

SEQ ID NO: 18346 - DNA, 843 bp, Homo sapiens
tgtttaggtgggggagggaatatcttaattatcattgtgctccatacgctacagatggcacctgctggccttagcaatatggggtcaagtatgaaacatgatagagtgacacccaaggaacctataaggaaaggaattttgattctttcagaaataacaggaagaaattatcttaaaatcttaaggttgatgctgcaaacaaccagagacaataaataaattgttatttagtgatgttgcagaatattgtgttaatagagcctgtgatctcttctggcaatttcttaccctaagtctgggatttttcctgctgtgcttctcttactagaaacgttaagtgtgcacagatgctcatacgtgtgcagagaaatgcctgaattaactctcacactgccaacattagatcattaaacacactattagtaaatgttctctattttgattttcatgttaagactcatctcttttgctcatagaattaattttatcaatgacatagaaaatggttattttaatacttctctgcactgcggtatcatagctgtgttttgccccaggacttctctctaatgacttgagccagcttgaattagcgtgatgtatcattaatgcatacaaatggcttttatttttgttcataatctgttcataatgccacggcattctgctctttctaatgtttttaaaatgattaagtagtgatgtactttttgacctagttaaccctccatggaatcgatgatcaaaagaataagagaatattacttaactaggatagtcagaagttgttataatctgtagctgatgttttccagttattttgaagttttttataattttttt

SEQ ID NO: 18347 - DNA, 337 bp, Homo sapiens
gtgctcatttgatcctcacagcaaccccagggattaaacagtggggacttagcacacccgttttacagatgaggaaatgttctctgagaagaacctcagagaaggagaacatcatcggtggcctggatttagagagtctgtctaccatcgcctggtcttgagtgatctcagtttggcttttgctaaattccctcaaaactgtgaacattcatcttctcccaggcttagtttgtccctgtcccctctgacctgaacctccatcctgaccaactatcttccataatgaacttaacgacagcagagacttaagcactgtcttgattttatcattgtctcg

SEQ ID NO: 18348 - DNA, 918 bp, Homo sapiens
  misc_feature (918)..(918): n is a, c, g, or t
agcggggggcatctttgtgcggggccgcgcttcgccagcgccgcagcggggaatctgcagtaggtctgccggcgatggagtggtgggctagctcgccgcttcggctctggctgctgttgttcctcctgccctcagcgcagggccgccagaaggagtcaggttcaaaatggaaagtatttattgaccaaattaacaggtctttggagaattacgaaccatgttcaagtcaaaactgcagctgctaccatggtgtcatagaagaggatctaactcctttccgaggaggcatctccaggaagatgatggcagaggtagtcagacggaagctagggacccactatcagatcactaagaacagactgtaccgggaaaatgactgcatgttcccctcaaggtgtagtggtgttgagcactttattttggaagtgatcgggcgtctccctgacatggagatggtgatcaatgtacgagattatcctcaggttcctaaatggatggagcctgccatcccagtcttctccttcagtaagacatcagagtaccatgatatcatgtatcctgcttggacattttgggaagggggacctgctgtttggccaatttatcctacaggtcttggacggtgggacctcttcagagaagatctggtaaggtcagcagcacagtggccatggaaaaagaaaaactctacagcatatttccgaggatcaaggacaagtccagaacgagatcctctcattcttctgtctcggaaaaccctaccttaaggaaagccagttgctaagtgagcccatcttgttgaatcactgcaaatacaggaatctgtttaaattcggaggggaaggctgaagttttcgtgttaaacacctccttcctgggggcctaaatgggtttccatgtctgaagatgaatggctan

SEQ ID NO: 18349 - DNA, 3524 bp, Homo sapiens
agcggggggcatctttgtgcggggccgcgcttcgccagcgccgcagcggggaatctgcagtaggtctgccggcgatggagtggtgggctagctcgccgcttcggctctggctgctgttgttcctcctgccctcagcgcagggccgccagaaggagtcaggttcaaaatggaaagtatttattgaccaaattaacaggtctttggagaattacgaaccatgttcaagtcaaaactgcagctgctaccatggtgtcatagaagaggatctaactcctttccgaggaggcatctccaggaagatgatggcagaggtagtcagacggaagctagggacccactatcagatcactaagaacagactgtaccgggaaaatgactgcatgttcccctcaaggtgtagtggtgttgagcactttattttggaagtgatcgggcgtctccctgacatggagatggtgatcaatgtacgagattatcctcaggttcctaaatggatggagcctgccatcccagtcttctccttcagtaagacatcagagtaccatgatatcatgtatcctgcttggacattttgggaagggggacctgctgtttggccaatttatcctacaggtcttggacggtgggacctcttcagagaagatctggtaaggtcagcagcacagtggccatggaaaaagaaaaactctacagcatatttccgaggatcaaggacaagtccagaacgagatcctctcattcttctgtctcggaaaaacccaaaacttgttgatgcagaatacaccaaaaaccaggcctggaaatctatgaaagataccttaggaaagccagctgctaaggatgtccatcttgtggatcactgcaaatacaagtatctgtttaattttcgaggcgtagctgcaagtttccggtttaaacacctcttcctgtgtggctcacttgttttccatgttggtgatgagtggctagaattcttctatccacagctgaagccatgggttcactatatcccagtcaaaacagatctctccaatgtccaagagctgttacaatttgtaaaagcaaatgatgatgtagctcaagagattgctgaaaggggaagccagtttattaggaaccatttgcagatggatgacatcacctgttactgggagaacctcttgagtgaatactctaaattcctgtcttataatgtaacgagaaggaaaggttatgatcaaattattcccaaaatgttgaaaactgaactatagtagtcatcataggaccatagtcctctttgtggcaacagatctcagatatcctacggtgagaagcttaccataagcttggcacctataccttgaatatctgctatcaagccaaatacctggttttccttatcatgctgcacccagagcaactcttgagaaagatttaaaatgtgtctaatacactgatatgaagcagttcaactttttggatgaataaggaccagaaatcgtgagatgtggattttgaacccaactctacctttcattttcttaagaccaatcacagcttgtgcctcagatcatccacctgtgtgagtccatcactgtgaaattgactgtgtccatgtgatgatgccctttgtcccattatttggagcagaaaattcgtcatttggaagtagtacaactcattgctggaattgtgaaattattcaaggcgtgatctctgtcactttattttaatgtaggaaaccctatggggtttatgaaaaatacttggggatcattctctgaatggtctaaggaagcggtagccatgccatgcaatgatgtaggagttctcttttgtaaaaccataaactctgttactcaggaggtttctataatgccacatagaaagaggccaattgcatgagtaattattgcaattggatttcaggttccctttttgtgccttcatgccctacttcttaatgcctctctaaagccaaaaaaaaaaaaaaaaagacaaagcctcttaataaatttaatggaactatacatagaacagcagctcttcctcaccctttgcatacctttaatatttttccttcttaaattggccacagcaggggtcattcacactctcactgtcttgcaggaatcacaagaagtcttcatatgtgaacgtgccattcagttggtagttaagagcattcaacttcaaatatatagaagatatttgttttagtgcaaatccatgatggagtgcctcccttttccttttttcactttttgaaaaagatgttttgggtagtagtttaatatctcagggtgctctttctaacatagtaaaaaatgaagaaaaatgtttagattaaaactctgtagtctgatgacttagaaccatccttgacccttaggcccaacctttccacagagaaatcacctctcttcctttgtcttttaagaactatttggtattaactagtttcagaattagtaaatgtgagattcagtcacataattatcagacattccatttgtcagaaatgtatttggctttttaaactcctttccacaaaagtttaagtctaatgaccttcttagagaagttgagcatgcctggcaagatcatttcatggaataagcagatgtttaaagttggattttttttttttttttttttgagtactagcaatgcacagggaccgtgttcttaggttcttagtctgtgaatctagcaataggcagtccagatttctgagtcgtactatggttttgccttgtcactgtgaggccctactaggtgtaagcattctctctgaattttaatttcctctcattaaaataggaacaaaatttgctatcctttagattaggagctgaagattcatttccctgggaatgtttcccatttagcttcaagtttcagctcaaacatcaccttctttctgactcctttcattcattcctccaggcagtaaggggctaccatagtactttgtttatgcctgtattatatgacatcactgtagttgcttgactgtttctcctactgttctgtaaacttattaatgggtgagaatctaattttactcatcttgatggcttcatgatccagcacagtgcctcacacaaagaactattgggtgggtggatggatggatggaggaatggagacagttggcttaaccagatcctatatacagattattactggctccaaaggatgagtagataagaccataagaattggatcaatgtaaatcctcacctgccctttgaagagccaataagggcatctttgtctttaaatacagcaaatgttattcagattttgtacttgtctatctgtttacctcagtgtagatgatatgaggatggtataactatgtaaattgtttttgaaaataatttgtttccccacaacttttgaaggttttatttgttgttgttattactagttcagtcccaaacttaccctttccttttcagagagctaatggccatgcttttcttcaaggaaagaataatttatttgaatgaagtgggatacttgcataacaaaaa

SEQ ID NO: 18350 - DNA, 3995 bp, Homo sapiens
agcggggggcatctttgtgcggggccgcgcttcgccagcgccgcagcggggaatctgcagtaggtctgccggcgatggagtggtgggctagctcgccgcttcggctctggctgctgttgttcctcctgccctcagcgcagggccgccagaaggagtcaggttcaaaatggaaagtatttattgaccaaattaacaggtctttggagaattacgaaccatgttcaagtcaaaactgcagctgctaccatggtgtcatagaagaggatctaactcctttccgaggaggcatctccaggaagatgatggcagaggtagtcagacggaagctagggacccactatcagatcactaagaacagactgtaccgggaaaatgactgcatgttcccctcaaggtgtagtggtgttgagcactttattttggaagtgatcgggcgtctccctgacatggagatggtgatcaatgtacgagattatcctcaggttcctaaatggatggagcctgccatcccagtcttctccttcagtaagacatcagagtaccatgatatcatgtatcctgcttggacattttgggaagggggacctgctgtttggccaatttatcctacaggtcttggacggtgggacctcttcagagaagatctggtaaggtcagcagcacagtggccatggaaaaagaaaaactctacagcatatttccgaggatcaaggacaagtccagaacgagatcctctcattcttctgtctcggaaaaacccaaaacttgttgatgcagaatacaccaaaaaccaggcctggaaatctatgaaagataccttaggaaagccagctgctaaggatgtccatcttgtggatcactgcaaatacaagtatctgtttaattttcgaggcgtagctgcaagtttccggtttaaacacctcttcctgtgtggctcacttgttttccatgttggtgatgagtggctagaattcttctatccacagctgaagccatgggttcactatatcccagtcaaaacagatctctccaatgtccaagagctgttacaatttgtaaaagcaaatgatgatgtagctcaagagattgctgaaaggggaagccagtttattaggaaccatttgcagatggatgacatcacctgttactgggagaacctcttgagtgaatactctaaattcctgtcttataatgtaacgagaaggaaaggttatgatcaaattattcccaaaatgttgaaaactgaactatagtagtcatcataggaccatagtcctctttgtggcaacagatctcagatatcctacggtgagaagcttaccataagcttggcacctataccttgaatatctgctatcaagccaaatacctggttttccttatcatgctgcacccagagcaactcttgagaaagatttaaaatgtgtctaatacactgatatgaagcagttcaactttttggatgaataaggaccagaaatcgtgagatgtggattttgaacccaactctacctttcattttcttaagaccaatcacagcttgtgcctcagatcatccacctgtgtgagtccatcactgtgaaattgactgtgtccatgtgatgatgccctttgtcccattatttggagcagaaaattcgtcatttggaagtagtacaactcattgctggaattgtgaaattattcaaggcgtgatctctgtcactttattttaatgtaggaaaccctatggggtttatgaaaaatacttggggatcattctctgaatggtctaaggaagcggtagccatgccatgcaatgatgtaggagttctcttttgtaaaaccataaactctgttactcaggaggtttctataatgccacatagaaagaggccaattgcatgagtaattattgcaattggatttcaggttccctttttgtgccttcatgccctacttcttaatgcctctctaaagccaaaaaaaaaaaaaaaaagacaaagcctcttaataaatttaatggaactatacatagaacagcagctcttcctcaccctttgcatacctttaatatttttccttcttaaattggccacagcaggggtcattcacactctcactgtcttgcaggaatcacaagaagtcttcatatgtgaacgtgccattcagttggtagttaagagcattcaacttcaaatatatagaagatatttgttttagtgcaaatccatgatggagtgcctcccttttccttttttcactttttgaaaaagatgttttgggtagtagtttaatatctcagggtgctctttctaacatagtaaaaaatgaagaaaaatgtttagattaaaactctgtagtctgatgacttagaaccatccttgacccttaggcccaacctttccacagagaaatcacctctcttcctttgtcttttaagaactatttggtattaactagtttcagaattagtaaatgtgagattcagtcacataattatcagacattccatttgtcagaaatgtatttggctttttaaactcctttccacaaaagtttaagtctaatgaccttcttagagaagttgagcatgcctggcaagatcatttcatggaataagcagatgtttaaagttggattttttttttttttttttttgagtactagcaatgcacagggaccgtgttcttaggttcttagtctgtgaatctagcaataggcagtccagatttctgagtcgtactatggttttgccttgtcactgtgaggccctactaggtgtaagcattctctctgaattttaatttcctctcattaaaataggaacaaaatttgctatcctttagattaggagctgaagattcatttccctgggaatgtttcccatttagcttcaagtttcagctcaaacatcaccttctttctgactcctttcattcattcctccaggcagtaaggggctaccatagtactttgtttatgcctgtattatatgacatcactgtagttgcttgactgtttctcctactgttctgtaaacttattaatgggtgagaatctaattttactcatcttgatggcttcatgatccagcacagtgcctcacacaaagaactattgggtgggtggatggatggatggaggaatggagacagttggcttaaccagatcctatatacagattattactggctccaaaggatgagtagataagaccataagaattggatcaatgtaaatcctcacctgccctttgaagagccaataagggcatctttgtctttaaatacagcaaatgttattcagattttgtacttgtctatctgtttacctcagtgtagatgatatgaggatggtataactatgtaaattgtttttgaaaataatttgtttccccacaacttttgaaggttttatttgttgttgttattactagttcagtcccaaacttaccctttccttttcagagagctaatggccatgcttttcttcaaggaaagaataatttatttgaatgaagtgggatacttgcataacaaaaaaaaaaaaaaaaaaaaaaaaaaaaaaaaaaaaaaaaaaaaaaaaaaaaaaaaaaaaaaaaaaaaaaaaaaaaaaaaaaaaaaaaaaaaaaaaaaaaaaaaaaaaaaaaaagggaaaaaaaaaaaaaaaataaaaaaaaaaaacttttgggcccttttggcccaatgttttttaaatttgggcaagtttttttttggggcccaattttgggctcatttggccatttcccccttatggggggccttttaaaattaatgggcccggttttaaaaaatgggtgctttggaaaaacccctgtggtttcccccatttaaaccctttggagaaaaacccccttttttccaaggggggataatatcaaagggccccacccaaatgcctttttcaaaaagtttgccccccctatatggggctaagtgagaatctgaacccgttatatttttttgtaaaaattccgggataaaattttgttt

SEQ ID NO: 18351 - DNA, 3438 bp, Homo sapiens
agcggggggcatctttgtgcggggccgcgcttcgccagcgccgcagcggggaatctgcagtaggtctgccggcgatggagtggtgggctagctcgccgcttcggctctggctgctgttgttcctcctgccctcagcgcagggccgccagaaggagtcaggttcaaaatggaaagtatttattgaccaaattaacaggtctttggagaattacgaaccatgttcaagtcaaaactgcagctgctaccatggtgtcatagaagaggatctaactcctttccgaggaggcatctccaggaagatgatggcagaggtagtcagacggaagctagggacccactatcagatcactaagaacagactgtaccgggaaaatgactgcatgttcccctcaaggtgtagtggtgttgagcactttattttggaagtgatcgggcgtctccctgacatggagatggtgatcaatgtacgagattatcctcaggttcctaaatggatggagcctgccatcccagtcttctccttcagtaagacatcagagtaccatgatatcatgtatcctgcttggacattttgggaagggggacctgctgtttggccaatttatcctacaggtcttggacggtgggacctcttcagagaagatctggtaaggtcagcagcacagtggccatggaaaaagaaaaactctacagcatatttccgaggatcaaggacaagtccagaacgagatcctctcattcttctgtctcggaaaaacccaaaacttgttgatgcagaatacaccaaaaaccaggcctggaaatctatgaaagataccttaggaaagccagctgctaaggatgtccatcttgtggatcactgcaaatacaagtatctgtttaattttcgaggcgtagctgcaagtttccggtttaaacacctcttcctgtgtggctcacttgttttccatgttggtgatgagtggctagaattcttctatccacagctgaagccatgggttcactatatcccagtcaaaacagatctctccaatgtccaagagctgttacaatttgtaaaagcaaatgatgatgtagctcaagagattgctgaaaggggaagccagtttattaggaaccatttgcagatggatgacatcacctgttactgggagaacctcttgagtgaatactctaaattcctgtcttataatgtaacgagaaggaaaggttatgatcaaattattcccaaaatgttgaaaactgaactatagtagtcatcataggaccatagtcctctttgtggcaacagatctcagatatcctacggtgagaagcttaccataagcttggcacctataccttgaatatctgctatcaagccaaatacctggttttccttatcatgctgcacccagagcaactcttgagaaagatttaaaatgtgtctaatacactgatatgaagcagttcaactttttggatgaataaggaccagaaatcgtgagatgtggattttgaacccaactctacctttcattttcttaagaccaatcacagcttgtgcctcagatcatccacctgtgtgagtccatcactgtgaaattgactgtgtccatgtgatgatgccctttgtcccattatttggagcagaaaattcgtcatttggaagtagtacaactcattgctggaattgtgaaattattcaaggcgtgatctctgtcactttattttaatgtaggaaaccctatggggtttatgaaaaatacttggggatcattctctgaatggtctaaggaagcggtagccatgccatgcaatgatgtaggagttctcttttgtaaaaccataaactctgttactcaggaggtttctataatgccacatagaaagaggccaattgcatgagtaattattgcaattggatttcaggttccctttttgtgccttcatgccctacttcttaatgcctctctaaagccaaaaaaaaaaaaaaaaagacaaagcctcttaataaatttaatggaactatacatagaacagcagctcttcctcaccctttgcatacctttaatatttttccttcttaaattggccacagcaggggtcattcacactctcactgtcttgcaggaatcacaagaagtcttcatatgtgaacgtgccattcagttggtagttaagagcattcaacttcaaatatatagaagatatttgttttagtgcaaatccatgatggagtgcctcccttttccttttttcactttttgaaaaagatgttttgggtagtagtttaatatctcagggtgctctttctaacatagtaaaaaatgaagaaaaatgtttagattaaaactctgtagtctgatgacttagaaccatccttgacccttaggcccaacctttccacagagaaatcacctctcttcctttgtcttttaagaactatttggtattaactagtttcagaattagtaaatgtgagattcagtcacataattatcagacattccatttgtcagaaatgtatttggctttttaaactcctttccacaaaagtttaagtctaatgaccttcttagagaagttgagcatgcctggcaagatcatttcatggaataagcagatgtttaaagttggattttttttttttttttttttgagtactagcaatgcacagggaccgtgttcttaggttcttagtctgtgaatctagcaataggcagtccagatttctgagtcgtactatggttttgccttgtcactgtgaggccctactaggtgtaagcattctctctgaattttaatttcctctcattaaaataggaacaaaatttgctatcctttagattaggagctgaagattcatttccctgggaatgtttcccatttagcttcaagtttcagctcaaacatcactgtagttgcttgactgtttctcctactgttctgtaaacttattaatgggtgagaatctaattttactcatcttgatggcttcatgatccagcacagtgcctcacacaaagaactattgggtgggtggatggatggatggaggaatggagacagttggcttaaccagatcctatatacagattattactggctccaaaggatgagtagataagaccataagaattggatcaatgtaaatcctcacctgccctttgaagagccaataagggcatctttgtctttaaatacagcaaatgttattcagattttgtacttgtctatctgtttacctcagtgtagatgatatgaggatggtataactatgtaaattgtttttgaaaataatttgtttccccacaacttttgaaggttttatttgttgttgttattactagttcagtcccaaacttaccctttccttttcagagagctaatggccatgcttttcttcaaggaaagaataatttatttgaatgaagtgggatacttgcataacaaaaa

SEQ ID NO: 18352 - DNA, 2695 bp, Homo sapiens
caggcatatagtatcaaatgtattttgttcttttttccccaggtatctgtttaattttcgaggcgtagctgcaagtttccggtttaaacacctcttcctgtgtggctcacttgttttccatgttggtgatgagtggctagaattcttctatccacagctgaagccatgggttcactatatcccagtcaaaacagatctctccaatgtccaagagctgttacaatttgtaaaagcaaatgatgatgtagctcaagagattgctgaaaggggaagccagtttattaggaaccatttgcagatggatgacatcacctgttactgggagaacctcttgagtgaatactctaaattcctgtcttataatgtaacgagaaggaaaggttatgatcaaattattcccaaaatgttgaaaactgaactatagtagtcatcataggaccatagtcctctttgtggcaacagatctcagatatcctacggtgagaagcttaccataagcttggcacctataccttgaatatctgctatcaagccaaatacctggttttccttatcatgctgcacccagagcaactcttgagaaagatttaaaatgtgtctaatacactgatatgaagcagttcaactttttggatgaataaggaccagaaatcgtgagatgtggattttgaacccaactctacctttcattttcttaagaccaatcacagcttgtgcctcagatcatccacctgtgtgagtccatcactgtgaaattgactgtgtccatgtgatgatgccctttgtcccattatttggagcagaaaattcgtcatttggaagtagtacaactcattgctggaattgtgaaattattcaaggcgtgatctctgtcactttattttaatgtaggaaaccctatggggtttatgaaaaatacttggggatcattctctgaatggtctaaggaagcggtagccatgccatgcaatgatgtaggagttctcttttgtaaaaccataaactctgttactcaggaggtttctataatgccacatagaaagaggccaattgcatgagtaattattgcaattggatttcaggttccctttttgtgccttcatgccctacttcttaatgcctctctaaagccaaaaaaaaaaaaaaaaagacaaagcctcttaataaatttaatggaactatacatagaacagcagctcttcctcaccctttgcatacctttaatatttttccttcttaaattggccacagcaggggtcattcacactctcactgtcttgcaggaatcacaagaagtcttcatatgtgaacgtgccattcagttggtagttaagagcattcaacttcaaatatatagaagatatttgttttagtgcaaatccatgatggagtgcctcccttttccttttttcactttttgaaaaagatgttttgggtagtagtttaatatctcagggtgctctttctaacatagtaaaaaatgaagaaaaatgtttagattaaaactctgtagtctgatgacttagaaccatccttgacccttaggcccaacctttccacagagaaatcacctctcttcctttgtcttttaagaactatttggtattaactagtttcagaattagtaaatgtgagattcagtcacataattatcagacattccatttgtcagaaatgtatttggctttttaaactcctttccacaaaagtttaagtctaatgaccttcttagagaagttgagcatgcctggcaagatcatttcatggaataagcagatgtttaaagttggattttttttttttttttttttgagtactagcaatgcacagggaccgtgttcttaggttcttagtctgtgaatctagcaataggcagtccagatttctgagtcgtactatggttttgccttgtcactgtgaggccctactaggtgtaagcattctctctgaattttaatttcctctcattaaaataggaacaaaatttgctatcctttagattaggagctgaagattcatttccctgggaatgtttcccatttagcttcaagtttcagctcaaacatcaccttctttctgactcctttcattcattcctccaggcagtaaggggctaccatagtactttgtttatgcctgtattatatgacatcactgtagttgcttgactgtttctcctactgttctgtaaacttattaatgggtgagaatctaattttactcatcttgatggcttcatgatccagcacagtgcctcacacaaagaactattgggtgggtggatggatggatggaggaatggagacagttggcttaaccagatcctatatacagattattactggctccaaaggatgagtagataagaccataagaattggatcaatgtaaatcctcacctgccctttgaagagccaataagggcatctttgtctttaaatacagcaaatgttattcagattttgtacttgtctatctgtttacctcagtgtagatgatatgaggatggtataactatgtaaattgtttttgaaaataatttgtttccccacaacttttgaaggttttatttgttgttgttattactagttcagtcccaaacttaccctttccttttcagagagctaatggccatgcttttcttcaaggaaagaataatttatttgaatgaagtgggatacttgcataacaaaaa

SEQ ID NO: 18353 - DNA, 2520 bp, Homo sapiens
gggtgggggagtggcaggcgagagggagtcggcaaagagcaaaaggtgtgcgaatggtgaaagccaaggtatatgggcgtcgagagtgagtgaaaaggggagacgggagtgggagccatgtcgggaagagatgcgtggggggtggagggaagacctcttaaggagatgctggagatgccgggctgatagtggaacaaagagaaaggttatgatcaaattattcccaaaatgttgaaaactgaactatagtagtcatcataggaccatagtcctctttgtggcaacagatctcagatatcctacggtgagaagcttaccataagcttggcacctataccttgaatatctgctatcaagccaaatacctggttttccttatcatgctgcacccagagcaactcttgagaaagatttaaaatgtgtctaatacactgatatgaagcagttcaactttttggatgaataaggaccagaaatcgtgagatgtggattttgaacccaactctacctttcattttcttaagaccaatcacagcttgtgcctcagatcatccacctgtgtgagtccatcactgtgaaattgactgtgtccatgtgatgatgccctttgtcccattatttggagcagaaaattcgtcatttggaagtagtacaactcattgctggaattgtgaaattattcaaggcgtgatctctgtcactttattttaatgtaggaaaccctatggggtttatgaaaaatacttggggatcattctctgaatggtctaaggaagcggtagccatgccatgcaatgatgtaggagttctcttttgtaaaaccataaactctgttactcaggaggtttctataatgccacatagaaagaggccaattgcatgagtaattattgcaattggatttcaggttccctttttgtgccttcatgccctacttcttaatgcctctctaaagccaaaaaaaaaaaaaaaaagacaaagcctcttaataaatttaatggaactatacatagaacagcagctcttcctcaccctttgcatacctttaatatttttccttcttaaattggccacagcaggggtcattcacactctcactgtcttgcaggaatcacaagaagtcttcatatgtgaacgtgccattcagttggtagttaagagcattcaacttcaaatatatagaagatatttgttttagtgcaaatccatgatggagtgcctcccttttccttttttcactttttgaaaaagatgttttgggtagtagtttaatatctcagggtgctctttctaacatagtaaaaaatgaagaaaaatgtttagattaaaactctgtagtctgatgacttagaaccatccttgacccttaggcccaacctttccacagagaaatcacctctcttcctttgtcttttaagaactatttggtattaactagtttcagaattagtaaatgtgagattcagtcacataattatcagacattccatttgtcagaaatgtatttggctttttaaactcctttccacaaaagtttaagtctaatgaccttcttagagaagttgagcatgcctggcaagatcatttcatggaataagcagatgtttaaagttggattttttttttttttttttttgagtactagcaatgcacagggaccgtgttcttaggttcttagtctgtgaatctagcaataggcagtccagatttctgagtcgtactatggttttgccttgtcactgtgaggccctactaggtgtaagcattctctctgaattttaatttcctctcattaaaataggaacaaaatttgctatcctttagattaggagctgaagattcatttccctgggaatgtttcccatttagcttcaagtttcagctcaaacatcaccttctttctgactcctttcattcattcctccaggcagtaaggggctaccatagtactttgtttatgcctgtattatatgacatcactgtagttgcttgactgtttctcctactgttctgtaaacttattaatgggtgagaatctaattttactcatcttgatggcttcatgatccagcacagtgcctcacacaaagaactattgggtgggtggatggatggatggaggaatggagacagttggcttaaccagatcctatatacagattattactggctccaaaggatgagtagataagaccataagaattggatcaatgtaaatcctcacctgccctttgaagagccaataagggcatctttgtctttaaatacagcaaatgttattcagattttgtacttgtctatctgtttacctcagtgtagatgatatgaggatggtataactatgtaaattgtttttgaaaataatttgtttccccacaacttttgaaggttttatttgttgttgttattactagttcagtcccaaacttaccctttccttttcagagagctaatggccatgcttttcttcaaggaaagaataatttatttgaatgaagtgggatacttgcataacaaaaa

SEQ ID NO: 18354 - DNA, 1800 bp, Homo sapiens
ccgaggaaaaaaaaaaaaaaaaaaaaatccaactttaaacatctgcttattctatgaaatgaccatgccatgcaatgatgtaggagttctcttttgtaaaaccataaactctgttactcaggaggtttctataatgccacatagaaagaggccaattgcatgagtaattattgcaattggatttcaggttccctttttgtgccttcatgccctacttcttaatgcctctctaaagccaaaaaaaaaaaaaaaaagacaaagcctcttaataaatttaatggaactatacatagaacagcagctcttcctcaccctttgcatacctttaatatttttccttcttaaattggccacagcaggggtcattcacactctcactgtcttgcaggaatcacaagaagtcttcatatgtgaacgtgccattcagttggtagttaagagcattcaacttcaaatatatagaagatatttgttttagtgcaaatccatgatggagtgcctcccttttccttttttcactttttgaaaaagatgttttgggtagtagtttaatatctcagggtgctctttctaacatagtaaaaaatgaagaaaaatgtttagattaaaactctgtagtctgatgacttagaaccatccttgacccttaggcccaacctttccacagagaaatcacctctcttcctttgtcttttaagaactatttggtattaactagtttcagaattagtaaatgtgagattcagtcacataattatcagacattccatttgtcagaaatgtatttggctttttaaactcctttccacaaaagtttaagtctaatgaccttcttagagaagttgagcatgcctggcaagatcatttcatggaataagcagatgtttaaagttggattttttttttttttttttttgagtactagcaatgcacagggaccgtgttcttaggttcttagtctgtgaatctagcaataggcagtccagatttctgagtcgtactatggttttgccttgtcactgtgaggccctactaggtgtaagcattctctctgaattttaatttcctctcattaaaataggaacaaaatttgctatcctttagattaggagctgaagattcatttccctgggaatgtttcccatttagcttcaagtttcagctcaaacatcaccttctttctgactcctttcattcattcctccaggcagtaaggggctaccatagtactttgtttatgcctgtattatatgacatcactgtagttgcttgactgtttctcctactgttctgtaaacttattaatgggtgagaatctaattttactcatcttgatggcttcatgatccagcacagtgcctcacacaaagaactattgggtgggtggatggatggatggaggaatggagacagttggcttaaccagatcctatatacagattattactggctccaaaggatgagtagataagaccataagaattggatcaatgtaaatcctcacctgccctttgaagagccaataagggcatctttgtctttaaatacagcaaatgttattcagattttgtacttgtctatctgtttacctcagtgtagatgatatgaggatggtataactatgtaaattgtttttgaaaataatttgtttccccacaacttttgaaggttttatttgttgttgttattactagttcagtcccaaacttaccctttccttttcagagagctaatggccatgcttttcttcaaggaaagaataatttatttgaatgaagtgggatacttgcataacaaaaa

SEQ ID NO: 18355 - DNA, 1978 bp, Homo sapiens
agcggggggcatctttgtgcggggccgcgcttcgccagcgccgcagcggggaatctgcagtaggtctgccggcgatggagtggtgggctagctcgccgcttcggctctggctgctgttgttcctcctgccctcagcgcagggccgccagaaggagtcaggttcaaaatggaaagtatttattgaccaaattaacaggtctttggagaattacgaaccatgttcaagtcaaaactgcagctgctaccatggtgtcatagaagaggatctaactcctttccgaggaggcatctccaggaagatgatggcagaggtagtcagacggaagctagggacccactatcagatcactaagaacagactgtaccgggaaaatgactgcatgttcccctcaaggtgtagtggtgttgagcactttattttggaagtgatcgggcgtctccctgacatggagatggtgatcaatgtacgagattatcctcaggttcctaaatggatggagcctgccatcccagtcttctccttcagtaagacatcagagtaccatgatatcatgtatcctgcttggacattttgggaagggggacctgctgtttggccaatttatcctacaggtcttggacggtgggacctcttcagagaagatctggtaaggtcagcagcacagtggccatggaaaaagaaaaactctacagcatatttccgaggatcaaggacaagtccagaacgagatcctctcattcttctgtctcggaaaaacccaaaacttgttgatgcagaatacaccaaaaaccaggcctggaaatctatgaaagataccttaggaaagccagctgctaaggatgtccatcttgtggatcactgcaaatacaagtatctgtttaattttcgaggcgtagctgcaagtttccggtttaaacacctcttcctgtgtggctcacttgttttccatgttggtgatgagtggctagaattcttctatccacagctgaagccatgggttcactatatcccagtcaaaacagatctctccaatgtccaagagctgttacaatttgtaaaagcaaatgatgatgtagctcaagagattgctgaaaggggaagccagtttattaggaaccatttgcagatggatgacatcacctgttactgggagaacctcttgagtgaatactctaaattcctgtcttataatgtaacgagaaggaaaggttatgatcaaattattcccaaaatgttgaaaactgaactatagtagtcatcataggaccatagtcctctttgtggcaacagatctcagatatcctacggtgagaagcttaccataagcttggcacctataccttgaatatctgctatcaagccaaatacctggttttccttatcatgctgcacccagagcaactcttgagaaagatttaaaatgtgtctaatacactgatatgaagcagttcaactttttggatgaataaggaccagaaatcgtgagatgtggattttgaacccaactctacctttcattttcttaagaccaatcacagcttgtgcctcagatcatccacctgtgtgagtccatcactgtgaaattgactgtgtccatgtgatgatgccctttgtcccattatttggagcagaaaattcgtcatttggaagtagtacaactcattgctggaattgtgaaattattcaaggcgtgatctctgtcactttattttaatgtaggaaaccctatggggtttatgaaaaatacttggggatcattctctgaatggtctaaggaagcggtagccatgccatgcaatgatgtaggagttctcttttgtaaaaccataaactctgttactcaggaggtttctataatgccacatagaaagaggccaattgcatgagtaattattgcaattggatttcaggttccctttttgtgccttcatgccctacttcttaatgcctctccagcctgaagggtcccaggttaca

SEQ ID NO: 18356 - DNA, 1491 bp, Homo sapiens
agcggggggcatctttgtgcggggccgcgcttcgccagcgccgcagcggggaatctgcagtaggtctgccggcgatggagtggtgggctagctcgccgcttcggctctggctgctgttgttcctcctgccctcagcgcagggccgccagaaggagtcaggttcaaaatggaaagtatttattgaccaaattaacaggtctttggagaattacgaaccatgttcaagtcaaaactgcagctgctaccatggtgtcatagaagaggatctaactcctttccgaggaggcatctccaggaagatgatggcagaggtagtcagacggaagctagggacccactatcagatcactaagaacagactgtaccgggaaaatgactgcatgttcccctcaaggtgtagtggtgttgagcactttattttggaagtgatcgggcgtctccctgacatggagatggtgatcaatgtacgagattatcctcaggttcctaaatggatggagcctgccatcccagtcttctccttcagtaagacatcagagtaccatgatatcatgtatcctgcttggacattttgggaagggggacctgctgtttggccaatttatcctacaggtcttggacggtgggacctcttcagagaagatctggtaaggtcagcagcacagtggccatggaaaaagaaaaactctacagcatatttccgaggatcaaggacaagtccagaacgagatcctctcattcttctgtctcggaaaaacccaaaacttgttgatgcagaatacaccaaaaaccaggcctggaaatctatgaaagtaatcaccagtcatctgactagaactacagcagtgaacattctcactcaaagaacattgccacctgggtagaatttgagattaggtttcctgtcagtggtgaggtgaatgtaaagaaagttccatgaaccagcattagcatatatgtaaattctcctttttcaaacttacattgcttttctggccatattatgactagtatattgcactactttgaaggtttaaaccaggggtcacaaactttttccaggaagggccaaatagtaaatgttgtaggttttgcaggtcgtatggtctctattgcagttgccaacagacatgggcagtttgtaaatgaatgagcctggcagtgtttttattaaaactttattacggccaggcatggtggctcatgcctgtaatcctagcactttgggaggcgaggcgggtggatcacttgaggtcaggagttcaagaccagcctggccaacatggtgaaaccccgtctctactaaaaacacaaaaattagccgggcatggtggtatgtgccggtagtcccagctactggggaggctgaggcaggagaatcgcttgaacctgggaggcagagattgcagtgagccgagatcacgccattgcactccagcctggcgacagagcaagactccgtctcaaaaataagtaaataaaaataaaaat

SEQ ID NO: 18357 - DNA, 470 bp, Homo sapiens
aaaagattgttaagttgtattgctacatgcatgtatgtggatatgattgccatagggttggttcttgaggctcaaatgaattaatttatataaaatgctgaataatgcttggcacaaggtgagcactcaaatgcagactgctattatcattaaattctgtgctttaacattttcttgttaaatcttgtctctaggggaagccagtttattaggaaccatttgcagatggatgacatcacctgttactgggagaacctcttgagtgaatactctaaattcctgtcttataatgtaacgagaaggaaaggttatgatcaaattattcccaaaatgttgaaaactgaactatagtagtcatcataggaccatagtcctctttgtggcaacagatctcagatatcctacggtgagaagcttaccataagcttggcacctataccttgaatatctgctatcaagccaaatacctg

SEQ ID NO: 18358 - DNA, 405 bp, Homo sapiens
cacctgtgtgagtccatcactgtgaaattgactgtgtccatgtgatgatgccctttgtcccattatttggagcagaaaattcgtcatttggaagtagtacaactcattgctggaattgtgaaattattcaaggcgtgatctctgtcactttattttaatgtaggaaaccctatggggtttatgaaaaatacttggggatcattctctgaatggtctaaggaagcggtagccatgccatgcaatgatgtaggagttctcttttgtaaaaccataaactctgttactcaggaggtttctataatgccacatagaaagaggccaattgcatgagtaattattgcaattggatttcaggttccctttttgtgccttcatgccctacttcttaatgcctctctaaagcca

SEQ ID NO: 18359 - DNA, 446 bp, Homo sapiens
gttttctcttgaaaaaaatagaatcagtgatgaaatatcagtaagtagtattggaatataaagtctaattttcagaatttgctgataactggcgaaatcaatatggactccatttttgcttattaaaatactaatttttaattttttcctccaaatttatcagtaatacatgcttgttgttgtgacaaacataatatgaagatgtaaaggcaaagccagttgttgaacccccactctctaccaaactacccaatcccatgaggcaaccagtgttaacagcgggttgtatttgtccactcattcccctttgtaataatgtatatacagtacaagtacgtatgcagatatgtagggtttgtgttggttatgaatttttttgcttttactgaaacagataacattttgagtcatacaaataaagaccatttttgttcacaaatgctaaa

SEQ ID NO: 18360 - DNA, 609 bp, Homo sapiens
aaaaaaagaatgtgtatatatatattacattttggggatctctactatatctctgcaggctcactaaatttcacttttgcttttatatgcaaattaacaggaagccctgaataaatgtaaaagctatttctcaacaaaactggagcctttattggggtggagatttctgtttccaccagtactcattagcatcttctgtgtgccaggcagtggggacaacactgtgtccatggcagaaatggatgagacagccgtggcctgagcccctgagtgctggtggtctagtctcaagcaaattcattctgggttcctggcacagacttagggatatgtatgtattgaagcatatgtccagaatgaccttctagtccatattacaaataaattatctaacatttgaaaaaaagagaaacagaagtggagcttctcagacaatgaatattattctggctttcaaacattttatatgtttgatatacgaaatattatataattgttgtaatatatttaaaagaaaccaaaatcttcattggctattccactgaaacaataattacataaaaatagccactagagatccaagtataagttgaactctgattttgtaaa

SEQ ID NO: 18361 - DNA, 395 bp, Homo sapiens
gcgtggggggtggaagggtctctgcatttgtgggaagcaagaagtctgaggctgtgttcatcattctgaaatctctttccaaatgctatgctccatctccatcgcagaatacctgtctgtgacccaaggattcttcttcccaggggcctctccaccaattctatctgcaatagcagtcacctcctccaagctcatctctcacctactggctttatctccctctcctctgctggtcaacagccccagaaactggtccctcagaactaaaggtttatgtcgcagttttcagtctgagacctgagcctttcacaagactgctgggagccatttaatcgagcgctcctcccgtgcccgtcacgggtgctggaagctctccctgcccatctttaattccc

SEQ ID NO: 18362 - DNA, 325 bp, Homo sapiens
aaggggtgcacactgcactagaggaaaagcttcaggaaccaggatctcagaaactctaactggggactcaaagctacagagaactgtctattttgttcactgctatctcagcttctctttgcttttttggtctcaggattttataacaaagagtgtggctgccacaaacctcatgttagaaaccacagcccaaagggcatatttccaccccaagaaatgactctggccctggttgggttgtatgatgtggaccagtctctattagaatgagaattggtcacatatttagtcctgtggccagggagatggtatctgttagccaaaa

SEQ ID NO: 18363 - DNA, 395 bp, Homo sapiens
gcaaaactgagacagcgtacctattacacatcaaactcctcgttcccagttctcctccagcgcctggcagccactattctactttctttctctatgaattacattactctggatatctcttccaatttttattatagcctgcttgacgttgtaaagaaatcaaatgtttggcccagtagccattctcctctctgcttgctccatcacgctgaaaatcaactggtagcttcagctgtagcagacggagccctgagctctcctgacttgtacatgcgcttgtaagtacacaaaatgccctgctccctagtttctgcctgcacgagttcctccatatccctgccccagggcttcctgctttactttctcctcacatcccttcctgtagactccttcgc

SEQ ID NO: 18364 - DNA, 466 bp, Homo sapiens
acccatttccaaataaggccacattctgaggctcctgctggacatatcttttgggtggcgtggtggggtggaacaccattctacccattgcagtggataaggaaagcaaagttcaaacagggaaaatgactcttccaacgtcatgcagtgagaaagtaacaagagctggcatttgaacccaggtcttctgcttaacatatgcctttaattgggtaaaaacaagactcttatggtataactgctgactgttatctggtttgtagaaaatgaaattggtagcttttaccctaggatacctcaaatatcagacaccattttctggaagtatactattgttaacgacattgaaactattagtgccaatgtgaaccccttaaatgggcatcatttatttattttctgtgtcataaatggggaaattaagacctagagggatgattctgctgagagagaaaaagaattaaaa

SEQ ID NO: 18365 - DNA, 484 bp, Homo sapiens
agatacgctcagttaaaaggaaactaagtgaatttgccttgtccccagcacacatacattaaagaatggccaaaggaagttctctaaacacaaattataaaagaaagagtcatggggacgtctggaagtaaggaagaatattataatagtaaaaatatggtaaataaaatttccttctcctcttgaggtttccaaattatgtttgatgactgaagcaaaaattttaacactgtccaatgtagttctcaatgcatgtagataaaatatttatattattaatgagagagggtaaagggatataaatgaaggcaaggtttctaaactttacttgaactggtaaaatatcgatgccagtagactttgataagttatgtatgtaatacctaaagcaactacttaaaaagctgctcagagatacatactgaaaaacactagaaatagaaatgggattctaaaaatgttcaacaaacctatatagagccag

SEQ ID NO: 18366 - DNA, 512 bp, Homo sapiens
caaaggaaggcgctttgtgttttacccatgtctgagggaggggacggcaagaggttgtgcattccagagccgcctccccccgcccccaccagctgggcctccaggtcagactggagaccctgctgccacccccgtggctgtctccatgccccagccctcctgccccccagtcccccacgagggagaccacagagataaaggagctccaggtcccctgcctcctgcccgcgccactgtcaaatctagggccagatcccaggcagaggaggctgcaagcagaacctgtggggtgaggaggagagccctggggggcctcccagcgggaggaggagggggccaggagaaggaggccacaagtctgctggaagataagaagaccccaatccctgaaagacaggcctgggggaagcaacctcagggcacaggtgggggacagaggcctagagaaagacagggacttgtcacccagggcaccaatgagcacttattaaacatctactgagagctacaaa

SEQ ID NO: 18367 - DNA, 662 bp, Homo sapiens
  misc_feature (2)..(2): n is a, c, g, or t
anttcggcacaggattttaggatcagcttgaccatttctggaaaaaaaaaggccattgaaattttatagtaattatgctgaatatatcgatcaattgccaggtgaagattttcctgcttccccattgccttctgccatgattgtaagttccccgaggcctcctcagccatgcttcccaaacagcctgtggaacgagaaaaggccatgtgatgacctggtgagaaggtggcaatctgcaagccaagaagagggctttcaccggaaacaaactcttccagatcttaattgtggatttctagcctccagaatgatattctttcagatactgtgtactgatgaaactgctgactcagctggtctgaaggaccccactggcactggctggtctgaaggaccctgctgatcacaacttgcctgaaggaccctactgacatcagctgttgtccaaaggacgccacaagaaactgactcaccaaaaaatgcatcctgatgatttcatcccccttaacccgaccaatcaacaaccccaaatctacacagcccctttccctccatgattcctacaaaactccagcccagaactcctcagggagatggatttgaaggtctcctcccttctacttgcttgatgccctattattattaaactctttgctacaaaa

SEQ ID NO: 18368 - DNA, 546 bp, Homo sapiens
  misc_feature (2)..(2): n is a, c, g, or t
anttcggcacaggattttaggatcagcttgaccatttctggaaaaaaaaaggccattgaaattttatagtaattatgctgaatatatcgatcaattgccaggtgaagattttcctgcttccccattgccttctgccatgattgtaagttccccgaggcctcctcagccatgcttcccaaacagcctgtggaacgatattctttcagatactgtgtactgatgaaactgctgactcagctggtctgaaggaccccactggcactggctggtctgaaggaccctgctgatcacaacttgcctgaaggaccctactgacatcagctgttgtccaaaggacgccacaagaaactgactcaccaaaaaatgcatcctgatgatttcatcccccttaacccgaccaatcaacaaccccaaatctacacagcccctttccctccatgattcctacaaaactccagcccagaactcctcagggagatggatttgaaggtctcctcccttctacttgcttgatgccctattattattaaactctttgctacaaaa

SEQ ID NO: 18369 - DNA, 656 bp, Homo sapiens
acttgcattagtttactttgcagtgtttgaactagttgaggagtggctcttctatatctgtaaataatgttgtatctaaccaattaactattagaaagcctggaagataaacatacacattattttgagttatcacatttatcgttttacctagttcctgttggaatatagaaagcaacagctttttgttatctctggaacagcttctatcctagtttaaatcacagatccttactctctttaaaaaaggtcaagcataggtacctaaaaatacccacaataataagaagggaaattgcattccacaagatgattgctcttaaagagtcagaaggagttattggtgcattcctgataccataaatggttaccaaacatttggtaattttgaccaagttcacagtaaggagaaaaaagggtgttggacttgcttttcttgaagattacttatggagcaaccaacctagaaggatgaatctacttgccaataacaacactggatcacagccaaggcagaggtttttgacattcccaattcatcatggtggtgttttgtatttgtaacatgtcttttctccacagatgttgaaaggcatgcttggatgacacatgctaatagtgaaacacgctgaaagtcctgccatcacagatcactt

SEQ ID NO: 18370 - DNA, 396 bp, Homo sapiens
ctctgctgtccagtctggagtccagtggcatgatcttggtgcactgcaacctcatctcatcagctcaagccatcctccctaccttagcctcccgattatctgggaccacaggtacatgccaccacagtttttgtatggctagtttttgtattttttgtagagatgagatttcgccatgttgcccaggagtttgagaccaaccagcctgggcctcatagtgagattccatctctacaaaaaatttttaaaaattagctgcgtgtagtggtttgcacctgtagtcccagctactcaggaagctaaggcaggatcatttgagccaaagttggagcctgtggtgagctatgatcgcaccactacactccaagatgggtgacagagtgagaccctatctct

SEQ ID NO: 18371 - DNA, 418 bp, Homo sapiens
cacttacagagctagtgaagcctagaaagagtccaggccttgctgcagttttcttccagtggcactcagaggggtttgtgttttcagtttctgtattattttttggcctatgcagtatttcgttcttagcattttgcaataaattggtggtctctcaatatttctatgtatctggttttaccatgtcccagttgtgtgatcttggaaaatttacttctgtgttcctctgtttcctctgctgtgaatgtggggatggagggttgtcttcaggagtgaccattctaatatttgccaagatcctagaatggtgcttagcacgttctgagtgggcagcaaacattagatgttctgatttacggttctagctgtccctgtctcttctctcttctgcttgccactgtccccacctacctgagct

SEQ ID NO: 18372 - DNA, 706 bp, Homo sapiens
acaacctcgatcgcttgcatgcgcagttcacaatacagttcacgctcctatgagaacctaatgctgccgctgagcggatgggaggtggagctcaggtggtaatgctcactcgcctgctgctcacttcctgctgtgcggcccggttcctaacaggcctgtacggggaattggggtcccctgctgtagattatctggctagatttaaatttaccgtatttactaatgaagtcagtcattgagtctaatggggctgttgggattagccccaaaaatttagtcagggaaatggatgactcgtacagacttgtatcatcctcagcatataccactgttggaattgaacggtgatacggttattgctcttttgtggaagtcttctcaggaactataaagaggagagcaaaaagaaaggcagtttagtgggaggagaatgttggaggtaaaaaagaaaacaaacaagaaatggtaaaagtaaagggtgtgtatacatcaaaatgaacttcatcttttttattatctactttatttgactttaaatttttattgctatcacttcatctattttctgattttgcctagggctagccctggtataggatgtattatatattttaaaatacaatgtgattttaaagtaataagttaatcgcttcatttaatcattctcttaggctgctaaaagtgttaaatggcaatatattaattg

SEQ ID NO: 18373 - DNA, 566 bp, Homo sapiens
ctccttctacagcccctcacctcgacttcccaccaccgggaaatggcttgtttatccagctccagaatcttacaagttcctggagctcactaacaggtcaagactcgagggcatccataaaacagtgactccttccactaccgccagcaccagccagggcccctccacctctcagctaagttcccgcttctgatttaaagttcatgtgaaaactagagatgatcctgagtcggaatctaccttccaacgtggtggccaggctgttagctcaccaggggtcagcggcctgcctgcctgctttaccacaggttgtggcaaaagcccttaagatcatgtccccgccacacaggttgggcagctttcaggtctcctgggagacagtttcatctgtaccgtggcaagcaaacttcagagctataagcagtaccgggctatggcaagtgtggtgtgctaggaagacaccgtcactcagacatgggcagcgcgtgactggggtctatggaggcctgcacatgaagagttctcagttcttgccttacagcttttctgtaagcttgaaactgctt

SEQ ID NO: 18374 - DNA, 489 bp, Homo sapiens
gaacaagaaagagagagggactttccaaacagatgaacaaaaacctgcagggaataggagatttggataagaattgacaataatttcctgagggtcttgggagttgaggggatatgctagatgagatcagattaggagattagaggccaggtaatcagggtaacctggattttcaggttcattccggagaccagtgtattccttgcttaggaggtatcaaatggaatgttgtgtttttccatacttggttacttggttctaaacaaataaagttattaaaggaccagagaattgagttatttcaagtttgtcagaaatttagtggccctaactggaggctttttcatgacaaataacaaatagatgttgttgagcccagctgtgtgtagatgtgtaggctggtttgtctgatagaggttagtttttattccttaacaagcacagccaccacagactcctcacctttctagcacttaaaaagctcaccct

SEQ ID NO: 18375 - DNA, 491 bp, Homo sapiens
aaacccaggcactcagtgacagcatccacactcataaccacgatgctaagagtttgccagacaggtgagaagcaacatttttggaagagggtcagggccataggttttgtgaagtgacagagcatgacattcagattcagtagggcttaaagaccccaagttttggaaagtagaggagatctgaaccttagccgtagcttctagaggtgggctaagagcaacctgggcacatgtagtggtgaccagaggacttgcagccatcaaatcactatggtgtgctgtttatttctcccaaagactcaggaggggagaggtttgatacttttttctcatatcagataactttaaaatgtagttttatattatagaataggatgtaaaattaccatgacatttttccttgtttcttcttccttttgatatatgatttaaattgtttctttaatgtatttatttatactaaataaaacaactcatggttatataaatta

SEQ ID NO: 18376 - DNA, 396 bp, Homo sapiens
tgtagtgacagggtctcgccatgttgcccaggctggtctcaaactcctggcctcaagtgatcctcctgtcttggcctcccaaaatggtgggattacaggtgatcctcctgtcttggcctcccaaaatggtgcgattacaggtatgaaccactgtgctcagccccaagaaagaaaatctttaaagaacatatacccaacaaaagacttgtatctaatatataaagaattattaaaactcaacagtctatttccccaacttgctcaggcaaaataggaggaaaattaaacagacatttctccaaagaagacaaaacaggtatggtatatggaacaaatgctttatatcattggtcattagtgaatgctacttaaaaccataagaggataccactaaac

SEQ ID NO: 18377 - DNA, 329 bp, Homo sapiens
cttatgcaggtttcactcagcccctctattttcaataagaggcctcatctccttcctcacctacaccagtttcctttgagcccacatcctttctcgtttagcctcttcagagagcaggccttctgttttgtacaggagatcagttgcctagctctgaggttgaggaatgagacactattctctatagattttcaatgcacctgcctgttttttcagtcccacctcagccttccaaagtgctaggattacagatgtgagccactgtgcccagccctttgcccgttttttaacggggtggttttttgtttgttgaattaattttcttatag

SEQ ID NO: 18378 - DNA, 543 bp, Homo sapiens
aacctggtgttcctgagtggtcctgaatcatataagttggtaatggaagctgtaatgaccaagtcccctaaacatactatgtctttgccacgtgtgctgtgacttctctgtgggtgatttaatttatttggatccacctctgagtgagcgcacagtgatcaggtgcttcaaagccaacagaccagctcctcttcctccggatcctcttttgatctgcccaggaaagggatgcattgacactctcctgcatgcacctggcgagaagccacctgaaagtcactgtggttaaagatattggtggaggtaccccaggagcactgttacaaatccttcttgttttggcatctcgtacaacattattaagacacagctgagagttgatgggtgtgtaatgcatatgccaaggaaatgtcactaatcccaaagcaatcaaaaaggagacctcaaaccagatgttaatttgttctttgtgtaacaatgtaaccaaaatattgatgataaaagtcataatttaagattcagaataaatgggtttgatgtctg

SEQ ID NO: 18379 - DNA, 360 bp, Homo sapiens
gccagctagtaggactttcactttgttgggagttcctatttcctttttttcctctttgcccaataaattcaatttttctcacccttcaaagtgcctgtgagcctaatctctcctggctatgtgacaaggaccccgtttttagctgaactaaggagaaagtcctacaacataactagatgaggttacggcaggcactaaatctgccccgagtgcttgactcagcctcacttgatccgctgcaacagcctcccctctggactgagatggaagtgggacagctggatgaccatgacattggacctccagtagtgctcgtgaagcgatgcatcttggaaaggaggatctgcctgcgttcctgac

SEQ ID NO: 18380 - DNA, 406 bp, Homo sapiens
  misc_feature (406)..(406): n is a, c, g, or t
gcagtttaattatcttgatttcgagcctcattctcttacattttcactaattttccatattttttctaagtctctgagaagttttgatagtgaattccatcacctttatattagctaagctctcattggctttctaactcaatttatcacatggatattgactttcaaccatgttttcttttttctttttttttttttttcttttgagatgagttttgctcttgttgcctaggctggagtgcaatggcgtgatctcggctcactgcaacctctgcctccagggttcaagcgattctccttactcagctagtggggagtctgagggaggagaatcgcttgaacctgggaggtggaggtcacagtgagccgagatcgtgccacagcgctccagcctgggtgacagagn

SEQ ID NO: 18381 - DNA, 225 bp, Homo sapiens
agaaacagaggtacatggaggttaaataactagcccaaagtcacatagctagtaagtgataaaattcgttggtttttgtctgttgaacaatgaagagaatggtttcctaaaatttgttttgtttagtcactgattcactagttcaatcttaaatgtaattcagtagttcagtcctagaaacagttttcaaagccactaaaaacagatttagatcctagtgaggta

SEQ ID NO: 18382 - DNA, 920 bp, Homo sapiens
  misc_feature (70)..(70): n is a, c, g, or t
  misc_feature (73)..(74): n is a, c, g, or t
agcggagttccaggctctcctgcttctccacggactctgcgggaagttagagcctctgcgtgcgctccgnggnncggcgagaggatgcgcaaggtggagagccgcggggaagggggcagagaggaactgggaagtaacagccctccacagagaaactggaagggaattgctattgctctgctggtgattttagttgtatgctcactcatcactatgtcagtcatcctcttaaccccagatgaactcacaaattcgtcagaaaccagattgtctttggaagacctctttaggaaagactttgtgcttcacgatccagaggctcggtggatcaatgatacagatgtggtgtataaaagcgagaatggacatgtcattaaactgaatatagaaacaaatgctaccacattattattggaaaacacaacttttgtaaccttcaaagcatcaagacattcagtttcaccagatttaaaatatgtccttctggcatatgatgtcaaacaggtaaaggagtgatcttctttgagaatacttttctttgtgatgcattggggtgacaatgcataattttactcagctataactcacctaagcaaaatctggcatgtctagtaactaccggaggacagtaatgactactttgcacaaaagatgtttgaagataatgtccaaacatcttccatatctgcacagcaaataattgggacagtttgcccagtgcctgtgctgatccaagtccatctcttggcagaggagaatgtggcagagtttagcaaatccaacaaatgcgggcttgtgaaagtttcaagataagccttaccatatacttgagtgtttcatgtgtgtacagattagagactttcctagtggctgtgcctagagcttcagatgtgtatattgggaaggcaactgctgaaaac

SEQ ID NO: 18383 - DNA, 5258 bp, Homo sapiens
agcggataatctggagagacagaggagttgagagtgcccctttaaactgcaggactgcaattgatctctgtatgttttctggttttcgtccctttgaaaggggaatgagagccaggatcattggctgtactgtggagctgtcacatctccatactgaaaaggtacactgcaagtgaatttaaaccgtttttggctttctattgcatattgccaagagctttgagactgatgaaccaagtaaatgctctatttagggctaagtgagatacagattcctccaatctgatagcgtttcagcctccggagtgaggaagcagcagaaacagaagcagcagaagcaacagcagtagcagcggcagcagcaacagcagcagcccctactgaagtccaatagaggagacttgatctctagttcattctggaactccgcctgggattgtgcactgtccagggtcctgaaacatgaaccaaactgccagcgtgtcccatcacatcaagtgtcaaccctcaaaaacaatcaaggaactgggaagtaacagccctccacagagaaactggaagggaattgctattgctctgctggtgattttagttgtatgctcactcatcactatgtcagtcatcctcttaaccccagatgaactcacaaattcgtcagaaaccagattgtctttggaagacctctttaggaaagactttgtgcttcacgatccagaggctcggtggatcaatgatacagatgtggtgtataaaagcgagaatggacatgtcattaaactgaatatagaaacaaatgctaccacattattattggaaaacacaacttttgtaaccttcaaagcatcaagacattcagtttcaccagatttaaaatatgtccttctggcatatgatgtcaaacagatttttcattattcgtatactgcttcatatgtgatttacaacatacacactagggaagtttgggagttaaatcctccagaagtagaggactccgtcttgcagtacgcggcctggggtgtccaagggcagcagctgatttatatttttgaaaataatatctactatcaacctgatataaagagcagttcattgcgactgacatcttctggaaaagaagaaataatttttaatgggattgctgactggttatatgaagaggaactcctgcattctcacatcgcccactggtggtcaccagatggagaaagacttgccttcctgatgataaatgactctttggtacccaccatggttatccctcggtttactggagcgttgtatcccaaaggaaagcagtatccgtatcctaaggcaggtcaagtgaacccaacaataaaattatatgttgtaaacctgtatggaccaactcacactttggagctcatgccacctgacagctttaaatcaagagaatactatatcactatggttaaatgggtaagcaataccaagactgtggtaagatggttaaaccgacctcagaacatctccatcctcacagtctgtgagaccactacaggtgcttgtagtaaaaaatatgagatgacatcagatacgtggctctctcagcagaatgaggagcccgtgttttctagagacggcagcaaattctttatgacagtgcctgttaagcaagggggacgtggagaatttcaccacatagctatgttcctcatccagagtaaaagtgagcaaattaccgtgcggcatctgacatcaggaaactgggaagtgataaagatcttggcatacgatgaaactactcaaaaaatttactttctgagcactgaatcttctcccagaggaaggcagctgtacagtgcttctactgaaggattattgaatcgccaatgcatttcatgtaatttcatgaaagaacaatgtacatattttgatgccagttttagtcccatgaatcaacatttcttattattctgtgaaggtccaagggtcccagtggtcagcctacatagtacggacaacccagcaaaatattttatattggaaagcaattctatgctgaaggaagctatcctgaagaagaagataggaaagccagaaattaaaatccttcatattgacgactatgaacttcctttacagttgtcccttcccaaagattttatggaccgaaaccagtatgctcttctgttaataatggatgaagaaccaggaggccagctggttacagataagttccatattgactgggattccgtactcattgacatggataatgtcattgtagcaagatttgatggcagaggaagtggattccagggtctgaaaattttgcaggagattcatcgaagattaggttcagtagaagtaaaggaccaaataacagctgtgaaatttttgctgaaactgccttacattgactccaaaagattaagcatttttggaaagggttatggtggctatattgcatcaatgatcttaaaatcagatgaaaagctttttaaatgtggatccgtggttgcacctatcacagacttgaaattgtatgcctcagctttctctgaaagataccttgggatgccatctaaggaagaaagcacttaccaggcagccagtgtgctacataatgttcatggcttgaaagaagaaaatatattaataattcatggaactgctgacacaaaagttcatttccaacactcagcagaattaatcaagcacctaataaaagctggagtgaattatactatgcaggtctacccagatgaaggtcataacgtatctgagaagagcaagtatcatctctacagcacaatcctcaaattcttcagtgattgtttgaaggaagaaatatctgtgctaccacaggaaccagaagaagatgaataatggaccgtatttatacagaactgaagggaatattgaggctcaatgaaacctgacaaagagactgtaatattgtagttgctccagaatgtcaagggcagcttacggagatgtcactggagcagcacgctcagagacagtgaactagcatttgaatacacaagtccaagtctactgtgttgctaggggtgcagaacccgtttctttgtatgagagaggtcaaagggttggtttcctgggagaaattagttttgcattaaagtaggagtagtgcatgttttcttctgttatccccctgtttgttctgtaactagttgctctcattttaatttcactggccaccatcatctttgcatataatgcacaatctatcatctgtcctacagtccctgatctttcatggctgagctgcaatctaacactttactgtacctttataataagtgcaattctttcattgtctattattatgcttaagaaaatattcagttaataaaaaacagagtattttatgtaatttctgtttttaaaaagacattattaaatgggtcaaaggacatatagaaatgtggatttcagcaccttccaaagttcagccagttatcagtagatacaatatctttaaatgaacacacgagtgtatgtctcacaatatatatacacaagtgtgcatatacagttaatgaaactatctttaaatgttattcatgctataaagagtaaacgtttgatgaattagaagagatgctcttttccaagctataatggatgctttgtttaatgagccaaatatgatgaaacattttttccaattcaaattctagctattgctttcctataaatgtttgggttgtgtttggtattgtttttagtggttaatagttttccagttgcatttaattttttgaatatgataccttgtcacatgtaaattagatacttaaatattaaattatagtttctgataaagaaattttgttaacaatgcaatgccactgagtgctattttgctcttttggtggagaaggcttttttcaaaactcttggtccttttacttctttctctcagtgcagaatcaattctcattttcatcgtaaaagcaaatagctggattatttcatttgccagtttctatttagtattccatgcctgcccaattcatctgttactgtttaatttcaattcttctggtgagaattagaaatgaaatattttttattcattggccaaaaagttcacagacagcagtgtttgctatttactttgaattgaaggcacaaaatgcatcaattcctgtgctgtgttgacttgcagtagtaagtaactgagagcataaaataaacctgactgtatgaagtcaatttaagtgatgagaacatttaactttggtgactaaagtcagaatatcttctcacttcacttaagggatcttccagaagatatctaaaagtctgtaataagcttagaagttcagataaatctaggcaggatactgcatttttgtggttttaaaaaagtccttaggacagactgaattatcataacttatggcatcaggaggaaactttaaaatatcaaggaatcactcagtcaccctcctgttttgttgaaggatcaaccccaaattctgggtatttgagtacatgtgaatcatggatttggtattcaactttttccctggatgctttggaatcgtgtcttccatgctccactgggttcaatttaaaataggagaggctttctcttctgaaagatccattttaggtctttttcaagaatagtgaacacattttttaacaaaataagttgtaattttaaaaggaaagttttgcctattttattaagatggaaatttctttttaggctaatttgaaatccaactgaagctttttaaccaatattttaaatttgaaccactagagttttttatgatgcaaatgattatgttgtctgaaaggtgtggttttattgaatgtctatttgagtatcatttaaaaagtatttgccttttactgtcatcatttctcttgttttattattattatcaatgtttatctatttttcaattaatttaatacagtttctaatgtgaaagacatttttctggaacccgttttccccttaaacactaaagagacctcaagtgaaagcatattgcttagtaggaaggtagaaaatgttaatccctgcgattctttgagttttaatgacagggtcattttcagtaaaggaaatgctcaccaacacatagtcaccaactattaaaggaatcatgtgattggattttcccctgtatacatgtacccttggtcataatcccactatttcatacatatttatgcattgctagattttcctaggactccaatagcatgctttccaagtgttattattcccttaatgttaa

SEQ ID NO: 18384 - DNA, 4859 bp, Homo sapiens
  misc_feature (70)..(70): n is a, c, g, or t
  misc_feature (73)..(74): n is a, c, g, or t
agcggagttccaggctctcctgcttctccacggactctgcgggaagttagagcctctgcgtgcgctccgnggnncggcgagaggatgcgcaaggtggagagccgcggggaagggggcagagaggaactgggaagtaacagccctccacagagaaactggaagggaattgctattgctctgctggtgattttagttgtatgctcactcatcactatgtcagtcatcctcttaaccccagatgaactcacaaattcgtcagaaaccagattgtctttggaagacctctttaggaaagactttgtgcttcacgatccagaggctcggtggatcaatgatacagatgtggtgtataaaagcgagaatggacatgtcattaaactgaatatagaaacaaatgctaccacattattattggaaaacacaacttttgtaaccttcaaagcatcaagacattcagtttcaccagatttaaaatatgtccttctggcatatgatgtcaaacagatttttcattattcgtatactgcttcatatgtgatttacaacatacacactagggaagtttgggagttaaatcctccagaagtagaggactccgtcttgcagtacgcggcctggggtgtccaagggcagcagctgatttatatttttgaaaataatatctactatcaacctgatataaagagcagttcattgcgactgacatcttctggaaaagaagaaataatttttaatgggattgctgactggttatatgaagaggaactcctgcattctcacatcgcccactggtggtcaccagatggagaaagacttgccttcctgatgataaatgactctttggtacccaccatggttatccctcggtttactggagcgttgtatcccaaaggaaagcagtatccgtatcctaaggcaggtcaagtgaacccaacaataaaattatatgttgtaaacctgtatggaccaactcacactttggagctcatgccacctgacagctttaaatcaagagaatactatatcactatggttaaatgggtaagcaataccaagactgtggtaagatggttaaaccgacctcagaacatctccatcctcacagtctgtgagaccactacaggtgcttgtagtaaaaaatatgagatgacatcagatacgtggctctctcagcagaatgaggagcccgtgttttctagagacggcagcaaattctttatgacagtgcctgttaagcaagggggacgtggagaatttcaccacatagctatgttcctcatccagagtaaaagtgagcaaattaccgtgcggcatctgacatcaggaaactgggaagtgataaagatcttggcatacgatgaaactactcaaaaaatttactttctgagcactgaatcttctcccagaggaaggcagctgtacagtgcttctactgaaggattattgaatcgccaatgcatttcatgtaatttcatgaaagaacaatgtacatattttgatgccagttttagtcccatgaatcaacatttcttattattctgtgaaggtccaagggtcccagtggtcagcctacatagtacggacaacccagcaaaatattttatattggaaagcaattctatgctgaaggaagctatcctgaagaagaagataggaaagccagaaattaaaatccttcatattgacgactatgaacttcctttacagttgtcccttcccaaagattttatggaccgaaaccagtatgctcttctgttaataatggatgaagaaccaggaggccagctggttacagataagttccatattgactgggattccgtactcattgacatggataatgtcattgtagcaagatttgatggcagaggaagtggattccagggtctgaaaattttgcaggagattcatcgaagattaggttcagtagaagtaaaggaccaaataacagctgtgaaatttttgctgaaactgccttacattgactccaaaagattaagcatttttggaaagggttatggtggctatattgcatcaatgatcttaaaatcagatgaaaagctttttaaatgtggatccgtggttgcacctatcacagacttgaaattgtatgcctcagctttctctgaaagataccttgggatgccatctaaggaagaaagcacttaccaggcagccagtgtgctacataatgttcatggcttgaaagaagaaaatatattaataattcatggaactgctgacacaaaagttcatttccaacactcagcagaattaatcaagcacctaataaaagctggagtgaattatactatgcaggtctacccagatgaaggtcataacgtatctgagaagagcaagtatcatctctacagcacaatcctcaaattcttcagtgattgtttgaaggaagaaatatctgtgctaccacaggaaccagaagaagatgaataatggaccgtatttatacagaactgaagggaatattgaggctcaatgaaacctgacaaagagactgtaatattgtagttgctccagaatgtcaagggcagcttacggagatgtcactggagcagcacgctcagagacagtgaactagcatttgaatacacaagtccaagtctactgtgttgctaggggtgcagaacccgtttctttgtatgagagaggtcaaagggttggtttcctgggagaaattagttttgcattaaagtaggagtagtgcatgttttcttctgttatccccctgtttgttctgtaactagttgctctcattttaatttcactggccaccatcatctttgcatataatgcacaatctatcatctgtcctacagtccctgatctttcatggctgagctgcaatctaacactttactgtacctttataataagtgcaattctttcattgtctattattatgcttaagaaaatattcagttaataaaaaacagagtattttatgtaatttctgtttttaaaaagacattattaaatgggtcaaaggacatatagaaatgtggatttcagcaccttccaaagttcagccagttatcagtagatacaatatctttaaatgaacacacgagtgtatgtctcacaatatatatacacaagtgtgcatatacagttaatgaaactatctttaaatgttattcatgctataaagagtaaacgtttgatgaattagaagagatgctcttttccaagctataatggatgctttgtttaatgagccaaatatgatgaaacattttttccaattcaaattctagctattgctttcctataaatgtttgggttgtgtttggtattgtttttagtggttaatagttttccagttgcatttaattttttgaatatgataccttgtcacatgtaaattagatacttaaatattaaattatagtttctgataaagaaattttgttaacaatgcaatgccactgagtgctattttgctcttttggtggagaaggcttttttcaaaactcttggtccttttacttctttctctcagtgcagaatcaattctcattttcatcgtaaaagcaaatagctggattatttcatttgccagtttctatttagtattccatgcctgcccaattcatctgttactgtttaatttcaattcttctggtgagaattagaaatgaaatattttttattcattggccaaaaagttcacagacagcagtgtttgctatttactttgaattgaaggcacaaaatgcatcaattcctgtgctgtgttgacttgcagtagtaagtaactgagagcataaaataaacctgactgtatgaagtcaatttaagtgatgagaacatttaactttggtgactaaagtcagaatatcttctcacttcacttaagggatcttccagaagatatctaaaagtctgtaataagcttagaagttcagataaatctaggcaggatactgcatttttgtggttttaaaaaagtccttaggacagactgaattatcataacttatggcatcaggaggaaactttaaaatatcaaggaatcactcagtcaccctcctgttttgttgaaggatcaaccccaaattctgggtatttgagtacatgtgaatcatggatttggtattcaactttttccctggatgctttggaatcgtgtcttccatgctccactgggttcaatttaaaataggagaggctttctcttctgaaagatccattttaggtctttttcaagaatagtgaacacattttttaacaaaataagttgtaattttaaaaggaaagttttgcctattttattaagatggaaatttctttttaggctaatttgaaatccaactgaagctttttaaccaatattttaaatttgaaccactagagttttttatgatgcaaatgattatgttgtctgaaaggtgtggttttattgaatgtctatttgagtatcatttaaaaagtatttgccttttactgtcatcatttctcttgttttattattattatcaatgtttatctatttttcaattaatttaatacagtttctaatgtgaaagacatttttctggaacccgttttccccttaaacactaaagagacctcaagtgaaagcatattgcttagtaggaaggtagaaaatgttaatccctgcgattctttgagttttaatgacagggtcattttcagtaaaggaaatgctcaccaacacatagtcaccaactattaaaggaatcatgtgattggattttcccctgtatacatgtacccttggtcataatcccactatttcatacatatttatgcattgctagattttcctaggactccaatagcatgctttccaagtgttattattcccttaatgttaa

SEQ ID NO: 18385 - DNA, 3838 bp, Homo sapiens
agcggataatctggagagacagaggagttgagagtgcccctttaaactgcaggactgcaattgatctctgtatgttttctggttttcgtccctttgaaaggggaatgagagccaggatcattggctgtactgtggagctgtcacatctccatactgaaaaggtacactgcaagtgaatttaaaccgtttttggctttctattgcatattgccaagagctttgagactgatgaaccaagtaaatgctctatttagggctaagtgagatacagattcctccaatctgatagcgtttcagcctccggagtgaggaagcagcagaaacagaagcagcagaagcaacagcagtagcagcggcagcagcaacagcagcagcccctactgaagtccaatagaggagacttgatctctagttcattctggaactccgcctgggattgtgcactgtccagggtcctgaaacatgaaccaaactgccagcgtgtcccatcacatcaagtgtcaaccctcaaaaacaatcaaggaactgggaagtaacagccctccacagagaaactggaagggaattgctattgctctgctggtgattttagttgtatgctcactcatcactatgtcagtcatcctcttaaccccagatgaactcacaaattcgtcagaaaccagattgtctttggaagacctctttaggaaagactttgtgcttcacgatccagaggctcggtggatcaatgatacagatgtggtgtataaaagcgagaatggacatgtcattaaactgaatatagaaacaaatgctaccacattattattggaaaacacaacttttgtaaccttcaaagcatcaagacattcagtttcaccagatttaaaatatgtccttctggcatatgatgtcaaacagatttttcattattcgtatactgcttcatatgtgatttacaacatacacactagggaagtttgggagttaaatcctccagaagtagaggactccgtcttgcagtacgcggcctggggtgtccaagggcagcagctgatttatatttttgaaaataatatctactatcaacctgatataaagagcagttcattgcgactgacatcttctggaaaagaagaaataatttttaatgggattgctgactggttatatgaagaggaactcctgcattctcacatcgcccactggtggtcaccagatggagaaagacttgccttcctgatgataaatgactctttggtacccaccatggttatccctcggtttactggagcgttgtatcccaaaggaaagcagtatccgtatcctaaggcaggtcaagtgaacccaacaataaaattatatgttgtaaacctgtatggaccaactcacactttggagctcatgccacctgacagctttaaatcaagagaatactatatcactatggttaaatgggtaagcaataccaagactgtggtaagatggttaaaccgacctcagaacatctccatcctcacagtctgtgagaccactacaggtgcttgtagtaaaaaatatgagatgacatcagatacgtggctctctcagcagaatgaggagcccgtgttttctagagacggcagcaaattctttatgacagtgcctgttaagcaagggggacgtggagaatttcaccacatagctatgttcctcatccagagtaaaagtgagcaaattaccgtgcggcatctgacatcaggaaactgggaagtgataaagatcttggcatacgatgaaactactcaaaaaatttactttctgagcactgaatcttctcccagaggaaggcagctgtacagtgcttctactgaaggattattgaatcgccaatgcatttcatgtaatttcatgaaagaacaatgtacatattttgatgccagttttagtcccatgaatcaacatttcttattattctgtgaaggtccaagggtcccagtggtcagcctacatagtacggacaacccagcaaaatattttatattggaaagcaattctatgctgaaggaagctatcctgaagaagaagataggaaagccagaaattaaaatccttcatattgacgactatgaacttcctttacagttgtcccttcccaaagattttatggaccgaaaccagtatgctcttctgttaataatggatgaagaaccaggaggccagctggttacagataagttccatattgactgggattccgtactcattgacatggataatgtcattgtagcaagatttgatggcagaggaagtggattccagggtctgaaaattttgcaggagattcatcgaagattaggttcagtagaagtaaaggaccaaataacagctgtgaaatttttgctgaaactgccttacattgactccaaaagattaagcatttttggaaagggttatggtggctatattgcatcaatgatcttaaaatcagatgaaaagctttttaaatgtggatccgtggttgcacctatcacagacttgaaattgtatgcctcagctttctctgaaagataccttgggatgccatctaaggaagaaagcacttaccaggcagccagtgtgctacataatgttcatggcttgaaagaagaaaatatattaataattcatggaactgctgacacaaaagttcatttccaacactcagcagaattaatcaagcacctaataaaagctggagtgaattatactatgcaggtctacccagatgaaggtcataacgtatctgagaagagcaagtatcatctctacagcacaatcctcaaattcttcagtgattgtttgaaggaagaaatatctgtgctaccacaggaaccagaagaagatgaataatggaccgtatttatacagaactgaagggaatattgaggctcaatgaaacctgacaaagagactgtaatattgtagttgctccagaatgtcaagggcagcttacggagatgtcactggagcagcacgctcagagacagtgaactagcatttgaatacacaagtccaagtctactgtgttgctaggggtgcagaacccgtttctttgtatgagagaggtcaaagggttggtttcctgggagaaattagttttgcattaaagtaggagtagtgcatgttttcttctgttatccccctgtttgttctgtaactagttgctctcattttaatttcactggccaccatcatctttgcatataatgcacaatctatcatctgtcctacagtccctgatctttcatggctgagctgcaatctaacactttactgtacctttataataagtgcaattctttcattgtctattattatgcttaagaaaatattcagttaataaaaaacagagtattttatgtaatttctgtttttaaaaagacattattaaatgggtcaaaggacatatagaaatgtggatttcagcaccttccaaagttcagccagttatcagtagatacaatatctttaaatgaacacacgagtgtatgtctcacaatatatatacacaagtgtgcatatacagttaatgaaactatctttaaatgttattcatgctataaagagtaaacgtttgatgaattagaagagatgctcttttccaagctataatggatgctttgtttaatgagccaaatatgatgaaacattttttccaattcaaattctagctattgctttcctataaatgtttgggttgtgtttggtattgtttttagtggttaatagttttccagttgcatttaattttttgaatatgataccttgtcacatgtaaattagatacttaaatattaaattatagtttctgataaagaaattttgttaacaatgc

SEQ ID NO: 18386 - DNA, 3790 bp, Homo sapiens
agcggataatctggagagacagaggagttgagagtgcccctttaaactgcaggactgcaattgatctctgtatgttttctggttttcgtccctttgaaaggggaatgagagccaggatcattggctgtactgtggagctgtcacatctccatactgaaaaggtacactgcaagtgaatttaaaccgtttttggctttctattgcatattgccaagagctttgagactgatgaaccaagtaaatgctctatttagggctaagtgagatacagattcctccaatctgatagcgtttcagcctccggagtgaggaagcagcagaaacagaagcagcagaagcaacagcagtagcagcggcagcagcaacagcagcagcccctactgaagtccaatagaggagacttgatctctagttcattctggaactccgcctgggattgtgcactgtccagggtcctgaaacatgaaccaaactgccagcgtgtcccatcacatcaagtgtcaaccctcaaaaacaatcaaggaactgggaagtaacagccctccacagagaaactggaagggaattgctattgctctgctggtgattttagttgtatgctcactcatcactatgtcagtcatcctcttaaccccagatgaactcacaaattcgtcagaaaccagattgtctttggaagacctctttaggaaagactttgtgcttcacgatccagaggctcggtggatcaatgatacagatgtggtgtataaaagcgagaatggacatgtcattaaactgaatatagaaacaaatgctaccacattattattggaaaacacaacttttgtaaccttcaaagcatcaagacattcagtttcaccagatttaaaatatgtccttctggcatatgatgtcaaacagatttttcattattcgtatactgcttcatatgtgatttacaacatacacactagggaagtttgggagttaaatcctccagaagtagaggactccgtcttgcagtacgcggcctggggtgtccaagggcagcagctgatttatatttttgaaaataatatctactatcaacctgatataaagagcagttcattgcgactgacatcttctggaaaagaagaaataatttttaatgggattgctgactggttatatgaagaggaactcctgcattctcacatcgcccactggtggtcaccagatggagaaagacttgccttcctgatgataaatgactctttggtacccaccatggttatccctcggtttactggagcgttgtatcccaaaggaaagcagtatccgtatcctaaggcaggtcaagtgaacccaacaataaaattatatgttgtaaacctgtatggaccaactcacactttggagctcatgccacctgacagctttaaatcaagagaatactatatcactatggttaaatgggtaagcaataccaagactgtggtaagatggttaaaccgacctcagaacatctccatcctcacagtctgtgagaccactacaggtgcttgtagtaaaaaatatgagatgacatcagatacgtggctctctcagcagaatgaggagcccgtgttttctagagacggcagcaaattctttatgacagtgcctgttaagcaagggggacgtggagaatttcaccacatagctatgttcctcatccagagtaaaagtgagcaaattaccgtgcggcatctgacatcaggaaactgggaagtgataaagatcttggcatacgatgaaactactcaaaaaattgcttctactgaaggattattgaatcgccaatgcatttcatgtaatttcatgaaagaacaatgtacatattttgatgccagttttagtcccatgaatcaacatttcttattattctgtgaaggtccaagggtcccagtggtcagcctacatagtacggacaacccagcaaaatattttatattggaaagcaattctatgctgaaggaagctatcctgaagaagaagataggaaagccagaaattaaaatccttcatattgacgactatgaacttcctttacagttgtcccttcccaaagattttatggaccgaaaccagtatgctcttctgttaataatggatgaagaaccaggaggccagctggttacagataagttccatattgactgggattccgtactcattgacatggataatgtcattgtagcaagatttgatggcagaggaagtggattccagggtctgaaaattttgcaggagattcatcgaagattaggttcagtagaagtaaaggaccaaataacagctgtgaaatttttgctgaaactgccttacattgactccaaaagattaagcatttttggaaagggttatggtggctatattgcatcaatgatcttaaaatcagatgaaaagctttttaaatgtggatccgtggttgcacctatcacagacttgaaattgtatgcctcagctttctctgaaagataccttgggatgccatctaaggaagaaagcacttaccaggcagccagtgtgctacataatgttcatggcttgaaagaagaaaatatattaataattcatggaactgctgacacaaaagttcatttccaacactcagcagaattaatcaagcacctaataaaagctggagtgaattatactatgcaggtctacccagatgaaggtcataacgtatctgagaagagcaagtatcatctctacagcacaatcctcaaattcttcagtgattgtttgaaggaagaaatatctgtgctaccacaggaaccagaagaagatgaataatggaccgtatttatacagaactgaagggaatattgaggctcaatgaaacctgacaaagagactgtaatattgtagttgctccagaatgtcaagggcagcttacggagatgtcactggagcagcacgctcagagacagtgaactagcatttgaatacacaagtccaagtctactgtgttgctaggggtgcagaacccgtttctttgtatgagagaggtcaaagggttggtttcctgggagaaattagttttgcattaaagtaggagtagtgcatgttttcttctgttatccccctgtttgttctgtaactagttgctctcattttaatttcactggccaccatcatctttgcatataatgcacaatctatcatctgtcctacagtccctgatctttcatggctgagctgcaatctaacactttactgtacctttataataagtgcaattctttcattgtctattattatgcttaagaaaatattcagttaataaaaaacagagtattttatgtaatttctgtttttaaaaagacattattaaatgggtcaaaggacatatagaaatgtggatttcagcaccttccaaagttcagccagttatcagtagatacaatatctttaaatgaacacacgagtgtatgtctcacaatatatatacacaagtgtgcatatacagttaatgaaactatctttaaatgttattcatgctataaagagtaaacgtttgatgaattagaagagatgctcttttccaagctataatggatgctttgtttaatgagccaaatatgatgaaacattttttccaattcaaattctagctattgctttcctataaatgtttgggttgtgtttggtattgtttttagtggttaatagttttccagttgcatttaattttttgaatatgataccttgtcacatgtaaattagatacttaaatattaaattatagtttctgataaagaaattttgttaacaatgc

SEQ ID NO: 18387 - DNA, 337 bp, Homo sapiens
gtaaaattttgtgcatgctatgttattcaagaacaactttctctgcgtcttatagttttacctgcaaatgactctccatctttaatattttgctctttctttaaaagaacttcctttacagttgtcccttcccaaagattttatggaccgaaaccagtatgctcttctgttaataatgtaagtattttatttgtttttaaaataaaggaatctaaagattttatatttttgtgtctcacatgacaacatttgattcaataaagaagagaagtcctatgtgtgtagttaatcaggacagctgtctgttgtctaaattcctctagaagtccatcactaa

SEQ ID NO: 18388 - DNA, 3696 bp, Homo sapiens
  misc_feature (2)..(3): n is a, c, g, or t
  misc_feature (6)..(6): n is a, c, g, or t
gnnttnggcgcagcggagcctggagagaaggcgctgggctgcgagggcgcgagggcgcgagggcagggggcaaccggaccccgcccgcacccatggcgcccgtcgccgtctgggccgcgctggccgtcggactggagctctgggctgcggcgcacgccttgcccgcccaggtggcatttacaccctacgccccggagcccgggagcacatgccggctcagagaatactatgaccagacagctcagatgtgctgcagcaaatgctcgccgggccaacatgcaaaagtcttctgtaccaagacctcggacaccgtgtgtgactcctgtgaggacagcacatacacccagctctggaactgggttcccgagtgcttgagctgtggctcccgctgtagctctgaccaggtggaaactcaagcctgcactcgggaacagaaccgcatctgcacctgcaggcccggctggtactgcgcgctgagcaagcaggaggggtgccggctgtgcgcgccgctgcgcaagtgccgcccgggcttcggcgtggccagaccaggaactgaaacatcagacgtggtgtgcaagccctgtgccccggggacgttctccaacacgacttcatccacggatatttgcaggccccaccagatctgtaacgtggtggccatccctgggaatgcaagcatggatgcagtctgcacgtccacgtcccccacccggagtatggccccaggggcagtacacttaccccagccagtgtccacacgatcccaacacacgcagccaactccagaacccagcactgctccaagcacctccttcctgctcccaatgggccccagccccccagctgaagggagcactggcgacttcgctcttccagttggactgattgtgggtgtgacagccttgggtctactaataataggagtggtgaactgtgtcatcatgacccaggtgaaaaagaagcccttgtgcctgcagagagaagccaaggtgcctcacttgcctgccgataaggcccggggtacacagggccccgagcagcagcacctgctgatcacagcgccgagctccagcagcagctccctggagagctcggccagtgcgttggacagaagggcgcccactcggaaccagccacaggcaccaggcgtggaggccagtggggccggggaggcccgggccagcaccgggagctcagattcttcccctggtggccatgggacccaggtcaatgtcacctgcatcgtgaacgtctgtagcagctctgaccacagctcacagtgctcctcccaagccagctccacaatgggagacacagattccagcccctcggagtccccgaaggacgagcaggtccccttctccaaggaggaatgtgcctttcggtcacagctggagacgccagagaccctgctggggagcaccgaagagaagcccctgccccttggagtgcctgatgctgggatgaagcccagttaaccaggccggtgtgggctgtgtcgtagccaaggtgggctgagccctggcaggatgaccctgcgaaggggccctggtccttccaggcccccaccactaggactctgaggctctttctgggccaagttcctctagtgccctccacagccgcagcctccctctgacctgcaggccaagagcagaggcagcgggttgtggaaagcctctgctgccatggtgtgtccctctcggaaggctggctgggcatggacgttcggggcatgctggggcaagtccctgactctctgtgacctgccccgcccagctgcacctgccagcctggcttctggagcccttgggttttttgtttgtttgtttgtttgtttgtttgtttctccccctgggctctgccccagctctggcttccagaaaaccccagcatccttttctgcagaggggctttctggagaggagggatgctgcctgagtcacccatgaagacaggacagtgcttcagcctgaggctgagactgcgggatggtcctggggctctgtgcagggaggaggtggcagccctgtagggaacggggtccttcaagttagctcaggaggcttggaaagcatcacctcaggccaggtgcagtggctcacgcctatgatcccagcactttgggaggctgaggcgggtggatcacctgaggttaggagttcgagaccagcctggccaacatggtaaaaccccatctctactaaaaatacagaaattagccgggcgtggtggcgggcacctatagtcccagctactcagaagcctgaggctgggaaatcgtttgaacccgggaagcggaggttgcagggagccgagatcacgccactgcactccagcctgggcgacagagcgagagtctgtctcaaaagaaaaaaaaaaagcaccgcctccaaatgccaacttgtccttttgtaccatggtgtgaaagtcagatgcccagagggcccaggcaggccaccatattcagtgctgtggcctgggcaagataacgcacttctaactagaaatctgccaattttttaaaaaagtaagtaccactcaggccaacaagccaacgacaaagccaaactctgccagccacatccaaccccccacctgccatttgcaccctccgccttcactccggtgtgcctgcagccccgcgcctccttccttgctgtcctaggccacaccatctcctttcagggaatttcaggaactagagatgactgagtcctcgtagccatctctctactcctacctcagcctagaccctcctcctcccccagaggggtgggttcctcttccccactccccaccttcaattcctgggccccaaacgggctgccctgccactttggtacatggccagtgtgatcccaagtgccagtcttgtgtctgcgtctgtgttgcgtgtcgtgggtgtgtgtagccaaggtcggtaagttgaatggcctgccttgaagccactgaagctgggattcctccccattagagtcagccttccccctcccagggccagggccctgcagaggggaaaccagtgtagccttgcccggattctgggaggaagcaggttgaggggctcctggaaaggctcagtctcaggagcatggggataaaggagaaggcatgaaattgtctagcagagcaggggcagggtgataaattgttgataaattccactggacttgagcttggcagctgaactattggagggtgggagagcccagccattaccatggagacaagaagggttttccaccctggaatcaagatgtcagactggctggctgcagtgacgtgcacctgtactcaggaggctgaggggaggatcactggagcccaggagtttgaggctgcagcgagctatgatcgcgccactacactccagcctgagcaacagagtgagaccctgtctcttaaagaaaaaaaaagtcagactgctgggactggccaggtttctgcccacattggacccacatgaggacatgatggagcgcacctgccccctggtggacagtcctgggagaacctcaggcttccttggcatcacagggcagagccgggaagcgatgaatttggagactctgtggggccttggttcccttgtgtgtgtgtgttgatcccaagacaatgaaagtttgcactgtatgctggacggcattcctgcttatcaataaacctgtttgttttacacgtcgaaaaaaaact

SEQ ID NO: 18389 - DNA, 3602 bp, Homo sapiens
ggcacgagggcgagcgcagcggagcctggagagaaggcgctgggctgcgagggcgcgagggcgcgagggcagggggcaaccggaccccgcccgcacccatggcgcccgtcgccgtctgggccgcgctggccgtcggactggagctctgggctgcggcgcacgccttgcccgcccaggccaacatgcaaaagtcttctgtaccaagacctcggacaccgtgtgtgactcctgtgaggacagcacatacacccagctctggaactgggttcccgagtgcttgagctgtggctcccgctgtagctctgaccaggtggaaactcaagcctgcactcgggaacagaaccgcatctgcacctgcaggcccggctggtactgcgcgctgagcaagcaggaggggtgccggctgtgcgcgccgctgcgcaagtgccgcccgggcttcggcgtggccagaccaggaactgaaacatcagacgtggtgtgcaagccctgtgccccggggacgttctccaacacgacttcatccacggatatttgcaggccccaccagatctgtaacgtggtggccatccctgggaatgcaagcatggatgcagtctgcacgtccacgtcccccacccggagtatggccccaggggcagtacacttaccccagccagtgtccacacgatcccaacacacgcagccaactccagaacccagcactgctccaagcacctccttcctgctcccaatgggccccagccccccagctgaagggagcactggcgacttcgctcttccagttggactgattgtgggtgtgacagccttgggtctactaataataggagtggtgaactgtgtcatcatgacccaggtgaaaaagaagcccttgtgcctgcagagagaagccaaggtgcctcacttgcctgccgataaggcccggggtacacagggccccgagcagcagcacctgctgatcacagcgccgagctccagcagcagctccctggagagctcggccagtgcgttggacagaagggcgcccactcggaaccagccacaggcaccaggcgtggaggccagtggggccggggaggcccgggccagcaccgggagctcagattcttcccctggtggccatgggacccaggtcaatgtcacctgcatcgtgaacgtctgtagcagctctgaccacagctcacagtgctcctcccaagccagctccacaatgggagacacagattccagcccctcggagtccccgaaggacgagcaggtccccttctccaaggaggaatgtgcctttcggtcacagctggagacgccagagaccctgctggggagcaccgaagagaagcccctgccccttggagtgcctgatgctgggatgaagcccagttaaccaggccggtgtgggctgtgtcgtagccaaggtgggctgagccctggcaggatgaccctgcgaaggggccctggtccttccaggcccccaccactaggactctgaggctctttctgggccaagttcctctagtgccctccacagccgcagcctccctctgacctgcaggccaagagcagaggcagcgggttgtggaaagcctctgctgccatggtgtgtccctctcggaaggctggctgggcatggacgttcggggcatgctggggcaagtccctgactctctgtgacctgccccgcccagctgcacctgccagcctggcttctggagcccttgggttttttgtttgtttgtttgtttgtttgtttgtttctccccctgggctctgccccagctctggcttccagaaaaccccagcatccttttctgcagaggggctttctggagaggagggatgctgcctgagtcacccatgaagacaggacagtgcttcagcctgaggctgagactgcgggatggtcctggggctctgtgcagggaggaggtggcagccctgtagggaacggggtccttcaagttagctcaggaggcttggaaagcatcacctcaggccaggtgcagtggctcacgcctatgatcccagcactttgggaggctgaggcgggtggatcacctgaggttaggagttcgagaccagcctggccaacatggtaaaaccccatctctactaaaaatacagaaattagccgggcgtggtggcgggcacctatagtcccagctactcagaagcctgaggctgggaaatcgtttgaacccgggaagcggaggttgcagggagccgagatcacgccactgcactccagcctgggcgacagagcgagagtctgtctcaaaagaaaaaaaaaaagcaccgcctccaaatgccaacttgtccttttgtaccatggtgtgaaagtcagatgcccagagggcccaggcaggccaccatattcagtgctgtggcctgggcaagataacgcacttctaactagaaatctgccaattttttaaaaaagtaagtaccactcaggccaacaagccaacgacaaagccaaactctgccagccacatccaaccccccacctgccatttgcaccctccgccttcactccggtgtgcctgcagccccgcgcctccttccttgctgtcctaggccacaccatctcctttcagggaatttcaggaactagagatgactgagtcctcgtagccatctctctactcctacctcagcctagaccctcctcctcccccagaggggtgggttcctcttccccactccccaccttcaattcctgggccccaaacgggctgccctgccactttggtacatggccagtgtgatcccaagtgccagtcttgtgtctgcgtctgtgttgcgtgtcgtgggtgtgtgtagccaaggtcggtaagttgaatggcctgccttgaagccactgaagctgggattcctccccattagagtcagccttccccctcccagggccagggccctgcagaggggaaaccagtgtagccttgcccggattctgggaggaagcaggttgaggggctcctggaaaggctcagtctcaggagcatggggataaaggagaaggcatgaaattgtctagcagagcaggggcagggtgataaattgttgataaattccactggacttgagcttggcagctgaactattggagggtgggagagcccagccattaccatggagacaagaagggttttccaccctggaatcaagatgtcagactggctggctgcagtgacgtgcacctgtactcaggaggctgaggggaggatcactggagcccaggagtttgaggctgcagcgagctatgatcgcgccactacactccagcctgagcaacagagtgagaccctgtctcttaaagaaaaaaaaagtcagactgctgggactggccaggtttctgcccacattggacccacatgaggacatgatggagcgcacctgccccctggtggacagtcctgggagaacctcaggcttccttggcatcacagggcagagccgggaagcgatgaatttggagactctgtggggccttggttcccttgtgtgtgtgtgttgatcccaagacaatgaaagtttgcactgtatgctggacggcattcctgcttatcaataaacctgtttgttttacacgtcgaaaaaaaact

SEQ ID NO: 18390 - DNA, 3779 bp, Homo sapiens
  misc_feature (2)..(3): n is a, c, g, or t
  misc_feature (6)..(6): n is a, c, g, or t
gnnttnggcgcagcggagcctggagagaaggcgctgggctgcgagggcgcgagggcgcgagggcagggggcaaccggaccccgcccgcacccatggcgcccgtcgccgtctgggccgcgctggccgtcggactggagctctgggctgcggcgcacgccttgcccgcccaggtggcatttacaccctacgccccggagcccgggagcacatgccggctcagagaatactatgaccagacagctcagatgtgctgcagcaaatgctcgccgggccaacatgcaaaagtcttctgtaccaagacctcggacaccgtgtgtgactcctgtgaggacagcacatacacccagctctggaactgggttcccgagtgcttgagctgtggctcccgctgtagctctgaccaggtggaaactcaagcctgcactcgggaacagaaccgcatctgcacctgcaggcccggctggtactgcgcgctgagcaagcaggaggggtgccggctgtgcgcgccgctgcgcaagtgccgcccgggcttcggcgtggccagaccagacctctcctagggctctagtgccaaggcccagctgtcccgcagagtgtctgagtggttgacaagttcggattgttccctgaaggaactgaaacatcagacgtggtgtgcaagccctgtgccccggggacgttctccaacacgacttcatccacggatatttgcaggccccaccagatctgtaacgtggtggccatccctgggaatgcaagcatggatgcagtctgcacgtccacgtcccccacccggagtatggccccaggggcagtacacttaccccagccagtgtccacacgatcccaacacacgcagccaactccagaacccagcactgctccaagcacctccttcctgctcccaatgggccccagccccccagctgaagggagcactggcgacttcgctcttccagttggactgattgtgggtgtgacagccttgggtctactaataataggagtggtgaactgtgtcatcatgacccaggtgaaaaagaagcccttgtgcctgcagagagaagccaaggtgcctcacttgcctgccgataaggcccggggtacacagggccccgagcagcagcacctgctgatcacagcgccgagctccagcagcagctccctggagagctcggccagtgcgttggacagaagggcgcccactcggaaccagccacaggcaccaggcgtggaggccagtggggccggggaggcccgggccagcaccgggagctcagattcttcccctggtggccatgggacccaggtcaatgtcacctgcatcgtgaacgtctgtagcagctctgaccacagctcacagtgctcctcccaagccagctccacaatgggagacacagattccagcccctcggagtccccgaaggacgagcaggtccccttctccaaggaggaatgtgcctttcggtcacagctggagacgccagagaccctgctggggagcaccgaagagaagcccctgccccttggagtgcctgatgctgggatgaagcccagttaaccaggccggtgtgggctgtgtcgtagccaaggtgggctgagccctggcaggatgaccctgcgaaggggccctggtccttccaggcccccaccactaggactctgaggctctttctgggccaagttcctctagtgccctccacagccgcagcctccctctgacctgcaggccaagagcagaggcagcgggttgtggaaagcctctgctgccatggtgtgtccctctcggaaggctggctgggcatggacgttcggggcatgctggggcaagtccctgactctctgtgacctgccccgcccagctgcacctgccagcctggcttctggagcccttgggttttttgtttgtttgtttgtttgtttgtttgtttctccccctgggctctgccccagctctggcttccagaaaaccccagcatccttttctgcagaggggctttctggagaggagggatgctgcctgagtcacccatgaagacaggacagtgcttcagcctgaggctgagactgcgggatggtcctggggctctgtgcagggaggaggtggcagccctgtagggaacggggtccttcaagttagctcaggaggcttggaaagcatcacctcaggccaggtgcagtggctcacgcctatgatcccagcactttgggaggctgaggcgggtggatcacctgaggttaggagttcgagaccagcctggccaacatggtaaaaccccatctctactaaaaatacagaaattagccgggcgtggtggcgggcacctatagtcccagctactcagaagcctgaggctgggaaatcgtttgaacccgggaagcggaggttgcagggagccgagatcacgccactgcactccagcctgggcgacagagcgagagtctgtctcaaaagaaaaaaaaaaagcaccgcctccaaatgccaacttgtccttttgtaccatggtgtgaaagtcagatgcccagagggcccaggcaggccaccatattcagtgctgtggcctgggcaagataacgcacttctaactagaaatctgccaattttttaaaaaagtaagtaccactcaggccaacaagccaacgacaaagccaaactctgccagccacatccaaccccccacctgccatttgcaccctccgccttcactccggtgtgcctgcagccccgcgcctccttccttgctgtcctaggccacaccatctcctttcagggaatttcaggaactagagatgactgagtcctcgtagccatctctctactcctacctcagcctagaccctcctcctcccccagaggggtgggttcctcttccccactccccaccttcaattcctgggccccaaacgggctgccctgccactttggtacatggccagtgtgatcccaagtgccagtcttgtgtctgcgtctgtgttgcgtgtcgtgggtgtgtgtagccaaggtcggtaagttgaatggcctgccttgaagccactgaagctgggattcctccccattagagtcagccttccccctcccagggccagggccctgcagaggggaaaccagtgtagccttgcccggattctgggaggaagcaggttgaggggctcctggaaaggctcagtctcaggagcatggggataaaggagaaggcatgaaattgtctagcagagcaggggcagggtgataaattgttgataaattccactggacttgagcttggcagctgaactattggagggtgggagagcccagccattaccatggagacaagaagggttttccaccctggaatcaagatgtcagactggctggctgcagtgacgtgcacctgtactcaggaggctgaggggaggatcactggagcccaggagtttgaggctgcagcgagctatgatcgcgccactacactccagcctgagcaacagagtgagaccctgtctcttaaagaaaaaaaaagtcagactgctgggactggccaggtttctgcccacattggacccacatgaggacatgatggagcgcacctgccccctggtggacagtcctgggagaacctcaggcttccttggcatcacagggcagagccgggaagcgatgaatttggagactctgtggggccttggttcccttgtgtgtgtgtgttgatcccaagacaatgaaagtttgcactgtatgctggacggcattcctgcttatcaataaacctgtttgttttacacgtcgaaaaaaaact

SEQ ID NO: 18391 - DNA, 3325 bp, Homo sapiens
ggcacgagggcgagcgcagcggagcctggagagaaggcgctgggctgcgagggcgcgagggcgcgagggcagggggcaaccggaccccgcccgcacccatggcgcccgtcgccgtctgggccgcgctggccgtcggactggagctctgggctgcggcgcacgccttgcccgcccaggccaacatgcaaaagtcttctgtaccaagacctcggacaccgtgtgtgactcctgtgaggacagcacatacacccagctctggaactgggttcccgagtgcttgagctgtggctcccgctgtagctctgaccaggtggaaactcaagcctgcactcgggaacagaaccgcatctgcacctgcaggcccggctggtactgcgcgctgagcaagcaggaggggtgccggctgtgcgcgccgctgcgcaagtgccgcccgggcttcggcgtggccagaccaggaactgaaacatcagacgtggtgtgcaagccctgtgccccggggacgttctccaacacgacttcatccacggatatttgcaggccccaccagatctgtaacgtggtggccatccctgggaatgcaagcatggatgcagtctgcacgtccacgtcccccacccggagtatggccccaggggcagtacacttaccccagccagtgtccacacgatcccaacacacgcagccaactccagaacccagcactgctccaagcacctccttcctgctcccaatgggccccagccccccagctgaagggagcactggcgacttcgctcttccagttggactgattgtgggtgtgacagccttgggtctactaataataggagtggtgaactgtgtcatcatgacccaggtgaaaaagaagcccttgtgcctgcagagagaagccaaggtgcctcacttgcctgccgataaggcccggggtacacagggccccgagcagcagcacctgctgatcacagcgccgagctccagcagcagctccctggagagctcggccagtgcgttggacagaagggcgcccactcggaaccagccacaggcaccaggcgtggaggccagtggggccggggaggcccgggccagcaccgggagctcagattcttcccctggtggccatgggacccaggtcaatgtcacctgcatcgtgaacgtctgtagcagctctgaccacagctcacagtgctcctcccaagccagctccacaatgggagacacagattccagcccctcggagtccccgaaggacgagcaggtccccttctccaaggaggaatgtgcctttcggtcacagctggagacgccagagaccctgctggggagcaccgaagagaagcccctgccccttggagtgcctgatgctgggatgaagcccagttaaccaggccggtgtgggctgtgtcgtagccaaggtgggctgagccctggcaggatgaccctgcgaaggggccctggtccttccaggcccccaccactaggactctgaggctctttctgggccaagttcctctagtgccctccacagccgcagcctccctctgacctgcaggccaagagcagaggcagcgggttgtggaaagcctctgctgccatggtgtgtccctctcggaaggctggctgggcatggacgttcggggcatgctggggcaagtccctgactctctgtgacctgccccgcccagctgcacctgccagcctggcttctggagcccttgggttttttgtttgtttgtttgtttgtttgtttgtttctccccctgggctctgccccagctctggcttccagaaaaccccagcatccttttctgcagaggggctttctggagaggagggatgctgcctgagtcacccatgaagacaggacagtgcttcagcctgaggctgagactgcgggatggtcctggggctctgtgcagggaggaggtggcagccctgtagggaacggggtccttcaagttagctcaggaggcttggaaagcatcacctcaggccaggtgcagtggctcacgcctatgatcccagcactttgggaggctgaggcgggtggatcacctgaggttaggagttcgagaccagcctggccaacatggtaaaaccccatctctactaaaaatacagaaattagccgggcgtggtggcgggcacctatagtcccagctactcagaagcctgaggctgggaaatcgtttgaacccgggaagcggaggttgcagggagccgagatcacgccactgcactccagcctgggcgacagagcgagagtctgtctcaaaagaaaaaaaaaaagcaccgcctccaaatgccaacttgtccttttgtaccatggtgtgaaagtcagatgcccagagggcccaggcaggccaccatattcagtgctgtggcctgggcaagataacgcacttctaactagaaatctgccaattttttaaaaaagtaagtaccactcaggccaacaagccaacgacaaagccaaactctgccagccacatccaaccccccacctgccatttgcaccctccgccttcactccggtgtgcctgcagccccgcgcctccttccttgctgtcctaggccacaccatctcctttcagggaatttcaggaactagagatgactgagtcctcgtagccatctctctactcctacctcagcctagaccctcctcctcccccagaggggtgggttcctcttccccactccccaccttcaattcctgggccccaaacgggctgccctgccactttggtacatggccagtgtgatcccaagtgccagtcttgtgtctgcgtctgtgttgcgtgtcgtgggtgtgtgtagccaaggtcggtaagttgaatggcctgccttgaagccactgaagctgggattcctccccattagagtcagccttccccctcccagggccagggccctgcagaggggaaaccagtgtagccttgcccggattctgggaggaagcaggttgaggggctcctggaaaggctcagtctcaggagcatggggataaaggagaaggcatgaaattgtctcttaaagaaaaaaaaagtcagactgctgggactggccaggtttctgcccacattggacccacatgaggacatgatggagcgcacctgccccctggtggacagtcctgggagaacctcaggcttccttggcatcacagggcagagccgggaagcgatgaatttggagactctgtggggccttggttcccttgtgtgtgtgtgttgatcccaagacaatgaaagtttgcactgtatgctggacggcattcctgcttatcaataaacctgtttgttttacacgtcgaaaaaaaact

SEQ ID NO: 18392 - DNA, 630 bp, Homo sapiens
gtcacctccaggggcttccattctggggtagaactgcatcaggccagaggtctcaaactagtggcccttaggctgaatgaggcacacagacatgattgctttgtaattggatttgagaatctccggcctagactcgcccctcatttgcaatgacccgaagcaccttgggtccctggcttgcctggctggcccctggtacatttgagtttgttttctgtagctgtctgagcttctcttttctttctaggactgattgtgggtgtgacagccttgggtctactaataataggagtggtgaactgtgtcatcatgacccaggtgaaaagtaagagtccatccttccttccttcatccacttgttcaggaagcttttgtggggtgcctcctgtgagtccagcactgggcacagccttaggggtcagacagagctggatatgggggtccttgttctgtaggagcttaaggcctggggtgaaggtacctctgctaacttaattactaaaaggcaagaggtgatcagggttttctaaagggtaggaggagttcaggattcctatccaggaagcctgggggattcgggcttcctgcagcaggtggtctctgagctgggtaagatcttgatgggtggag

SEQ ID NO: 18393 - DNA, 120 bp, Homo sapiens
gtaccaccaggggaagaaaataagagcagttaacttttaggtattctctcaggatgactcactatcattaatttcccttgataggggaaattgaattagcttcatggggattagatggct

SEQ ID NO: 18394 - DNA, 645 bp, Homo sapiens
tacttagcaacttggccacattgacattgacaaggacctggaggccccgctgtacctcacccccgagggctggtccctcttcctccagcgctactaccaagtggtccacgaaggggcagaactcaggcacctcgacactcaggtccagcgctgtgaggacatcctgcagcagctgcaggccgtggtaccccagatagacatggaaggggatcgcaacatctggatcgtgaagccaggagccaagtcccgtggacgaggcatcatgtgcatggaccacctggaggagatgctgaagctggtgaacggcaaccccgtggtgatgaaggacggcaagtgggtggtgcagaagtatattgagcggcccctcctcatctttggcaccaagtttgacctcagacagtggttcctggtaactgactggaacccacttaccgtgtggttctaccgcgacagctatatccgcttttccacgcagcccttctccctgaagaacctggacaacttccaagttgtttgaatctggtcatgtgaaaacctatttaagccttggtttccacatctgaagaatggaggtagtctgaagaaaaatataaaaaacagtgaagtgggtactgttactacccccattttgcagatgtgaagagc

SEQ ID NO: 18395 - DNA, 702 bp, Homo sapiens
tacttagcaacttggccacattgacattgacaaggacctggaggccccgctgtacctcacccccgagggctggtccctcttcctccagcgctactaccaagtggtccacgaaggggcagaactcaggcacctcgacactcaggtccagcgctgtgaggacatcctgcagcagctgcaggccgtggtaccccagatagacatggaaggggatcgcaacatctggatcgtgaagccaggagccaagtcccgtggacgaggcatcatgtgcatggaccacctggaggagatgctgaagctggtgaacggcaaccccgtggtgatgaaggacggcaagtgggtggtgcagaagtatattgagcggcccctcctcatctttggcaccaagtttgacctcagacagtggttcctggtaactgactggaacccacttaccgtgtggttctaccgcgacagctatatccgcttttccacgcagcccttctccctgaagaacctggacaagtgagcccctctgctcgcctcccacgagctccctgcctagttggggagctggcaagcaaacaggcgattacagtgcaggggactcgcgcagcagcgctaggctccacacacagactgcaggcaggcaggccctcatcctgccagctgtccttgcatccaacagatttttttttaacagacagggggcggtctcactctgtt

SEQ ID NO: 18396 - DNA, 714 bp, Homo sapiens
ggagggcgtgaccaaggctgcctggatgacggcgggggatggtggaatatatctccccctgccctctccacctgcatgtcccaggtccagccctgcccaagttctatcatttccccacagcgaaggggcagaactcaggcacctcgacactcaggtccagcgctgtgaggacatcctgcagcagctgcaggccgtggtaccccagatagacatggaaggggatcgcaacatctggatcgtgaagccaggagccaagtcccgtggacgaggcatcatgtgcatggaccacctggaggagatgctgaagctggtgaacggcaaccccgtggtgatgaaggacggcaagtgggtggtgcagaagtatattgagcggcccctcctcatctttggcaccaagtttgacctcagacagtggttcctggtaactgactggaacccacttaccgtgtggttctaccgcgacagctatatccgcttttccacgcagcccttctccctgaagaacctggacaagtgagcccctctgctcgcctcccacgagctccctgcctagttggggagctggcaagcaaacaggcgattacagtgcaggggactcgcgcagcagcgctaggctccacacacagactgcaggcaggcaggccctcatcctgccagctgtccttgcatccaacagatttttttttaacagacagggggcggtctcactctgtt

SEQ ID NO: 18397 - DNA, 526 bp, Homo sapiens
ttggctgcgtgcctttctccaggtttccctgtcctgcatgcagggacaagtcattctcctcctgtggctgtcactagccatctgtgtcccatgcctgggacatcctggaccaggcccctcctgccttctgacctttgccagatggcaggagactgccatctcctatcatgtgacctactggacaaagtgcggataagttgaaccatatgaaattgtctaagcggggaaactccaggtcaatgtgtctcctttttctgaaaaaaaaaaaaaaaaaaaaaaaaaaaggtttttctttaagtttctcctccccctgaaacaaggtcataaagaacagagatgcaatctcatcttccctgtctccttccaaccccttctcccatcctctggaccagacggccttgtgcaggcaggctagagggagaataatgaaaccttgagtggggagttatactcccaataacagtggtcgaggtaattaggcctgaatttcccacagaaaataagctggcaaacatgttgaaaaaaa

SEQ ID NO: 18398 - DNA, 242 bp, Homo sapiens
cctctgctaccaccattgcccaaatcaccttggctacctagaaggccttgaacatggtacttgcctggtatatacattgccattacaagtggcatttgagaaagccaccttactaaggctgtttataaccaaagaaatcaaacagagtctatgccactgaacacacctagaagcaaagccaaatgaccctattcaacatacattatagacacattttcagggaaaaataaaagttctacccc

SEQ ID NO: 18399 - DNA, 445 bp, Homo sapiens
attttggtttaagccagaggaatcagactgcccaccaatccacactattagagagtttttaagtgtccatttagtggccagcctttaggctgggcaacttcacacaaaaatgaagttatggggccaggcacggtggctcacacctgtaatctcagcactttgggagaccaacatggaatgatcacttgagcctaggagtcttgaaatgggtctgggcaaggtgatgagaccccatcactacaaaaaaaatttttttaactagccaggcatcatgatgtgcacctatagtcccgggtacttgggaggctgaggcaggaggatcccttgaacccaggaattcaaggcagcagtgagctatgatcgagccactgtactctagcctgggtgacaaagcaagacctcatctctaaataaataaataaataaataaataatgtttttaatg

SEQ ID NO: 18400 - DNA, 284 bp, Homo sapiens
gccatggcttcatcagctactttagccctgttgttggaaagaaaatggtccaagtggtccagtcttcagtcccatctagagatcagctggctctggggtgaagactgcctgactccctcataagtaggtgtgtgaccttgggcttgttgctgaactttcccgtgcctcagtttcttcctctgtaaaatgggaataataatacctagcccacaggatcaaaaaagttaagatatgtaagccttatattaacagcataatacatggtttttgttgttgttgttgtt

SEQ ID NO: 18401 - DNA, 440 bp, Homo sapiens
tttatttaatcctcacattgactccctaaggtagctgtattgtccttatttcacgtatgggaaaattgagattcagagaagttaagtttcccagggacaccgcagatcacgaacagagctgggattcagtccaacttcagagctaatgcactttggaggaagagatacaatctttgccctgggggtcagtatctgatctgatgagaatgtaagagctggggccaaaacaagacaagaacaagagatgagaaatgataatagctaacacttcctggatgcattgctaggtcccaagctttgctctgcactcttacactgaatcttcagacgctagaataaaagctccatgagggcagagactttgttcctctggttctctactctgtatctgccttgagatagatactcaataaatctttgatgaataaagcagctgtgct

SEQ ID NO: 18402 - DNA, 428 bp, Homo sapiens
ggtcagccatttgaaaaaggcctaaaccttcttacacaagtcaattgaaaaggcctgtagaaatcagagctcgaagacacctgttaaatcatctgatctatccctctaccagcggtactcggttgttcatagccctctctaagctgttttcactctccttcctgtgttccagacattcattattttcccagagactggacttgtgttcacccttttaatcatttaagaagggaatgtgacttttcttaactcaaaaaatttcatttattttatatttagactttaattttggaaactgttgataatggcagagattagtaagcatgtggactgttttcctctagattcacaaaaggatttagttgatgaatgtctaacaatagtaattatatgatcagaaagtgacgggaatacaagtcaaatttcat

SEQ ID NO: 18403 - DNA, 104 bp, Homo sapiens
cacaataattctatttatcaggatataaaatctatgtacacaaatcagtagcagtgctatacaccaacatctaccacgctgagaatcaaatcaaacccttttat

SEQ ID NO: 18404 - DNA, 400 bp, Homo sapiens
tttcaatgtggctttgtctagtatagtggatggcctattttccaggacttccaaactttccatttgttattatcccatgtagagggtacaacattttcattataaactgtggctaaaaatattggaaaatacaatctgtgttgctagataatcaaatacaatcctgaaatattttgaagagtttgaaaatttcagagctttatttatataatattttatgtgtatatttctctcaaactatatctaacatttgtatataaatgagaataactctttgtgaaagcaacaagttttacaaagatttttacttttaaattatgcccaaacaagtaatataaataaaagtcattttgaaagtgtttaaacttaataaaagaccttaaatgggaaaaaatagtaa

SEQ ID NO: 18405 - DNA, 355 bp, Homo sapiens
gttaaaataaataacacttgttatgaaaaataactataacacaaatagtgaagagtgacattacatttttcaaatttctgtaatgtctagcttagaagacaaaagagttctcatatctatttgacttgagatattcatgctgctgaaatattttgttttagttgaagttgatgactaaaatccagttgcatatagtatttgagggaagggagtattttaatacatttttatggtaattatagatatgctactttgatactaccctcgaactcaacaattggtagcttcttaaaagttttgcaatgtagattctgaaaccatttcaataaatttgttaactgtacattaaaattaa

SEQ ID NO: 18406 - DNA, 541 bp, Homo sapiens
gaatggcaaaagttaggcagtatttataaggtacctgttttatgttactgatatctgtttccttctcttcttataccctggcatggtggcctgtagggtagtttcttcttaatagtcaagaacagagaaagctgaggagagcagaaaatatcttgcactttaaaatgcttattttgattccatattatctgaatttccagagaggatgtaaacaagagtgaccatatttttggagtccttcttgaagccagaacaacacacagtgggttgctaagagccgacaatcataattgacatttagtgtaccagattattctaagaatttctgaaattaccatgtacatgagtaatgaaacaactgggaataatgtgatgatgtgaacacaattttaaagtctgcttgtctgggatttgcaggtacccttccgccaccccccaacatggtagggtaaggagagcaaaaggggaactggggaaaattcagctacaaataaaatgggtgactaatccccagttcttggacccattatatttgtagcca

SEQ ID NO: 18407 - DNA, 1722 bp, Homo sapiens
cttccattttgcagctgcactgtaccatgcacctggtttctatatagtaacagtgtgcaattctaattatggactgtgccctggtttttagttttcaaatcaatttctaattctggtgatgtgtgatgtaaagaggtgctatgatggtcatgcaattaatactaaatattgaatcaatgcccagagctttattggattcactttgtgtgtgttagtgctctaaagtagcagtattattattaaactgtccccagagtaaccctgtaggcctaaagtactcagttttaagacaaacactacttcccatgcggggtactttccttatggtaaatgtaaacatgtagactgcattcgaggtgacctaaagtagagaggtcatgaactttgagaatgggcttcctttttggttcagtattagtgagagggagagggagatggatggtggggtaggttttctagtctatcattttacatttttcatggagtccctgcttagtgcagtttccattggaatgggtggaagatgataaagctctcttttttatctactaataatgtgattgcaacttaaaatagcaaaacccaactctccctgtccctccaatccctctcctaaaaagttcagtttggaatctcattctggaaaagatggaatcgcatggagattctctagctgttaggtagacctaaataaaaagttctcaatagattcctcttttgagtaaatataagacctcttgtagctacaatgttttagagcatgtttcatcttcatttttaatatcctgaactgaatgatagtgtttttttagatgaagaactgatgtcagcctgccaggtactgtaatttattctatcatattattatattatatatcaagtaggacagtgaaaaatgtttccttgcaaacttgtagtccagtatcagttacttcctatttttatccttaaaagaccattgcaaatcagtgtaagggtttttccagtaattactcacagcactttgttaaagtttgcaatttcttcagccatttaataatatctttctgtgaagaaactttgctgagttaaccataaatgttcattcattgactgggtgggatgtgaatggaatgttagaaatgttgtgtgaattgaagttctgtattcattatagatgtagcccttatttaaaaaagtgaattccatactaaaactaggaatgaaagtgagagatttctaaacttttgcgaaagtgggtcattttttgtttgactataatagcaggaagaattatagcaatctgtcattttacctgaaacagacaagcctatgtattatgaatactttcaagcttccctttggaatatacaagacatgcgtttggagttacctttgtttttctatcgtaaatttagattctggaattggggtttggtggtgcaatgtgttgctcacaagtggccagaactcctattcctaaaaggattttgagatggaggaacacatatttaattcccctttatgccttggttcttgctcctctttccacgttggataacaattttttggttgttttgtttaagttggtgctctgaagcttaatctcagtaccctttactctgaattgtcaaattttgataaaacgtgccattttctttggtaagagaaagcaggtcttaatgtctgccagaacacaatttatatgccttattggcttcattaaacttttagaaaacttta

SEQ ID NO: 18408 - DNA, 2364 bp, Homo sapiens
cttccattttgcagctgcactgtaccatgcacctggtttctatatagtaacagtgtgcaattctaattatggactgtgccctggtttttagttttcaaatcaatttctaattctggtgatgtgtgatgtaaagaggtgctatgatggtcatgcaattaatactaaatattgaatcaatgcccagagctttattggattcactttgtgtgtgttagtgctctaaagtagcagtattattattaaactgtccccagagtaaccctgtaggcctaaagtactcagttttaagacaaacactacttcccatgcggggtactttccttatggtaaatgtaaacatgtagactgcattcgaggtgacctaaagtagagaggtcatgaactttgagaatgggcttcctttttggttcagtattagtgagagggagagggagatggatggtggggtaggttttctagtctatcattttacatttttcatggagtccctgcttagtgcagtttccattggaatgggtggaagatgataaagctctcttttttatctactaataatgtgattgcaacttaaaatagcaaaacccaactctccctgtccctccaatccctctcctaaaaagttcagtttggaatctcattctggaaaagatggaatcgcatggagattctctagctgttaggtagacctaaataaaaagttctcaatagattcctcttttgagtaaatataagacctcttgtagctacaatgttttagagcatgtttcatcttcatttttaatatcctgaactgaatgatagtgtttttttagatgaagaactgatgtcagcctgccaggtactgtaatttattctatcatattattatattatatatcaagtaggacagtgaaaaatgtttccttgcaaacttgtagtccagtatcagttacttcctatttttatccttaaaagaccattgcaaatcagtgtaagggtttttccagtaattactcacagcactttgttaaagtttgcaatttcttcagccatttaataatatctttctgtgaagaaactttgctgagttaaccataaatgttcattcattgactgggtgggatgtgaatggaatgttagaaatgttgtgtgaattgaagttctgtattcattatagatgtagcccttatttaaaaaagtgaattccatactaaaactaggaatgaaagtgagagatttctaaacttttgcgaaagtgggtcattttttgtttgactataatagcaggaagaattatagcaatctgtcattttacctgaaacagacaagcctatgtattatgaatactttcaagcttccctttggaatatacaagacatgcgtttggagttacctttgtttttctatcgtaaatttagattctggaattggggtttggtggtgcaatgtgttgctcacaagtggccagaactcctattcctaaaaggattttgagatggaggaacacatatttaattcccctttatgccttggttcttgctcctctttccacgttggataacaattttttggttgttttgtttaagttggtgctctgaagcttaatctcagtaccctttactctgaattgtcaaattttgataaaacgtgccattttctttggtaagagaaagcaggtcttaatgtctgccagaacacaatttatatgccttattggcttcattaaacttttagaaaactttagcatttgttacttttttccattgcatttactttcaaatgcacctaatgaatttgtcacccagtcgcaacttttcccttctctgtcccattgctttctcctttccccgacgcacagaataaacatgaagctcagcagtagaagcgtaatgatttccctcaggaaaaacttctgacagctaggtttttcaagggtttccctgtgctagctgagatgcaaaacaaatcatggaagattgcatacctgtgtggtattttaaaaacaagttgactttttcagtttcttgaacggttaagggtggatttaaaaactagacagtttagttttggggaacagaagctctcttcgtcttaagccagattctctgattcttttagacgtcatagctccttagttctgctcctgtcgccctaacttggcatgggcaagttgaagttcatccttagactgcagcgttctgagcatggctgaagtattaaaatgtttaatattttttagagcaaaattgatggaaagcatttggctgaatctaaagacctgcagtcagattcttcaatgtggtttacccaactggagtagtgataaacaccttaatcataaaatgaataaaaacaaaaaacccgatctttttaataatgctccaa

SEQ ID NO: 18409 - DNA, 867 bp, Homo sapiens
taccgcgacctagaggatcccatcagtaggacagtgaaaaatgtttccttgcaaacttgtagtccagtatcagttacttcctatttttatccttaaaagaccattgcaaatcagtgtaagggtttttccagtaattactcacagcactttgttaaagtttgcaatttcttcagccatttaataatatctttctgtgaagaaactttgctgagttaaccataaatgttcattcattgactgggtgggatgtgaatggaatgttagaaatgttgtgtgaattgaagttctgtattcattatagatgtagcccttatttaaaaaagtgaattccatactaaaactaggaatgaaagtgagagatttctaaacttttgcgaaagtgggtcattttttgtttgactataatagcaggaagaattatagcaatctgtcattttacctgaaacagacaagcctatgtattatgaatactttcaagcttccctttggaatatacaagacatgcgtttggagttacctttgtttttctatcgtaaatttagattctggaattggggtttggtggtgcaatgtgttgctcacaagtggccagaactcctattcctaaaaggattttgagatggaggaacacatatttaattcccctttatgccttggttcttgctcctctttccacgttggataacaattttttggttgttttgtttaagttggtgctctgaagcttaatctcagtaccctttactctgaattgtcaaattttgataaaacgtgccattttctttggtaagagaaagcaggtcttaatgtctgccagaacacaatttatatgccttattggcttcattaaacttttagaaaacttta

SEQ ID NO: 18410 - DNA, 2338 bp, Homo sapiens
cttccattttgcagctgcactgtaccatgcacctggtttctatatagtaacagtgtgcaattctaattatggactgtgccctggtttttagttttcaaatcaatttctaattctggtgatgtgtgatgtaaagaggtgctatgatggtcatgcaattaatactaaatattgaatcaatgcccagagctttattggattcactttgtgtgtgttagtgctctaaagtagcagtattattattaaactgtccccagagtaaccctgtaggcctaaagtactcagttttaagacaaacactacttcccatgcggggtactttccttatggtaaatgtaaacatgtagactgcattcgaggtgacctaaagtagagaggtcatgaactttgagaatgggcttcctttttggttcagtattagtgagagggagagggagatggatggtggggtaggttttctagtctatcattttacatttttcatggagtccctgcttagtgcagtttccattggaatgggtggaagatgataaagctctcttttttatctactaataatgtgattgcaacttaaaatagcaaaacccaactctccctgtccctccaatccctctcctaaaaagttcagtttggaatctcattctggaaaagatggaatcgcatggagattctctagctgttaggtagacctaaataaaaagttctcaatagattcctcttttgagtaaatataagacctcttgtagctacaatgttttagagcatgtttcatcttcatttttaatatcctgaactgaatgatagtgtttttttagatgaagaactgatgtcagcctgccaggtactgtaatttattctatcatattattatattatatatcaagtaggacagtgaaaaatgtttccttgcaaacttgtagtccagtatcagttacttcctatttttatccttaaaagaccattgcaaatcagtgtaagggtttttccagtaattactcacagcactttgttaaagtttgcaatttcttcagccatttaataatatctttctgtgaagaaactttgctgagttaaccataaatgttcattcattgactgggtgggatgtgaatggaatgttagaaatgttgtgtgaattgaagttctgtattcattatagatgtagcccttatttaaaaaagtgaattccatactaaaactaggaatgaaagtgagagatttctaaacttttgcgaaagtgggtcattttttgtttgactataatagcaggaagaattatagcaatctgtcattttacctgaaacagacaagcctatgtattatgaatactttcaagcttccctttggaatatacaagacatgcgtttggagttacctttgtttttctatcgtaaatttagattctggaattggggtttggtggtgcaatgtgttgctcacaagtggccagaactcctattcctaaaaggattttgagatggaggaacacatatttaattcccctttatgccttggttcttgctcctctttccacgttggataacaattttttggttgttttgtttaagttggtgctctgaagcttaatctcagtaccctttactctgaattgtcaaattttgataaaacgtgccattttctttggtaagagaaagcaggtcttaatgtctgccagaacacaatttatatgccttattggcttcattaaacttttagaaaactttagcatttgttacttttttccattgcatttactttcaaatgcacctaatgaatttgtcacccagtcgcaacttttcccttctctgtcccattgctttctcctttccccgacgcacagaataaacatgaagctcagcagtagaagcgtaatgatttccctcaggaaaaacttctgacagctaggtttttcaagggtttccctgtgctagctgagatgcaaaacaaatcatggaagattgcatacctgtgtggtattttaaaaacaagttgactttttcagtttcttgaacggttaagggtggatttaaaaactagacagtttagttttggggaacagaagctctcttcgtcttaagccagattctctgattcttttagacgtcatagctccttagttctgctcctgtcgccctaacttggcatgggcaagttgaagttcatccttagactgcagcgttctgagcatggctgaagtattaaaatgtttaatattttttagagcaaaattgatggaaagcatttggctgaatctaaagacctgcagtcagattcttcaatgtggtttacccaactggagtagtgataaacacgtagatcttgtcattaaatcctggcaccc

SEQ ID NO: 18411 - DNA, 1625 bp, Homo sapiens
gatcgctttgccaattttgcgttactgggcaggctaagagatcttcttttaattcagcctgcttaagacgggaactgataactgtagtgtatcctctgccttttttcttatctattggaggaagctcaggtgaagaaatggagttgccatcaactaagttgagaaagactacagatggtgtcacaagaaggatctgaagtggagcttctagtatccccaggagcgcgaagtgaacacggaaggtacctgcaggatccaattgtgtccattgatctctcagagtggctgaggataatagagtttcttcttcaaggtctcaaggtctgaagcatcccacagaatgatcctactgaataactcccataagctgctggccctatacaaatccttggccaggagcatccctgagtccctgaaggtgtatggctctgtgtatcacatcaatcacgggaaccccttcaacatggaggtgctggtggattcctggcctgaatatcagatggttattatccggcctcaaaagcaggagatgactgatgacatggattcatacacaaacgtatatcgtatgttctccaaagagcctcaaaaatcagaagaagttttgaaaaattgtgagatcgtaaactggaaacagagactccaaatccaaggtcttcaagaaagtttaggtgaggggataagagtggctacattttcaaagtcagtgaaagtagagcattcgagagcactcctcttggttacggaagatattctgaagctcaatgcctccagtaaaagcaagcttggaagctgggctgagacaggccacccagatgatgaatttgaaagtgaaactcccaactttaagtatgcccagctggatgtctcttattctgggctggtaaatgacaactggaagcgagggaagaatgagaggagcctgcattacatcaagcgctgcatagaagacctgccagcagcctgtatgctcggcccagagggagtcccggtctcatgggtaaccatggacccttcttgtgaagtaggaatggcctacagcatggaaaaataccgaaggacaggcaacatggcacgagtgatggtgcgatacatgaaatatctgcgtcagaagaatattccattttacatctctgtgttggaagaaaatgaagactcccgcagatttgtggggcagtttggtttctttgaggcctcctgtgagtggcaccaatggacttgctacccacagaatctagttccattttagacaatgaagctgcttagtaatctctgccaagccatctcttaatattaaagcagacaccacagaatagatttcttcacttacaaatgcatattgggcacttataatacagcaggaactcttctcacctggagccttgatgttaaaagacacagccatgctcttgaggagcttacaatcctggctggaggcaggggagggtatattctttaaatatgcttaagtgttatagggaaagacggggttaccagtaaacatgtaactagaaagccaggctcagttcttacctctgggaatcagaactctttatgcaacttggttaatagaatctactatctggaagataaatgaaggattttaataaaattttcaatagaat

SEQ ID NO: 18412 - DNA, 779 bp, Homo sapiens
gtaaacagatctaactggggaagcctgtgttgtccctagtatttaccctatgacctaatgctctaagatggtgtcacaagaaggatctgaagtggagcttctagtatccccaggagcgcgaagtgaacacggaaggtacctgcaggatccaattgtgtccattgatctctcagagtggctgaggataatagagtttcttcttcaaggtctcaaggtctgaagcatcccacagaatgatcctactgaataactcccataagctgctggccctatacaaatccttggccaggagcatccctgagtccctgaaggtgtatggctctgtgtatcacatcaatcacgggaaccccttcaacatggaggtgctggtggattcctggcctgaatatcagatggttattatccggcctcaaaagcagcgagattgacttgattgaccttggattcatagcaaaacgttattatccgtatggtttcttccaaaaggaggcttccaaaaatccggaaggaaggttcttggagcaacattcgtgaggatccgtaaacgtgggaacacccgaagacttccaaatccaaggtccttcagagaaacggtcaagcggtggaaggggcacacggacgggggctacaatttttcaacagtccaggtggaacggttgagccatttcgagaagcactcccttctgtggtaacaggaagatatttcttgaaaggttcaaatggcttcccagtttaaagccacacgtttggaagctgggtctgtggaaaagggccaacca

SEQ ID NO: 18413 - DNA, 2542 bp, Homo sapiens
taattacagcctgagaaggactctgtacttcttcatttgagtccttgtgggtaaactgtaacgtagcttaatcatcagacaaaattgaaaacctaatttagtagtgtgcacctgtaacaatactccagtgttggccaatcccagcagccatacttcaactactcatagactgctgaatgttcaaactgtgttcaaataaggcaagcgcccagttgtaaccaatctctttgtttctgtacctgatttctggttcctgtacatcactttaccttttttgtctataaattcattttgaccacgaggcacccccggagcctcggtgaatctgctgtgattttgtaggctgccggattcacaaattgtttgttgcttaatgaaactcctttaagtttaattcagctgaagtttttcttttatcagatggtgtcacaagaaggatctgaagtggagcttctagtatccccaggagcgcgaagtgaacacggaaggtacctgcaggatccaattgtgtccattgatctctcagagtggctgaggataatagagtttcttcttcaaggtctcaaggtctgaagcatcccacagaatgatcctactgaataactcccataagctgctggccctatacaaatccttggccaggagcatccctgagtccctgaaggtgtatggctctgtgtatcacatcaatcacgggaaccccttcaacatggaggtgctggtggattcctggcctgaatatcagatggttattatccggcctcaaaagcaggagatgactgatgacatggattcatacacaaacgtatatcgtatgttctccaaagagcctcaaaaatcagaagaagttttgaaaaattgtgagatcgtaaactggaaacagagactccaaatccaaggtcttcaagaaagtttaggtgaggggataagagtggctacattttcaaagtcagtgaaagtagagcattcgagagcactcctcttggttacggaagatattctgaagctcaatgcctccagtaaaagcaagcttggaagctgggctgagacaggccacccagatgatgaatttgaaagtgaaactcccaactttaagtatgcccagctggatgtctcttattctgggctggtaaatgacaactggaagcgagggaagaatgagaggagcctgcattacatcaagcgctgcatagaagacctgccagcagcctgtatgctcggcccagagggagtcccggtctcatgggtaaccatggacccttcttgtgaagtaggaatggcctacagcatggaaaaataccgaaggacaggcaacatggcacgagtgatggtgcgatacatgaaatatctgcgtcagaagaatattccattttacatctctgtgttggaagaaaatgaagactcccgcagatttgtggggcagtttggtttctttgaggcctcctgtgagtggcaccaatggacttgctacccacagaatctagttccattttagacaatgaagctgcttagtaatctctgccaagccatctcttaatattaaagcagacaccacagaatagatttcttcacttacaaatgcatattgggcacttataatacagcaggaactcttctcacctggagccttgatgttaaaagacacagccatgctcttgaggagcttacaatcctggctggaggcaggggagggtatattctttaaatatgcttaagtgttatagggaaagacggggttaccagtaaacatgtaactagaaagccaggctcagttcttacctctgggaatcagaactctttatgcaacttggttaatagaatctactatctggaagataaatgaaggattttaataaaattttcaatagaataaacctaatctgtatggatactttatcaaaaatgaatgtccctgctatttctggatttatgaggcaatggtacactaaagaatggaatcagttcagtgagtagaaaggtatccaaggtgaagcctgagacgaatggctttcccaggctaccttccatcactgttgtacagaaaagaaatccagagaatcaaatggactggccttgggggtctctgctatggaaatgccattttttgtgtctcctttctcctactctttctcacatcctcttcatgattgaagcatggcacaaggcaaggtgttgcctgcgagtctggttgtaagttcagcctttggtgtttgcactactgctatcataaggggtcagggacattccggggagaagtgaccactaaggtgaggattagagagtgagtagaagtgagccagacaaaaaaagcagaaaatgcagatgatggaaaggacatgtgccatgcactatcataagaacttcctaactgaacactgatactacaattctgaatccctgatcttaaaaaataattatacttcaccaacaaaacttggcctcttttggttccactctgccaccctgccattggaacttggattactgtgaacattgcagctatagcaaaataaaaaataaaaaaaataaataattggcattt

SEQ ID NO: 18414 - DNA, 3125 bp, Homo sapiens
ctctttctcttgtatttcttttaataaatgccttaccagaagtttatctctctctttcttcttctctctctgtttttgccatttaaaaatgaacttttggctttatatatcctttgcactatgtcttgttctccatttcattatttatagctttcatttttacaaattgttccatttgttattttctagtttactttgatattcttttatatatttccttgactatttacttggctatttttggtcattcttttaaaatcaggtcttttaaaacatctactcttctaaattcactgacgttttgggtttgaccatattcaggaacttgcatttataaaagcaccctgaaattcttgaaggtttctttaaattaattacactattttctctttaactctttagcaatacaatttccaacataatattaatacattcactgctaaaacgctcacacttattgtttatattttcccagagaaacatcctcatcttccaatgaagtttctgtcatgccagaatgggatcacgagtctctttctttcaaacccaagagtctaacaccacataaattacccagagagctaccaaaaaattcagttacatcattctattttgtgggcttctgggtgtaaagccagtgtcacttttcaaataggctgatatcctgtaggcttgagaaaaggcaaggtctcgttagtgtttatattcactaaagtatcttgctcaagccctggacaccgtagattctaggacactattgactctaggtgtctggtgaaacagtaggcactaaaaattagagaaatcacagttaaatttattttgagccaagtttaaggacttaactcttaacaacacaaactcagtacaacccagaatgtgtcccacagtaggttacctggggcacagtatatataacaggagtatccgtttggcacaggtggtaagagaagcagggagagaagcaattgttgcatttttttattctgctgggtgcttggtgatgctatatataaaatagggtatgtgtgcagttgagtgggtagggagaaaggtgaggcatcttaaggcctggtggagggtgactgatttcatcctgtcttagttctgcatgtgataaggaggtttataaccaatacttgtcagtgttaaatatttaacaaactccagttacacaggtaagaggtcagcggtagcttataggcctaggttttattatcgatgtgcccaactgcagccatcatgggccactgttaaaattttcttttgaactttcatttttctgataattgcaaccagtgagaggtgaagaaaaagttcaagggaatgacctgatcttatatcatccaatacaggagatgactgatgacatggattcatacacaaacgtatatcgtatgttctccaaagagcctcaaaaatcagaagaagttttgaaaaattgtgagatcgtaaactggaaacagagactccaaatccaaggtcttcaagaaagtttaggtgaggggataagagtggctacattttcaaagtcagtgaaagtagagcattcgagagcactcctcttggttacggaagatattctgaagctcaatgcctccagtaaaagcaagcttggaagctgggctgagacaggccacccagatgatgaatttgaaagtgaaactcccaactttaagtatgcccagctggatgtctcttattctgggctggtaaatgacaactggaagcgagggaagaatgagaggagcctgcattacatcaagcgctgcatagaagacctgccagcagcctgtatgctcggcccagagggagtcccggtctcatgggtaaccatggacccttcttgtgaagtaggaatggcctacagcatggaaaaataccgaaggacaggcaacatggcacgagtgatggtgcgatacatgaaatatctgcgtcagaagaatattccattttacatctctgtgttggaagaaaatgaagactcccgcagatttgtggggcagtttggtttctttgaggcctcctgtgagtggcaccaatggacttgctacccacagaatctagttccattttagacaatgaagctgcttagtaatctctgccaagccatctcttaatattaaagcagacaccacagaatagatttcttcacttacaaatgcatattgggcacttataatacagcaggaactcttctcacctggagccttgatgttaaaagacacagccatgctcttgaggagcttacaatcctggctggaggcaggggagggtatattctttaaatatgcttaagtgttatagggaaagacggggttaccagtaaacatgtaactagaaagccaggctcagttcttacctctgggaatcagaactctttatgcaacttggttaatagaatctactatctggaagataaatgaaggattttaataaaattttcaatagaataaacctaatctgtatggatactttatcaaaaatgaatgtccctgctatttctggatttatgaggcaatggtacactaaagaatggaatcagttcagtgagtagaaaggtatccaaggtgaagcctgagacgaatggctttcccaggctaccttccatcactgttgtacagaaaagaaatccagagaatcaaatggactggccttgggggtctctgctatggaaatgccattttttgtgtctcctttctcctactctttctcacatcctcttcatgattgaagcatggcacaaggcaaggtgttgcctgcgagtctggttgtaagttcagcctttggtgtttgcactactgctatcataaggggtcagggacattccggggagaagtgaccactaaggtgaggattagagagtgagtagaagtgagccagacaaaaaaagcagaaaatgcagatgatggaaaggacatgtgccatgcactatcataagaacttcctaactgaacactgatactacaattctgaatccctgatcttaaaaaataattatacttcaccaacaaaacttggcctcttttggttccactctgccaccctgccattggaacttggattactgtgaacattgcagctatagcaaaataaaaaataaaaaaaataaataattggcattt

SEQ ID NO: 18415 - DNA, 2296 bp, Homo sapiens
gatcgctttgccaattttgcgttactgggcaggctaagagatcttcttttaattcagcctgcttaagacgggaactgataactgtagtgtatcctctgccttttttcttatctattggaggaagctcaggtgaagaaatggagttgccatcaactaagttgagaaagactacagatggtgtcacaagaaggatctgaagtggagcttctagtatccccaggagcgcgaagtgaacacggaaggtacctgcaggatccaattgtgtccattgatctctcagagtggctgaggataatagagtttcttcttcaaggtctcaaggtctgaagcatcccacagaatgatcctactgaataactcccataagctgctggccctatacaaatccttggccaggagcatccctgagtccctgaaggtgtatggctctgtgtatcacatcaatcacgggaaccccttcaacatggaggtgctggtggattcctggcctgaatatcagatggttattatccggcctcaaaagcaggagatgactgatgacatggattcatacacaaacgtatatcgtatgttctccaaagagcctcaaaaatcagaagaagttttgaaaaattgtgagatcgtaaactggaaacagagactccaaatccaaggtcttcaagaaagtttaggtgaggggataagagtggctacattttcaaagtcagtgaaagtagagcattcgagagcactcctcttggttacggaagatattctgaagctcaatgcctccagtaaaagcaagcttggaagctgggctgagacaggccacccagatgatgaatttgaaagtgaaactcccaactttaagtatgcccagctggatgtctcttattctgggctggtaaatgacaactggaagcgagggaagaatgagaggagcctgcattacatcaagcgctgcatagaagacctgccagcagcctgtatgctcggcccagagggagtcccggtctcatgggtaaccatggacccttcttgtgaagtaggaatggcctacagcatggaaaaataccgaaggacaggcaacatggcacgagtgatggtgcgatacatgaaatatctgcgtcagaagaatattccattttacatctctgtgttggaagaaaatgaagactcccgcagatttgtggggcagtttggtttctttgaggcctcctgtgagtggcaccaatggacttgctacccacagaatctagttccattttagacaatgaagctgcttagtaatctctgccaagccatctcttaatattaaagcagacaccacagaatagatttcttcacttacaaatgcatattgggcacttataatacagcaggaactcttctcacctggagccttgatgttaaaagacacagccatgctcttgaggagcttacaatcctggctggaggcaggggagggtatattctttaaatatgcttaagtgttatagggaaagacggggttaccagtaaacatgtaactagaaagccaggctcagttcttacctctgggaatcagaactctttatgcaacttggttaatagaatctactatctggaagataaatgaaggattttaataaaattttcaatagaataaacctaatctgtatggatactttatcaaaaatgaatgtccctgctatttctggatttatgaggcaatggtacactaaagaatggaatcagttcagtgagtagaaaggtatccaaggtgaagcctgagacgaatggctttcccaggctaccttccatcactgttgtacagaaaagaaatccagagaatcaaatggactggccttgggggtctctgctatggaaatgccattttttgtgtctcctttctcctactctttctcacatcctcttcatgattgaagcatggcacaaggcaaggtgttgcctgcgagtctggttgtaagttcagcctttggtgtttgcactactgctatcataaggggtcagggacattccggggagaagtgaccactaaggtgaggattagagagtgagtagaagtgagccagacaaaaaaagcagaaaatgcagatgatggaaaggacatgtgccatgcactatcataagaacttcctaactgaacactgatactacaattctgaatccctgatcttaaaaaataattatacttcaccaacaaaacttggcctcttttggttccactctgccaccctgccattggaacttggattactgtgaacattgcagctatagcaaaataaaaaataaaaaaaataaataattggcattt

SEQ ID NO: 18416 - DNA, 2460 bp, Homo sapiens
taattacagcctgagaaggactctgtacttcttcatttgagtccttgtgggtaaactgtaacgtagcttaatcatcagacaaaattgaaaacctaatttagtagtgtgcacctgtaacaatactccagtgttggccaatcccagcagccatacttcaactactcatagactgctgaatgttcaaactgtgttcaaataaggcaagcgcccagttgtaaccaatctctttgtttctgtacctgatttctggttcctgtacatcactttaccttttttgtctataaattcattttgaccacgaggcacccccggagcctcggtgaatctgctgtgattttatggtgtcacaagaaggatctgaagtggagcttctagtatccccaggagcgcgaagtgaacacggaaggtacctgcaggatccaattgtgtccattgatctctcagagtggctgaggataatagagtttcttcttcaaggtctcaaggtctgaagcatcccacagaatgatcctactgaataactcccataagctgctggccctatacaaatccttggccaggagcatccctgagtccctgaaggtgtatggctctgtgtatcacatcaatcacgggaaccccttcaacatggaggtgctggtggattcctggcctgaatatcagatggttattatccggcctcaaaagcaggagatgactgatgacatggattcatacacaaacgtatatcgtatgttctccaaagagcctcaaaaatcagaagaagttttgaaaaattgtgagatcgtaaactggaaacagagactccaaatccaaggtcttcaagaaagtttaggtgaggggataagagtggctacattttcaaagtcagtgaaagtagagcattcgagagcactcctcttggttacggaagatattctgaagctcaatgcctccagtaaaagcaagcttggaagctgggctgagacaggccacccagatgatgaatttgaaagtgaaactcccaactttaagtatgcccagctggatgtctcttattctgggctggtaaatgacaactggaagcgagggaagaatgagaggagcctgcattacatcaagcgctgcatagaagacctgccagcagcctgtatgctcggcccagagggagtcccggtctcatgggtaaccatggacccttcttgtgaagtaggaatggcctacagcatggaaaaataccgaaggacaggcaacatggcacgagtgatggtgcgatacatgaaatatctgcgtcagaagaatattccattttacatctctgtgttggaagaaaatgaagactcccgcagatttgtggggcagtttggtttctttgaggcctcctgtgagtggcaccaatggacttgctacccacagaatctagttccattttagacaatgaagctgcttagtaatctctgccaagccatctcttaatattaaagcagacaccacagaatagatttcttcacttacaaatgcatattgggcacttataatacagcaggaactcttctcacctggagccttgatgttaaaagacacagccatgctcttgaggagcttacaatcctggctggaggcaggggagggtatattctttaaatatgcttaagtgttatagggaaagacggggttaccagtaaacatgtaactagaaagccaggctcagttcttacctctgggaatcagaactctttatgcaacttggttaatagaatctactatctggaagataaatgaaggattttaataaaattttcaatagaataaacctaatctgtatggatactttatcaaaaatgaatgtccctgctatttctggatttatgaggcaatggtacactaaagaatggaatcagttcagtgagtagaaaggtatccaaggtgaagcctgagacgaatggctttcccaggctaccttccatcactgttgtacagaaaagaaatccagagaatcaaatggactggccttgggggtctctgctatggaaatgccattttttgtgtctcctttctcctactctttctcacatcctcttcatgattgaagcatggcacaaggcaaggtgttgcctgcgagtctggttgtaagttcagcctttggtgtttgcactactgctatcataaggggtcagggacattccggggagaagtgaccactaaggtgaggattagagagtgagtagaagtgagccagacaaaaaaagcagaaaatgcagatgatggaaaggacatgtgccatgcactatcataagaacttcctaactgaacactgatactacaattctgaatccctgatcttaaaaaataattatacttcaccaacaaaacttggcctcttttggttccactctgccaccctgccattggaacttggattactgtgaacattgcagctatagcaaaataaaaaataaaaaaaataaataattggcattt

SEQ ID NO: 18417 - DNA, 2322 bp, Homo sapiens
taattacagcctgagaaggactctgtacttcttcatttgagtccttgtgggtaaactgtaacgtagcttaatcatcagacaaaattgaaaacctaatttagtagtgtgcacctgtaacaatactccagtgttggccaatcccagcagccatacttcaactactcatagactgctgaatgttcaaactgtgttcaaataagatggtgtcacaagaaggatctgaagtggagcttctagtatccccaggagcgcgaagtgaacacggaaggtacctgcaggatccaattgtgtccattgatctctcagagtggctgaggataatagagtttcttcttcaaggtctcaaggtctgaagcatcccacagaatgatcctactgaataactcccataagctgctggccctatacaaatccttggccaggagcatccctgagtccctgaaggtgtatggctctgtgtatcacatcaatcacgggaaccccttcaacatggaggtgctggtggattcctggcctgaatatcagatggttattatccggcctcaaaagcaggagatgactgatgacatggattcatacacaaacgtatatcgtatgttctccaaagagcctcaaaaatcagaagaagttttgaaaaattgtgagatcgtaaactggaaacagagactccaaatccaaggtcttcaagaaagtttaggtgaggggataagagtggctacattttcaaagtcagtgaaagtagagcattcgagagcactcctcttggttacggaagatattctgaagctcaatgcctccagtaaaagcaagcttggaagctgggctgagacaggccacccagatgatgaatttgaaagtgaaactcccaactttaagtatgcccagctggatgtctcttattctgggctggtaaatgacaactggaagcgagggaagaatgagaggagcctgcattacatcaagcgctgcatagaagacctgccagcagcctgtatgctcggcccagagggagtcccggtctcatgggtaaccatggacccttcttgtgaagtaggaatggcctacagcatggaaaaataccgaaggacaggcaacatggcacgagtgatggtgcgatacatgaaatatctgcgtcagaagaatattccattttacatctctgtgttggaagaaaatgaagactcccgcagatttgtggggcagtttggtttctttgaggcctcctgtgagtggcaccaatggacttgctacccacagaatctagttccattttagacaatgaagctgcttagtaatctctgccaagccatctcttaatattaaagcagacaccacagaatagatttcttcacttacaaatgcatattgggcacttataatacagcaggaactcttctcacctggagccttgatgttaaaagacacagccatgctcttgaggagcttacaatcctggctggaggcaggggagggtatattctttaaatatgcttaagtgttatagggaaagacggggttaccagtaaacatgtaactagaaagccaggctcagttcttacctctgggaatcagaactctttatgcaacttggttaatagaatctactatctggaagataaatgaaggattttaataaaattttcaatagaataaacctaatctgtatggatactttatcaaaaatgaatgtccctgctatttctggatttatgaggcaatggtacactaaagaatggaatcagttcagtgagtagaaaggtatccaaggtgaagcctgagacgaatggctttcccaggctaccttccatcactgttgtacagaaaagaaatccagagaatcaaatggactggccttgggggtctctgctatggaaatgccattttttgtgtctcctttctcctactctttctcacatcctcttcatgattgaagcatggcacaaggcaaggtgttgcctgcgagtctggttgtaagttcagcctttggtgtttgcactactgctatcataaggggtcagggacattccggggagaagtgaccactaaggtgaggattagagagtgagtagaagtgagccagacaaaaaaagcagaaaatgcagatgatggaaaggacatgtgccatgcactatcataagaacttcctaactgaacactgatactacaattctgaatccctgatcttaaaaaataattatacttcaccaacaaaacttggcctcttttggttccactctgccaccctgccattggaacttggattactgtgaacattgcagctatagcaaaataaaaaataaaaaaaataaataattggcattt

SEQ ID NO: 18418 - DNA, 2288 bp, Homo sapiens
gctcagttgccatgggccaggagtctcacagaactactaagcagctgcttacccaattttggctggagagataagtaccctctggggccaccacagctggccccaaccatggtcctgattgccttggaagaactgcctttggaatttcacatcggcatccagatagatggtgtcacaagaaggatctgaagtggagcttctagtatccccaggagcgcgaagtgaacacggaaggtacctgcaggatccaattgtgtccattgatctctcagagtggctgaggataatagagtttcttcttcaaggtctcaaggtctgaagcatcccacagaatgatcctactgaataactcccataagctgctggccctatacaaatccttggccaggagcatccctgagtccctgaaggtgtatggctctgtgtatcacatcaatcacgggaaccccttcaacatggaggtgctggtggattcctggcctgaatatcagatggttattatccggcctcaaaagcaggagatgactgatgacatggattcatacacaaacgtatatcgtatgttctccaaagagcctcaaaaatcagaagaagttttgaaaaattgtgagatcgtaaactggaaacagagactccaaatccaaggtcttcaagaaagtttaggtgaggggataagagtggctacattttcaaagtcagtgaaagtagagcattcgagagcactcctcttggttacggaagatattctgaagctcaatgcctccagtaaaagcaagcttggaagctgggctgagacaggccacccagatgatgaatttgaaagtgaaactcccaactttaagtatgcccagctggatgtctcttattctgggctggtaaatgacaactggaagcgagggaagaatgagaggagcctgcattacatcaagcgctgcatagaagacctgccagcagcctgtatgctcggcccagagggagtcccggtctcatgggtaaccatggacccttcttgtgaagtaggaatggcctacagcatggaaaaataccgaaggacaggcaacatggcacgagtgatggtgcgatacatgaaatatctgcgtcagaagaatattccattttacatctctgtgttggaagaaaatgaagactcccgcagatttgtggggcagtttggtttctttgaggcctcctgtgagtggcaccaatggacttgctacccacagaatctagttccattttagacaatgaagctgcttagtaatctctgccaagccatctcttaatattaaagcagacaccacagaatagatttcttcacttacaaatgcatattgggcacttataatacagcaggaactcttctcacctggagccttgatgttaaaagacacagccatgctcttgaggagcttacaatcctggctggaggcaggggagggtatattctttaaatatgcttaagtgttatagggaaagacggggttaccagtaaacatgtaactagaaagccaggctcagttcttacctctgggaatcagaactctttatgcaacttggttaatagaatctactatctggaagataaatgaaggattttaataaaattttcaatagaataaacctaatctgtatggatactttatcaaaaatgaatgtccctgctatttctggatttatgaggcaatggtacactaaagaatggaatcagttcagtgagtagaaaggtatccaaggtgaagcctgagacgaatggctttcccaggctaccttccatcactgttgtacagaaaagaaatccagagaatcaaatggactggccttgggggtctctgctatggaaatgccattttttgtgtctcctttctcctactctttctcacatcctcttcatgattgaagcatggcacaaggcaaggtgttgcctgcgagtctggttgtaagttcagcctttggtgtttgcactactgctatcataaggggtcagggacattccggggagaagtgaccactaaggtgaggattagagagtgagtagaagtgagccagacaaaaaaagcagaaaatgcagatgatggaaaggacatgtgccatgcactatcataagaacttcctaactgaacactgatactacaattctgaatccctgatcttaaaaaataattatacttcaccaacaaaacttggcctcttttggttccactctgccaccctgccattggaacttggattactgtgaacattgcagctatagcaaaataaaaaataaaaaaaataaataattggcattt

SEQ ID NO: 18419 - DNA, 2231 bp, Homo sapiens
atatttctggcaccattctgagtgaatcccaacatttccccgtttttgttttcggtatcatgtctttttgatttcagattgcagatatgtacagccataggattgtcagatggtgtcacaagaaggatctgaagtggagcttctagtatccccaggagcgcgaagtgaacacggaaggtacctgcaggatccaattgtgtccattgatctctcagagtggctgaggataatagagtttcttcttcaaggtctcaaggtctgaagcatcccacagaatgatcctactgaataactcccataagctgctggccctatacaaatccttggccaggagcatccctgagtccctgaaggtgtatggctctgtgtatcacatcaatcacgggaaccccttcaacatggaggtgctggtggattcctggcctgaatatcagatggttattatccggcctcaaaagcaggagatgactgatgacatggattcatacacaaacgtatatcgtatgttctccaaagagcctcaaaaatcagaagaagttttgaaaaattgtgagatcgtaaactggaaacagagactccaaatccaaggtcttcaagaaagtttaggtgaggggataagagtggctacattttcaaagtcagtgaaagtagagcattcgagagcactcctcttggttacggaagatattctgaagctcaatgcctccagtaaaagcaagcttggaagctgggctgagacaggccacccagatgatgaatttgaaagtgaaactcccaactttaagtatgcccagctggatgtctcttattctgggctggtaaatgacaactggaagcgagggaagaatgagaggagcctgcattacatcaagcgctgcatagaagacctgccagcagcctgtatgctcggcccagagggagtcccggtctcatgggtaaccatggacccttcttgtgaagtaggaatggcctacagcatggaaaaataccgaaggacaggcaacatggcacgagtgatggtgcgatacatgaaatatctgcgtcagaagaatattccattttacatctctgtgttggaagaaaatgaagactcccgcagatttgtggggcagtttggtttctttgaggcctcctgtgagtggcaccaatggacttgctacccacagaatctagttccattttagacaatgaagctgcttagtaatctctgccaagccatctcttaatattaaagcagacaccacagaatagatttcttcacttacaaatgcatattgggcacttataatacagcaggaactcttctcacctggagccttgatgttaaaagacacagccatgctcttgaggagcttacaatcctggctggaggcaggggagggtatattctttaaatatgcttaagtgttatagggaaagacggggttaccagtaaacatgtaactagaaagccaggctcagttcttacctctgggaatcagaactctttatgcaacttggttaatagaatctactatctggaagataaatgaaggattttaataaaattttcaatagaataaacctaatctgtatggatactttatcaaaaatgaatgtccctgctatttctggatttatgaggcaatggtacactaaagaatggaatcagttcagtgagtagaaaggtatccaaggtgaagcctgagacgaatggctttcccaggctaccttccatcactgttgtacagaaaagaaatccagagaatcaaatggactggccttgggggtctctgctatggaaatgccattttttgtgtctcctttctcctactctttctcacatcctcttcatgattgaagcatggcacaaggcaaggtgttgcctgcgagtctggttgtaagttcagcctttggtgtttgcactactgctatcataaggggtcagggacattccggggagaagtgaccactaaggtgaggattagagagtgagtagaagtgagccagacaaaaaaagcagaaaatgcagatgatggaaaggacatgtgccatgcactatcataagaacttcctaactgaacactgatactacaattctgaatccctgatcttaaaaaataattatacttcaccaacaaaacttggcctcttttggttccactctgccaccctgccattggaacttggattactgtgaacattgcagctatagcaaaataaaaaataaaaaaaataaataattggcattt

SEQ ID NO: 18420 - DNA, 2202 bp, Homo sapiens
taattacagcctgagaaggactctgtacttcttcatttgagtccttgtgggtaaactgtaacgtagcttaatcatcagacaaaattgaaaacctaatttagtagtgtgcacctgtaacaatactccagtgttggccaatcccagcagccatacttcaactactcatagactgctgaatgttcaaactgtgttcaaataagatggtgtcacaagaaggatctgaagtggagcttctagtatccccaggagcgcgaagtgaacacggaaggtacctgcaggatccaattgtgtccattgatctctcagagtggctgaggataataggtgtatggctctgtgtatcacatcaatcacgggaaccccttcaacatggaggtgctggtggattcctggcctgaatatcagatggttattatccggcctcaaaagcaggagatgactgatgacatggattcatacacaaacgtatatcgtatgttctccaaagagcctcaaaaatcagaagaagttttgaaaaattgtgagatcgtaaactggaaacagagactccaaatccaaggtcttcaagaaagtttaggtgaggggataagagtggctacattttcaaagtcagtgaaagtagagcattcgagagcactcctcttggttacggaagatattctgaagctcaatgcctccagtaaaagcaagcttggaagctgggctgagacaggccacccagatgatgaatttgaaagtgaaactcccaactttaagtatgcccagctggatgtctcttattctgggctggtaaatgacaactggaagcgagggaagaatgagaggagcctgcattacatcaagcgctgcatagaagacctgccagcagcctgtatgctcggcccagagggagtcccggtctcatgggtaaccatggacccttcttgtgaagtaggaatggcctacagcatggaaaaataccgaaggacaggcaacatggcacgagtgatggtgcgatacatgaaatatctgcgtcagaagaatattccattttacatctctgtgttggaagaaaatgaagactcccgcagatttgtggggcagtttggtttctttgaggcctcctgtgagtggcaccaatggacttgctacccacagaatctagttccattttagacaatgaagctgcttagtaatctctgccaagccatctcttaatattaaagcagacaccacagaatagatttcttcacttacaaatgcatattgggcacttataatacagcaggaactcttctcacctggagccttgatgttaaaagacacagccatgctcttgaggagcttacaatcctggctggaggcaggggagggtatattctttaaatatgcttaagtgttatagggaaagacggggttaccagtaaacatgtaactagaaagccaggctcagttcttacctctgggaatcagaactctttatgcaacttggttaatagaatctactatctggaagataaatgaaggattttaataaaattttcaatagaataaacctaatctgtatggatactttatcaaaaatgaatgtccctgctatttctggatttatgaggcaatggtacactaaagaatggaatcagttcagtgagtagaaaggtatccaaggtgaagcctgagacgaatggctttcccaggctaccttccatcactgttgtacagaaaagaaatccagagaatcaaatggactggccttgggggtctctgctatggaaatgccattttttgtgtctcctttctcctactctttctcacatcctcttcatgattgaagcatggcacaaggcaaggtgttgcctgcgagtctggttgtaagttcagcctttggtgtttgcactactgctatcataaggggtcagggacattccggggagaagtgaccactaaggtgaggattagagagtgagtagaagtgagccagacaaaaaaagcagaaaatgcagatgatggaaaggacatgtgccatgcactatcataagaacttcctaactgaacactgatactacaattctgaatccctgatcttaaaaaataattatacttcaccaacaaaacttggcctcttttggttccactctgccaccctgccattggaacttggattactgtgaacattgcagctatagcaaaataaaaaataaaaaaaataaataattggcattt

SEQ ID NO: 18421 - DNA, 2225 bp, Homo sapiens
taattacagcctgagaaggactctgtacttcttcatttgagtccttgtgggtaaactgtaacgtagcttaatcatcagacaaaattgaaaacctaatttagtagtgtgcacctgtaacaatactccagtgttggccaatcccagcagccatacttcaactactcatagactgctgaatgttcaaactgtgttcaaataagatggtgtcacaagaaggatctgaagtggagcttctagtatccccaggagcgcgaagtgaacacggaaggtacctgcaggatccaattgtgtccattgatctctcagagtggctgaggataatagagtttcttcttcaaggtctcaaggtgtatggctctgtgtatcacatcaatcacgggaaccccttcaacatggaggtgctggtggattcctggcctgaatatcagatggttattatccggcctcaaaagcaggagatgactgatgacatggattcatacacaaacgtatatcgtatgttctccaaagagcctcaaaaatcagaagaagttttgaaaaattgtgagatcgtaaactggaaacagagactccaaatccaaggtcttcaagaaagtttaggtgaggggataagagtggctacattttcaaagtcagtgaaagtagagcattcgagagcactcctcttggttacggaagatattctgaagctcaatgcctccagtaaaagcaagcttggaagctgggctgagacaggccacccagatgatgaatttgaaagtgaaactcccaactttaagtatgcccagctggatgtctcttattctgggctggtaaatgacaactggaagcgagggaagaatgagaggagcctgcattacatcaagcgctgcatagaagacctgccagcagcctgtatgctcggcccagagggagtcccggtctcatgggtaaccatggacccttcttgtgaagtaggaatggcctacagcatggaaaaataccgaaggacaggcaacatggcacgagtgatggtgcgatacatgaaatatctgcgtcagaagaatattccattttacatctctgtgttggaagaaaatgaagactcccgcagatttgtggggcagtttggtttctttgaggcctcctgtgagtggcaccaatggacttgctacccacagaatctagttccattttagacaatgaagctgcttagtaatctctgccaagccatctcttaatattaaagcagacaccacagaatagatttcttcacttacaaatgcatattgggcacttataatacagcaggaactcttctcacctggagccttgatgttaaaagacacagccatgctcttgaggagcttacaatcctggctggaggcaggggagggtatattctttaaatatgcttaagtgttatagggaaagacggggttaccagtaaacatgtaactagaaagccaggctcagttcttacctctgggaatcagaactctttatgcaacttggttaatagaatctactatctggaagataaatgaaggattttaataaaattttcaatagaataaacctaatctgtatggatactttatcaaaaatgaatgtccctgctatttctggatttatgaggcaatggtacactaaagaatggaatcagttcagtgagtagaaaggtatccaaggtgaagcctgagacgaatggctttcccaggctaccttccatcactgttgtacagaaaagaaatccagagaatcaaatggactggccttgggggtctctgctatggaaatgccattttttgtgtctcctttctcctactctttctcacatcctcttcatgattgaagcatggcacaaggcaaggtgttgcctgcgagtctggttgtaagttcagcctttggtgtttgcactactgctatcataaggggtcagggacattccggggagaagtgaccactaaggtgaggattagagagtgagtagaagtgagccagacaaaaaaagcagaaaatgcagatgatggaaaggacatgtgccatgcactatcataagaacttcctaactgaacactgatactacaattctgaatccctgatcttaaaaaataattatacttcaccaacaaaacttggcctcttttggttccactctgccaccctgccattggaacttggattactgtgaacattgcagctatagcaaaataaaaaataaaaaaaataaataattggcattt

SEQ ID NO: 18422 - DNA, 698 bp, Homo sapiens
ctgtaacaatactccagtgttggccaatcccagcagccatacttcaactactcatagactgctgaatgttcaaactgtgttcaaataaggcaagcgcccagttgtaaccaatctctttgtttctgtacctgatttctggttcctgtacatcactttaccttttttgtctataaattcattttgaccacgaggcacccccggagcctcggtgaatctgctgtgattttgtaggctgccggattcacaaattgtttgttgcttaatgaaactcctttaagtttaattcagctgaagtttttcttttatcagatggtgtcacaagaaggatctgaagtggagcttctagtatccccaggagcgcgaagtgaacacggaaggtacctgcaggatccaattgtgtccattgatctctcagagtggctgaggataataggtaagctccctctcgcattttggagcttcacacgttggtgttttgagctctctgagttgcttggagcaaatttctgatccaaactgggtttggagtcacaacaggaaacagactgggtctaggaacagatttgatcttggaattaactggcctggatccagttagaggcctcttacatctcactgggtcagaaaggaactggtagtaagcagtaatgttgcaggagttataaaatttggcttttgaaaattcacagggatttttg

SEQ ID NO: 18423 - DNA, 422 bp, Homo sapiens
caaagatgtcactgtgtaattacactatataagatcacattatagctgatgggagcaagagattctcctgctggctttgaagaagtcagatagcatgttataaagggggctgtgagacgttcatgtggcaaggaactttgaatgacctgtaagagttgagaatgaactttggctggaaaccagtgaaaaatggatacctcagttatacaagtgcaagaaaatgaaacctgctgacaaccatgtaaactaagctccagaaaaaaagacactggctaacaccatgattgcagccttgtgagactaagattctgagctgagcatcagttaatctatatccagactccttccctacaaatactgtgagttaggtaataactgtgtgttgtttgaagccagtaagtttgtgtaattgttaagcagaa

SEQ ID NO: 18424 - DNA, 1058 bp, Homo sapiens
cagttagtacactgaaattcaaagtcatgctcataactgttaatgaaagcagattcaaagcaacaccaccaccactgaagtatttttagttatataagattggaactaccaagcatgtggctcctggtcagtgtaattctaatctcacggatatcctctgttgggggagaagcaatgttctgtgattttccaaaaataaaccatggaattctatatgatgaagaaaaatataagccattttcccaagttcctacaggggaagttttctattactcctgtgaatataattttgtgtctccttcaaaatccttttggactcgcataacgtgcgcagaagaaggatggtcaccaacaccaaagtgtctcagactgtgtttctttccttttgtggaaaatggtcattctgaatcttcaggacaaacacatctggaaggtgatactgtacaaattatttgcaacacaggatacagacttcaaaacaatgagaacaacatttcatgtgtagaacggggctggtccactcctcccaaatgcaggtccactatttctgcagaaaaatgtgggccccctccacctattgacaatggagacattacttcattcctgttgtcagtatatgctccaggttcatcagttgagtaccagtgccagaacttgtatcaacttgagggtaacaatcaaataacatgtagaaacggacaatggtcagaaccaccaaaatgcttagatccatgtgtaatatcacaagaaattatggaaaaatataacataaaattaaagtggacaaaccaacaaaagctttattcaagaacaggtgacatagttgaatttgtttgtaaatctggatatcatccaacaaaatctcattcatttcgagcaatgtgtcagaatgggaaactggtatatcccagttgtgaagaaaaatagaatcaatggcattactattagtaaaatgcacacctttttctgaatttactattatatttgttttcaatttcatttttcaagtactgttttactcatttttattcataaataaagttttgtgttgatttgtg

SEQ ID NO: 18425 - DNA, 813 bp, Homo sapiens
cagttagtacactgaaattcaaagtcatgctcataactgttaatgaaagcagattcaaagcaacaccaccaccactgaagtatttttagttatataagattggaactaccaagcatgtggctcctggtcagtgtaattctaatctcacggatatcctctgttgggggagaagcaatgttctgtgattttccaaaaataaaccatggaattctatatgatgaagaaaaatataagccattttcccaagttcctacaggggaagttttctattactcctgtgaatataattttgtgtctccttcaaaatccttttggactcgcataacgtgcgcagaagaaggatggtcaccaacaccaaagtgtctcagactgtgtttctttccttttgtggaaaatggtcattctgaatcttcaggacaaacacatctggaaggtgatactgtacaaattatttgcaacacaggatacagacttcaaaacaatgagaacaacatttcatgtgtagaacggggctggtccactcctcccaaatgcaggtccactatttctgcagaaaaatgtgggccccctccacctattgacaatggagacattacttcattcctgttgtcagtatatgctccaggttcatcagttgagtaccagtgccagaacttgtatcaacttgagggtaacaatcaaataacatgtagaaacggacaatggtcagaaccaccaaaatgcttagatcccatgtgtaatatcacaagaaattatgggtattacattgaatttggttgtatctggatatcattcactctcattctttcgagc

SEQ ID NO: 18426 - DNA, 783 bp, Homo sapiens
cagttagtacactgaaattcaaagtcatgctcataactgttaatgaaagcagattcaaagcaacaccaccaccactgaagtatttttagttatataagattggaactaccaagcatgtggctcctggtcagtgtaattctaatctcacggatatcctctgttgggggagaagcaatgttctgtgattttccaaaaataaaccatggaattctatatgatgaagaaaaatataagccattttcccaagttcctacaggggaagttttctattactcctgtgaatataattttgtgtctccttcaaaatccttttggactcgcataacgtgcgcagaagaaggatggtcaccaacaccaaagtgtctcagactgtgtttctttccttttgtggaaaatggtcattctgaatcttcaggacaaacacatctggaaggtgatactgtacaaattatttgcaacacaggatacagacttcaaaacaatgagaacaacatttcatgtgtagaacggggctggtccactcctcccaaatgcaggtccactatttctgcagaaaaatgtgggccccctccacctattgacaatggagacattacttcattcctgttgtcagtatatgctccaggttcatcagttgagtaccagtgccagaacttgtatcaacttgagggtaacaatcaaataacatgtagaaacggacaatggtcagaaccaccaaaatgcttagatccatcgtgtatatcacacgagattatggaacgtgacatgttgtttggttgttct

SEQ ID NO: 18427 - DNA, 686 bp, Homo sapiens
cagttagtacactgaaattcaaagtcatgctcataactgttaatgaaagcagattcaaagcaacaccaccaccactgaagtatttttagttatataagattggaactaccaagcatgtggctcctggtcagtgtaattctaatctcacggatatcctctgttgggggagaagtttctgcagaaaaatgtgggccccctccacctattgacaatggagacattacttcattcctgttgtcagtatatgctccaggttcatcagttgagtaccagtgccagaacttgtatcaacttgagggtaacaatcaaataacatgtagaaacggacaatggtcagaaccaccaaaatgcttagatccatgtgtaatatcacaagaaattatggaaaaatataacataaaattaaagtggacaaaccaacaaaagctttattcaagaacaggtgacatagttgaatttgtttgtaaatctggatatcatccaacaaaatctcattcatttcgagcaatgtgtcagaatgggaaactggtatatcccagttgtgaagaaaaatagaatcaatggcattactattagtaaaatgcacacctttttctgaatttactattatatttgttttcaatttcatttttcaagtactgttttactcatttttattcataaataaagttttgtgttgatttgtg

SEQ ID NO: 18428 - DNA, 695 bp, Homo sapiens
cagttagtacactgaaattcaaagtcatgctcataactgttaatgaaagcagattcaaagcaacaccaccaccactgaagtatttttagttatataagattggaactaccaagcatgtggctcctggtcagtgtaattctaatctcacggatatcctctgttgggggagaagcaatgttctgtgattttccaaaaataaaccatggaattctatatgatgaagaaaaatataagccattttcccaagttcctacaggggaagttttctattactcctgtgaatataattttgtgtctccttcaaaatccttttggactcgcataacgtgcgcagaagaaggatggtcaccaacaccaaagtgtctcagactgtgtttctttccttttgtggaaaatggtcattctgaatcttcaggacaaacacatctggaaggtgatactgtacaaattatttgcaacacaggatacagacttcaaaacaatgagaacaacatttcatgtgtagaacggggctggtccactcctcccaaatgcaggtccactattcctgttgtcagtatatgctccaggttcatcagttgagtaccagtgccagaacttgtatcaacttgagggtaacaatcaaataacatgtagaaacggacaatggtcagaaccaccaaaatgcttaggtaagtactttaatattctcatgg

SEQ ID NO: 18429 - DNA, 415 bp, Homo sapiens
cagttagtacactgaaattcaaagtcatgctcataactgttaatgaaagcagattcaaagcaacaccaccaccactgaagtatttttagttatataagattggaactaccaagcatgtggctcctggtcagtgtaattctaatctcacggatatcctctgttgggggagaagcaatgttctgtgattttccaaaaataaaccatggaattctatatgatgaagaaaaatataagccattttcccaagttcctacaggggaagttttctattactcctgtgaatataattttgtgtctccttcaaaatccttttggactcgcataacgtgcgcagaagaaggatggtcaccaacaccaaagtgtctcaactgtgtttctttccttttgtggttatttgccacaggatacagacttc

SEQ ID NO: 18430 - DNA, 863 bp, Homo sapiens
cagttagtacactgaaattcaaagtcatgctcataactgttaatgaaagcagattcaaagcaacaccaccaccactgaagtatttttagttatataagattggaactaccaagcatgtggctcctggtcagtgtaattctaatctcacggatatcctctgttgggggagaaggactgtgtttctttccttttgtggaaaatggtcattctgaatcttcaggacaaacacatctggaaggtgatactgtacaaattatttgcaacacaggatacagacttcaaaacaatgagaacaacatttcatgtgtagaacggggctggtccactcctcccaaatgcaggtccactatttctgcagaaaaatgtgggccccctccacctattgacaatggagacattacttcattcctgttgtcagtatatgctccaggttcatcagttgagtaccagtgccagaacttgtatcaacttgagggtaacaatcaaataacatgtagaaacggacaatggtcagaaccaccaaaatgcttagatccatgtgtaatatcacaagaaattatggaaaaatataacataaaattaaagtggacaaaccaacaaaagctttattcaagaacaggtgacatagttgaatttgtttgtaaatctggatatcatccaacaaaatctcattcatttcgagcaatgtgtcagaatgggaaactggtatatcccagttgtgaagaaaaatagaatcaatggcattactattagtaaaatgcacacctttttctgaatttactattatatttgttttcaatttcatttttcaagtactgttttactcatttttattcataaataaagttttgtgttgatttgtg

SEQ ID NO: 18431 - DNA, 1314 bp, Homo sapiens
cagttagtacactgaaattcaaagtcatgctcataactgttaatgaaagcagattcaaagcaacaccaccaccactgaagtatttttagttatataagattggaactaccaagcatgtggctcctggtcagtgtaattctaatctcacggatatcctctgttgggggagaagagtcctgctctgtcgcccccaggatggtgtttagtggcatgatctcggctcactgcaacatacccctcctgggttcaagtgattcttctgcctcagcctcccaagtagctgggattacaggtgcgcaccaccacacctggctaatttttgtatttttagtagagatgggctttcgccatgttggccaggctggtctcaaactcctgacctcaagtgatccacctacctcagcctcccaaagtgctggggattacagcaatgttctgtgattttccaaaaataaaccatggaattctatatgatgaagaaaaatataagccattttcccaagttcctacaggggaagttttctattactcctgtgaatataattttgtgtctccttcaaaatccttttggactcgcataacgtgcgcagaagaaggatggtcaccaacaccaaagtgtctcagactgtgtttctttccttttgtggaaaatggtcattctgaatcttcaggacaaacacatctggaaggtgatactgtacaaattatttgcaacacaggatacagacttcaaaacaatgagaacaacatttcatgtgtagaacggggctggtccactcctcccaaatgcaggtccactatttctgcagaaaaatgtgggccccctccacctattgacaatggagacattacttcattcctgttgtcagtatatgctccaggttcatcagttgagtaccagtgccagaacttgtatcaacttgagggtaacaatcaaataacatgtagaaacggacaatggtcagaaccaccaaaatgcttagatccatgtgtaatatcacaagaaattatggaaaaatataacataaaattaaagtggacaaaccaacaaaagctttattcaagaacaggtgacatagttgaatttgtttgtaaatctggatatcatccaacaaaatctcattcatttcgagcaatgtgtcagaatgggaaactggtatatcccagttgtgaagaaaaatagaatcaatggcattactattagtaaaatgcacacctttttctgaatttactattatatttgttttcaatttcatttttcaagtactgttttactcatttttattcataaataaagttttgtgttgatttgtg

SEQ ID NO: 18432 - DNA, 1077 bp, Homo sapiens
cagttagtacactgaaattcaaagtcatgctcataactgttaatgaaagcagattcaaagcaacaccaccaccactgaagtatttttagttatataagattggaactaccaagcatgtggctcctggtcagtgtaattctaatctcacggatatcctctgttgggggagaagttttgtgttattttcccagcaatgttctgtgattttccaaaaataaaccatggaattctatatgatgaagaaaaatataagccattttcccaagttcctacaggggaagttttctattactcctgtgaatataattttgtgtctccttcaaaatccttttggactcgcataacgtgcgcagaagaaggatggtcaccaacaccaaagtgtctcagactgtgtttctttccttttgtggaaaatggtcattctgaatcttcaggacaaacacatctggaaggtgatactgtacaaattatttgcaacacaggatacagacttcaaaacaatgagaacaacatttcatgtgtagaacggggctggtccactcctcccaaatgcaggtccactatttctgcagaaaaatgtgggccccctccacctattgacaatggagacattacttcattcctgttgtcagtatatgctccaggttcatcagttgagtaccagtgccagaacttgtatcaacttgagggtaacaatcaaataacatgtagaaacggacaatggtcagaaccaccaaaatgcttagatccatgtgtaatatcacaagaaattatggaaaaatataacataaaattaaagtggacaaaccaacaaaagctttattcaagaacaggtgacatagttgaatttgtttgtaaatctggatatcatccaacaaaatctcattcatttcgagcaatgtgtcagaatgggaaactggtatatcccagttgtgaagaaaaatagaatcaatggcattactattagtaaaatgcacacctttttctgaatttactattatatttgttttcaatttcatttttcaagtactgttttactcatttttattcataaataaagttttgtgttgatttgtg

SEQ ID NO: 18433 - DNA, 1002 bp, Homo sapiens
cagttagtacactgaaattcaaagtcatgctcataactgttaatgaaagcagattcaaagcaacaccaccaccactgaagtatttttagttatataagattggaactaccaagcatgtggctcctggtcagtgtaattctaatctcacggatatcctctgttgggggagaagcaatgttctgtgattttccaaaaataaaccatggaattctatatgatgaagaaaaatataagccattttcccaagttcctacaggggaagttttctattactcctgtgaatataattttgtgtctccttcaaaatccttttggactcgcataacgtgcgcagaagaaggatggtcaccaacaccaaagtgtctcagactgtgtttctttccttttgtggaaaatggtcattctgaatcttcaggacaaacacatctggaaggtgatactgtacaaattatttgcaacacaggatacagacttcaaaacaatgagaacaacatttcatgtgtagaacggggctggtccactcctcccaaatgcaggtccactattcctgttgtcagtatatgctccaggttcatcagttgagtaccagtgccagaacttgtatcaacttgagggtaacaatcaaataacatgtagaaacggacaatggtcagaaccaccaaaatgcttagatccatgtgtaatatcacaagaaattatggaaaaatataacataaaattaaagtggacaaaccaacaaaagctttattcaagaacaggtgacatagttgaatttgtttgtaaatctggatatcatccaacaaaatctcattcatttcgagcaatgtgtcagaatgggaaactggtatatcccagttgtgaagaaaaatagaatcaatggcattactattagtaaaatgcacacctttttctgaatttactattatatttgttttcaatttcatttttcaagtactgttttactcatttttattcataaataaagttttgtgttgatttgtg

SEQ ID NO: 18434 - DNA, 1010 bp, Homo sapiens
cagttagtacactgaaattcaaagtcatgctcataactgttaatgaaagcagattcaaagcaacaccaccaccactgaagtatttttagttatataagattggaactaccaagcatgtggctcctggtcagtgtaattctaatctcacggatatcctctgttgggggagaagcaatgttctgtgattttccaaaaataaaccatggaattctatatgatgaagaaaaatataagccattttcccaagttcctacaggggaagttttctattactcctgtgaatataattttgtgtctccttcaaaatccttttggactcgcataacgtgcgcagaagaaggatggtcaccaacaccaaagtgtctcagacaaacacatctggaaggtgatactgtacaaattatttgcaacacaggatacagacttcaaaacaatgagaacaacatttcatgtgtagaacggggctggtccactcctcccaaatgcaggtccactatttctgcagaaaaatgtgggccccctccacctattgacaatggagacattacttcattcctgttgtcagtatatgctccaggttcatcagttgagtaccagtgccagaacttgtatcaacttgagggtaacaatcaaataacatgtagaaacggacaatggtcagaaccaccaaaatgcttagatccatgtgtaatatcacaagaaattatggaaaaatataacataaaattaaagtggacaaaccaacaaaagctttattcaagaacaggtgacatagttgaatttgtttgtaaatctggatatcatccaacaaaatctcattcatttcgagcaatgtgtcagaatgggaaactggtatatcccagttgtgaagaaaaatagaatcaatggcattactattagtaaaatgcacacctttttctgaatttactattatatttgttttcaatttcatttttcaagtactgttttactcatttttattcataaataaagttttgtgttgatttgtg

SEQ ID NO: 18435 - DNA, 881 bp, Homo sapiens
cagttagtacactgaaattcaaagtcatgctcataactgttaatgaaagcagattcaaagcaacaccaccaccactgaagtatttttagttatataagattggaactaccaagcatgtggctcctggtcagtgtaattctaatctcacggatatcctctgttgggggagaagcaatgttctgtgattttccaaaaataaaccatggaattctatatgatgaagaaaaatataagccattttcccaagttcctacaggggaagttttctattactcctgtgaatataattttgtgtctccttcaaaatccttttggactcgcataacgtgcgcagaagaaggatggtcaccaacaccaaagtgtctcatttctgcagaaaaatgtgggccccctccacctattgacaatggagacattacttcattcctgttgtcagtatatgctccaggttcatcagttgagtaccagtgccagaacttgtatcaacttgagggtaacaatcaaataacatgtagaaacggacaatggtcagaaccaccaaaatgcttagatccatgtgtaatatcacaagaaattatggaaaaatataacataaaattaaagtggacaaaccaacaaaagctttattcaagaacaggtgacatagttgaatttgtttgtaaatctggatatcatccaacaaaatctcattcatttcgagcaatgtgtcagaatgggaaactggtatatcccagttgtgaagaaaaatagaatcaatggcattactattagtaaaatgcacacctttttctgaatttactattatatttgttttcaatttcatttttcaagtactgttttactcatttttattcataaataaagttttgtgttgatttgtg

SEQ ID NO: 18436 - DNA, 807 bp, Homo sapiens
cagttagtacactgaaattcaaagtcatgctcataactgttaatgaaagcagattcaaagcaacaccaccaccactgaagtatttttagttatataagattggaactaccaagcatgtggctcctggtcagtgtaattctaatctcacggatatcctctgttgggggagaaggactgtgtttctttccttttgtggaaaatggtcattctgaatcttcaggacaaacacatctggaaggtgatactgtacaaattatttgcaacacaggatacagacttcaaaacaatgagaacaacatttcatgtgtagaacggggctggtccactcctcccaaatgcaggtccactattcctgttgtcagtatatgctccaggttcatcagttgagtaccagtgccagaacttgtatcaacttgagggtaacaatcaaataacatgtagaaacggacaatggtcagaaccaccaaaatgcttagatccatgtgtaatatcacaagaaattatggaaaaatataacataaaattaaagtggacaaaccaacaaaagctttattcaagaacaggtgacatagttgaatttgtttgtaaatctggatatcatccaacaaaatctcattcatttcgagcaatgtgtcagaatgggaaactggtatatcccagttgtgaagaaaaatagaatcaatggcattactattagtaaaatgcacacctttttctgaatttactattatatttgttttcaatttcatttttcaagtactgttttactcatttttattcataaataaagttttgtgttgatttgtg

SEQ ID NO: 18437 - DNA, 396 bp, Homo sapiens
gtatgagctaccacacccaaccctctcatacaatttaaagaatctctagattatttataatacctaatacaatgtaaatgctatacaaatagttgttatattgtatttttaattgcattatttttattgttttattgtctttttattgtttttttccgaatatttttgatctgcagttggttgaatcagaggatgtgaaaccagtggggctgaccgtatatatatgtgtgtatacaagtataaatatataaatacaaatatacaatacatatttgtatatacaacattaaccagaatttagctctaactttatcttgagttgttcttagtgattttcttatattctctcaattatttccactgaaactatattaactttgtaaccagaaagtattc

SEQ ID NO: 18438 - DNA, 2055 bp, Homo sapiens
ggggagatactgtaaaccagcagtatctttgtgtcaccaatggtaactgaaagtcatgctgaagtacagattcctgtagcgtgcacagaggcagaggtgcttcctttaccttgcagatgagttgagcggcgtaagatgtttctgttagggttgaatttcatggttatttcagcaacgattttcgtttttgaagttttggcccccccaaaaatgaaagtctgcaacgcatgtttgttaagagaacagtttattctcctgttaggttttggtctttgaggtatggattccagagttggctattctgttagatttagaggtgtggaaaatcttttaacggggagatcctgaaacacggaaacatggcagggaagttagaatttcctgatggtcatttttaacattttaaagtttactttttggttgttgccatttttctagaatccgtgtcttttttggggaaatacagtcctttgaggactagaatttaatgatttctttacacatctaggattttttgagatttagaaaggatatggctttattcctaaggaagtggaggcagcagtttctaggatactctggtttcaaggcatgctaacttggttgtgatgtctaacccattttggtttacacagtctgaccactagcacaatgcctggcacatagtttacaaatcatttaaggcaagcttaccatcttaagacaatttaatacatagaagtgtccctcctaaaaatctgagtttgatttagaaatccagttatacctgcaggtactgatgactaattccttctttgaagacaaaataagcagctgtgtagcttcagtggctctcaaatggataatagattcagtgtatactcgctttgaactttcctgttttttgatcagctagataaatgactttagtgggtaaatgtctgcctccaaaaccaaattctgaccctgatctaagtattctactgcaccgctgtcactggaatatcaaagttggccttcagactggtgcctggttccttggattggcttgagtattgaggtctgtctcatcttactagggaactaaaatgatgttgattgttttgtagagaattgtaattagagatctgtaggttcttaattcttttggaattccattctgaaaattttcaaccttatggtgttggtggagtgctcatgtgaagagtgaaactgacttaagaataaaagaaaaagtgggcaaaactaatgctaaacttgagaccattgggcagaaatttgcctgtgtgtgtagagtaattggtcttgagtcaaagtaactatgcttatttttaacatcactgaatattttctagcgttacactctatataggcttgtagaaataaacccaggggtaagcccagaaattgaatatcagtcctaaagaaagcctatcaagagcatcctattctctttaagagctgctattcgaatttaggactgggctggtttgctgctcattctctcgaggcataggcagccacacttgaattttgccaagtatgcagataattccaacttgtagtcaggatcatcaggtaatagcattataaggggagctgtacagactgtatactttctacagtttgttgaaatagaaacatttatatggatacatacatctgcaaaggttagggagaaaacggtagccctggcagagaagagctagttagtgtatttcaggatagggccaagggaagctgtcatttctctactaagtctcattgtggaaaagccacaaatgtccctagtacagtaataaggaaaaaaaggctgagcgtggtggctcacacctgtagtcccaggactttcggaaggattgcttgagcccaggagttgcagatcggccaggacaatgtaagaaaaccccatgtattagaaaaaaagaattagccaggcgtgatggtgtgggtctatagtctcagcttgggaggctgaggtggcaggatcgcatatagcccaggagttcgaggctgcagtgagccatgatcgcatcactgcaccctagtctgggcaacagagtctctaaaaagaaa

SEQ ID NO: 18439 - DNA, 527 bp, Homo sapiens
gtcctaaatacagtggggccacactcgctctgaggtccctagagagaatccattctgtggatcttccagcttctgggggctgccagcattcctttactcatgcgagcattcctttaccccagcttctgggggctgcaccactccaatctctgctccctggtcacattgcctcctcttctgtgtgtcaagtctccctctgactcactcttaaaagaacatttgtcaggccgggcacagtggctcatgcctgtggtcccagcaatttgggaggccgaggagggcgaataacttgaggtcaggagtttgagaccagcctggctaacatggtgaaacccttcctctaataaaagtataaaaattatctgggcatgatggcgggcgcttgtagtcccactcctcaggaggctgaggcaggagagttgcttgaacctgggaggcggaggttgcagtgagcagagattgcaccactgcactccaccagcctgggcgaaagaacaagactccatctcaaaaaaaaaaaaaaaaga

SEQ ID NO: 18440 - DNA, 387 bp, Homo sapiens
ataccgtaagtgcttttagtaatactgctgttattggtgatggtgatgattagttcctgttcagcaaaatgagagacttgactgaaatcactataacatctcttttagagaaggaggcaggtgatcagatccacagcctctgaggtttttaaccacacactaaaatatttaaatgggcaggggacaggggaagctgtcacttgggccacagaggggaaggtaggaagccgaataacatcagccacccctgagcctgggcctaccagtacagagccatgctcagccatctggagatagaaatgctcaggggtccccaggtagcttggatgtttcactggcccaagtgctcctatcagctgctccttagggcctgtggttttccagact

SEQ ID NO: 18441 - DNA, 337 bp, Homo sapiens
atatacccaatctctagttcccatacttacatctttcatatagaggatagggttggagacattggctgttagaaatcttcgtaaatttttggctgggtgcggtggctcactcctgtaattccagcactttgggaggctgaggaggtggatcacttgaggtcaggagtttgagaccaacctggccaacatgatgaaatcctttctctactaaaaatagaaaaattggtcaggcatgggggtgcatgcctgtaatcccagctactcaggaggctgaggcaggaggatcgcttgaacccaggaggcagaggtgcagtaagccaagatcatgccattgcac

SEQ ID NO: 18442 - DNA, 247 bp, Homo sapiens
catttagagaccatgagttaccccacgctaaattagactcaaactaatgcgttttcatgttttcatttttaaatggcttttctgtctctctgtcaggcatcatgtatgcctcccctgtcttgagttggggctaaaaaatcaagtgactgaacttaaggtaattatttttaaaacaactaaaatgaaagtattatattaataaagtgctgagttttttacatttatttttcctgccagagcaaaaaaa

SEQ ID NO: 18443 - DNA, 412 bp, Homo sapiens
gacatcttgcccatttaccttagaccacttggaaagcattttcctgtagaaaagtcttacagttaattcttcaggtgctcactagatatattttaagaatctttaaagatagatgaaaatctcactagtatgtgtttctatcccaatattttcatcgtataagtgtttctgtagtcactgacctatcaggaagggtcatggcgctccctcattaatctccccctcagaacctgttcctgcaattattatgcatttcctggtctctttgtgcccccgaaatgctctgaaatgcttatttccctcctgcagagtgaacattatttaacgtagtttgttagtaaggaaatgaaactgaagaggtaggaaaggactgtgtgttaaataaaacaacctagaatcctttatttgaagt

SEQ ID NO: 18444 - DNA, 450 bp, Homo sapiens
tctatgggctaggtattcaaaattctgattttgtttcaatcaaatcttgaaaaacttggcatcttaattccgcatacaaacttcagcatacatctcatttcttgagcaatttattgcaaacttgaatatggggagtgtttgaagttgaacaggccacagaaaactgagtcaactctgcagaggattaggattaaattgaggctaaattttcatgttttattaatcatctggtagtaattctttattgaattctttcctatggtgaatctgcccttctctgacattcagtgaaatgtaaattaaaatatatacttgacattcaatgaaaccataaattaaaatatataattgaatgtttttcagtccagagccatgttgaataaaggcagtcaacatgagaaacatttatttaacctatatggttcttaattttaacattatatttatagc

SEQ ID NO: 18445 - DNA, 414 bp, Homo sapiens
tcgtcttaccctgtttagtccatgaggaaagaaaggctcagctcagggaggacatttgcccaaggttacataactggtgggtgcgcgggccaggcctgacatcgggtccacccagatgccaaccttccttactgctcctctccagcgcctcagccagctcccagcctgggacccagaaaggcccagagcccgcgctcatgccagcacacgatatcttcggtactaatccccggatttcattaatctctatcacaggtccaaagaggaggggtcgctgaggctgggctaatctccctcccgagtttgacttccaactttccatgaaggccttagccctattgcatcccatgggaccaagtaaaaaccttaggctcccagaagatcaaggggatgtttatctggcatctagggatc

SEQ ID NO: 18446 - DNA, 510 bp, Homo sapiens
gtctttcacaaatacctcgtctatcatcctgttcagtaaacccactccacttgtaagtctgttttttctctccattggaatcaggtattggagttccagaattgacattttctaaggtttcatcctgtccctcaatataatcccatgaacgagttctatgattactaaaactaacagatggagacgtcagtgctccttgagatgcacttcttggacaatacttcattagcacagaatcttccagtctttcttgggacacactgcgttgccgtatctggacagactggggcactcgatcatgagaggtgcttcgacgtcgtccctgcaaagtagtgcggttggggacgacctggttataatctgtcgtgctttgagatgctgctcttaaactatctaatctttcttgtattgtccgacaacctatgtgcaatcgtctgttatcaatatactctttgtaagttttatagtttttccagtctatgtgctgatgggaatttggcgaatagtgat

SEQ ID NO: 18447 - DNA, 5875 bp, Homo sapiens
ggcgacggacggcgcgagctgcgagcccgacttgtcccgggccccggaggacgcggcgggggccgcggcggaggcggcgaaaaaagagtttgatgtggatactctcagtaaatccgagctgcggatgctcctcagcgtgatggaaggggagctggaggccagagaccttgtcatcgaggccctgcgggctcgcaggaaggaggtatttatccaggaacggtatgggagatttaatctaaatgacccgttcctggcactccagagagactatgaagcaggtgctggtgacaaagagaagaagccagtttgtaccaaccccctctccatccttgaagcagtcatggcccactgcaagaaaatgcaagaaaggatgtccgcacagctggctgctgctgagagcagacaaaagaagctggaaatggagaagcttcagctacaagcccttgagcaagagcacaagaagctggctgcccgccttgaggaagagcgtggcaagaacaagcaggtggtcctgatgctggtcaaagagtgcaagcagctctcaggcaaagtcatagaggaggcccagaagctcgaagacgtaatggccaaactggaagaggaaaagaaaaagacgaatgaattagaagaggaactctccgctgagaaacgaagaagcacagaaatggaagctcagatggaaaaacaactctctgagtttgacactgagcgggaacagcttcgtgccaagctgaaccgggaagaagcacacaccactgacctcaaagaggagatagacaagatgaggaaaatgattgagcaactgaaaaggggaagtgacagcaaaccaagcctctctcttccacggaagacaaaagataggcgtttggtttccatatctgtgggaacagaaggaactgtgacaaggtctgttgcatgccagacagacctagtgacagaaaatgctgaccacatgaaaaagttgcctttaaccatgcctgtaaaaccttccacagggagtcccctagtttctgcaaatgcaaaagggagcgtgtgcaccagtgccaccatggccagaccaggtattgacaggcaggcttcctatggtgacttgattggcgcttctgtacccgctttcccacctccaagtgcaaacaaaattgaggaaaatggaccaagcactggctcaacaccagatccaaccagtagcacacccccacttcccagtaacgctgcccctcccaccgctcaaacaccaggcatagctcctcagaactcgcaagctccacctatgcacagtttacattcaccatgtgccaacacctctttgcatccaggtctaaacccacgaatccaagcagctagatttagatttcagggcaatgctaacgacccagaccaaaatggaaatactacccaaagtcctccgtcaagagatgtctcgcctacaagtcgtgacaacctagtggccaaacaactagctcggaatactgtgacccaagcactgtcaagatttacaagccctcaagcaggtgctccctcaaggcctggagtgcccccaacaggggatgttggcacccaccctccagttggtcggaccagtttaaagactcatggtgtagcacgagttgacagaggaaatcctcctcctatccctccaaaaaagccagggctctcccaaactccttctccaccacacccccaactcaaggttattatagacagcagcagggcctcgaacacaggggccaaagttgataacaaaactgtggcttcgactccttccagtttgccacaagggaacagggtgatcaatgaggagaaccttcctaagtcatcctcccctcagctgccaccaaaaccatccatagatttaactgtggcacctgcaggctgtgccgtttcagccctggccacgtctcaggtgggtgcctggcctgctgcaacccccggactgaaccaacctgcatgttcagacagttcccttgtcattcctaccaccattgccttttgctcttccataaaccccgttagtgcctcatcctgtagaccaggtgcctcagacagcctcctggtaacagcatcaggctggtcaccctccctaacccctttgctaatgagtggtggtcctgcccccctggctggcaggcccacccttcttcagcaagctgctgcccagggaaatgtcactttattatcaatgctgcttaatgaagaaggactggacattaattactcctgtgaagatggccattctgccttgtattctgctgctaagaatggacatacagactgtgtgagattgctgctgagtgcagaagcccaagtcaatgctgctgataaaaatggcttcacacccttgtgtgctgcagctgctcagggacatttcgagtgtgtagaattattaatttcatatgatgctaacattaatcatgctgctgatggaggacagacacctctatacctggcctgtaaaaatggaaataaagaatgtattaaactcttgttggaagctggaaccaatcgaagtgtaaaaaccacagatggctggacaccagttcacgcagctgtggacactggtaatgtggacagcctcaagcttcttatgtaccatagaataccagctcatggaaattctttcaatgaggaggagtccgagtcaagtgtctttgacttggatggaggagaagagagtcctgaaggcatatccaagcctgttgttcctgcagacctcattaaccacgccaacagagaaggctggactgctgcccacattgctgcttccaaaggttttaagaactgcctagaaatcttgtgtaggcacggagggcttgagccagaaaggagagacaagtgcaatcggactgtgcatgatgttgccactgatgactgcaagcatttgctggagaatctgaatgctcttaaaatacccttaaggatttcagtgggtgagattgaaccaagcaactatggttctgatgacttggaatgtgaaaacacaatatgtgctttaaatatccgcaaacagacatcatgggatgatttttcaaaagcagtgagtcaagctctgacaaatcatttccaggcaatctcttctgatggatggtggagtctggaagacgtgacttgcaataacaccactgattccaacatcggcctcagtgcaagaagcatacgatccatcacgctaggaaatgtgccgtggtcagtgggtcagagcttcgcgcagtccccgtgggactttatgaggaagaataaggcagagcacatcactgtgcttttgtcaggtcctcaagaaggctgtctcagtagtgtgacttatgcctccatgatccctctccagatgatgcagaactacctcaggctggttgagcaatatcataatgtcattttccacggcccagaaggaagcttgcaagactacatagtacatcagcttgcactctgcctgaagcacagacaaatggctgcaggattctcctgtgaaatagtgagagctgaagtagatgctggtttttccaaggaacagctactagacctgttcattagtagcgcttgtctgatcccagtgaaacaatctcccagtaagaagaaaatcatcatcattttagaaaatttagaaaaatcttcactgtcggagttattgagggactttttggcacctcttgaaaatcgcagcactgaaagcccctgcactttccaaaaaggaaatggactgtccgaatgttattactttcatgagaactgctttctgatgggaaccatcgccaaggcctgtctccagggctccgacttgctggtgcagcagcatttccgctgggtgcagctgcggtgggatggcgagcccatgcaaggactgctgcagaggttcttacgaaggaaagttgtgaataagttcaaaggtcaggcgccctccccctgcgatcctgtgtgcaagattgtcgactgggctctgtccgtctggcgtcagcttaactcctgcctggcccgcttgggcacacctgaagcacttcttggaccaaaatatttcctgtcttgtcctgtagttcctgggcatgcccaagtgacagtgaagtggatgtctaagctgtggaatggcgtcatcgcacccagagttcaagaagcaatattgtcaagagcctctgtgaaaagacaacctggctttgggcagacaactgctaaaagacaccctagccaaggacagcaggctgtggtcaaagctgctctcagcatcttgctaaataaagctgtactgcatggctgtcccctccccagagcagagctagaccagcatacagctgatttcaaaggaggaagtttccctttatccatagtttccagttataacacttgtaacaagaagaaaggagagagtggtgcctggagaaaggtgaacaccagtcctcgcaggaagtctggccgcttctctttacccacctggaataagccagacctaagcactgaaggtatgaaaaataagactatatcacagctgaattgtaacaggaatgcttctctgtcaaaacaaaagtctttagagaatgatctatcactgacgttgaatttggatcagagactctctctgggttcagatgacgaagcagatcttgtcaaggaacttcagagcatgtgctccagcaagtctgagtctgatatcagcaagattgctgattccagggatgatttaaggatgtttgatagttctggaaacaaccctgtactttcagcaactattaataatctgagaatgccagtgtcacaaaaggaggtcagtcctctcagcagccatcaaactactgaatgcagcaacagtaaatcaaagactgagttgggtgtttcaagagttaaatcttttcttcctgttcctagaagtaaagtcacccagtgttcccagaacaccaaaagaagcagcagcagcagtaatacaaggcaaatagaaatcaacaacaactcaaaagaagtgaattggaacttacacaaaaatgaacacctagaaaaacctaacaaataggcctgcctacaatattctcattattaacttcctctatttcacacagaaaccaaggacaacaagatacaaatacctttaaattgataaaatgttttcactgtaatataaattatgagtgcgggaccactattcaatttttttttgtaaagaatgtatttataaccaacattttgttgcttttttttttaattctgtaggattgaacttcaataccaggaagttatgccaacttttcaagtagttttataatagaaaaattgtaatagttttaatcaagatgttcaggggtattaaaacagaactgtgtactgtatatctgtatatatgtatatatgtatgtatatttaaggaagtccagaaatcatactgcatacatgctacaaaaaagtagcaaaaaagtacaaagttggcttagataacttgtaccattttaaatggagatcataattttatgttcacttgatggggaatgactagaatggggcaataacaaatcatttctaaacagttattttccattaaaagccatattaagtattttgcttgttaaattctagttttatgttttaaatctcttagtggttacattgccatttggtagcatcatgtatatatttatgcttataagtttgcattatgactcctgtaaaatatgaaattataatgcaataaaagtgttatctttcttacaaaagttttgtacctaagtggatatagataactgcataaatgaataaattcagaattaactccttcaatatttctagtagcacaactgataatattgatattttctacaaatgttacttctaaaattacagacaaaattacttacacaattcagttaagatgctttgacactgaataaaatattgatttcatgaa

SEQ ID NO: 18448 - DNA, 4438 bp, Homo sapiens
gtagatgctgtgtattgaatgaattgctctgatttaccaattctttaaggctaaataaaacttactttaggtcagtgcctttctacacaaattagtttttgagtttaacatgcacagcaatatggatagtaaacgttatacatttaatacagataattcgggggttttagcccaggaagcattaaacacctgtaactctcctgctcctaaactccgctgccccctaggcttgacttccagggtgtcaggagcacttttcaggcaggatgctgtgcattggtcacctgctctattcttgcactcctggccttgaattgctgtggctcacgctaagcccaagtgattctccatgttctcatcctaactccttccattctagcctcacacttccagggactgaccaaactacatgtttttagttgttctgggtacttctcagtactttatttcatgtggatatttcctgcctcagaccatgaaggtacactcccctcaccatcatgttgcaggtacagaaacagactagaacagtgtatgtctcctttccttcctctgggccatggcattaattaactctgtagatttgacaataatggcaaaattaaacaactcccctcaccaccagattctgtatagcaactaactgttatccttattataatgccatatttcatgttttctgaatactacgtatgtgttgcatttgctggtgttttaaaccaaattacaagttctaattggccttagtaggcccatgaccaagtcccattttgcggacttaacagtaatttcttgttaggaaaaatgagattggatcctggtacctgcactgtttttacagttgtgactatcaccatccaactcatgacaagcaatgtaacttctcattttctttctggtaacttgacagcataagcatctttacaaaacaaaagcagaacatactaagcagattcgcccttaacataccatcaagtacacatggaggtgacgaggatggactaggatgtgttccctcaccagatgtagctcagcctttttccaggcttcctcggacgtagttaaaaccgagcccatctgttttttgttttatcaggaagctcttgcctttctaagctagcttcttgcagtctagacttctctttcctttccctgtaaatgcaggtggcctggaccccagatttgtcccctctttattctccattacatatttgttgtttcagtgtttttatattttcccaaaccactagccaagtatatattagagttacattgctgttccacttaagattagctgagtctgaaaatctgaccccaagagatttcactttggtgatttaggggtagtttaatgaacatgttgtgttgggctttaaagaattaggactttaacagggaagtaaaggaaaaataggatttaaaggggattggagccaaactttaaaagaactttagtgacatgccagttagtgaggacttatcctttaccttcctattcacacaaacacagccataattctctgcccattttgtgggtaacattggattaggttggtgaggagagagagaaaggcagctgctaaagataactgaggatttcctgctaaattcactgggagagcagcattagccagtaatgagccaagcggaaaggctttagaaattagtattgaagaaatgcaataaatacagttttagaaagaatttgaagtgtggctagacatataggtgaattagtggggtggaaatgcaggagataaatgagggctaaagaaagaactttgggaaatacttagagcttgaaatactctgaagggaaagattatcaatgtgtgacttatagagggctaagaaaaatgctaccatttaggacagcagtccccagccattttggcactggagactggtttcgtggaagacaatttttccacggacctgggtagtttccggatgaaactgttccatctcagatctttaggcattagattctcgcaaggactgggcaacctagacccctcacttgcacaattcacaagagggtttgtactactatgagaatctaatgctgctgatctgacaggaggcggagctcaggtggtaatactggctcgcccccgctcacgtcctgctgtgctgcccagttattaataggccatggactggtccacagcctgtggcttggggacccttgatttaattgctcaatggagaaaaaggatagtgaggagttaagctaggcgttctttggccgcaagattttttaaaatcgtatgtccatgccacaccccagaactattaaatatgaatctctggtaatagggcccagccaatgactattaaagctcccccaggtgattccaatgtcatataagacgatacccaggagaatgcaactgccgcaactgccagatgaagccagatttttcctgttaaattttagttttgttttaaattcttgtaatggttatattgctgttgggtgcattattacttttgaagaggagaagttatcaaggtcaactccttcagaggcattcagagtaggtcacttagtaggagtcatgtcatgtttgttagtttgcagaatttaatgcaatatagggaaaataccttgagtgaaagttgggagacctgaggtcttgtcccagcttcaccactccgttcactgtgggcaaatcatcttacctatccagctctcagattcttcatgggcaaaatgagagacattgaccaggtaatcacaggatttctgaaacattagagaaatgagaacatgcagcttccaagtatggaagatcttgagtggcctaaccatagatgaatgtaggttctgctagggaaggaatgtttctcttatgttttctcctatatgcccccagattatttgattattgagtaatagttcacttttaagacttgaaagtagaaagcagaaaagttaggtgatttacccaaggtgacatagtttgtagagctacctacaaatgggactactccaatttggtgatttcctcatgcctgtaattttgtgaagtttctgttggtaaggagatcgacgccttagcacttgattcactgactcctgtatttaggaattttgtaacagcagatggattaatgaaaatcatgcagtaagtctataggaaattaattactcagcttctcctctccattttcttttgatttttcacgagaacctatagttttagagagaaactcctgtacatttgctcaaagaggaggcaggggtagggctcataacaggagaagtttgtgataaacttgtgtggtttcttgtctcttacaggaggtcagtcctctcagcagccatcaaactactgaatgcagcaacagtaaatcaaagactgagttgggtgtttcaagagttaaatcttttcttcctgttcctagaagtaaagtcacccagtgttcccagaacaccaaaagaagcagcagcagcagtaatacaaggcaaatagaaatcaacaacaactcaaaagaagtgaattggaacttacacaaaaatgaacacctagaaaaacctaacaaataggcctgcctacaatattctcattattaacttcctctatttcacacagaaaccaaggacaacaagatacaaatacctttaaattgataaaatgttttcactgtaatataaattatgagtgcgggaccactattcaatttttttttgtaaagaatgtatttataaccaacattttgttgcttttttttttaattctgtaggattgaacttcaataccaggaagttatgccaacttttcaagtagttttataatagaaaaattgtaatagttttaatcaagatgttcaggggtattaaaacagaactgtgtactgtatatctgtatatatgtatatatgtatgtatatttaaggaagtccagaaatcatactgcatacatgctacaaaaaagtagcaaaaaagtacaaagttggcttagataacttgtaccattttaaatggagatcataattttatgttcacttgatggggaatgactagaatggggcaataacaaatcatttctaaacagttattttccattaaaagccatattaagtattttgcttgttaaattctagttttatgttttaaatctcttagtggttacattgccatttggtagcatcatgtatatatttatgcttataagtttgcattatgactcctgtaaaatatgaaattataatgcaataaaagtgttatctttcttacaaaagttttgtacctaagtggatatagataactgcataaatgaataaattcagaattaactccttcaatatttctagtagcacaactgataatattgatattttctacaaatgttacttctaaaattacagacaaaattacttacacaattcagttaagatgctttgacactgaataaaatattgatttcatgaa

SEQ ID NO: 18449 - DNA, 224 bp, Homo sapiens
tcgctctagagtgatcccgactccaccatccatcagaagagatgcctggaaatgatttgtcagagcttgactcactgcttctgatggatggtggagtctggaagacgtgacttgcaataacaccactgattccaacatcggcctcagtgcaagaagcatacgatccatcacgctaggtatcagcagtcctatgacggagagaaagtgaaatttctgggtttatt

SEQ ID NO: 18450 - DNA, 5661 bp, Homo sapiens
ctcctactcaccctcccacaggtcactcttgtgccatgcgcacatggcttactgcaggagcgctacgggaaggtgtgtggtgggaatcccatgcagagagaacagcaaggacaaagaccccgaggcaggaccatgtttaggaaactccgggcatccagcgaagctaagggagtaagcaggatcaaagtaggagacaagctggaaatggagaagcttcagctacaagcccttgagcaagagcacaagaagctggctgcccgccttgaggaagagcgtggcaagaacaagcaggtggtcctgatgctggtcaaagagtgcaagcagctctcaggcaaagtcatagaggaggcccagaagctcgaagacgtaatggccaaactggaagaggaaaagaaaaagacgaatgaattagaagaggaactctccgctgagaaacgaagaagcacagaaatggaagctcagatggaaaaacaactctctgagtttgacactgagcgggaacagcttcgtgccaagctgaaccgggaagaagcacacaccactgacctcaaagaggagatagacaagatgaggaaaatgattgagcaactgaaaaggggaagtgacagcaaaccaagcctctctcttccacggaagacaaaagataggcgtttggtttccatatctgtgggaacagaaggaactgtgacaaggtctgttgcatgccagacagacctagtgacagaaaatgctgaccacatgaaaaagttgcctttaaccatgcctgtaaaaccttccacagggagtcccctagtttctgcaaatgcaaaagggagcgtgtgcaccagtgccaccatggccagaccaggtattgacaggcaggcttcctatggtgacttgattggcgcttctgtacccgctttcccacctccaagtgcaaacaaaattgaggaaaatggaccaagcactggctcaacaccagatccaaccagtagcacacccccacttcccagtaacgctgcccctcccaccgctcaaacaccaggcatagctcctcagaactcgcaagctccacctatgcacagtttacattcaccatgtgccaacacctctttgcatccaggtctaaacccacgaatccaagcagctagatttagatttcagggcaatgctaacgacccagaccaaaatggaaatactacccaaagtcctccgtcaagagatgtctcgcctacaagtcgtgacaacctagtggccaaacaactagctcggaatactgtgacccaagcactgtcaagatttacaagccctcaagcaggtgctccctcaaggcctggagtgcccccaacaggggatgttggcacccaccctccagttggtcggaccagtttaaagactcatggtgtagcacgagttgacagaggaaatcctcctcctatccctccaaaaaagccagggctctcccaaactccttctccaccacacccccaactcaaggttattatagacagcagcagggcctcgaacacaggggccaaagttgataacaaaactgtggcttcgactccttccagtttgccacaagggaacagggtgatcaatgaggagaaccttcctaagtcatcctcccctcagctgccaccaaaaccatccatagatttaactgtggcacctgcaggctgtgccgtttcagccctggccacgtctcaggtgggtgcctggcctgctgcaacccccggactgaaccaacctgcatgttcagacagttcccttgtcattcctaccaccattgccttttgctcttccataaaccccgttagtgcctcatcctgtagaccaggtgcctcagacagcctcctggtaacagcatcaggctggtcaccctccctaacccctttgctaatgagtggtggtcctgcccccctggctggcaggcccacccttcttcagcaagctgctgcccagggaaatgtcactttattatcaatgctgcttaatgaagaaggactggacattaattactcctgtgaagatggccattctgccttgtattctgctgctaagaatggacatacagactgtgtgagattgctgctgagtgcagaagcccaagtcaatgctgctgataaaaatggcttcacacccttgtgtgctgcagctgctcagggacatttcgagtgtgtagaattattaatttcatatgatgctaacattaatcatgctgctgatggaggacagacacctctatacctggcctgtaaaaatggaaataaagaatgtattaaactcttgttggaagctggaaccaatcgaagtgtaaaaaccacagatggctggacaccagttcacgcagctgtggacactggtaatgtggacagcctcaagcttcttatgtaccatagaataccagctcatggaaattctttcaatgaggaggagtccgagtcaagtgtctttgacttggatggaggagaagagagtcctgaaggcatatccaagcctgttgttcctgcagacctcattaaccacgccaacagagaaggctggactgctgcccacattgctgcttccaaaggttttaagaactgcctagaaatcttgtgtaggcacggagggcttgagccagaaaggagagacaagtgcaatcggactgtgcatgatgttgccactgatgactgcaagcatttgctggagaatctgaatgctcttaaaatacccttaaggatttcagtgggtgagattgaaccaagcaactatggttctgatgacttggaatgtgaaaacacaatatgtgctttaaatatccgcaaacagacatcatgggatgatttttcaaaagcagtgagtcaagctctgacaaatcatttccaggcaatctcttctgatggatggtggagtctggaagacgtgacttgcaataacaccactgattccaacatcggcctcagtgcaagaagcatacgatccatcacgctaggaaatgtgccgtggtcagtgggtcagagcttcgcgcagtccccgtgggactttatgaggaagaataaggcagagcacatcactgtgcttttgtcaggtcctcaagaaggctgtctcagtagtgtgacttatgcctccatgatccctctccagatgatgcagaactacctcaggctggttgagcaatatcataatgtcattttccacggcccagaaggaagcttgcaagactacatagtacatcagcttgcactctgcctgaagcacagacaaatggctgcaggattctcctgtgaaatagtgagagctgaagtagatgctggtttttccaaggaacagctactagacctgttcattagtagcgcttgtctgatcccagtgaaacaatctcccagtaagaagaaaatcatcatcattttagaaaatttagaaaaatcttcactgtcggagttattgagggactttttggcacctcttgaaaatcgcagcactgaaagcccctgcactttccaaaaaggaaatggactgtccgaatgttattactttcatgagaactgctttctgatgggaaccatcgccaaggcctgtctccagggctccgacttgctggtgcagcagcatttccgctgggtgcagctgcggtgggatggcgagcccatgcaaggactgctgcagaggttcttacgaaggaaagttgtgaataagttcaaaggtcaggcgccctccccctgcgatcctgtgtgcaagattgtcgactgggctctgtccgtctggcgtcagcttaactcctgcctggcccgcttgggcacacctgaagcacttcttggaccaaaatatttcctgtcttgtcctgtagttcctgggcatgcccaagtgacagtgaagtggatgtctaagctgtggaatggcgtcatcgcacccagagttcaagaagcaatattgtcaagagcctctgtgaaaagacaacctggctttgggcagacaactgctaaaagacaccctagccaaggacagcaggctgtggtcaaagctgctctcagcatcttgctaaataaagctgtactgcatggctgtcccctccccagagcagagctagaccagcatacagctgatttcaaaggaggaagtttccctttatccatagtttccagttataacacttgtaacaagaagaaaggagagagtggtgcctggagaaaggtgaacaccagtcctcgcaggaagtctggccgcttctctttacccacctggaataagccagacctaagcactgaaggtatgaaaaataagactatatcacagctgaattgtaacaggaatgcttctctgtcaaaacaaaagtctttagagaatgatctatcactgacgttgaatttggatcagagactctctctgggttcagatgacgaagcagatcttgtcaaggaacttcagagcatgtgctccagcaagtctgagtctgatatcagcaagattgctgattccagggatgatttaaggatgtttgatagttctggaaacaaccctgtactttcagcaactattaataatctgagaatgccagtgtcacaaaaggaggtcagtcctctcagcagccatcaaactactgaatgcagcaacagtaaatcaaagactgagttgggtgtttcaagagttaaatcttttcttcctgttcctagaagtaaagtcacccagtgttcccagaacaccaaaagaagcagcagcagcagtaatacaaggcaaatagaaatcaacaacaactcaaaagaagtgaattggaacttacacaaaaatgaacacctagaaaaacctaacaaataggcctgcctacaatattctcattattaacttcctctatttcacacagaaaccaaggacaacaagatacaaatacctttaaattgataaaatgttttcactgtaatataaattatgagtgcgggaccactattcaatttttttttgtaaagaatgtatttataaccaacattttgttgcttttttttttaattctgtaggattgaacttcaataccaggaagttatgccaacttttcaagtagttttataatagaaaaattgtaatagttttaatcaagatgttcaggggtattaaaacagaactgtgtactgtatatctgtatatatgtatatatgtatgtatatttaaggaagtccagaaatcatactgcatacatgctacaaaaaagtagcaaaaaagtacaaagttggcttagataacttgtaccattttaaatggagatcataattttatgttcacttgatggggaatgactagaatggggcaataacaaatcatttctaaacagttattttccattaaaagccatattaagtattttgcttgttaaattctagttttatgttttaaatctcttagtggttacattgccatttggtagcatcatgtatatatttatgcttataagtttgcattatgactcctgtaaaatatgaaattataatgcaataaaagtgttatctttcttacaaaagttttgtacctaagtggatatagataactgcataaatgaataaattcagaattaactccttcaatatttctagtagcacaactgataatattgatattttctacaaatgttacttctaaaattacagacaaaattacttacacaattcagttaagatgctttgacactgaataaaatattgatttcatgaa

SEQ ID NO: 18451 - DNA, 5455 bp, Homo sapiens
ctcctactcaccctcccacaggtcactcttgtgccatgcgcacatggcttactgcaggagcgctacgggaaggtgtgtggtgggaatcccatgcagagagaacagcaaggacaaagaccccgaggcaggaccatgtttaggaaactccgggcatccagcgaagctaagggagtaagcaggatcaaagtaggagacaagctggaaatggagaagcttcagctacaagcccttgagcaagagcacaagaagctggctgcccgccttgaggaagagcgtggcaagaacaagcaggtggtcctgatgctggtcaaagagtgcaagcagctctcaggcaaagtcatagaggaggcccagaagctcgaagacgtaatggccaaactggaagaggaaaagaaaaagacgaatgaattagaagaggaactctccgctgagaaacgaagaagcacagaaatggaagctcagatggaaaaacaactctctgagtttgacactgagcgggaacagcttcgtgccaagctgaaccgggaagaagcacacaccactgacctcaaagaggagatagacaagatgaggaaaatgattgagcaactgaaaaggggaagtgacagcaaaccaagcctctctcttccacggaagacaaaagataggcgtttggtttccatatctgtgggaacagaaggaactgtgacaaggtctgttgcatgccagacagacctagtgacagaaaatgctgaccacatgaaaaagttgcctttaaccatgcctgtaaaaccttccacagggagtcccctagtttctgcaaatgcaaaagggagcgtgtgcaccagtgccaccatggccagaccaggtattgacaggcaggcttcctatggtgacttgattggcgcttctgtacccgctttcccacctccaagtgcaaacaaaattgaggaaaatggaccaagcactggctcaacaccagatccaaccagtagcacacccccacttcccagtaacgctgcccctcccaccgctcaaacaccaggcatagctcctcagaactcgcaagctccacctatgcacagtttacattcaccatgtgccaacacctctttgcatccaggtctaaacccacgaatccaagcagctagatttagatttcagggcaatgctaacgacccagaccaaaatggaaatactacccaaagtcctccgtcaagagatgtctcgcctacaagtcgtgacaacctagtggccaaacaactagctcggaatactgtgacccaagcactgtcaagatttacaagccctcaagcaggtgctccctcaaggcctggagtgcccccaacaggggatgttggcacccaccctccagttggtcggaccagtttaaagactcatggtgtagcacgagttgacagaggaaatcctcctcctatccctccaaaaaagccagggctctcccaaactccttctccaccacacccccaactcaaggttattatagacagcagcagggcctcgaacacaggggccaaagttgataacaaaactgtggcttcgactccttccagtttgccacaagggaacagggtgatcaatgaggagaaccttcctaagtcatcctcccctcagctgccaccaaaaccatccatagatttaactgtggcacctgcaggctgtgccgtttcagccctggccacgtctcaggtgggtgcctggcctgctgcaacccccggactgaaccaacctgcatgttcagacagttcccttgtcattcctaccaccattgccttttgctcttccataaaccccgttagtgcctcatcctgtagaccaggtgcctcagacagcctcctggtaacagcatcaggctggtcaccctccctaacccctttgctaatgagtggtggtcctgcccccctggctggcaggcccacccttcttcagcaagctgctgcccagggaaatgtcactttattatcaatgctgcttaatgaagaaggactggacattaattactcctgtgaagatggccattctgccttgtattctgctgctaagaatggacatacagactgtgtgagattgctgctgagtgcagaagcccaagtcaatgctgctgataaaaatggcttcacacccttgtgtgctgcagctgctcagggacatttcgagtgtgtagaattattaatttcatatgatgctaacattaatcatgctgctgatggaggacagacacctctatacctggcctgtaaaaatggaaataaagaatgtattaaactcttgttggaagctggaaccaatcgaagtgtaaaaaccacagatggctggacaccagttcacgcagctgtggacactggtaatgtggacagcctcaagcttcttatgtaccatagaataccagctcatggaaattctttcaatgaggaggagtccgagtcaagtgtctttgacttggatggaggagaagagagtcctgaaggcatatccaagcctgttgttcctgcagacctcattaaccacgccaacagagaaggctggactgctgcccacattgctgcttccaaaggttttaagaactgcctagaaatcttgtgtaggcacggagggcttgagccagaaaggagagacaagtgcaatcggactgtgcatgatgttgccactgatgactgcaagcatttgctggagaatctgaatgctcttaaaatacccttaaggatttcagtgggtgagattgaaccaagcaactatggttctgatgacttggaatgtgaaaacacaatatgtgctttaaatatccgcaaacagacatcatgggatgatttttcaaaagcagtgagtcaagctctgacaaatcatttccaggcaatctcttctgatggatggtggagtctggaagacgtgacttgcaataacaccactgattccaacatcggcctcagtgcaagaagcatacgatccatcacgctaggaaatgtgccgtggtcagtgggtcagagcttcgcgcagtccccgtgggactttatgaggaagaataaggcagagcacatcactgtgcttttgtcaggtcctcaagaaggctgtctcagtagtgtgacttatgcctccatgatccctctccagatgatgcagaactacctcaggctggttgagcaatatcataatgtcattttccacggcccagaaggaagcttgcaagactacatagtacatcagcttgcactctgcctgaagcacagacaaatggctgcaggattctcctgtgaaatagtgagagctgaagtagatgctggtttttccaaggaacagctactagacctgttcattagtagcgcttgtctgatcccagtgaaacaatctcccagtaagaagaaaatcatcatcattttagaaaatttagaaaaatcttcactgtcggagttattgagggactttttggcacctcttgaaaatcgcagcactgaaagcccctgcactttccaaaaaggaaatggactgtccgaatgttattactttcatgagaactgctttctgatgggaaccatcgccaaggcctgtctccagggctccgacttgctggtgcagcagcatttccgctgggtgcagctgcggtgggatggcgagcccatgcaaggactgctgcagaggttcttacgaaggaaagttgtgaataagttcaaaggtcaggcgccctccccctgcgatcctgtgtgcaagattgtcgactgggctctgtccgtctggcgtcagcttaactcctgcctggcccgcttgggcacacctgaagcacttcttggaccaaaatatttcctgtcttgtcctgtagttcctgggcatgcccaagtgacagtgaaagctagaccagcatacagctgatttcaaaggaggaagtttccctttatccatagtttccagttataacacttgtaacaagaagaaaggagagagtggtgcctggagaaaggtgaacaccagtcctcgcaggaagtctggccgcttctctttacccacctggaataagccagacctaagcactgaaggtatgaaaaataagactatatcacagctgaattgtaacaggaatgcttctctgtcaaaacaaaagtctttagagaatgatctatcactgacgttgaatttggatcagagactctctctgggttcagatgacgaagcagatcttgtcaaggaacttcagagcatgtgctccagcaagtctgagtctgatatcagcaagattgctgattccagggatgatttaaggatgtttgatagttctggaaacaaccctgtactttcagcaactattaataatctgagaatgccagtgtcacaaaaggaggtcagtcctctcagcagccatcaaactactgaatgcagcaacagtaaatcaaagactgagttgggtgtttcaagagttaaatcttttcttcctgttcctagaagtaaagtcacccagtgttcccagaacaccaaaagaagcagcagcagcagtaatacaaggcaaatagaaatcaacaacaactcaaaagaagtgaattggaacttacacaaaaatgaacacctagaaaaacctaacaaataggcctgcctacaatattctcattattaacttcctctatttcacacagaaaccaaggacaacaagatacaaatacctttaaattgataaaatgttttcactgtaatataaattatgagtgcgggaccactattcaatttttttttgtaaagaatgtatttataaccaacattttgttgcttttttttttaattctgtaggattgaacttcaataccaggaagttatgccaacttttcaagtagttttataatagaaaaattgtaatagttttaatcaagatgttcaggggtattaaaacagaactgtgtactgtatatctgtatatatgtatatatgtatgtatatttaaggaagtccagaaatcatactgcatacatgctacaaaaaagtagcaaaaaagtacaaagttggcttagataacttgtaccattttaaatggagatcataattttatgttcacttgatggggaatgactagaatggggcaataacaaatcatttctaaacagttattttccattaaaagccatattaagtattttgcttgttaaattctagttttatgttttaaatctcttagtggttacattgccatttggtagcatcatgtatatatttatgcttataagtttgcattatgactcctgtaaaatatgaaattataatgcaataaaagtgttatctttcttacaaaagttttgtacctaagtggatatagataactgcataaatgaataaattcagaattaactccttcaatatttctagtagcacaactgataatattgatattttctacaaatgttacttctaaaattacagacaaaattacttacacaattcagttaagatgctttgacactgaataaaatattgatttcatgaa

SEQ ID NO: 18452 - DNA, 1208 bp, Homo sapiens
ggaggaagttaaggctgattgcagaagttggtaacaacacctaatatgatgagctgttttgtttccctttgtttcaggaggtcagtcctctcagcagccatcaaactactgaatgcagcaacagtaaatcaaagactgagttgggtgtttcaagagttaaatcttttcttcctgttcctagaagtaaagtcacccagtgttcccagaacaccaaaagaagcagcagcagcagtaatacaaggcaaatagaaatcaacaacaactcaaaagaagtgaattggaacttacacaaaaatgaacacctagaaaaacctaacaaataggcctgcctacaatattctcattattaacttcctctatttcacacagaaaccaaggacaacaagatacaaatacctttaaattgataaaatgttttcactgtaatataaattatgagtgcgggaccactattcaatttttttttgtaaagaatgtatttataaccaacattttgttgcttttttttttaattctgtaggattgaacttcaataccaggaagttatgccaacttttcaagtagttttataatagaaaaattgtaatagttttaatcaagatgttcaggggtattaaaacagaactgtgtactgtatatctgtatatatgtatatatgtatgtatatttaaggaagtccagaaatcatactgcatacatgctacaaaaaagtagcaaaaaagtacaaagttggcttagataacttgtaccattttaaatggagatcataattttatgttcacttgatggggaatgactagaatggggcaataacaaatcatttctaaacagttattttccattaaaagccatattaagtattttgcttgttaaattctagttttatgttttaaatctcttagtggttacattgccatttggtagcatcatgtatatatttatgcttataagtttgcattatgactcctgtaaaatatgaaattataatgcaataaaagtgttatctttcttacaaaagttttgtacctaagtggatatagataactgcataaatgaataaattcagaattaactccttcaatatttctagtagcacaactgataatattgatattttctacaaatgttacttctaaaattacagacaaaattacttacacaattcagttaagatgctttgacactgaataaaatattgatttcatgaa

SEQ ID NO: 18453 - DNA, 3339 bp, Homo sapiens
ctcctactcaccctcccacaggtcactcttgtgccatgcgcacatggcttactgcaggagcgctacgggaaggtgtgtggtgggaatcccatgcagagagaacagcaaggacaaagaccccgaggcaggaccatgtttaggaaactccgggcatccagcgaagctaagggagtaagcaggatcaaagtaggagacaagctggaaatggagaagcttcagctacaagcccttgagcaagagcacaagaagctggctgcccgccttgaggaagagcgtggcaagaacaagcaggtggtcctgatgctggtcaaagagtgcaagcagctctcaggcaaagtcatagaggaggcccagaagctcgaagacgtaatggccaaactggaagaggaaaagaaaaagacgaatgaattagaagaggaactctccgctgagaaacgaagaagcacagaaatggaagctcagatggaaaaacaactctctgagtttgacactgagcgggaacagcttcgtgccaagctgaaccgggaagaagcacacaccactgacctcaaagaggagatagacaagatgaggaaaatgattgagcaactgaaaaggggaagtgacagcaaaccaagcctctctcttccacggaagacaaaagataggcgtttggtttccatatctgtgggaacagaaggaactgtgacaaggtctgttgcatgccagacagacctagtgacagaaaatgctgaccacatgaaaaagttgcctttaaccatgcctgtaaaaccttccacagggagtcccctagtttctgcaaatgcaaaagggagcgtgtgcaccagtgccaccatggccagaccaggtattgacaggcaggcttcctatggtgacttgattggcgcttctgtacccgctttcccacctccaagtgcaaacaaaattgaggaaaatggaccaagcactggctcaacaccagatccaaccagtagcacacccccacttcccagtaacgctgcccctcccaccgctcaaacaccaggcatagctcctcagaactcgcaagctccacctatgcacagtttacattcaccatgtgccaacacctctttgcatccaggtctaaacccacgaatccaagcagctagatttagatttcagggcaatgctaacgacccagaccaaaatggaaatactacccaaagtcctccgtcaagagatgtctcgcctacaagtcgtgacaacctagtggccaaacaactagctcggaatactgtgacccaagcactgtcaagatttacaagccctcaagcaggtgctccctcaaggcctggagtgcccccaacaggggatgttggcacccaccctccagttggtcggaccagtttaaagactcatggtgtagcacgagttgacagaggaaatcctcctcctatccctccaaaaaagccagggctctcccaaactccttctccaccacacccccaactcaaggttattatagacagcagcagggcctcgaacacaggggccaaagttgataacaaaactgtggcttcgactccttccagtttgccacaagggaacagggtgatcaatgaggagaaccttcctaagtcatcctcccctcagctgccaccaaaaccatccatagatttaactgtggcacctgcaggctgtgccgtttcagccctggccacgtctcaggtgggtgcctggcctgctgcaacccccggactgaaccaacctgcatgttcagacagttcccttgtcattcctaccaccattgccttttgctcttccataaaccccgttagtgcctcatcctgtagaccaggtgcctcagacagcctcctggtaacagcatcaggctggtcaccctccctaacccctttgctaatgagtggtggtcctgcccccctggctggcaggcccacccttcttcagcaagctgctgcccagggaaatgtcactttattatcaatgctgcttaatgaagaaggactggacattaattactcctgtgaagatggccattctgccttgtattctgctgctaagaatggacatacagactgtgtgagattgctgctgagtgcagaagcccaagtcaatgctgctgataaaaatggcttcacacccttgtgtgctgcagctgctcagggacatttcgagtgtgtagaattattaatttcatatgatgctaacattaatcatgctgctgatggaggacagacacctctatacctggcctgtaaaaatggaaataaagaatgtattaaactcttgttggaagctggaaccaatcgaagtgtaaaaaccacagatggctggacaccagttcacgcagctgtggacactggtaatgtggacagcctcaagcttcttatgtaccatagaataccagctcatggaaattctttcaatgaggaggagtccgagtcaagtgtctttgacttggatggaggagaagagagtcctgaaggcatatccaagcctgttgttcctgcagacctcattaaccacgccaacagagaaggctggactgctgcccacattgctgcttccaaaggttttaagaactgcctagaaatcttgtgtaggcacggagggcttgagccagaaaggagagacaagtgcaatcggactgtgcatgatgttgccactgatgactgcaagcatttgctggagaatctgaatgctcttaaaatacccttaaggatttcagtgggtgagattgaaccaagcaactatggttctgatgacttggaatgtgaaaacacaatatgtgctttaaatatccgcaaacagacatcatgggatgatttttcaaaagcagtgagtcaagctctgacaaatcatttccaggcaatctcttctgatggatggtggagtctggaagacgtgacttgcaataacaccactgattccaacatcggcctcagtgcaagaagcatacgatccatcacgctaggaaatgtgccgtggtcagtgggtcagagcttcgcgcagtccccgtgggactttatgaggaagaataaggcagagcacatcactgtgcttttgtcaggtcctcaagaaggctgtctcagtagtgtgacttatgcctccatgatccctctccagatgatgcagaactacctcaggctgatggggaaactgaacagagagaggtaaaatgctcaaagtcatgcatctagcaagtgatgaagccaggattgtgcaagtctctgatgtgtatgagatcaatctgaaactaatactactggtataaaacattaaacataattttgcttgctgccttaatttcgatgacctttttaaataaatgagttggaactatgacccttgacaaaa

SEQ ID NO: 18454 - DNA, 181 bp, Homo sapiens
tccataaaccccgttagtgcctcatcctgtagaccaggtgcctcagacagcctcctggtaacagcatcaggtaaagggattgaaatgttatacgctttttaaagaatatggcctctcttctcacttgccttgattttcttcacattgccttgaaactttttttttaaatttgatgcttccc

SEQ ID NO: 18455 - DNA, 512 bp, Homo sapiens
caatttgttggccaccagaaaaccgctttttaaaaaaacacttggtgattctttcaagtgccgaatgttattagaatcaacattgcatccttcttgcttatacgttaagttacataaaaggaaaacaaaattatgtggtgtgaaacagccaaggcatttattcttcagaggcaggataatatttcaggatacaaaagcccaaattacccgctacggaacaaagatgaatacagtaaaagagtcgaacactcatttccaaggccctaacccttatcctttaaaaagaaatcctctgaactgggtcggtctgttgtatggctgtctaatttgttgcaaattctgcagtcgtactataattcaggcctgttgggtagacaaaatcaaaaggcatttaacagcagcagtacttggaagctttgaaaacatgtgctaaacttgaatggagcaacactcctttctgaaaagccagaagaagggggttttaaagcaggatctctcaatgttcagtgttt

SEQ ID NO: 18456 - DNA, 282 bp, Homo sapiens
aattgactaagaaagtatgtatttgtgtgtgtgaggggtggggttaagagccccacagtagaagtcaacaggtaatatctaaaactgaacaattgggaaatagcaatgcaaagttattatttataaacatggggataaataccagaagcaataaataaaagagttgaaaatggtttgtttcgagggatgaggatctcgagggtgaaaggtcaaggaatggctgtttttcattttattgtacattacaaaatgtgtccattttgcttttatacaaatattagg

SEQ ID NO: 18457 - DNA, 419 bp, Homo sapiens
gtctctgacccagaaatttcactcttaggggtgtgtgtatgtgtgtgtacctgtctgtgaatcttgaatagaataaatcataataagtaaaccaaaagctgtagaatgagtaaataacttaccacatactcattcaatggaattgtatccagtagtgagaataaatgaactgcaacttcttgcttgctataacaaggatgagtcacacaaacatgatattgaatgaataaaaccagatgctcccttccccaaaataaggcaaacttgatctgtggcattagaagtcaatatactggtggccagacgtggtggctcatgcctataatcccagcactttgggaggccaaggcaggcagatcacttgaggtcaggagttcaagagcagcctggccaacacggtaaaaccccatctttactaa

SEQ ID NO: 18458 - DNA, 419 bp, Homo sapiens
tttaggaaaacaggaaatgtgaatacggactacacttctgaaacagaatgattcatcaccactttttaagtaagagtgtgatccatgaaccaccagctttagactcactggaggaaaaaaaaaaaaagagtcctgaggttcagtctagactcaattcctgggaggcacctagacactcttatttcttatcaggtcgtccagataacagcacgtttgagaaccccactaaaggctttctttgaggtctatgacacactacatatcctacagcaaatgacaacaggcaactgtcaccactgttctttgactacttggaaaagtaacggaaaactttttttttttttttttttttttgagacggagtctcgctctgtcccccaggctggagtgcagtggcacgatttccgctcactgcaagc

SEQ ID NO: 18459 - DNA, 383 bp, Homo sapiens
ctaagagacagagtcttgctgtgttgcccagactggagtccagtggcatgatcatagctcactgtagccttccagtgagcaaggaaggaaacaatgaactttccatgggaagagagttgaaataaaggaaggtcatgagaaactcaggctgtgatttcttgagaggaagtcaatgaaatgaactacaggcatgaacaatgaagaaaagttaaaaggataatagagacaacagcttggccgggcatggtggctcacacctgtaatcctagctctcagggaggcagaggcgggaggatagcttgagcccaggagttcaagacctgcctgggcaatatagcgagaccccgttctccacgaaaaggaagaaaaaaaaagacaaaaaa

SEQ ID NO: 18460 - DNA, 399 bp, Homo sapiens
ggcatcagtgctaccattgagatgtccccacaaaagagtgtgtgacagccagatgtgcagcttaatggagactgaaccaggattgtgggtggaacattggcacatgctgcttatggcttgaatagcagctcttgaggaatctatatttctctacctcatgcagaatcttagagctctggctttgtggctccatggctgggggagggagtggagacggaggaacttgtcactgctccatgccccattgttgaaatggaaaatgtggaaatgttaagccgtttctagaggattgtggaaggtaagaattgcttccaaatataaaaatacaaatacaaaagatcacctgatcgtcacagttgggggctttcttgaataaaaatggttatatctctatttctc

SEQ ID NO: 18461 - DNA, 1242 bp, Homo sapiens
ttatcagtaagttccccttgtcccagcctccgctttcacttcccgcgttccctccaccccaaaaaccgccccaacatgtccagagaggggcatctacccagccgcccagccaggggcgaccactttgtgagccccggggagcgggacccgtaccaggcgcgcccagcgggggatgcggtgaccgaggggccgggagcgccgggcaggtaacgtatcctggacctagagtcgggggactttgtttggggcgggaggagcggaacaggggtgggtgtgaacgccggacggcccttccgggactcctgtcccccctccttcgccccactcgcctgcgcgctggaagccaatctgggtgtgtagcgcgaagagcgaaagagaaacttctgcgtgactgactagatgaggctcctcccgagaagccgagataatagaggccccctctcccgccgcccgcctttttctcctcccccggccgctcgctcctgtcgccccacccctcgaaggctgcggaccagccccccacacttccccctacacctctggcgggttcgcgccgtggacgcccccgccctgcgggaggaggggctggcgcggattttagggacttcctgggatgcggagatcggctctgaaccatcccctttctgctgcccggagctggggaagctcgctgtggagcgtctcgcacgtggcaggcaggcagagaacttgctgcaccttctaggaaattgcaatcgatttgtaatgcactttcgctaattgggagttcaaaattaaactttaataaagcattcgtgtcgtctcgtctaattgtgaaagcttccatccgtcctggtagatagactctaagtctcaagttaatggcgctaagctagattttccccccaagtacaattccgtcagccgtcgtcggcgcagctggatttccgtaaggtacagatgttgctaatgacagcttaagcacggatgggcagatagcatacggaatgcaacatgttgccatatggttcctttagcctttcacctccagggatatcaatcacatatattctgggaggaacttaatgactctctgaacagcaaaatgaattacctggtacaatttatatcccttgacctgatacgttataacaacaggaagatagcatctcgcaatttctgtggtataaattgaactacagagctacatttaaaattctacatctatttgtagtttaaggggccctgtcatattctggctgt

SEQ ID NO: 18462 - DNA, 437 bp, Homo sapiens
gatttatatggattacctcattcaagctctgcatagcaactctgttataatcctcatttcacagataagcagacaggctcagagtggtaaagcaatttatcctaggtcacacagccaggaagtggtaaagctggattctgacttcagggcttacaggctccagagtggagtccttaacccttcgcctgaaattggaagctactaatgttggctgcagggagtttaactggcaggaccctctcagcccttggggacctccctatcaccccgtgccccgatctgggctccaaactgggagtggactaggctcctacccacgtctctgtgatcagcccatcttcagatcaggctgtccctctcctagcccgtcgttggagccccagccgggaccatgctgtatgcagatcaccccattaaaatttcatgtggattcaaaa

SEQ ID NO: 18463 - DNA, 629 bp, Homo sapiens
acagagcacctcaacttcacccctggaacctggcacaattcagcttagtgcccacaggggcctctaccatgacttctgggaggagcaagtagagaccgggcagacacaccatccagatttggtggcggcattccatccaggttttcattcctccccagacttgatggaggcttggctgcccaccctgctgctacttcgtgactataagattcctacattgattactgtttacagccatcaggagttggtatcctctttgcagattctggtggaactggatacacacatcactgcctttgggtctaatcctttcatgtccctcaaacctgaacaggtctattccagtcccaacaagcagccagtatactgcagtgcatactatatcatgtttctgggaagctcctgtcagctggataataggcaattagaagagaaagtggacggcgggatttaaatagatcataactggacatctggaaaacggggagtttgtgatgaaattaccctgctaatgccaggttcttgcaaactttgaaaaacattatattctaaacctcatttactgtttgggtaaaaattctaagctgaatgagagtttctgtataacataactggtttctttctttttt

SEQ ID NO: 18464 - DNA, 954 bp, Homo sapiens
acagagcacctcaacttcacccctggaacctggcacaattcagcttagtgcccacaggggcctctaccatgacttctgggaggagcaagtagagaccgggcagacacaccatccagatttggtggcggcattccatccaggttttcattcctccccagacttgatggaggcttggctgcccaccctgctgctacttcgtgactataagattcctacattgattactgtttacaggttttgacctcatcctatttgtgatacttccctgactttacatctctctttatatagatgagctcatttttgcccccctcttgctcatctaccttctggtgaggatgttcttttccgcatatggcttttttatccccttggaacagtcctttgctagttaatggaatatttaatgagacatttgggagggaaagatagcccttgcctagtccagccttaggcaatttgggggatgggtgattacagaaatgtcaggctcttgggcagtttttcctttatctctgtcacaatcagtagagtaatttttcttctctctcttctacagccatcaggagttggtatcctctttgcagattctggtggaactggatacacacatcactgcctttgggtctaatcctttcatgtccctcaaacctgaacaggtctattccagtcccaacaagcagccagtatactgcagtgcatactatatcatgtttctgggaagctcctgtcagctggataataggcaattagaagagaaagtggacggcgggatttaaatagatcataactggacatctggaaaacggggagtttgtgatgaaattaccctgctaatgccaggttcttgcaaactttgaaaaacattatattctaaacctcatttactgtttgggtaaaaattctaagctgaatgagagtttctgtataacataactggtttctttctttttt

SEQ ID NO: 18465 - DNA, 347 bp, Homo sapiens
tgttcaagtacacatgaccaaggccaaaggcaacctttgacatgcatcatagaaaaggctgcattccagggaagaacatgaacttcatgtctttcgaattccctggtctacgtcttcaattgcatttcacaggttataataatgataataattaccagcacgtgtgtaatgctttagagctcacaaagcactttcccactcattgtctagtctatggggaatccaccattcccgtctcagagtgaggaagcgatgtccggtgggcccaggtgacctgcccaagccctcggccagtatgggcagaacccagctctgagctgcagcactaccagcttgctcctgccccg

SEQ ID NO: 18466 - DNA, 317 bp, Homo sapiens
aactttttaacatggaacttgagggtccttaaaatctcaaatcaaactagtttaacaacacttgacaatgtccattatgtactccgtgctctttttctattgagtccactatgggacaaccacctgatgtgttttcctgtaccacatgttttttgttcaagctaaactccaaaactgacatgtgttttaccattttgttcattggttacagaactgatgttcccattactgtgcttaacatgctgattcagttcaacactttactgtgctgaattaagtttagcccttaatatattcctcaaagagcacttatgact

SEQ ID NO: 18467 - DNA, 483 bp, Homo sapiens
  misc_feature (6)..(6): n is a, c, g, or t
  misc_feature (32)..(32): n is a, c, g, or t
  misc_feature (79)..(79): n is a, c, g, or t
  misc_feature (86)..(86): n is a, c, g, or t
  misc_feature (116)..(116): n is a, c, g, or t
acccanaaaccccttgggccccttattttaanggcccccccccttggaagaaaatggcccccaaaggaggaccccttgnccccccnatttaaacccccgatttttttttgggttancccctggggaagtaagagttttgaatgaagggtaaaatgtgtccttaaacatgacagacttgatgctggggaagtaactttcacagaaacaattgaagatagtcaataaaattgcatttatatcttggcaaaaaggtaagaaattctcaggtcaggggatgaacaggtagggaattcaaaaataagtacttgataattattgaacattgggttttatatcttcataggataaaagaaaagatcaaggcagcccaagatagtcaagtgggaaaccaaatccctgtcactcttttataaaacaaatccacaaagcccaaaattcattctttgaaaacaccaagaaagtcagctggtctttggtgagact

SEQ ID NO: 18468 - DNA, 408 bp, Homo sapiens
tgcagtcataattttaagttagaagcacccataaatttagtatatagacgacagtgaactttcacttatagcatcaacattgttaaggtcatgatgtacagagcagtcactttcaaattcattaaattgataaaacatgacaacgtcttcagtttaaatactgattttaaaatgcccataaaaaaagtgcaaacaacgtaatctagcagcctatctgttgcatttttaggaatgaccaattcatggtctttatcttggccatgtattcaaagttgggcttttctttctttttttattttaaagacaaatagcagatgtagccattatactgtgtataaatgtcataaaattgtcgttcacagtctaccatacaagtgtatgctgcaaataaaatgaattttactttaa

SEQ ID NO: 18469 - DNA, 167 bp, Homo sapiens
tatgtacagctatgttaaacagtctgaacatgagactttttctttcaagttgaagattattgtcatcgttttaccactaagttggttgagacacttacttgtaatactttaatttttttaaagtgtttttagaaacaagttgtttgaaaaccaattagaaattagaa

SEQ ID NO: 18470 - DNA, 234 bp, Homo sapiens
gagacagagtttctctcccatcacccaggctggagtgcagtggtgtgctctcagctcactacaacctccacctcctgggctcaagcaatcctcctacctgagcctcccaagtagctgagactacagatgtgtaccaccacacccagttaattttcatattattatacttaatttaaaagggaacagctggcctggcacagtggctcacagccgtaatcccagcactttgggagg

SEQ ID NO: 18471 - DNA, 343 bp, Homo sapiens
tcagctgccgccaaggtgctcggtccttccgaggaagctaaggctgcgttggggtgaggccctcacttcatccggcgactagcaccgcgtccggcagcgccagccctacactcgcccgcgccatggcctctgtctccgagctcgcctgcatctactcggccctcattctgcacgacgatgaggtgacagtcacggaggataagatcaatgccctccagctgaggagaagaaagtggaagcaaagaaagaagaatccgaggagtctgatgatgacatgggctttggtctttttgactaaacctcttttataacatgttcaataaaaagctgaactttactgcta

SEQ ID NO: 18472 - DNA, 375 bp, Homo sapiens
tcagctgccgccaaggtgctcggtccttccgaggaagctaaggctgcgttggggtgaggccctcacttcatccggtggcgcgtgctctagtcccagctactcgggaggctgaggcggcgactagcaccgcgtccggcagcgccagccctacactcgcccgcgccatggcctctgtctccgagctcgcctgcatctactcggccctcattctgcacgacgatgaggtgacagtcacggaggataagatcaatgcccctcattaaagcagccggtgtaaatgttgaacctttttggcctggcttgtttgcaaaggccctggccaacgtcaacattgggagcctcatctgcaatgtaggggctggtggacctgctcca

SEQ ID NO: 18473 - DNA, 418 bp, Homo sapiens
cggtttagagccaaagtgtcctgcctgcattccagctgtttccatccatgtccatgtcaactggcatctggaactactcgtagcagcatccactcaatataccagcctggaagacaacggagctgtcattctgttaaaaaattaagagaagtacgcagaacctgcctttttctaaatgagaagctttggaagcgactggacacttttggccattgcagtccacaggtagcctctctgggggcaatagacagactttttcacttcttgtatttactccccaaatgcttgattacatagcttgtcacctgtcaggggggccagctagctagttgctgggttgagtggttaatccaatgatttgtatagctggctcactaaggaaatcataggtactcaatatatagctactgaacaattc

SEQ ID NO: 18474 - DNA, 581 bp, Homo sapiens
ctaatgagaaatccgaacttcagagaaactaagttagtagtctgaggtcacacagcaacaaatgggagagctggactttaaaacacatttctgatatcagagccactgcacaggtttctcaaagtggccttgaaatacttgcattagaattacctggtgcatttgaaaatcaaaatgaaagtttctgggtgtcacctcctcactaaatcagaatctcttagggtagggaatacacagtattgaaaactgttggtcacactttgatctcttcagccccatctctactaaaaatacaaaaattagccgggcgtgatggctggtgcctgtaatcccagctacttgggaggctgaggcaggaaaatcacttgaacccaggaggcagaggttgcagtgagccgagactgtgccattgcactccagcctgggcgacaagagcgaaactgtctcaaaaaaaaaggaaaatattgttttgtgagaaatttaaaaagcaggcttcaagaatacatagtgttgaaaaatattggccacattttcatctctttagccctacctctatataataggtttttcctcccccaaat

SEQ ID NO: 18475 - DNA, 712 bp, Homo sapiens
agatatcatctgtatgtgagatgcatctaaggttcatgcttaacacggctgtggctagggtgctaaaatgggaggtatgcctaaagcacttctgcatactgaagtatggtggtcgtcccaaaatgaaaacatttgtgtgtgcttttgacttgtgagcttgtttctgtttctggacctaccctgggcaggtttccacagttgagaatcttagcgtattgctgttacctcaaatttccacacactaccagtttgtcttttgaaatgttatttttataagatgtcaaccctggtatggttcacttttgttatatgttggcacctctgtgggttacggaaagctttgccctccaaagcaaccagttggtttttaggaaagggaaatattgatctttgtggataagtagagtcttgttaaaagctattaaaaggctctctttggaaaaaaatcagaaaaatcaaaagaactgtgaaaaggatgataataatggaaaagaggcctttgtagccttgtgaatgtaatacgtatagtcaccacagatttttcagggaggccagtcacggtggttcaagcgtgtaatcccagcactttgggaggctgaggcaggaggattgatagaaccaaggagtttgagaccagcctgggcaacatagtgagaccccatctctagcaaaaaaaatgtttttcagggaatgctgaaatgtctccttctca

SEQ ID NO: 18476 - DNA, 638 bp, Homo sapiens
agatatcatctgtatgtgagatgcatctaaggttcatgcttaacacggctgtggctagggtgctaaaatgggaggtatgcctaaagcacttctgcatactgaagtatggtggtcgtcccaaaatgaaaacatttgtgtgtgcttttgacttgtgagcttgtttctgtttctggacctaccctgggcaggtttccacagttgagaatcttagcgtattgctgttacctcaaatttccacacactaccagtttgtcttttgaaatgttatttttataagatgtcaaccctggtatggttcacttttgttatatgttggcacctctgtgggttacggaaagctttgccctccaaagcaaccagttggtttttaggaaagggaaatattgatctttgtggataagtagagtcttgttaaaagctattaaaaggctctctttggaaaaaaatcagaaaaatcaaaagaactgtgaaaaggatgataataatggaaaagaggcctttgtagccttgtgaatgtaatacgtatagtcaccgtgcccagctctctttctcttcttaactgcctgatatattcctattgagaatctgccaggctggctgcgtggctcatctcctttcaaggttcttctctaccttac

SEQ ID NO: 18477 - DNA, 420 bp, Homo sapiens
ctaagtctttattccttaaggacacatcttaattgcttgtgtgacaaaatgggaggtatgcctaaagcacttctgcatactgaagtatggtggtcgtcccaaaatgaaaacatttgtgtgtgcttttgacttgtgagcttgtttctgtttctggacctaccctgggcaggtttccacagttgagaatcttagcgtattgctgttacctcaaatttccacacactaccagtttgtcttttgaaatgttatttttataagatgtcaaccctggtatggttcacttttgttatatgttggcacctctgtgggttacggaaagctttgccctccaaagcaaccagttggtttttaggaaagggaaatattgatctttgtggataagtagagtcttgttaaaagctattaaaaggctctctttgg

SEQ ID NO: 18478 - DNA, 143 bp, Homo sapiens
ggcttcatccctcccattccccacctcattttccaactacccacaccttcccagcttcccactcaagatccgaaatccattatcaggttccatactggctggataaagggattattattttccactgtggaaaaatgtgtctg

SEQ ID NO: 18479 - DNA, 468 bp, Homo sapiens
cattttatagctgaggacagtaaattcagcgaagcagagtgatttgcttaagaacctgctggtgagcagtggggtagggatttgcgcttgggttctccagtctccaaaaatccgtgccttccgcatggcctctgcaccaagccctgcttcactgctcctttgtggactttctggtcgcagctgaggcatccaggcagaaagaccatccctaggtttgtttgaagagggtgttgacgaagagtcacactctaaaatatttgaagggatttattctgagccaaatatttgtgaccatggcccgtgacacagccctcaggaggtcctgagaacatgtgcccaaagtggtcggggcgcagcattttagaaagacacgagacatcaatcaaatacatttaagaaatacattggtttggtccagaaaggtaggacaactcaaagccgggaggaggggagagggtggggcaggag

SEQ ID NO: 18480 - DNA, 888 bp, Homo sapiens
  misc_feature (141)..(141): n is a, c, g, or t
tatctgccgcctttgtggagtggttttttattgatcgtctccctcgaagggggcgtgtgttattagatcctcgctggtttgggtggtggttgttgctcccccacagtatgtgtgtttcggcccccccgtggcgcgcagtantgttgggagttccctctcttctgccgacgatgtgttgtcctcctgcgttgtgtgcgccgttgtgtttttccccccgcttgctctgggctggttggtgtgttttgtatgtcgcggccgccctctgtgtcccgtctgttattattagctggcccctctcctcattggggggcccctcctctgtgttacaacgaacatagtgctggcgtgtggtgcgtcttttcttgtggcgccccccggcgggggattttttggggcgcgcgcgcgccccccgctttttgttttttgtttttgtttttttgttgttgttttttttttttttttttgttttgttttgttttttttgtggtctaatttctctctttttttttttttttttttaagagacagtctgactgtgttgcccaggctggagtgcagtggctcttcacagactcagtcacggcacactatagcctcaaactcccgggctcaagggagcctcccacatcagtctcccaagtagctgaaggagtgcgccactgcagctaactatcaggttgttgaaaaagtaattgcaatttttgccccttttttgtggcaggggggcctccctcatgaagatgccacccctaatagggctacatggcccttgcagtctgccttggctgatctcagggagaattgtggggtggggaggtagccttggattttgccatatggcgaaaaccgcaattacctttgcacccactgtaaaaagtttttgttgtc

SEQ ID NO: 18481 - DNA, 504 bp, Homo sapiens
atactctctattccttctggcaaagattccccaaaaaagccaaagtaaaaaggatccaagtagaaaaggcagcaagggaaaaatgcaaaaaaccaaaaaacacgcacaatttcctggataactgaatagttattctgaaatgctttaaaaattaaatttacatacaaaaattattttagccctatttttaaataaagcacctattctagaggagataaaaaaaagatttgtaggctaggcacgtggctcacccctataattccagcactatggaaggatgaggtgggagaatcgtttgagcccaggagtttgagaccagcctgggaacgatgagaccagtctcatcaaaaaaagttagccaggtgtggtggcacacacctgtggtcccagctacttgggaggctaaagtgggaagaggctccttgagcccaggagtttgaggttacagtgtgcgattgcagcactgcactccagcctgggcgacagagtgaaaccccatcttta

SEQ ID NO: 18482 - DNA, 375 bp, Homo sapiens
  misc_feature (171)..(171): n is a, c, g, or t
ccttgatctgctgctcctatcacagttcaccagctagagaaatgtgatgcatgcaaggatataaaccaggctgatgtgggctgcagggctacagggctgcagggccggagggcatgtccatgcagaacacctgtgattcaccggtgtgcaagctcaggggctcccgggagntagatggcagagccagatctgcagccctgagctgtgtcttccttctgccataccactctcttcttgaacagaccaggtagctgctatttcaaaatgcaaccattccatcttctagtctaactctcccaggacagcccttctggaattgggagccggtgcccagagtctgccagctgctgggataaactacctgagtttcttcaa

SEQ ID NO: 18483 - DNA, 768 bp, Homo sapiens
ccttcctcagcctcctgagtagctgggattttaggcacccgccaccacacccggctaattattgtatttttattagagacaaggtttcaccatgctggccaggctggtcttgaactcctgacctcatgatccatccgccttggcctcccaaaagtgctgggattacaggcctgagccaccacgccctgctggtttattttattttttggcatgaataccacagctgggatgtcatcttctcaatgcatagtggagatatgcaatgtcagtctgtccaactcctggtcctgttagttcaggtggtggcagcggctgccggggcttctcccctacatagttactgttttccctttgtcatccataaataccttggggagatacttccagactaagtgaatgtctgtttcacttccaagttttacccacttttttttttttttttgagatggagtctcacttttgccgaggctgtagtgcaatggcgccatctcagctcactgcaacctccgcctcccaggttcaagcaattcccccgtctcagcctcccaagtagctgggattacaggcacgcgccaccatgcccaggtaattttttttatttttagtagagacggggtttcaccgtgttgcccaggcgcaggcaaagagaacgatggtgctgtcatgaaataaaattacaacatagctaccttggggaacaaacaaaaacaacaacaccaacaacactcatcaaaaacaaaacaagggggggggccaaaaaaaaatccg

SEQ ID NO: 18484 - DNA, 2470 bp, Homo sapiens
ccttcctcagcctcctgagtagctgggattttaggcacccgccaccacacccggctaattattgtatttttattagagacaaggtttcaccatgctggccaggctggtcttgaactcctgacctcatgatccatccgccttggcctcccaaaagtgctgggattacaggcctgagccaccacgccctgctggtttattttattttttggcatgaataccacagctgggatgtcatcttctcaatgcatagtggagatatgcaatgtcagtctgtccaactcctggtcctgttagttcaggtggtggcagcggctgccggggcttctcccctacatagttactgttttccctttgtcatccataaataccttggggagatacttccagactaagtgaatgtctgtttcacttccaagttttacccacttttttttttttttttgagatggagtctcacttttgccgaggctgtagtgcaatggcgccatctcagctcactgcaacctccgcctcccaggttcaagcaattcccccgtctcagcctcccaagtagctgggattacaggcacgcgccaccatgcccaggtaattttttttatttttagtagagacggggtttcaccgtgttgcccaggctggtctccaactcctgagctcaggcagtccacctgcctcagcctcccaaggtgctaggattacaggcgtgagccaccgtgcccggcctacccactaattaatttcagcatccactggtgggtcttgcaatgcagtaattattaacttagttttcaaaggtgatttttgcattttcctcattcctttgacgtttattaattggaattcatctctaagaaagagcagtcccttcagcttttttcccttttttttttttgagacagggtcttgctctgcggctcaggctgcagtgcagtggctcgatcacggctcactgcagcctcgacctcccgggctcacgtgatctcccatctcagcctcctgagtaaccagaaccacaggtgctcaccaccatgcccagctgactttttgtattttttgtagagatggggtttacccatgttgctcaggctggtctcaaattttcgagctcaagtgatccgcccgccttggcctcccaaaaggcatgagccactgcgcctgacctacgatttctttctttatatatcagtatgaacgcaagggctgtttgttggattctgtgagtcataatctgatactgtttccacgctttggccattgggagctcctggagattgtctcctgtgccctatccttatttaagcacttgtttattttgggatgtcttcagttttccttgtcccagctctgcacccagctgcttctccagggagccctccctcactggagactgggatttagcaaccaagacctgggcactggctgtgcttgttgcttctgggccctcctgggacagagctgggaagtggatctatgacacgtgcttgtgcatttacccgccctgttggtttctgtagctgtctagttcctgctgttcctgtctcacctgcccctttccttatgtgtagtttcttcctgtgacagggagaaacctggctctcagattgacaggacattcgcttaggccatgtcagtgctgtaggtgaactgttcaacctgtgccccagggaggcgcagtcactatggaggcaccttacttccttaatcgtgtactgttgtttttgtgtttgacctgtagcatctaagtactggtttcaaaagttgcctagatgagttcttttctttctttccacctcctgcaaattatgtgatttgcataatttgtacatagttaggttcatttgttagtttgtattccttttggcttcccccatatcctcgttgactttttctttcttttgtaacttacatatgttatgaaatttatatgaggatatataattttcataaatgtttatggtttacatgtattagttgttattattaagatcaccctgggattgactggccaagcatttggtggaagatagcaataaataatacatcataaaagactttaatgtaaaaataaagccatgaaagtaccaagaaataaatcttctcattttaattacatcagcttgtctgtgatcatgtagcctaaggtaggcccagagttaatttttgtgttatctatacacgttattgaagcgaattataaaatgttttagcatgttaattacttgtaaattaatatctacatataaaaatgtgagcatatattctatttagtatattaatccttcataaacaagtaatgcaagttagtattaatgatatcttaagacttaacattccttttttagtttgtgttgaataaatgaacatctaagagttcatgatgatgcttaaggaaagaagcctcatgtttacctttggaagttgtaaggcactgactcataaaaattggcaaataaaaggaaagaatcgggca

SEQ ID NO: 18485 - DNA, 2734 bp, Homo sapiens
ccttcctcagcctcctgagtagctgggattttaggcacccgccaccacacccggctaattattgtatttttattagagacaaggtttcaccatgctggccaggctggtcttgaactcctgacctcatgatccatccgccttggcctcccaaaagtgctgggattacaggcctgagccaccacgccctgctggtttattttattttttggcatgaataccacagctgggatgtcatcttctcaatgcatagtggagatatgcaatgtcagtctgtccaactcctggtcctgttagttcaggtggtggcagcggctgccggggcttctcccctacatagttactgttttccctttgtcatccataaataccttggggagatacttccagactaagtgaatgtctgtttcacttccaagttttacccacttttttttttttttttgagatggagtctcacttttgccgaggctgtagtgcaatggcgccatctcagctcactgcaacctccgcctcccaggttcaagcaattcccccgtctcagcctcccaagtagctgggattacaggcacgcgccaccatgcccaggtaattttttttatttttagtagagacggggtttcaccgtgttgcccaggctggtctccaactcctgagctcaggcagtccacctgcctcagcctcccaaggtgctaggattacaggcgtgagccaccgtgcccggcctacccactaattaatttcagcatccactggtgggtcttgcaatgcagtaattattaacttagttttcaaaggtgatttttgcattttcctcattcctttgacgtttattaattggaattcatctctaagaaagagcagtcccttcagcttttttcccttttttttttttgagacagggtcttgctctgcggctcaggctgcagtgcagtggctcgatcacggctcactgcagcctcgacctcccgggctcacgtgatctcccatctcagcctcctgagtaaccagaaccacaggtgctcaccaccatgcccagctgactttttgtattttttgtagagatggggtttacccatgttgctcaggctggtctcaaattttcgagctcaagtgatccgcccgccttggcctcccaaaaggcatgagccactgcgcctgacctacgatttctttctttatatatcagtatgaacgcaagggctgtttgttggattctgtgagtcataatctgatactgtttccacgctttggccattgggagctcctggagattgtctcctgtgccctatccttatttaagcacttgtttattttgggatgtcttcagttttccttgtcccagctctgcacccagctgcttctccagggagccctccctcactggagactgggatttagcaaccaagacctgggcactggctgtgcttgttgcttctgggccctcctgggacagagctgggaagtggatctatgacacgtgcttgtgcatttacccgccctgttggtttctgtagctgtctagttcctgctgttcctgtctcacctgcccctttccttatgtgtagtttcttcctgtgacagggagaaacctggctctcagattgacaggacattcgcttaggccatgtcagtgctgtaggtgaactgttcaacctgtgccccagggaggcgcagtcactatggaggcaccttacttccttaatcgtgtactgttgtttttgtgtttgacctgtagcatctaagtactggtttcaaaagttgcctagatgagttcttttctttctttccacctcctgcaaattatgtgatttgcataatttgtacatagttaggttcatttgttagtttgtattccttttggcttcccccatatcctcgttgactttttctttcttttgtaacttacatatgttatgaaatttatatgaggatatataattttcataaatgtttatggtttacatgtattagttgttattattaagatcaccctgggattgactggccaagcatttggtggaagatagcaataaataatacatcataaaagactttaatgtaaaaataaagccatgaaagtaccaagaaataaatcttctcattttaattacatcagcttgtctgtgatcatgtagcctaaggtaggcccagagttaatttttgtgttatctatacacgttattgaagcgaattataaaatgttttagcatgttaattacttgtaaattaatatctacatataaaaatgtgagcatatattctatttagtatattaatccttcataaacaagtaatgcaagttagtattaatgatatcttaagacttaacattccttttttagtttgtgttgaataaatgaacatctaagagttcatgatgatgcttaaggaaagaagcctcatgtttacctttggaagttgtaaggcactgactcataaaaattggcaaataaaaggaaagaatcgggcaacaaaaaacaccaacaaccacaagggggggggcaaaaattacccgaggggccaagtttggttacccagtttttgccaaaggggccaagaggagggtaaaagaagaaggggggtacagtctgaggaacgtcttggtttgggagactttcgggggatataggaacaccaattagtcaggaaacattaatgtagggaccgttttgcgattttctaatataacttggtatgtgaaaagatatagagacattagataagaagtcttatc

SEQ ID NO: 18486 - DNA, 2362 bp, Homo sapiens
ccttcctcagcctcctgagtagctgggattttaggcacccgccaccacacccggctaattattgtatttttattagagacaaggtttcaccatgctggccaggctggtcttgaactcctgacctcatgatccatccgccttggcctcccaaaagtgctgggattacaggcctgagccaccacgccctgctggtttattttattttttggcatgaataccacagctgggatgtcatcttctcaatgcatagtggagatatgcaatgtcagtctgtccaactcctggtcctgttagttcaggtggtggcagcggctgccggggcttctcccctacatagttactgttttccctttgtcatccataaataccttggggagatacttccagactaagtgaatgtctgtttcacttccaagttttacccacttttttttttttttttgagatggagtctcacttttgccgaggctgtagtgcaatggcgccatctcagctcactgcaacctccgcctcccaggttcaagcaattcccccgtctcagcctcccaagtagctgggattacaggcacgcgccaccatgcccaggtaattttttttatttttagtagagacggggtttcaccgtgttgcccaggctggtctccaactcctgagctcaggcagtccacctgcctcagcctcccaaggtgctaggattacaggcgtgagccaccgtgcccggcctacccactaattaatttcagcatccactggtgggtcttgcaatgcagtaattattaacttagttttcaaaggtgatttttgcattttcctcattcctttgacgtttattaattggaattcatctctaagaaagagcagtcccttcagcttttttcccttttttttttttgagacagggtcttgctctgcggctcaggctgcagtgcagtggctcgatcacggctcactgcagcctcgacctcccgggctcacgtgatctcccatctcagcctcctgagtaaccagaaccacaggtgctcaccaccatgcccagctgactttttgtattttttgtagagatggggtttacccatgttgctcaggctggtctcaaattttcgagctcaagtgatccgcccgccttggcctcccaaaaggcatgagccactgcgcctgacctacgatttctttctttatatatcagtatgaacgcaagggctgtttgttggattctgtgagtcataatctgatactgtttccacgctttggccattgggagctcctggagattgtctcctgtgccctatccttatttaagcacttgtttattttgggatgtcttcagttttccttgtcccagctctgcacccagctgcttctccagggagccctccctcactggagactgggatttagcaaccaagacctgggcactggctgtgcttgttgcttctgggccctttccttatgtgtagtttcttcctgtgacagggagaaacctggctctcagattgacaggacattcgcttaggccatgtcagtgctgtaggtgaactgttcaacctgtgccccagggaggcgcagtcactatggaggcaccttacttccttaatcgtgtactgttgtttttgtgtttgacctgtagcatctaagtactggtttcaaaagttgcctagatgagttcttttctttctttccacctcctgcaaattatgtgatttgcataatttgtacatagttaggttcatttgttagtttgtattccttttggcttcccccatatcctcgttgactttttctttcttttgtaacttacatatgttatgaaatttatatgaggatatataattttcataaatgtttatggtttacatgtattagttgttattattaagatcaccctgggattgactggccaagcatttggtggaagatagcaataaataatacatcataaaagactttaatgtaaaaataaagccatgaaagtaccaagaaataaatcttctcattttaattacatcagcttgtctgtgatcatgtagcctaaggtaggcccagagttaatttttgtgttatctatacacgttattgaagcgaattataaaatgttttagcatgttaattacttgtaaattaatatctacatataaaaatgtgagcatatattctatttagtatattaatccttcataaacaagtaatgcaagttagtattaatgatatcttaagacttaacattccttttttagtttgtgttgaataaatgaacatctaagagttcatgatgatgcttaaggaaagaagcctcatgtttacctttggaagttgtaaggcactgactcataaaaattggcaaataaaaggaaagaatcgggca

SEQ ID NO: 18487 - DNA, 421 bp, Homo sapiens
tgggaggctgaggtggggggatcacctgaggtcaggagtttgagaccaacctggtcaacagagtgaaaccccatctctactaaaaatacaaaaaattagccacacatggtgggtgggtgcctgtaatcctagctactcgggaggctgaggcaggagaattgtttgaacccaggaggcagaggttgaagtgagccgagattgcaccattgtactccagcctgggcaacaacagcgaaactctgtctcaagaatagttaatgataataaatgaataaataaataaataaatagtggtttaaagaagtaacttcaaagtatacctggcacattggggtgtctagtaatttattttaaatatcccaagaaaaaaatccaattgaattatttgattcaaataccctatttttttcagagtaaaaaa

SEQ ID NO: 18488 - DNA, 169 bp, Homo sapiens
gcatgacctcgcccgtgcctgcctcacctgcacccacccttgcccgctaattgccatttgggctccgagggatgcatctccaaccccaaatctgtcaggcccttgcccagagctgcccttgttttctttctcttctattttttcctatgcgcaaaaagatctcaccaca

SEQ ID NO: 18489 - DNA, 808 bp, Homo sapiens
cagagctcaaagacatcatttagtatggctggggaatgacaagactttaaaatgcctattggcaaaacacattgataaagttataccaagtccattaacttctctgggaaatatttctagctagaggaaaaatgcctggattctggaagcagggatggtggagtggaaatgacagcacaccagtctcagctcagccattatccacacgtgttcatcccagcaagttgcttcatgcttctaggctttgtgtcatcatccatagtatagagtgtttctagattgcctaatgtcactcacactacgtcgctgggcaggtgtgtggtacactagctctaacatcaagcagacctgagtttgaatcctggctccgtcttcaagcaatgggctcttgggcaagtaattttcccatctgtaaaaatggagatgataatacctacctcagggtctttgcccttattgttcattctcctggggacagtctttcccagatatccacaaaggtcactcttttacctccttcaggtcttcactcaacttacctttttgtgagaactttcttgaacacaatagctaaacttgtaaaccatctggcatttcctatcctctttcctcattttattattttccttagcactcaatacctaacatactatatagcactcaattatcttatttattgcctctttcccacctctagaatgtatgctctataagggcaggattttttgtattctttactgctgtatccccagtttctagaatgatttaggtgattaataaatatttcttgcataaatgaattttttgt

SEQ ID NO: 18490 - DNA, 712 bp, Homo sapiens
actcgtggccccccggtggcaagggagagggcgccctgggtccaaccagtggggtggggcaggtgaggaagatgggagtggacaggcagcaccccctggcatgcccctgagaggagaggttaggtggggaggggaggccctgttttcaggaggagacgcgcctgcctggtggtgtctttgtgtggttataagagcaataaagttcctatccttaaaaaatgggaaagtatggataaaagaaggaaataaactttacctattattccatcgctcagagaaaacagttcccattttagtgtagtttctttctgtaagtttggtgaactcagacctgccttttggctgtccctaagcactctagactcatggggtcaccttatcttaatatgcaatggaacccttttgagtcccctcccccatatgtaggaaaccctggtcactctttgctccaatgccttgtttcctgggacttctcagggtagccccatccctcattttttcgccacagcaccaagcacggaaggtcactgtaggaagcagatttttctctgtgcagccatcccatccttagtgtctctcagcaccctgccgcagggaatttctccctggctgacctcagcttccagcccccttctccgcttctgggtgctaaggtgcctcccttctccctggtctctccctttcttgccttctaccccctgcagcctactcc

SEQ ID NO: 18491 - DNA, 445 bp, Homo sapiens
tctgctcagttaataacacattaaagatcaaattttatagtgtgtacacatggacacagtagaataataggcattggagacttggaaaggtgggagcatgggagaggggtaggggatgagaaattatctgatgggtacagtgtacatcaatcttgtccaacccacggcgcaggacggtttgattgtggcccaacactaatttgtaaactttcttaaaacatgagttgttgttttttttttttaagctcatcacctgtcgttagtgttagtgtattttatgtgtggcccaagacaattcttcttccgttgtggcccagggaagccaaaagattggacacccctgtccaccattggagtgatggtgacacttaagagcccagacttcaccactgtgcaagaaattcatgtagcaaaactgcagctgtatctcttaactataaaaata

SEQ ID NO: 18492 - DNA, 550 bp, Homo sapiens
cttttaatttcctttaataacgattcttttttttgcattcacagcttgactatttggtactagagacctagcttttggcctattgcagttttcatatgtctttcttactaagcctaatcatttctagatttcgattgaaagggagagacatgtgactcttcctttcatttaaacacttaaaggccattgtgggattattaataggcctaatttaaatatcgttatgcctcagggaatagggaagccccagcagagggggagagatgggggaaaaactggtcagttgagcagtcagaacacgtacaatgtgtatctgagtttgccatcttctatagacagagtttgtgacaccccaaaacaattacaatagttacatcaaagatcactaatcacagctcaccatatcagatatgataatgaaaatgttttaaatattgtgggaattactaaatgtgacacagagacaccgagtgcgcacatgctgttggaaaatgataccaatagatttgctcgatataaagttgccacaaaactttaatttgtaaaaaaa

SEQ ID NO: 18493 - DNA, 2164 bp, Homo sapiens
  misc_feature (1922)..(1922): n is a, c, g, or t
aacagaaaaatccattagtattaaccattatctttcatttgtggattcttacactgtttcaatggaagtgccttctccccagaaggaaatagaaaatgtgaaatatgaaaagaaaaaatacagggttaacaatattttctaaattactggtaacctgataagaattcatattaatttttgacactaaactaacttaagtataaagccatttttgttaaataaatgagtagatgatacttagattcccatctttactgtttgtttaaatataatttgcttgttacagtataaaaccaactagtttgtatcaaagcttggatactttatcctagtaaacattctgtctaccttgagtaaaaattctggtaaacagtttttttttaatcagaagaacacttttttcattaaaaagaagagctccatttaaaaaacaaacttcatttctagctctaaaatataacaagggttaattaaatctagactaaacaaaattaaacagttatcctgtaatagttaatagcctgttgtttgagtagctaaatgatttaaaaaacagatcaagtacattgatacctttgtatatttatttttgcaggtgaaaaaagccaagatgcaggaatcaggagagcaaactataaggtatgtaaagtttgctttctttttaatgaactactcataagttttgtttttttttttcacatgctgattagcgtatgggcatgctttgccctctttttggttcttaccatcagctgttacattttgaaattatttggtttaagattaaaatttcctttccaaatagttttttcctgaaacttgtgcactgatttgttcttatgcattcattatttattcaacaatatgtaccaaactcatgttgtatatcaggcactgtgctacatagaggagacttaatggtaaagatgaaaagcaccatattcttcagtcagacgtacaatatacagaataggaagcataagcgaaataaataaaatccaagagatttggtattaattaccaaatggttatgaaatgacttagtcattaaccccactcctcttatagaaaagaggaagcttgcgcctggcacggtcgctcacgcctgtaatcccagcactttgggaggctgaggcgggcagatcacgaggtcaggagatcgagaccatcctggctaacacggtgaaaccccgtctctactaaaaatacaaaattattaaccgggcgtgttggcgggcgcctgtggtcccagctactcaggaggctgaggcaggagaatggtgtgaacctgggaggtggagcttgcggtgagctgagatcgcgccactgcactccagcctgggcgacagagcgagactctgtctcaaaaaaaaaaaaaaaaagagaaaagaggcagcttgtttgcacctcacagtttggcttcttcataccatggttttcagttttccacagttcttaccttctgtcgtttgtgcaccaaccatatgagccagtaactgcatcacctctaccacattaatttcaagaatcctacacttttacctccacacactatcatcccggctcatttattctagaactgccatgctagccatatgatgtcttaaactatcaattaaatcatctgtcatcttttcaccatcaccccttaaaaagaactttagtttcttccttataagagaccaacatggcggaaccttgtttctactaaaaacacaaaaattagctcggcgtggtgacttgagcctataatcccagctacttgggagactgaggcaggagaatggcttgaacccacgaggcggaggttacagtgagccaagaatgcgccactgcactccagcctgggcgacaaagactctgtctcaaaaaaaaaaaggaacttaactggccaggtgtggtggctccacttttggaggtcnaggtgggcagatcgcttgagttcagtagtttgagaccagcctgggcgacatagcaagatgctgtctctataaaaaacacaaaaacaattatccaggaatggtggtgcacacctttagtcccagctactcggggctgaggcaggaggattgcttgagcccaggggccagaagttgtggtgagccaagattgcgccactgaactccatcctgggttggtggcagagcaagatgctgtctcattt

SEQ ID NO: 18494 - DNA, 427 bp, Homo sapiens
ctaagttgttgctgtgtgtccactaagataacaaaaatgagtagaatctctgccctttaatatagaaagtaaatgaacatgaaataatgagtagtagctgaacattggctctgaacagtataataccaggtcctttaaagttaatttttaataattaaattctaaagagttggcacatacgaattcttgctcccaggttggtttagtttcaccttttcttttcccttttactcccttatagaaagaattgtgtgaatgttctgatcactaccacccagctggttccagccctggccaaggttctcctatatggactaggagaaatatttcctattgagaacatctatagtgctaccaaaattggtatggtttctatgctgtttcttgtcactggccttgcaataaaactttctactcatgaaaaaaa

SEQ ID NO: 18495 - DNA, 2402 bp, Homo sapiens
gggtcacgctaacgccgcggtttcctccgctcgattggttctactgtgggtctggactgatctccatgtcctgttgtggggcttttacagcctttggattgtgaaaactgctgagagagacttgcaatccagtcacataagtataataaagaaatattggtcctcatggaagaagagcaagatttaccagagcaaccagtgaaaaaagccaagatgcaggaatcaggagagcaaactataagtcaagtaagcaatccagatgtcagtgatcagaagcctgaaacatcaagccttgcttcaaaccttcccatgtcagaggaaattatgacatgcaccgattacatccctcgctcatccaatgattatacctcacaaatgtattctgcaaaaccttatgcacatattctctcagttcctgtttcggaaactgcttaccctggacagactcaataccagacactacagcagactcaaccctatgctgtctaccctcaggcaacccaaacgtatggactacctccttttggtgcattgtggccaggtatgaaacctgaaagtggtttaattcagactccatctccaagtcaacacagtgttcttacctgcactacagggttaaccacaagccagccaagcccagcacattattcttatcccattcaagcttcaagcacaaatgccagcctgatatctacttcttctacaattgccaatattccagcagcagcagtagccagcatctcaaaccaggattatcccacctatactattcttggtcagaatcagtaccaggcctgctaccccagctccagctttggagtcacaggtcagactaacagtgatgcagagagcaccacattagcagcaaccacataccagtcggagaagcctagtgtcatggcgcctgcacctgcagcacagagactttcctctggagacccttctacaagtccatctttgtcccagactacaccaagtaaagatactgatgatcagtccaggaaaaacatgactagcaagaaccggggcaagaggaaagctgatgccacttcttcccaagacagtgaattagaacgggtatttctgtgggacttggatgaaaccatcatcatcttccactcacttcttactggatcctatgcccagaaatatggaaaggacccaacagtagtgattggctcaggtttaacaatggaagaaatgatttttgaagtggctgatactcatctatttttcaatgacttagaggagtgtgaccaggtacatgtggaagatgtggcttctgatgacaatggccaagacttgagcaactacagtttctcaacagatggtttcagtggctcaggaggtagtggcagccatggttcatctgtgggtgttcagggaggtgtggactggatgaggaaactagctttccgctaccggaaagtgagagaaatctatgataagcataaaagcaacgtgggtggtctcctcagtccccagaggaaggaagcactgcagagattaagagcagaaattgaagttttaacagattcctggttaggaactgcattaaagtccttacttctcatccagtccagaaagaattgtgtgaatgttctgatcactaccacccagctggttccagccctggccaaggttctcctatatggactaggagaaatatttcctattgagaacatctatagtgctaccaaaattggtaaggagagctgctttgagagaattgtgtcaaggtttggaaagaaagtcacatatgtagtgattggagatggacgagatgaagaaattgcagccaaacagcacaacatgcctttctggaggatcacaaaccatggagacctagtatcccttcaccaggctttagagcttgattttctctaagaactggaatgaggagccttccccttgagctccttttcactcctgaagggagctggagactggaaccaactgagaactttctctgtctgtctctctctgtgtctctgtctctatctctctctctttctctctttctctctctccctctctccctccctcccttcctctctccctccctctctgcctctctctctctctctctctctgtctttatccatggaatgctggcgagaacacaatcagaaccaacagctgcaatttttgctaagagtgagctgcagccccgtgttcatctccatacagaagcagggacagttggatagagagaacaatggactcactgcagctacagtgcttttaatttttctgtgttttgtttttgtttttttgttttcaaaaaatgaaaaagaaaaggaaattcctggggcagagttgcactcttagtccatgaccagattgagaattactgataacttgtggtgatcagataaatgcagcagacttttatgataaca

SEQ ID NO: 18496 - DNA, 1769 bp, Homo sapiens
gggtcacgctaacgccgcggtttcctccgctcgattggttctactgtgggtctggactgatctccatgtcctgttgtggggcttttacagcctttggattgtgaaaactgctgagagagacttgcaatccagtcacataagtataataaagaaatattggtcctcatggaagaagagcaagatttaccagagcaaccagtgaaaaaagccaagatgcaggaatcaggagagcaaactataagtcaagtaagcaatccagatgtcagtgatcagaagcctgaaacatcaagccttgcttcaaaccttcccatgtcagaggaaattatgacatgcaccgattacatccctcgctcatccaatgattatacctcacaaatgtattctgcaaaaccttatgcacatattctctcagttcctgtttcggaaactgcttaccctggacagactcaataccagacactacagcagactcaaccctatgctgtctaccctcaggcaacccaaacgtatggactacctccttttggtgcattgtggccaggtatgaaacctgaaagtggtttaattcagactccatctccaagtcaacacagtgttcttacctgcactacagggttaaccacaagccagccaagcccagcacattattcttatcccattcaagcttcaagcacaaatgccagcctgatatctacttcttctacaattgccaatattccagcagcagcagtagccagcatctcaaaccaggattatcccacctatactattcttggtcagaatcagtaccaggcctgctaccccagctccagctttggagtcacaggtcagactaacagtgatgcagagagcaccacattagcagcaaccacataccagtcggagaagcctagtgtcatggcgcctgcacctgcagcacagagactttcctctggagacccttctacaagtccatctttgtcccagactacaccaagtaaagatactgatgatcagtccaggaaaaacatgactagcaagaaccggggcaagaggaaagctgatgccacttcttcccaagacagtgaattagaacgggtatttctgtgggacttggatgaaaccatcatcatcttccactcacttcttactggatcctatgcccagaaatatggaaaggacccaacagtagtgattggctcaggtttaacaatggaagaaatgatttttgaagtggctgatactcatctatttttcaatgacttagaggagtgtgaccaggtacatgtggaagatgtggcttctgatgacaatggccaagacttgagcaactacagtttctcaacagatggtttcagtggctcaggaggtagtggcagccatggttcatctgtgggtgttcagggaggtgtggactggatgaggaaactagctttccgctaccggaaagtgagagaaatctatgataagcataaaagcaacgtgggtggtctcctcagtccccagaggaaggaagcactgcagagattaagagcagaaattgaagttttaacagattcctggttaggaactgcattaaagtccttacttctcatccagtccagaaagaattgtgtgaatgttctgatcactaccacccagctggttccagccctggccaaggttctcctatatggactaggagaaatatttcctattgagaacatctatagtgctaccaaaattggtatggtttctatgctgtttcttgtcactggccttgcaataaaactttctactcatgaaaaaaa

SEQ ID NO: 18497 - DNA, 1837 bp, Homo sapiens
gggtcacgctaacgccgcggtttcctccgctcgattggttctactgtgggtctggactgatctccatgtcctgttgtggggcttttacagcctttggattgtgaaaactgctgagagagacttgcaatccagtcacataagtataataaagaaatattggtcctcatggaagaagagcaagatttaccagagcaaccagtgaaaaaagccaagatgcaggaatcaggagagcaaactataagtcaagtaagcaatccagatgtcagtgatcagaagcctgaaacatcaagccttgcttcaaaccttcccatgtcagaggaaattatgacatgcaccgattacatccctcgctcatccaatgattatacctcacaaatgtattctgcaaaaccttatgcacatattctctcagttcctgtttcggaaactgcttaccctggacagactcaataccagacactacagcagactcaaccctatgctgtctaccctcaggcaacccaaacgtatggactacctccttttggtgcattgtggccaggtatgaaacctgaaagtggtttaattcagactccatctccaagtcaacacagtgttcttacctgcactacagggttaaccacaagccagccaagcccagcacattattcttatcccattcaagcttcaagcacaaatgccagcctgatatctacttcttctacaattgccaatattccagcagcagcagtagccagcatctcaaaccaggattatcccacctatactattcttggtcagaatcagtaccaggcctgctaccccagctccagctttggagtcacaggtcagactaacagtgatgcagagagcaccacattagcagcaaccacataccagtcggagaagcctagtgtcatggcgcctgcacctgcagcacagagactttcctctggagacccttctacaagtccatctttgtcccagactacaccaagtaaagatactgatgatcagtccaggaaaaacatgactagcaagaaccggggcaagaggaaagctgatgccacttcttcccaagacagtgaattagaacgggtatttctgtgggacttggatgaaaccatcatcatcttccactcacttcttactggatcctatgcccagaaatatggaaaggacccaacagtagtgattggctcaggtttaacaatggaagaaatgatttttgaagtggctgatactcatctatttttcaatgacttagagacatagtcctcactcaggaactgaaagttctgtgaagaatttgacctgaatgtgttcctgccccccaggagtgtgaccaggtacatgtggaagatgtggcttctgatgacaatggccaagacttgagcaactacagtttctcaacagatggtttcagtggctcaggaggtagtggcagccatggttcatctgtgggtgttcagggaggtgtggactggatgaggaaactagctttccgctaccggaaagtgagagaaatctatgataagcataaaagcaacgtgggtggtctcctcagtccccagaggaaggaagcactgcagagattaagagcagaaattgaagttttaacagattcctggttaggaactgcattaaagtccttacttctcatccagtccagaaagaattgtgtgaatgttctgatcactaccacccagctggttccagccctggccaaggttctcctatatggactaggagaaatatttcctattgagaacatctatagtgctaccaaaattggtatggtttctatgctgtttcttgtcactggccttgcaataaaactttctactcatgaaaaaaa

SEQ ID NO: 18498 - DNA, 2332 bp, Homo sapiens
gggtcacgctaacgccgcggtttcctccgctcgattggttctactgtgggtctggactgatctccatgtcctgttgtggggcttttacagcctttggattgtgaaaactgctgagagagacttgcaatccagtcacataagtataataaagaaatattggtcctcatggaagaagagcaagatttaccagagcaaccagtgaaaaaagccaagatgcaggaatcaggagagcaaactataagtcaagtaagcaatccagatgtcagtgatcagaagcctgaaacatcaagccttgcttcaaaccttcccatgtcagaggaaattatgacatgcaccgattacatccctcgctcatccaatgattatacctcacaaatgtattctgcaaaaccttatgcacatattctctcagttcctgtttcggaaactgcttaccctggacagactcaataccagacactacagcagactcaaccctatgctgtctaccctcaggcaacccaaacgtatggactacctccttttgcttcaagcacaaatgccagcctgatatctacttcttctacaattgccaatattccagcagcagcagtagccagcatctcaaaccaggattatcccacctatactattcttggtcagaatcagtaccaggcctgctaccccagctccagctttggagtcacaggtcagactaacagtgatgcagagagcaccacattagcagcaaccacataccagtcggagaagcctagtgtcatggcgcctgcacctgcagcacagagactttcctctggagacccttctacaagtccatctttgtcccagactacaccaagtaaagatactgatgatcagtccaggaaaaacatgactagcaagaaccggggcaagaggaaagctgatgccacttcttcccaagacagtgaattagaacgggtatttctgtgggacttggatgaaaccatcatcatcttccactcacttcttactggatcctatgcccagaaatatggaaaggacccaacagtagtgattggctcaggtttaacaatggaagaaatgatttttgaagtggctgatactcatctatttttcaatgacttagagacatagtcctcactcaggaactgaaagttctgtgaagaatttgacctgaatgtgttcctgccccccaggagtgtgaccaggtacatgtggaagatgtggcttctgatgacaatggccaagacttgagcaactacagtttctcaacagatggtttcagtggctcaggaggtagtggcagccatggttcatctgtgggtgttcagggaggtgtggactggatgaggaaactagctttccgctaccggaaagtgagagaaatctatgataagcataaaagcaacgtgggtggtctcctcagtccccagaggaaggaagcactgcagagattaagagcagaaattgaagttttaacagattcctggttaggaactgcattaaagtccttacttctcatccagtccagaaagaattgtgtgaatgttctgatcactaccacccagctggttccagccctggccaaggttctcctatatggactaggagaaatatttcctattgagaacatctatagtgctaccaaaattggtaaggagagctgctttgagagaattgtgtcaaggtttggaaagaaagtcacatatgtagtgattggagatggacgagatgaagaaattgcagccaaacagcacaacatgcctttctggaggatcacaaaccatggagacctagtatcccttcaccaggctttagagcttgattttctctaagaactggaatgaggagccttccccttgagctccttttcactcctgaagggagctggagactggaaccaactgagaactttctctgtctgtctctctctgtgtctctgtctctatctctctctctttctctctttctctctctccctctctccctccctcccttcctctctccctccctctctgcctctctctctctctctctctctgtctttatccatggaatgctggcgagaacacaatcagaaccaacagctgcaatttttgctaagagtgagctgcagccccgtgttcatctccatacagaagcagggacagttggatagagagaacaatggactcactgcagctacagtgcttttaatttttctgtgttttgtttttgtttttttgttttcaaaaaatgaaaaagaaaaggaaattcctggggcagagttgcactcttagtccatgaccagattgagaattactgataacttgtggtgatcagataaatgcagcagacttttatgataaca

SEQ ID NO: 18499 - DNA, 1228 bp, Homo sapiens
gggtcacgctaacgccgcggtttcctccgctcgattggttctactgtgggtctggactgatctccatgtcctgttgtggggcttttacagcctttggattgtgaaaactgctgagagagacttgcaatccagtcacataagtataataaagaaatattggtcctcatggaagaagagcaagatttaccagagcaaccagtgaaaaaagccaagatgcaggaatcaggagagcaaactataagtcaagtaagcaatccagatgtcagtgatcagaagcctgaaacatcaagccttgcttcaaaccttcccatgtcagaggaaattatgacatgcaccgattacatccctcgctcatccaatgattatacctcacaaatgtattctgcaaaaccttatgcacatattctctcagttcctgtttcggaaactgcttaccctggacagactcaataccagacactacagcagactcaaccctatgctgtctaccctcaggcaacccaaacgtatggactacctccttttggtgcattgtggccaggtatgaaacctgaaagtggtttaattcagactccatctccaagtcaacacagtgttcttacctgcactacagggttaaccacaagccagccaagcccagcacattattcttatcccattcaagcttcaagcacaaatgccagcctgatatctacttcttctacaattgccaatattccagcagcagcagtagccagcatctcaaaccaggattatcccacctatactattcttggtcagaatcagtaccaggcctgctaccccagctccagctttggagtcacaggtcagactaacagtgatgcagagagcaccacattagcagcaaccacataccagtcggagaagcctagtgtcatggcgcctgcacctgcagcacagagactttcctctggagacccttctacaagtccatctttgtcccagactacaccaagtaaagatactgatgatcagtccaggaaaaacatgactagcaagaaccggggcaagaggaaagctgatgccacttcttcccaagacagtgaattagaagtatgagaagaaactgatttagttacctactttgttctttctcacttcttaagtttatcaaacatgtttttgaagctcacagagataatgtgcactatgttatgtgccctttaattcctgagcaaaataaactaaattggccacgttaaaaaaa

SEQ ID NO: 18500 - DNA, 1263 bp, Homo sapiens
gggtcacgctaacgccgcggtttcctccgctcgattggttctactgtgggtctggactgatctccatgtcctgttgtggggcttttacagcctttggattgtgaaaactgctgagagagacttgcaatccagtcacataagtataataaagaaatattggtcctcatggaagaagagcaagatttaccagagcaaccagtgaaaaaagccaagatgcaggaatcaggagagcaaactataagtcaagtaagcaatccagatgtcagtgatcagaagcctgaaacatcaagccttgcttcaaaccttcccatgtcagaggaaattatgacatgcaccgattacatccctcgctcatccaatgattatacctcacaaatgtattctgcaaaaccttatgcacatattctctcagttcctgtttcggaaactgcttaccctggacagactcaataccagacactacagcagactcaaccctatgctgtctaccctcaggcaacccaaacgtatggactacctccttttggtgcattgtggccaggtatgaaacctgaaagtggtttaattcagactccatctccaagtcaacacagtgttcttacctgcactacagggttaaccacaagccagccaagcccagcacattattcttatcccattcaagcttcaagcacaaatgccagcctgatatctacttcttctacaattgccaatattccagcagcagcagtagccagcatctcaaaccaggattatcccacctatactattcttggtcagaatcagtaccaggcctgctaccccagctccagctttggagtcacaggtcagactaacagtgatgcagagagcaccacattagcagcaaccacataccagtcggagaagcctagtgtcatggcgcctgcacctgcagcacagagactttcctctggagacccttctacaagtccatctttgtcccagactacaccaagtaaagatactgatgatcagtccaggaaaaacatgactagcaagaaccggggcaagaggaaagctgatgccacttcttcccaagacagtgaattagaagtatgagaagaaactgatttagttacctactttgttctttctcacttcttaagtttatcaaacatgtttttgaagctcacagagataatgtgcactatgttatgtgccctttaattcctgagcaaaataaacagagatgcggccagacctacctctccacaaccaaccgacaccccacggatacactac

SEQ ID NO: 18501 - DNA, 1090 bp, Homo sapiens
gggtcacgctaacgccgcggtttcctccgctcgattggttctactgtgggtctggactgatctccatgtcctgttgtggggcttttacagcctttggattgtgaaaactgctgagagagacttgcaatccagtcacataagtataataaagaaatattggtcctcatggaagaagagcaagatttaccagagcaaccagtgaaaaaagccaagatgcaggaatcaggagagcaaactataagtcaagtaagcaatccagatgtcagtgatcagaagcctgaaacatcaagccttgcttcaaaccttcccatgtcagaggaaattatgacatgcaccgattacatccctcgctcatccaatgattatacctcacaaatgtattctgcaaaaccttatgcacatattctctcagttcctgtttcggaaactgcttaccctggacagactcaataccagacactacagcagactcaaccctatgctgtctaccctcaggcaacccaaacgtatggactacctccttttgcttcaagcacaaatgccagcctgatatctacttcttctacaattgccaatattccagcagcagcagtagccagcatctcaaaccaggattatcccacctatactattcttggtcagaatcagtaccaggcctgctaccccagctccagctttggagtcacaggtcagactaacagtgatgcagagagcaccacattagcagcaaccacataccagtcggagaagcctagtgtcatggcgcctgcacctgcagcacagagactttcctctggagacccttctacaagtccatctttgtcccagactacaccaagtaaagatactgatgatcagtccaggaaaaacatgactagcaagaaccggggcaagaggaaagctgatgccacttcttcccaagacagtgaattagaagtatgagaagaaactgatttagttacctactttgttctttctcacttcttaagtttatcaaacatgtttttgaagctcacagagataatgtgcactatgttatgtgccctttaattcctgagcaaaataaactaaattggccacgttaaaaaaa

SEQ ID NO: 18502 - DNA, 361 bp, Homo sapiens
taagatgcctggggacgcaagggatgcagggctgcgtcctccgccccggagtcatgctgccctgttcttcaagaataaacagtaacagagacgggcagaacccacgtcttctcagttccaccccaggagcatagggagaggcccacatgccaggatgcggggacacgggagctcacgggaagcaagagtaccaggtgcccagaggtcctaaggccagctcaggacaaaggcgcagagctcaggctgtcgcttctagattgctctgcttttcaacgtggtgctcattgattgcagtcactcttccctaagtgccatcatccccgggcggcccagccaggactcagagtgcagacagccacac

SEQ ID NO: 18503 - DNA, 425 bp, Homo sapiens
atgaggattcaggtttccagtcaatttcagtatgaataattccagcctgtaacaagaacaaacagtgaatgaatgagttaatttgagttgtttgaaaataagaatgttttccataaagagatcattgaactcattagttaacacgccatggtgatttctggcttgacactggtcacaacatttaaaagtaaaaagaatgacccagcagatttacaaattaggtgcatatagaatttaaggtcaggatattcaagcaatcacaaccagtgatattacattgagaggtgaagccagctggacttcctgggtggagtggagatttgcaagaatttggcttgctaatgatgctattaaaagataaactaaagttgatatactgtattattgcatagactatttgtccatgttagtgttcaaaaatgcca

SEQ ID NO: 18504 - DNA, 467 bp, Homo sapiens
gcagttcagacatgtaaagaaatacaactgtatttctttaaaacaaagtacactgtaaggaaaagtacaaaaaaagtacactgtaaagaaaagtacactgtaaaggcatgacatggcatagtcccatgatatctctctctttttggagacccagcattcagtgtgggctcctctgagagctcagtggtacagttaaaacttaaagactaaatttagaactacttatttaaataaaatgggtcccattataaaatcctttggtagatttttataattttatgtttgacttggcatacatttttaatcttcctctaacacaaccagactttctctctctgtattttgatatgtaaatttttgctatctgtgtttcacgttagaggtgtttctttagtatgcaaatttagggctatctagctgacaattgccttggatagtgaaataagttctcaaaaaattggaagtct

SEQ ID NO: 18505 - DNA, 438 bp, Homo sapiens
tatattccactcatggcatttatgatgttatattattatggtctattcccatgtctgtttctgccaccagatcattccattcttggagtcagggattagggcttattaattttaaatcccaaacacaagatggattaaaagaattattggaggccgggcacggtggctcacgcctgtaatcccagcactttgggaggccgaggcgggcggatcacaaggtcaggagattgagaccatcctggctaacacggtgaaaccccgtctctactaaaaatacaaaaaattagccgggcatagcggcgggcacctgtagtcccagctactcgggaggcagaggcgggagaatggcgtgaacccgggaggcggagcttgcagtgagccgagattgcggcactgcattccaacctgagcgacagagccagactccgtctcaaaaaa

SEQ ID NO: 18506 - DNA, 368 bp, Homo sapiens
tgggattataggcctgagccacggtacctggcctatttttctactttttaggagagagtccttccctttggtcagtgtccgttcattttggctgctgttagagaataccataaactagatggcttataaacaacagaagtttatttatcacatttgtggaggttagggggtccaagaccaaggtgccagaagataaactatctgatggagtcctgtttcccagttcatagacagcagttttcttgatgaaacctcacttggtggaatgcaaggaaattcccttgagtcattttttaataggagcactaaatccatttgtgaggcttccactctcatgacttaatcaactcccaaaggcctcatcttta

SEQ ID NO: 18507 - DNA, 460 bp, Homo sapiens
tatctgagaactcacaagttattctataggtaatacagtctgaagtaaattgggtgtaaatgcccaatccttgtctcattccaatttacgaagcccagcagaaaacatttgttaccctatatttttacaatacattcattgtgatgaggctccaagctttatgaacaggaaattgggaggagagagctaatatgatccagtgtgattttagtgtaacaactggagcctttgcaaaggaaggagccaacaggtctgacatgaaacattggggccacacatttttgcagtgggattaaggaatgggagaacttgtgcttttcagcattggaaagtcctccctgcaaacattccacatttaaagtaaaatatttcaagccttcagaaagaagctgcaaaggaaaattgaaatagctcaacaacttgactatattttctagattttaagtccatgacaataaat

SEQ ID NO: 18508 - DNA, 405 bp, Homo sapiens
gtaaatgacggctgtaagaaataccacaaaggcagtgtggtgcctggaaaacagccatccacccagaatagcaggaggtgactcagtttaattctagagaggacaaaaatccatcaggaatccctaaggaccccagaatttctgcatggccaaagggaaacctaagccaatgcagtaacctaaaggcatttgtaatttttgtcattatgacctggaacagacaccaccatgtatgtgttttaatccccacttactcaggaagttctaacatttcccccaaaacttaactgttaagtagtttcaaagctaaacctctgtgttcattgtggtggtcgtggtcatggttgttttttgtttgtttttgttttttcaatttagcaacttaaactgagtaagaattgctgg

SEQ ID NO: 18509 - DNA, 608 bp, Homo sapiens
ttgaatggaatttgaggaggcgcagagaggagaaaaacgctgttactcgaaagaggaagagtcacaggaggatgctgagtgaacgcagcgcccaggcagggtcatctggggacctggtgcgtgtgagaacatatttcttctcctggcgccctccaggctcactgtggctggagccggtgacctgaagctgcagggctctggtaggaacagaggcactgaaagctgcattcctctccgtttggacttaggagctgctagtagttctgatgaaattgacacacattaggaaaaggagtcgcttaaaaagcatctgagattacctaagataatttgttaaaagaccaatgcttacacctgattttcttccctttacattatacctctttgatattgtctcaaggaaaaaaaaatcagcatgtgtcactgactggcacttatttgccacaaaagattgttcccctgagcttcttgtatttatctgataatcactggcaacgtcctcctttctgtgatgttgtctcctcacctctgtctctgccatgaggagccatacaacgccttgagattgtcagccaaaagatgttcttgaaaagctgggttataaaaaa

SEQ ID NO: 18510 - DNA, 325 bp, Homo sapiens
aggatggtcacctaaaattagaatttctggataaaagggcatatgcatatttaagactagtgaatattgaccgggcagagtggctcacacctgtaatcccagcactttgggaggccaaggcgggtggatcacaaggtcaggagatcgagaccatcctggctaacacagtgaaaccccatctctactaaaaatataaaaaaattagccgggtgtggtggcggtcgcctgtagtcccagctgctcaggaggctgaggcaggagaatggcgtgaacccgggaggcggagcttgcagtgagccaatatagggccactgcactccggcct

SEQ ID NO: 18511 - DNA, 708 bp, Homo sapiens
gctcatctgtcaggagatgctatgactactgcttctgatatctctaaatgtcagtctgcttacaccattgctgattttgttcaagggaatctcttcgtgcacttgattccctctgttccctgcgtgatcgaacatgaaagcagtgttgtctgcagatgtgcttgcgctgccctagctgggtgcaaataagagtgtaacctattctgatgtctggtgaaaggacatccatagcatagtgcaagtatgccgtaaacgttgctttttaggcagtttaggaagtcagaccatgcaaattactcatgtgttaacatgcaatactcaaagggttttaatttaactctcttcttttgaattcttcatgatgatttactgtaaatgcttctcagtttgcatgccttgatcattgctgctagtgattttatgtgccagtagacctgagtttagtttaccaattttacttaaatagtaaaagccacttacaaagtgactgcctaggatttttttttcctttcatttgaaataattgataatatgtttttttaaaaagaaaaatgtgttttgtctcttcttttatttggttctggtttgattctttttctcccctctttcctttgttttttttttttaaataaattatgatgttgggattggaagccctgagtaatgaaaatctttggtaagaattgtttatgtagctcaataacgagg

SEQ ID NO: 18512 - DNA, 404 bp, Homo sapiens
tgtgtcaaattattttacctccctttataaaaaacaaactgatttcttcaaaacacctaaaggtagcattgttagagatcattctggttgaagttgtaactaattagtagtgggtacagctgcatataataggaaacccaaacttagatggcttagggaaagtagaagtttatttgccctcacaagtggggagcaaggtagctagcgccacagatgattagggacccaggttaccatcctgtgttctgtccttgaggtgtgtgacttccattcataagtcaccttaagggaggatgtcaggcagatgggcagaaaagagtctccttctgggcctgtcagcttggttacggcaatgctggccacacctagttgcaggagcagctgacagaagtggtcttttgttc

SEQ ID NO: 18513 - DNA, 536 bp, Homo sapiens
cgactctccctgcatggacccagcattcatcctgtccattctgttggccagagggcatttttgttttgttggtttttatttttgcaaggacaggaggtgacactccagacagcattagtgtttcctcctaaaaaaaaaaaaagtatttttaaaaagggacgattgccgtcttcaatatccagttccttaacctttttcttagcattctagcccgtgagaagaagaaatgtgtgaaaattctggagctttcctctcccagggataactggaggccttgaggattgaaagagaaagcgtcggttttttgtccttgagatagtttgctgagaatgatggtttccagcttcatccatgtccctacaaaggacacgaactcatcatttttttatggctgcatagtattccatggtgtatatgtgccacattttcttaatccagtctatcattgttggacatttgggttggttccaagtctttgctattgtgaatagtgccgtaataaacatgtaccctaaaacttaaagtataataaaaag

SEQ ID NO: 18514 - DNA, 797 bp, Homo sapiens
tgtagggggaatcccaaattgtcagcaacccatcactcccaggcaaaatccaaactgctgggctgtccccttggactgatttgtgtgctggcttttggggacagctatcctctgcacagtggacaccaggctctgttaagctgacctctaatgtgccttgaggttggttaccttggtgacagaaactccatttgcaccagcttacattaaaaaaagaggagggagaatatggtcgagtgaccccaggagtgatggggagcactgacggagtttctccctgctctggatagcagatccgctggctcccagcttatgatccatgaagagaacgtcttccccttgggcttcaatttgaagaatcctgaagacgaccctgatggcctttcgcggtccacgtgccccttcttgcactaccgtgatggtcctatccacggacgccttctcttgggttctgtggttggatgcggaggaatcatcgatcctctgtagtggaagggaagggaggacacaccaagaccatgtggccccaagagccgtgagaggagcagaagcctgactggtgcctcttacatgtcactgcagcctcggggggggccaccaggaaaacacctgacatcctgttctctagtaatggtgtggctggaatcattcctgtaccaaataattcacccatttaaagtgtgcaatccaacaatgattggtatactcagagttctgcaactctcaccacaatcaattttggaacatttctatcatccctagcaataaatactatatcttttttttgtgtgtgtgag

SEQ ID NO: 18515 - DNA, 643 bp, Homo sapiens
ctccattgtctgcgtgacaaagtggacgtagaactcccccatttcctgcccagggcgggtgaggaccctgcacacacacggtgtgtttgtgagctgtgcagagtggggtctccctggcaatggccacagcctccaggggcgctgacacctcccgtctaactggtagacagtttctgcctcttcttgtttggggattggagagggaagtgcgtctggatgactactaagatgaggaggctgaggcctagtgctcctagcgggcttggtcaagagcaggaggcggaggtggtggaaggctgtttccctgcgcattctagcccgtgagaagaagaaatgtgtgaaaattctggagctttcctctcccagggataactggaggccttgaggattgaaagagaaagcgtcggttttttgtccttgagatagtttgctgagaatgatggtttccagcttcatccatgtccctacaaaggacacgaactcatcatttttttatggctgcatagtattccatggtgtatatgtgccacattttcttaatccagtctatcattgttggacatttgggttggttccaagtctttgctattgtgaatagtgccgtaataaacatgtaccctaaaacttaaagtataataaaaag

SEQ ID NO: 18516 - DNA, 459 bp, Homo sapiens
ctccattgtctgcgtgacaaagtggacgtagaactcccccatttcctgcccagggcgggtgaggaccctgcacacacacggtgtgtttgtgagctgtgcagagtggggtctccctggcaatggccacagcctccaggggcgctgacacctcccgtctaactggtagacagtttctgcctcttcttgtttggggattggagagggaagtgcgtctggatgactactaagatgaggaggctgaggcctagtgctcctagcgggcttggtcaagagcaggaggcggaggtggtggaaggctgtttccctgcgatcttccagaatctctgctgttcacttttggagagtccagttagcctgtgaaaatgtcgtccctaggggtgagaggactctgggcgggtctctccagtgccgagggagacaccagcctccggctttcaataaatgtagccacagattaca

SEQ ID NO: 18517 - DNA, 1106 bp, Homo sapiens
ctccattgtctgcgtgacaaagtggacgtagaactcccccatttcctgcccagggcgggtgaggaccctgcacacacacggtgtgtttgtgagctgtgcagagtggggtctccctggcaatggccacagcctccaggggcgctgacacctcccgtctaactggtagacagtttctgcctcttcttgtttggggattggagagggaagtgcgtctggatgactactaagatgaggaggctgaggcctagtgctcctagcgggcttggtcaagagcaggaggcggaggtggtggaaggctgtttccctgcggtgacagaaactccatttgcaccagcttacattaaaaaaagaggagggagaatatggtcgagtgaccccaggagtgatggggagcactgacggagtttctccctgctctggatagcagatccgctggctcccagcttatgatccatgaagagaacgtcttccccttgggcttcaatttgaagaatcctgaagacgaccctgatggcctttcgcggtccacgtgccccttcttgcactaccgtgatggtcctatccacggacgccttctcttgggttctgtggttggatgcggaggaatcatcgatcctctgtagtggaagggaagggaggacacaccaagaccatgtggccccaagagccgtgagaggagcagaagcctgactggtgcctcttacatgtcactgcagcctcggggggggccaccaggaaaacacctgacatcctgttctctagtaatggtgtggctggaatcattcctgtaccaaataattcacccatttaaagtgtgcaatccaacaacgaggctccgtctcaaaaacaaacaaacaaacaaacaaacaaagttaaaagaaaccttctcttagacagtagtgatggcttcatttaaattagttgaggactagaaagaggcactgatttatcttcgctgtgaaaggtcctggccacgtgtaatgaatgggccctgtgagtgtgtgtgcatgtatgtgtgtgtacgtgcgtgtggctccctgagagtgtgtgtgtccacactgctgggttcctactcccgagctgccctgatagcatttggggtgggg

SEQ ID NO: 18518 - DNA, 560 bp, Homo sapiens
caatcagagcggtgtgatgacagaggcccagaagagagctcagaggtaactccaagtctagaggaaggggacatgtgataaaggtggcaccacatatcagtggggactgttcagaagatgatgttggaaagccagccctaaaatggaggaataggaatatggattcctaactgagcccctaggaaaagtagactccaaatggactaaatatttgaaagcaaaaggtagttgccatttgtttaataggagaaaaaatgaataatctccagggccagggtggccgtggggttcttaaacaggatccagaaagcacaaacctcaagactaaaatgtatgaacttgaatgcattaatgattatggattaaggatttctgttaaataaatccatcatggcaagggtcaagactgttttcataataatactaaggaaacaatttgcgtttttcacttttacactcatgaatgtaactttgccatgactcattacaagatatttgaaacaattaaagctgaggagggaacaacagctaaaatataccagaaagcaccacaaatcatt

SEQ ID NO: 18519 - DNA, 3377 bp, Homo sapiens
acacttccttcaacattagggcatggcgtgctgtgtgtgtcagtgattgcctctgtggactcatgactttccatcgccatggctttctcttacgccgctgtttggctttcagatgtaatcctgtcttctcctctcttccccacgaaagcgcactcgattttgttaggaatgaacggaagtttaaaaattcttgtgcccacccccgccctccacccattcctgttaaaagttctctggcgaagagccaatgggtgaacgtaattgaaagagctatttactcttttggaaatctgatttgaagtctaagttttcagtaacagaagacacacaagcaatgtggactgccaagcttgaagcacttcgggctctgccttcactcgcatgctaccatgtcgagcccaaactccactttaattaaaagagctgtgctgtgaattccacaacttctgttaaataatttgtattccattatatatattttgcacatctcaggggaccataatgaacatatgaaaggggggggggtgccatcaaatagagaaaacaaatagaagaggtgaatggagactagctggataaaaataacaaattacttcttctctgatgttgtgaaggtcaggttcaggaagcatcaattcacagttaatccggagtaacaatgatctgaacaccagctgttcccaggtccctctttttcatagcccaaccagcatctaaaatgtaaatttaaattacattgcagtcaccatggggagaagaaacctgttcagtggaagcagaagcattgttccttttttaggttggcgcagctttgcaaaactctacccaggataaaccacttatcaccaccaagtgtacttgaaaataaagtttttaacttaaattacaagcatattgcttataatacaatagtgatcattttttgaaagtcttgccatttataacatgggcagtatttggagcttcatttaaaaaccaacaacaaccgataatgactttgcacgattcactttgggatctcaaagtgcttccaaagcattcagatttacaaacaattcacaagacaggtcatctttgtaatacccatacttacaacgaattaacaaaaggagtgacttaagattctccaggaacacagtggcagctattgatgatctgttttctatctgtttgatagagcatcatgagaaatcacaaaatacaatgctatttttctgatgtgtgctaataaagtcaaagaaaacaaatacatcttgacacttttgtccattttcattaaaaaaaaaaaaaagttcagggtgtttggaattttacacctcagcacaccttactggtatcaatggataaagcgggtgattgacagatccacccaaatgccactgcagtcagaagcagatctggacacacccttgtttacagtttcatattgggttgctatagttcccgtgctaaatcaccagctttcaggaacatgactgctcctggcagtggaaggtgctgaaacagaaattttaattaaaaactttatcaagtactcttcacagtgctgcttggcaccatagaaaatcagtacaatatatcgagccctactttggaggagctggatttctgagggagctgatccagttctaagtgtcttctcgaattaggagatagatgatctttgatggggatctcctccgtcaccacaggccagtcacagaaccaactagccacgtgctgccagacctcagtgggcccaagcaggagcaatctcttctatcccccatctcccccaggaccatcccgcccattgtcaacgtcatccagggctcttctggtagtgagtgacttttctgcacatgtttagggcttgggggagctagaacacaggaaacatgaatgcaaaaggcatggaaaacactgttttgctttgggttagtaaaatgtgggcaggacaaagattactattggtctgagctttgccaagtgagatagaatcaactgtcaccccattcctttcccagaaggtcttatggtattaaggatacatccagtattttcccacagatttttattcaggcgatgtttcataaattacatatatgaaaacattcattattacatttccttgtgtgtttcaaacagacattggcaccttcctattgagttaattctctgcatcttttgcagcagcagcccacaaggagattcccagagatggctcccctaacacacagtcctgtgattttacagttctatgacttacagttgatgattcacaagattcaggattctacaagactcaagggggaactaaactttcttacgattgtacatgatcagttatagggctgtaatcattaattgttggcttcaaatgtggacacacacacacacacatcatgccaaggagggaatggggtgtttcaagtcaggcagcgatgattctggaaggttggaaatgtaaggttagaagcttggctggtcttagtaaacttgttcccttgctcccaccaagaagaggtaccaaatgtgagacctgagatctcctccaatatctgtcctctgcagttccgggaaactaatcatgaagtacacatgcagcagctcctccacttcctttcctccgaggtcctcctttccattctcccacctagatactgacacaccgccacggtttccacattggaagggcagaacactgtgcagtatcgtgcacacttgctgggttaggaatagagctgccctagggtcaccttcatgcaagtattgacagctacaaattaaagtccttagagcagttgacacagatactacgttctagaagagaattaaatttaaacgtcaagtttaaagggatcataattctgcaggtatctttctctgagtgactgaatgtgactattgcattagggtaaatgaattaagacgtgcaagtgggatttactgtatgttagaaaggagttttgcagccaagactgccttgaataaaatgtgtttgcactgaaaaaaaattttaaattacttggtctctggttgctgtaaaggtcatccaagatggatgttctgtttatattgtatagtatttcatatgaaataattacagttcatgaaatgtcttccctaatgttactgatttataacagcacatttgtaacatggtttttatcgtgtcagtgtaccatactgtaaatgatgattacttgtcatgcttagtataataacttaaaagaaaaaaaaggacagggatttttgtaagtctatatttgaaagtccctccctatggtgatactgtgttcatgttgtttatgtagtgttgtgtgaaatatccattttggattgtgttactttttaagatattaaataacatttggttatatgtcttaagtggattt

SEQ ID NO: 18520 - DNA, 4695 bp, Homo sapiens
  misc_feature (2791)..(2791): n is a, c, g, or t
agcttccttcacagggggaagaaccaacaacgcagagaccgtgggaaagagcccagcctatcgaaggtgctcaatgaacaggagccgcgctatcgtccagagaggacgcgtgctgccgcctcccgcccctcttgacacgacgaacctggccggccgcagaacgctccagggccgagcgaagatggcctcggtgccggtgtattgcctctgccggctgccttacgatgtgacccgcttcatgatcgagtgtgacatgtgccaggactggtttcatggcagttgtgttggtgttgaagaggagaaggctgctgacattgacctctaccactgccccaactgtgaagtcttgcatgggccctccattatgaaaaaacgccgtggatcttcaaaggggcatgatacacacaaggggaaaccagtgaagaccgggagccctacgttcgtcagagagctccggagtaggacttttgacagctcagatgaagtgattctgaagcccactggaaatcaactgaccgtggaattcctggaagaaaatagcttcagtgtgcccatcctggtcctgaagaaggatgggttgggcatgacgctgccctcgccatcattcactgtgagggatgttgaacactatgttggttctgacaaagagattgatgtgattgatgtgacccgccaggctgactgcaagatgaagcttggtgattttgtgaaatactattacagcgggaagagggagaaagtcctcaatgtcattagtttggaattccctgataccagactttctaaccttgtggagacaccgaagattgttcgaaagctgtcatgggtcgaaaacttgtggccagaggaatgtgtctttgagagacccaatgtacagaagtactgcctcatgagtgtgcgagatagctatacagactttcacattgactttggtggcacctctgtctggtaccatgtactcaagggtgaaaagatcttctacctgatccgcccaacaaatgccaatctgactctctttgagtgctggagcagttcctctaatcagaatgagatgttctttggggaccaggtggacaagtgctacaagtgttccgtgaagcaaggacagacacttttcattcccacagggtggatccatgctgtgctgacgcctgtggactgccttgcctttggagggaacttcttacacagccttaacatcgagatgcagctcaaagcctatgagattgagaagcggctgagcacagcagacctcttcagattccccaactttgagaccatctgttggtatgtgggaaagcacatcctggacatctttcgcggtttgcgagagaacaggagacaccctgcctcctacctggtccatggtggcaaagccttgaacttggcctttagagcctggacaaggaaagaagctctgccagaccatgaggatgagatcccggagacagtgcgaaccgtacagctcattaaagatctggccagggagatccgcctggtggaagacatcttccaacagaacgttgggaagacgagcaatatctttgggctgcagaggatcttcccagccggctccattcccctaaccaggccagcccattccacttcagtgtccatgtccaggctgtcactgccctccaaaaatggttcaaagaagaaaggcctgaagcccaaggaactcttcaagaaggcagagcgaaagggcaaggagagttcagccttggggcctgctggccagttgagctataatctcatggacacatacagtcatcaggcactgaagacaggctctttccagaaagcaaagttcaacatcactggtgcctgcttgaatgactcagatgacgactcaccagacttggaccttgatggaaatgagagcccattggccctattgatgtctaacggcagtacgaaaagggtgaagagtttatccaaatctcggcgaaccaagatagcaaagaaggtagacaaggctaggctgatggcagaacaggtgatggaagacgaatttgacttggattcagatgatgagctgcagattgacgagagattgggaaaggagaaggcgaccctgataataagaccaaaatttccccggaaattgccccgtgcgaagccttgctctgaccccaaccgagttcgtgaaccaggagaagttgagtttgacattgaggaggactatacaacagatgaggacatggtggaaggggttgaaggcaagcttgggaatggtagtggcgctggtggcattcttgatctgctcaaggccagcaggcaggtggggggacctgactatgctgccctcaccgaggccccagcttctcccagcactcaggaggccatccagggcatgctgtgcatggccaacctgcagtcctcatcgtcctcaccggctacctctagcctgcaggcctggtggactgggggacaggatcgaagcagtgggagctccagcagtgggctgggcacagtgtctaacagtcctgcttcccagcgcaccccagggaagcggcccatcaagcggccagcatactggagaaccgagagcgaggaggaggaggagaacgccagtctggatgaacaggacagcttgggagcgtgcttcaaggatgcagagtatatctatccttcactggagtctgatgatgatgaccctgctttgaaatctcgacccaagaaaaagaagaattcagatgatgctccatggagtcctaaagcccgcgtgaccccaactctgccgaagcaggaccgtcctgtgcgtgaggggacccgggtagcctctattganacaggtttggctgcagcagctgcaaagctggcccagcaggagctacagaaggcccaaaagaagaaatatatcaagaagaagcctttgctgaaggaggtagaacagcctcgccctcaagactccaatctcagtctgacagtaccagcccccactgtggctgccacaccacaacttgtcacctcctcctcacccctgcctcctcctgagcctaaacaagaggccctgtcaggaagtctcgctgaccatgagtacaccgctcgtcccaatgcctttggcatggcccaggcaaaccgcagcaccacacctatggcccccggtgtcttcttgacccagcggcgcccttcagttggctcccagagcaatcaggcaggacaaggaaagcgtcccaaaaagggcctggccacagcaaagcagagactcggccgtatcctgaaaatccacagaaatggcaaactacttctgtgagccctcctgtgtcccacccctcacccctttacccccattgccttctccattgtcaactcttggggcactcctggatcctatctgccctggacaaggtgctgaggtgcattgtcctgctttcttgggacttaccaaaggcacggacccctccaccgactccttctagttcccttccccactttcactagagcatcctgcctgccttctccactgaggagcaggtaaatgggagaggtttccagctgactagaaccctcttttctactcgtccaaaccactcccgtcacctgccttgtctgttctttattcttcatcccccgctagagctggaaggcaggatgaggagaggtatgaaggagcctgagccatgaagtgggaagcccagtgcttgacactttctgcaactctagccctatatccagaagcctgcccacctccacccattctgtttgccccatttccccagtccagtggacatgccccacctccagacttgctcatgggagaaggctgtggtctctgccccctcttgccaaatgcttcatggaaatgaagaggaaggcctagagcctccttcctgccccactgtgggccatttccagaagtggcctagaaatgccaacttcacttacctttcaaaagaaaggtgattcctatcacttgtcaaggtagggagaggtcagatgcccaagcctttgaccacggttttgtagcctgttggaggaagctacttttagctggctacacatgaggccacttgttttagggtgagctccagggatttgcctggattttgaaatcatgtagaacattatccacgtggctgtggctgtggctgtggctgggccctggcaggtggaaaaccatctcccagaaacctgaaagcacctgccaatgacgcagataaccctggccctacagcctgcttgctccgcctataccacagagcacagcctggacattatggagggtgtggcgggacggcccacacctgggtcctccatcgggaacttttcatgcttctttctccacctgaggtcttggtctgaagaagacctcaggactcacatcttcactcctgggcctttgcacttccagacgacaggtcatcgttcaagcagaatgcagacaggccattcacgagcccaagttgaagagaagagacgcccatccgtgaaggagcagaccatccatccgatcctccccttcccctgtccttccttcgtggattgtctccattgtccagacagtgcccccacctcccaccgccttgcctcactggcaatctggactcgatggagaacatccccccacctccatttggcactacccaagtggagtgtacccttgccctttccacctgtaccacccactccaacctcaccccagcttgcccaatgcttctggggaatttaatagctaccatgcaggccacaggg

SEQ ID NO: 18521 - DNA, 520 bp, Homo sapiens
gcggccgccagactaggcccaagccgcggtctccagtaggcccgaacggccgggccgaggggaatgttgtggaggaggctgctctgaagcaccgttgagcggctggcgccgcgcgacccagcggggggctcgaggggaaggcgagcgaggttcccggcggtacggggactatcccagaattcgacgcgcgtcgccgtaggggccggaactaccggacgagcctccgctgaggcgcttcgcagtcccggagctagcccggctgccggcgtgtcgctggggctgagctccgcgggcgtggagtccttgcagcccaaagcatgaggaggtccctgtaggattctggactgaagacgttcttgtcaggtttggggcgtgaggaggttcctgtcagttggggaagcgttaagattcctgtaagttttgggggctgcgaggctattactgtcagttttaggatatactgtgaggtacctgaacatttggggagactagggagctctcatcagtttgagggggggct

SEQ ID NO: 18522 - DNA, 4716 bp, Homo sapiens
  misc_feature (2812)..(2812): n is a, c, g, or t
gcggccgccagactaggcccaagccgcggtctccagtaggcccgaacggccgggccgaggggaatgttgtggaggaggctgctctgaagcaccgttgagcggctggcgccgcgcgacccagcggggggctcgaggggaaggcgagcgaggttcccggcggtacggggactatcccagaattcgacgcgcgtcgccgtaggggccggaactaccggacgagcctccgctgaggcgcttcgcagtcccggagctagcccggctgccggcgtgtcgctggggctgagctccgcgggcgtggagtccttgcagcccaaagcatgaggaggtccctgtaggattctggactgaagacgttcttgtcaggtttggggcgtgaggaggttcctgtcagttggggaagcgttaagattcctctatcgtccagagaggacgcgtgctgccgcctcccgcccctcttgacacgacgaacctggccggccgcagaacgctccagggccgagcgaagatggcctcggtgccggtgtattgcctctgccggctgccttacgatgtgacccgcttcatgatcgagtgtgacatgtgccaggactggtttcatggcagttgtgttggtgttgaagaggagaaggctgctgacattgacctctaccactgccccaactgtgaagtcttgcatgggccctccattatgaaaaaacgccgtggatcttcaaaggggcatgatacacacaaggggaaaccagtgaagaccgggagccctacgttcgtcagagagctccggagtaggacttttgacagctcagatgaagtgattctgaagcccactggaaatcaactgaccgtggaattcctggaagaaaatagcttcagtgtgcccatcctggtcctgaagaaggatgggttgggcatgacgctgccctcgccatcattcactgtgagggatgttgaacactatgttggttctgacaaagagattgatgtgattgatgtgacccgccaggctgactgcaagatgaagcttggtgattttgtgaaatactattacagcgggaagagggagaaagtcctcaatgtcattagtttggaattccctgataccagactttctaaccttgtggagacaccgaagattgttcgaaagctgtcatgggtcgaaaacttgtggccagaggaatgtgtctttgagagacccaatgtacagaagtactgcctcatgagtgtgcgagatagctatacagactttcacattgactttggtggcacctctgtctggtaccatgtactcaagggtgaaaagatcttctacctgatccgcccaacaaatgccaatctgactctctttgagtgctggagcagttcctctaatcagaatgagatgttctttggggaccaggtggacaagtgctacaagtgttccgtgaagcaaggacagacacttttcattcccacagggtggatccatgctgtgctgacgcctgtggactgccttgcctttggagggaacttcttacacagccttaacatcgagatgcagctcaaagcctatgagattgagaagcggctgagcacagcagacctcttcagattccccaactttgagaccatctgttggtatgtgggaaagcacatcctggacatctttcgcggtttgcgagagaacaggagacaccctgcctcctacctggtccatggtggcaaagccttgaacttggcctttagagcctggacaaggaaagaagctctgccagaccatgaggatgagatcccggagacagtgcgaaccgtacagctcattaaagatctggccagggagatccgcctggtggaattcaacatcactggtgcctgcttgaatgactcagatgacgactcaccagacttggaccttgatggaaatgagagcccattggccctattgatgtctaacggcagtacgaaaagggtgaagagtttatccaaatctcggcgaaccaagatagcaaagaaggtagacaaggctaggctgatggcagaacaggtgatggaagacgaatttgacttggattcagatgatgagctgcagattgacgagagattgggaaaggagaaggcgaccctgataataagaccaaaatttccccggaaattgccccgtgcgaagccttgctctgaccccaaccgagttcgtgaaccaggagaagttgagtttgacattgaggaggactatacaacagatgaggacatggtggaaggggttgaaggcaagcttgggaatggtagtggcgctggtggcattcttgatctgctcaaggccagcaggcaggtggggggacctgactatgctgccctcaccgaggccccagcttctcccagcactcaggaggccatccagggcatgctgtgcatggccaacctgcagtcctcatcgtcctcaccggctacctctagcctgcaggcctggtggactgggggacaggatcgaagcagtgggagctccagcagtgggctgggcacagtgtctaacagtcctgcttcccagcgcaccccagggaagcggcccatcaagcggccagcatactggagaaccgagagcgaggaggaggaggagaacgccagtctggatgaacaggacagcttgggagcgtgcttcaaggatgcagagtatatctatccttcactggagtctgatgatgatgaccctgctttgaaatctcgacccaagaaaaagaagaattcagatgatgctccatggagtcctaaagcccgcgtgaccccaactctgccgaagcaggaccgtcctgtgcgtgaggggacccgggtagcctctattganacaggtttggctgcagcagctgcaaagctggcccagcaggagctacagaaggcccaaaagaagaaatatatcaagaagaagcctttgctgaaggaggtagaacagcctcgccctcaagactccaatctcagtctgacagtaccagcccccactgtggctgccacaccacaacttgtcacctcctcctcacccctgcctcctcctgagcctaaacaagaggccctgtcaggaagtctcgctgaccatgagtacaccgctcgtcccaatgcctttggcatggcccaggcaaaccgcagcaccacacctatggcccccggtgtcttcttgacccagcggcgcccttcagttggctcccagagcaatcaggcaggacaaggaaagcgtcccaaaaagggcctggccacagcaaagcagagactcggccgtatcctgaaaatccacagaaatggcaaactacttctgtgagccctcctgtgtcccacccctcacccctttacccccattgccttctccattgtcaactcttggggcactcctggatcctatctgccctggacaaggtgctgaggtgcattgtcctgctttcttgggacttaccaaaggcacggacccctccaccgactccttctagttcccttccccactttcactagagcatcctgcctgccttctccactgaggagcaggtaaatgggagaggtttccagctgactagaaccctcttttctactcgtccaaaccactcccgtcacctgccttgtctgttctttattcttcatcccccgctagagctggaaggcaggatgaggagaggtatgaaggagcctgagccatgaagtgggaagcccagtgcttgacactttctgcaactctagccctatatccagaagcctgcccacctccacccattctgtttgccccatttccccagtccagtggacatgccccacctccagacttgctcatgggagaaggctgtggtctctgccccctcttgccaaatgcttcatggaaatgaagaggaaggcctagagcctccttcctgccccactgtgggccatttccagaagtggcctagaaatgccaacttcacttacctttcaaaagaaaggtgattcctatcacttgtcaaggtagggagaggtcagatgcccaagcctttgaccacggttttgtagcctgttggaggaagctacttttagctggctacacatgaggccacttgttttagggtgagctccagggatttgcctggattttgaaatcatgtagaacattatccacgtggctgtggctgtggctgtggctgggccctggcaggtggaaaaccatctcccagaaacctgaaagcacctgccaatgacgcagataaccctggccctacagcctgcttgctccgcctataccacagagcacagcctggacattatggagggtgtggcgggacggcccacacctgggtcctccatcgggaacttttcatgcttctttctccacctgaggtcttggtctgaagaagacctcaggactcacatcttcactcctgggcctttgcacttccagacgacaggtcatcgttcaagcagaatgcagacaggccattcacgagcccaagttgaagagaagagacgcccatccgtgaaggagcagaccatccatccgatcctccccttcccctgtccttccttcgtggattgtctccattgtccagacagtgcccccacctcccaccgccttgcctcactggcaatctggactcgatggagaacatccccccacctccatttggcactacccaagtggagtgtacccttgccctttccacctgtaccacccactccaacctcaccccagcttgcccaatgcttctggggaatttaatagctaccatgcaggccacaggg

SEQ ID NO: 18523 - DNA, 4354 bp, Homo sapiens
  misc_feature (2450)..(2450): n is a, c, g, or t
ctaggggagggttcagtgagagatgaaagaagcttcccgaaaaggcttcagctatcgtccagagaggacgcgtgctgccgcctcccgcccctcttgacacgacgaacctggccggccgcagaacgctccagggccgagcgaagatggcctcggtgccggtgtattgcctctgccggctgccttacgatgtgacccgcttcatgatcgagtgtgacatgtgccaggactggtttcatggcagttgtgttggtgttgaagaggagaaggctgctgacattgacctctaccactgccccaactgtgaagtcttgcatgggccctccattatgaaaaaacgccgtggatcttcaaaggggcatgatacacacaaggggaaaccagtgaagaccgggagccctacgttcgtcagagagctccggagtaggacttttgacagctcagatgaagtgattctgaagcccactggaaatcaactgaccgtggaattcctggaagaaaatagcttcagtgtgcccatcctggtcctgaagaaggatgggttgggcatgacgctgccctcgccatcattcactgtgagggatgttgaacactatgttggttctgacaaagagattgatgtgattgatgtgacccgccaggctgactgcaagatgaagcttggtgattttgtgaaatactattacagcgggaagagggagaaagtcctcaatgtcattagtttggaattccctgataccagactttctaaccttgtggagacaccgaagattgttcgaaagctgtcatgggtcgaaaacttgtggccagaggaatgtgtctttgagagacccaatgtacagaagtactgcctcatgagtgtgcgagatagctatacagactttcacattgactttggtggcacctctgtctggtaccatgtactcaagggtgaaaagatcttctacctgatccgcccaacaaatgccaatctgactctctttgagtgctggagcagttcctctaatcagaatgagatgttctttggggaccaggtggacaagtgctacaagtgttccgtgaagcaaggacagacacttttcattcccacagggtggatccatgctgtgctgacgcctgtggactgccttgcctttggagggaacttcttacacagccttaacatcgagatgcagctcaaagcctatgagattgagaagcggctgagcacagcagacctcttcagattccccaactttgagaccatctgttggtatgtgggaaagcacatcctggacatctttcgcggtttgcgagagaacaggagacaccctgcctcctacctggtccatggtggcaaagccttgaacttggcctttagagcctggacaaggaaagaagctctgccagaccatgaggatgagatcccggagacagtgcgaaccgtacagctcattaaagatctggccagggagatccgcctggtggaattcaacatcactggtgcctgcttgaatgactcagatgacgactcaccagacttggaccttgatggaaatgagagcccattggccctattgatgtctaacggcagtacgaaaagggtgaagagtttatccaaatctcggcgaaccaagatagcaaagaaggtagacaaggctaggctgatggcagaacaggtgatggaagacgaatttgacttggattcagatgatgagctgcagattgacgagagattgggaaaggagaaggcgaccctgataataagaccaaaatttccccggaaattgccccgtgcgaagccttgctctgaccccaaccgagttcgtgaaccaggagaagttgagtttgacattgaggaggactatacaacagatgaggacatggtggaaggggttgaaggcaagcttgggaatggtagtggcgctggtggcattcttgatctgctcaaggccagcaggcaggtggggggacctgactatgctgccctcaccgaggccccagcttctcccagcactcaggaggccatccagggcatgctgtgcatggccaacctgcagtcctcatcgtcctcaccggctacctctagcctgcaggcctggtggactgggggacaggatcgaagcagtgggagctccagcagtgggctgggcacagtgtctaacagtcctgcttcccagcgcaccccagggaagcggcccatcaagcggccagcatactggagaaccgagagcgaggaggaggaggagaacgccagtctggatgaacaggacagcttgggagcgtgcttcaaggatgcagagtatatctatccttcactggagtctgatgatgatgaccctgctttgaaatctcgacccaagaaaaagaagaattcagatgatgctccatggagtcctaaagcccgcgtgaccccaactctgccgaagcaggaccgtcctgtgcgtgaggggacccgggtagcctctattganacaggtttggctgcagcagctgcaaagctggcccagcaggagctacagaaggcccaaaagaagaaatatatcaagaagaagcctttgctgaaggaggtagaacagcctcgccctcaagactccaatctcagtctgacagtaccagcccccactgtggctgccacaccacaacttgtcacctcctcctcacccctgcctcctcctgagcctaaacaagaggccctgtcaggaagtctcgctgaccatgagtacaccgctcgtcccaatgcctttggcatggcccaggcaaaccgcagcaccacacctatggcccccggtgtcttcttgacccagcggcgcccttcagttggctcccagagcaatcaggcaggacaaggaaagcgtcccaaaaagggcctggccacagcaaagcagagactcggccgtatcctgaaaatccacagaaatggcaaactacttctgtgagccctcctgtgtcccacccctcacccctttacccccattgccttctccattgtcaactcttggggcactcctggatcctatctgccctggacaaggtgctgaggtgcattgtcctgctttcttgggacttaccaaaggcacggacccctccaccgactccttctagttcccttccccactttcactagagcatcctgcctgccttctccactgaggagcaggtaaatgggagaggtttccagctgactagaaccctcttttctactcgtccaaaccactcccgtcacctgccttgtctgttctttattcttcatcccccgctagagctggaaggcaggatgaggagaggtatgaaggagcctgagccatgaagtgggaagcccagtgcttgacactttctgcaactctagccctatatccagaagcctgcccacctccacccattctgtttgccccatttccccagtccagtggacatgccccacctccagacttgctcatgggagaaggctgtggtctctgccccctcttgccaaatgcttcatggaaatgaagaggaaggcctagagcctccttcctgccccactgtgggccatttccagaagtggcctagaaatgccaacttcacttacctttcaaaagaaaggtgattcctatcacttgtcaaggtagggagaggtcagatgcccaagcctttgaccacggttttgtagcctgttggaggaagctacttttagctggctacacatgaggccacttgttttagggtgagctccagggatttgcctggattttgaaatcatgtagaacattatccacgtggctgtggctgtggctgtggctgggccctggcaggtggaaaaccatctcccagaaacctgaaagcacctgccaatgacgcagataaccctggccctacagcctgcttgctccgcctataccacagagcacagcctggacattatggagggtgtggcgggacggcccacacctgggtcctccatcgggaacttttcatgcttctttctccacctgaggtcttggtctgaagaagacctcaggactcacatcttcactcctgggcctttgcacttccagacgacaggtcatcgttcaagcagaatgcagacaggccattcacgagcccaagttgaagagaagagacgcccatccgtgaaggagcagaccatccatccgatcctccccttcccctgtccttccttcgtggattgtctccattgtccagacagtgcccccacctcccaccgccttgcctcactggcaatctggactcgatggagaacatccccccacctccatttggcactacccaagtggagtgtacccttgccctttccacctgtaccacccactccaacctcaccccagcttgcccaatgcttctggggaatttaatagctaccatgcaggccacaggg

SEQ ID NO: 18524 - DNA, 1050 bp, Homo sapiens
gcggccgccagactaggcccaagccgcggtctccagtaggcccgaacggccgggccgaggggaatgttgtggaggaggctgctctgaagcaccgttgagcggctggcgccgcgcgacccagcggggggctcgaggggaaggcgagcgaggttcccggcggtacggggactatcccagaattcgacgcgcgtcgccgtaggggccggaactaccggacgagcctccgctgaggcgcttcgcagtcccggagctagcccggctgccggcgtgtcgctggggctgagctccgcgggcgtggagtccttgcagcccaaagcatgaggaggtccctgtaggattctggactgaagacgttcttgtcaggtttggggcgtgaggaggttcctgtcagttggggaagcgttaagattcctctatcgtccagagaggacgcgtgctgccgcctcccgcccctcttgacacgacgaacctggccggccgcagaacgctccagggccgagcgaagatggcctcggtgccggtgtattgcctctgccggctgccttacgatgtgacccgcttcatgatcgagtgtgacatgtgccaggactggtttcatggcagtgagacctgcttgttgtagaaaacacagaaaaagaataaagaaggaaatataactcacctaagtctactactgtctggcacaatccactgttaaatttgttgttgcattaactcccatcttttgacttagaatataaacatatttttacaagatgggattgcgttataaataccattttacaacctattttttatttctagttaatgttacaatgtaattgccagttcattaaatattcagctaaacttgatttctgatatcccacaatatatatgtgtcaccggttaatttggtaatttcctttatggttggacattgtacttttttgaacattatttgtacttttttatattataaataatgtgaggaaactttgggcgttctggaaaggttttgcatcttgatatgagtgctgattaaaacaaaaacattttggaaagcaactt

SEQ ID NO: 18525 - DNA, 367 bp, Homo sapiens
ttttcttctttttaaaaatgatgaatattattggagttctttttatctattgagatcatggcataagtttcttaaggtggagaattacactaaaagattttctaatattaagccatccttgcatttctgggaaaaatccattttgtttatgtgacattttgtacacatcattgaatttcctgattttttgcgtagcatttttgcttccatgttaacaagcaagattctgctatgatttttgtattcatactttatcagattggacatcaaaattatgctaaattcattaaatgagtctctgtttacataaaatggtgtctaagactggaattacttgttttacaaatgtttgatagagcttactggc

SEQ ID NO: 18526 - DNA, 249 bp, Homo sapiens
ctgtacccagtcttcatctctattttccattgccttcactaggctttcatcatgctagccttcttttcatttcatcaatatgtcttacggcattggcacttgctcttctctctgcctgaaagccttcttccagatctttgagtaggggttggaggcggttgaggagttcttgtaagtaatgctggagttccaaggtatctcctcactgaggctttgcctatccagtttaattcagtgccccctactgcc

SEQ ID NO: 18527 - DNA, 1205 bp, Homo sapiens
aacacattgacacacagagaggaacaacagacatgggggcctactggagggtgggcggaaggagggagaggatcaggaaaaataactaatgagtactaggcttaatacctgggtgatgaaataatccgtacaacaaatttctattatatgttacctatataacaaacctgtacatgtacccctgaacttaaaaggtaaagaagaaaactacaaaacattgctgaaataaattaaggaagacataaataaatataaggacatcccgtgttcatgaatttcaggctttaatattgttaagatgacaatatcctaccaagcaatctacagattcagtgcaatccctatcaaaattccaacagcatttttgtagaaaatctattcgaatattcatatggactatcagcagacctcaagtagccaaaaaattttgaaaaggaagagcaaatatgtaggactcacaattcctgatttcaaatcttaatataaatctacagcaattaaaacagtagggtactagtataaggagagagatagagatcaatggcatagaatagagggcccacaaataagaactcttacatatatggtgaagtgagttttgtttttcgtttttgtttttgttttttgtttttgagatggaatcttgctctgccgtccagcctggagtgcagtggcgtgatctcggctcactgcaagctctgcctcctgggttccgccattctcctgcctcagcctcccaagcagctgggactacaggtgcccgccaccacgcccagctaattttttgtatttttagtagagacggggtttcaccgtgttagccaggatggtctcgatctcctgaccttgtgatccacccgccttggcctcccaaagtgctgggattacaggcttgagccaccatgcccggccgactgaaactcttaagagccaaaactataaaaccattagatgaaaatataggggaatgtcttgatgacactgcgtttggcagtgatttcttggatatgacaccaaaagcacaggcaacaaaggaaaaaaatagttaagttgaactctatcaaaatttggaagtttcctgcatcaaagaacactgtcaaaagagtgaaaagtcaacccatacagtgtgaaaagattttcaaattgtatatctgctaatggattactatccagaatatatagggaattcctataattcaatgtca

SEQ ID NO: 18528 - DNA, 361 bp, Homo sapiens
gatattaaatcggtaataaaaacctcccaaagtgctgggattacaggcttgagccaccatgcccggccgactgaaactcttaagagccaaaactataaaaccattagatgaaaatataggggaatgtcttgatgacactgcgtttggcagtgatttcttggatatgacaccaaaagcacaggcaacaaaggaaaaaaatagttaagttgaactctatcaaaatttggaagtttcctgcatcaaagaacactgtcaaaagagtgaaaagtcaacccatacagtgtgaaaagattttcaaattgtatatctgctaatggattactatccagaatatatagggaattcctataattcaatgtca

SEQ ID NO: 18529 - DNA, 445 bp, Homo sapiens
gtgaggcgtgtccttacatttaaaacagctgagttaggaattatctccacagcctcgtgatcgtgaagggatgtgaagcagcactcaggataacgaagagtgcttgtgctgctcaccagtcggtaccaccatggcatacatggcaattgggacaatggagtttacaatttcagacaaaaactggaaaattacttgaaaacgagaaatgcattatttgcagatattctgctaactccagcatgaaccacagtgcactcagatagggtcccataagtgccctggctctgcgtgtgtgctctatcttgccttgccttggcttctctcgtaaagagcaggggccactttactctcttcctggccccatctagagggacttctgtttagatttattttagcagcttctatttagatttattttggcttgggtctccctttatctttctag

SEQ ID NO: 18530 - DNA, 2124 bp, Homo sapiens
  misc_feature (802)..(802): n is a, c, g, or t
agcccagcctcgggggccagccccctccgcccaccgcacacgggctggccatgcggcggctctgaacgatgtcctcctcctcctacgccaagaacgggaccgcggacgggccgcactcccccacctcgcaggtggcccgaggcaccacaacccggaggagcaggttgaaaagatccgatggcagcaccacttcgaccagcttcatcctcagacagggttcagcggattcctacacaagcaggccgtctgactccgatgtctctttggaagaggaccgggaagcaattcgacaggagagagaacagcaagcagctatccagcttgagagagcaaagtccaaacctgtagcatttgccgtgaagacaaatgtgagctactgcggcgccctggacgaggatgtgcctgttccaagcacagctatctcctttgatgctaaagactttctacatattaaagagaaatataacaatgattggtggataggaaggctggtgaaagagggctgtgaaattggcttcattccaagtccactcagattggagaacatacggatccagcaagaacaaaaaagaggacgttttcacggagggaaatcaagtggaaattcttcttcaagtcttggagaaatggtatctgggacattccgagcaactcccacatcaacagcaaaacagaagcaaaaagtgacggagcacattcctccttacgatgttgtaccgtcaatgcgtccggtggtgttagtggggccgtcactgaaaggttacgaggtaacagacatgatgcagaaagccctctttgattncctgaagcacaggtttgatgggaggatttcaataacgagagtgacagctgacatttctcttgctaagaggtctgtcctaaataatcccagcaagagagcaataattgaacgttcgaacacccggtccagcttagcggaagtacaaagtgaaattgaaagaatctttgagttggcaagatctttgcaactggttgttcttgatgcagacaccatcaatcacccagcacaacttataaagacttccttagcaccaattattgttcatgtaaaagtctcatctccaaaggttttacagcggttgattaaatctagaggaaagtcacaaagtaaacacttgaatgttcaactggtggcagctgataaacttgcacaatgccccccagaaatgtttgatgttatattggatgaaaatcagcttgaggatgcatgtgaacatctaggggagtacctggaggcgtactggcgtgccacccacacaaccagtagcacacccatgaccccgctgctgggaaggaatttgggctccacggcactctcaccatatcccacagcaatttctgggttacagagtcagcgaatgaggcacagcaaccactccacagagaactctccaattgaaagacgaagtctaatgacctctgatgaaaattatcacaatgaaagggctcggaagagtaggaaccgcttgtcttccagttctcagcatagccgagatcattaccctcttgtggaagaagattaccctgactcataccaggacacttacaaaccccataggaaccgaggatcacctgggggatatagccatgactcccgacataggctttgagtctaatgaaacaaaaaatattcatctgttgacaatttgccatagcagtgctaggataaaccaatcatcttaacttggctaacatagcacagtatttactgtgctaatgggctgctgtcattttatgctaagtaaggggcaaaaaaaaaaattacattatgcccttgagtctagatggatattagatgcccgatcatatagatatttttaagtgcaacatttacatgataacagtacattttgttttcttcatagatttagacacatcaatttgtaatttagggtacttacaaggcacatataaaataatttcccatgctggaaattccaaatgaccagttccagttggaaccaatttataaaccaattcctgttggaatttgggtgaattgactagaaagtctacttgagcatgttgtaatcaactgaaaaatctggggggaaaaaaaaaaaactaataagaaaatcgaaataccaatagaagccaaatcca

SEQ ID NO: 18531 - DNA, 1040 bp, Homo sapiens
agcccagcctcgggggccagccccctccgcccaccgcacacgggctggccatgcggcggctctgaacgatgtcctcctcctcctacgccaagaacgggaccgcggacgggccgcactcccccacctcgcaggtggcccgaggcaccacaacccggaggagcaggttgaaaagatccgatggcagcaccacttcgaccagcttcatcctcagacagggttcagcggattcctacacaagcaggccgtctgactccgatgtctctttggaagaggaccgggaagcaattcgacaggagagagaacagcaagcagctatccagcttgagagagcaaagtccaaacctgtagcatttgccgtgaagacaaatgtgagctactgcggcgccctggacgaggatgtgcctgttccaagcacagctatctcctttgatgctaaagactttctacatattaaagagaaatataacaatgattggtggataggaaggctggtgaaagagggctgtgaaattggcttcattccaagtccactcagattggagaacatacggatccagcaagaacaaaaaagaggacgttttcacggagggaaatcaagtggaaattcttcttcaagtcttggagaaatggtatctgggacattccgagcaactcccacatcaacagacggagcacattcctccttacgatgttgtaccgtcaatgcgtccggtggtgttagtggggccgtcactgaaaggttacgaggtacaaatatcatctgttactcttcagttcttgatcgagcacccaggagacagtcatgttgacgcttgctcctcaagggtctgtttccacgtgggtcctgatggaagccagtgctcagcatgggaaggcagggggtaccgtgtggggctcatgaggccctctgccctttctttcctctcttgcacacttctcatcttttatgtattacattgtttagaaatacctccctcaaaatattcacaatgggaagatctggtcaaagatttgctgtacattaaatgcaaagaaaagga

SEQ ID NO: 18532 - DNA, 4635 bp, Homo sapiens
  misc_feature (437)..(437): n is a, c, g, or t
  misc_feature (2864)..(2864): n is a, c, g, or t
  misc_feature (3956)..(3956): n is a, c, g, or t
  misc_feature (4312)..(4312): n is a, c, g, or t
cactcctgggatggaccctgccgtgaacccggcctttcccccagctgccccggcagggtacggtggataccagccccactccggccaggacttcgcctacggcagccgaccccaggagcccgtccccacggccaccaccatggctacctaccaggacagttacagctacggacagtcagcagctgccaggagctatgaggacaggccgtacttccagtctgctgccctccagtctgggcgcatgacagccgcagactccggccagccagggacccaagaagcctgcgggcagcccagcccccatggcagtcacagccacgctcagcccccacagcaggcgcccatagtggagtccggacagccagcgagcaccttgtcctcgggatacacctaccccacggcgacaggcgtccagcccgagtcgtcagcttccatcntgacctcctaccccccgccctcctacaaccccacctgcaccgcctacacggcaccaagctacccgaactatgacgcgtcggtgtactccgctgccagccctttctatcctccagcgcagcccccgcctcccccgggacccccgcagcagctgcccccgccgcccgcgcctgcaggctcaggaagcagccccagggccgactcgaagccaccgcttcccagcaagctgccgagacccaaggcggggcccaggcagctccagcttcactactgcgacatctgcaagatcagctgcgctggcccccagacctaccgggaacatctgggagggcagaagcacagaaagaaggaggcggcccagaagacaggcgtgcagcccaacgggagcccgcgcggggtgcaggcgcagctgcattgcgacctgtgcgccgtgtcctgcaccggggcggacgcctacgcggcccacatccggggatccaagcaccagaaggtcttcaagctgcacgccaaactggggaagcccattcccaccctcgagcctgcactggccacagagagcccccccggggcagaggccaagcccacgtcccccactggccccagcgtgtgtgcctcgagcaggccagcgctggccaagagacccgtggcctcgaaggccttatgcgaggggcctcctgagccacaggcagcaggctgcagaccccagtgggggaaaccagcccaacctaaattagagggtcccggagcacctacccaaggaggctcaaaggaagctcccgcgggctgctctgatgcgcagccggtgggcccggaatatgtggaggaggtgttcagcgacgaagggcgagtgcttcgcttccactgcaagctgtgcgagtgcagtttcaacgaccttaacgcgaaggacctgcacgtgagggggcggcggcaccggctgcagtaccggaagaaagtgaacccggaccttcccattgccacggagcccagcagccgggctcggaaggtcctggaggagcgcatgaggaagcagcggcacctggcggaggagcggctggagcagctgcggcgctggcacgcggagaggaggcggctggaggaggagccaccccaggacgtgccgccccacgcgccgcccgactgggcccagcctctgctcatgggcaggccggagtcacccgccagcgccccactccagcccgggcggcggccggcgtccagcgacgaccggcacgtcatgtgcaagcacgccaccatctaccccacggagcaggagctcctggccgtgcagagggccgtgtcccacgcagagcgggccctcaagctggtgtccgacacactggccgaggaggaccggggccgccgagaggaagagggtgacaagcgcagcagcgttgccccccagactcgggtcctgaaaggcgtcatgcgagtaggcatcctggcgaaaggcctcctcctgcgtggggacaggaacgtgcgcctcgctctgctctgctccgagaagcccacgcacagcctgctgcggaggatcgcccagcagctgccccggcagctccagatggtgaccgaggatgagtatgaggtctcctccgaccctgaagccaacattgtcatctcctcctgtgaggagcccaggatgcaggtcaccatatctgtcacctcacctctgatgcgggaggacccctccacagacccaggtgtggaggagcctcaggctgatgcaggtgatgtcctgagccccaagaagtgcctcgagtccctggccgccctccgtcatgccaggtggtttcaggctcgagccagcggcctgcagccatgcgtgatcgtcatcagggtcctgagggacctctgccggcgtgtgcccacctggggggccctgccagcctgggccatggagctgctggtggagaaggctgtgagcagtgcggctgggcccctgggccccggggatgcagtcaggcgagtcctggagtgcgtggccacagggacgctcctgacagacgggcccgggctccaggatccctgcgagagagaccagacagatgccctcgagcccatgaccctccaagagcgggaagacgtgaccgccagcgcccagcacgccctgcgaatgctggccttccggcagacccacaaggtcctgggcatggatctcctgccgcccagacaccggctgggggcccgcttccggaagaggcaacggggacctggcgagggagaggagggcgcaggggagaagaagcggggccggcggggcggagaggggctcgtgtgagccgcctacctcccccacctgcgggcctttgcatccctgcactcctggacgtgtgcgcgccgaccaatggctgcttcatccccgacgttggacaatggtcatttccttttgagtaacgctctgtaggtttcctttaaaacacctgtgcttcagnccgggcactgtggctcatgcctttaatcccagcactttgggaggctgagttgcttgagcctgagagttcaaggccagcccagacaacagagtgagacccccatctctccaaaatatttttaaaaatcagcttggcatggttggtggccaggcgcggtgattcacgcctgtaatcccagcactttgagaggccgaggtgggcagatcgcctgaggtcaggagttcgagaccggcctggtcaacatggtgaaaccctgtctctagtaaaaaacacaacaattagcctggcgtggtggtgtgcacctgtagtcccagctacttgggaggctgagtccggagccttgaggccaggagggcagtgagctgtgattgcaccgtgacactccagcctgggcaacagaagaagactttgtcacttaaaagaaatgttttttaacatttgtgcttaaattgttacagaaatgacaccatccagccctgggagtggcaccccttcctcgagggccccatcccccacagccaggggggccagcagtacagcaagcagattctaaactcgggggcatcttgctggctctaaactcacctcgtggtacaggaaggggttttaaaatacttcctctgggctgcgcatggtggctcacacctataatcccagcactttgggaggccaagcttggtggatcgcttgagcccagcggtttaagatcagtctgggcaatatggtgacaccccatctctacaaaaaattagccagttgtggtggcccaagcctgtagtcccagctactcgggaggctgaggccgtaggatcccttgagcccaggagttcgaggctgcagcgagccgagattgcgctactgaactccagcctgggttacagagcgagaccctgtctcaaagaaacaaacaaacaaacaaacaaacaaacaaaactttctttggatgcggctgcggcatggatttgaaatcacgtgggcaggccctgttctggggccccaccacatgtgcaggacaagcccaggggagctcccagccggcatccccacgcccccagcccagcctgctccaaacagaccccccacccacctccncagccaggatgtcagcagggcctgagccaggctcgtcccctgtggggagagccacagggccaggtggacacgccgacgggcgatgaggatcctggctgggcctcccccgggaacagctgtgctggacagtcagacccggagcccagaggcacccccacccaccccccgccccgagccctgtaccactgagtgcctttcacagagaaaacccactctgccatgtgtcactgaggcctggatttgagcttccgtccttccttcctccctctctccctgatgtaggccttggctggccctgaggcagggggtccccaatccccccttgtggtagcagggcccgggacccgtgcctgggngacccggggaggggccgccgtcttgtggatgctggccatggtgggcaggcgcctcctggcactgatggatgtgggggcacccccttctgagtccccaccccaacctgttcaaaccttccgcttggtcagtttttttttctttggccagctgcccagtggcattgaatgagaaaagtccacctttgggcagatgtgatctccagccagtggctcagttttgtttctctgtgtttgaaggacagcctgcatgtggctctgtctgaatgtctttgtagagctacctggaaattgggaggcagggggaataaaggaaatcatttgtc

SEQ ID NO: 18533 - DNA, 2756 bp, Homo sapiens
  misc_feature (985)..(985): n is a, c, g, or t
  misc_feature (2077)..(2077): n is a, c, g, or t
  misc_feature (2433)..(2433): n is a, c, g, or t
gcggccgcctcagccccgtgggctcccagcgcagaccgggacgcctgccatcagcttcctggccgagtgctgacttgacaaccaacgctggctcctggctgatggggtcgggaagtgtggaaggagtgggtgctgccctgggggtggggacgctgccgtctcgtggccactcaacagcctggtggcaccgggctcatgtgggagtggactctgtttccacccgccaccttcgaggcccgccaggctccctattatcctccctggggttcacgctcacgacagagcccggcgccatgccgtgtggccacgtgagcccctgaaagctaaccgtgtgcttctcccccgaaggctcgagccagcggcctgcagccatgcgtgatcgtcatcagggtcctgagggacctctgccggcgtgtgcccacctggggggccctgccagcctgggccatggagctgctggtggagaaggctgtgagcagtgcggctgggcccctgggccccggggatgcagtcaggcgagtcctggagtgcgtggccacagggacgctcctgacagacgggcccgggctccaggatccctgcgagagagaccagacagatgccctcgagcccatgaccctccaagagcgggaagacgtgaccgccagcgcccagcacgccctgcgaatgctggccttccggcagacccacaaggtcctgggcatggatctcctgccgcccagacaccggctgggggcccgcttccggaagaggcaacggggacctggcgagggagaggagggcgcaggggagaagaagcggggccggcggggcggagaggggctcgtgtgagccgcctacctcccccacctgcgggcctttgcatccctgcactcctggacgtgtgcgcgccgaccaatggctgcttcatccccgacgttggacaatggtcatttccttttgagtaacgctctgtaggtttcctttaaaacacctgtgcttcagnccgggcactgtggctcatgcctttaatcccagcactttgggaggctgagttgcttgagcctgagagttcaaggccagcccagacaacagagtgagacccccatctctccaaaatatttttaaaaatcagcttggcatggttggtggccaggcgcggtgattcacgcctgtaatcccagcactttgagaggccgaggtgggcagatcgcctgaggtcaggagttcgagaccggcctggtcaacatggtgaaaccctgtctctagtaaaaaacacaacaattagcctggcgtggtggtgtgcacctgtagtcccagctacttgggaggctgagtccggagccttgaggccaggagggcagtgagctgtgattgcaccgtgacactccagcctgggcaacagaagaagactttgtcacttaaaagaaatgttttttaacatttgtgcttaaattgttacagaaatgacaccatccagccctgggagtggcaccccttcctcgagggccccatcccccacagccaggggggccagcagtacagcaagcagattctaaactcgggggcatcttgctggctctaaactcacctcgtggtacaggaaggggttttaaaatacttcctctgggctgcgcatggtggctcacacctataatcccagcactttgggaggccaagcttggtggatcgcttgagcccagcggtttaagatcagtctgggcaatatggtgacaccccatctctacaaaaaattagccagttgtggtggcccaagcctgtagtcccagctactcgggaggctgaggccgtaggatcccttgagcccaggagttcgaggctgcagcgagccgagattgcgctactgaactccagcctgggttacagagcgagaccctgtctcaaagaaacaaacaaacaaacaaacaaacaaacaaaactttctttggatgcggctgcggcatggatttgaaatcacgtgggcaggccctgttctggggccccaccacatgtgcaggacaagcccaggggagctcccagccggcatccccacgcccccagcccagcctgctccaaacagaccccccacccacctccncagccaggatgtcagcagggcctgagccaggctcgtcccctgtggggagagccacagggccaggtggacacgccgacgggcgatgaggatcctggctgggcctcccccgggaacagctgtgctggacagtcagacccggagcccagaggcacccccacccaccccccgccccgagccctgtaccactgagtgcctttcacagagaaaacccactctgccatgtgtcactgaggcctggatttgagcttccgtccttccttcctccctctctccctgatgtaggccttggctggccctgaggcagggggtccccaatccccccttgtggtagcagggcccgggacccgtgcctgggngacccggggaggggccgccgtcttgtggatgctggccatggtgggcaggcgcctcctggcactgatggatgtgggggcacccccttctgagtccccaccccaacctgttcaaaccttccgcttggtcagtttttttttctttggccagctgcccagtggcattgaatgagaaaagtccacctttgggcagatgtgatctccagccagtggctcagttttgtttctctgtgtttgaaggacagcctgcatgtggctctgtctgaatgtctttgtagagctacctggaaattgggaggcagggggaataaaggaaatcatttgtc

SEQ ID NO: 18534 - DNA, 541 bp, Homo sapiens
  misc_feature (534)..(534): n is a, c, g, or t
cctcacccacattcgtaagtcataagtgagcttgcattaagaccatgaggttgtctgaaccagttggatgaaaagggaggacaataattctgaaattcattaagaaaacacaaggtggcagcagcggcccctcccgagcgccctcacctgtggccgaagcggggcggcaactgtgctcagtggaagaggctcactggccacacgtgggcttctctatgctcaggttttctgcaccaggctgacggatgcggggatccctccagaagtcatcatgggcatattctctaacatctcctccatccaccgcttccacgggcagttcctgctgccggagctgaagacgcggatcacggaggagtggtgagtaccatctgcgcatgcccatggggcccctcaagtgttctctagacctgggttcatgtgcctgagagcgaggcaagtgctgggggactgtctcatggtggctgggcgcctcccttctctgcacggtcctgggtccgatccagactccagcctgggcaacagagcaagacnctgtctc

SEQ ID NO: 18535 - DNA, 506 bp, Homo sapiens
atgttgtttagcattttcctaaggcagttttggacccatacaagtggggataaccgcaatgagtatccctccccagctccagaaacctcagcctggtgctgttcttatggcccctcagcccctagccccgacacacacacacacacacacgcacacacacacacacacacccccaattttctgtaatattttaaagcatatcccagacctctttttattctgctcagctacagtaatggtaagcttattttaggtagttttcttttaaacaggaaaaaaaaaaagaaagaaaaacacctgcaggcttcagtttccctgactggagaggttgagataaacatttctagtggcagttccagctctgacatcctggggaactcgatacatatctttgccttttcctaaagtcttcttaacagtggtttcggcacccataacaaagtgtctcaagggaggcacctcctccccagagaggaaatgctgggtgtggaccaagcttcaaaagc

SEQ ID NO: 18536 - DNA, 4942 bp, Homo sapiens
  misc_feature (2344)..(2344): n is a, c, g, or t
ggccgccgcagctgtgagcctagcacctgatcagtggagagctgtggattgcatgtttgtttgccattgcccccgccaccctgcaagttgcaccttctagaatcagcaagccaagctcctctcacccagcgtaatgatgcggaaatgcaaatgcaccatcatgttgtgacccatattgcgaaaattagaaaaaaggaagttgtgtttcgctattgcacgaagttcagcccagaggagaaactcgctcgccttcagaagacagtacctcctaaatggctctactttgaacctgctgggcaaggaagagattttcaaggaaaccatctaccgtgtgcaagctcctgccggccaaccccagaccccagcacggagccaggcgcctgtgcccgccgaccctcagcatcctcctcagaaaggctggtggcatcaggaagcccctggccagcctccacctgagcccagtgagctcagctttaaggatggagtcaggcagggggtcctcaacccctccaggacccattgctgccctagggatgccagacactgggcctggcagttcctccctagggaagcttcaggcgctccctgttgggcccagagcccactgtggggaccctgtcagcctggctgcagcaggggacggctctccagacataggccccacgggagagctgagtggtagcttaaagatccccaaccgggacagcgggatcgacagtccctcctccagtgtggctggagagaactttccctgcgaggagggcttggaggctggcccaagccccactgtactgggggcgcacgcagagatggccctggacagccaggtcccgaaggtcaccccccaggaggaggcggacagcgacgtgggtgaggaacctgactctgagaacaccccccagaaggctgacaaggatgccggcctggcccagcactctggcccccagaagcttctccacattgcccaggagctcctgcacaccgaggagacctatgtgaagcggctgcacctgctggaccaggttttctgcaccaggctgacggatgcggggatccctccagaagtcatcatgggcatattctctaacatctcctccatccaccgcttccacgggcagttcctgctgccggagctgaagacgcggatcacggaggagtgggacacaaacccacggctcggggacatcctgcagaagctggccccattcctgaagatgtacggcgagtatgtcaagaactttgaccgagccgtagggctggtgagcacgtggacccagcgctccccactgtttaaagacgtcgtccacagcatccagaagcaggaggtatgcgggaacctgacgctgcagcaccacatgctggagcccgtgcagagggtcccccggtacgagctgctgctcaaggactatctgaagaggctcccgcaggacgccccagaccggaaggatgcggagaggtccttggagctcatctccacagccgccaaccactccaatgctgccattcggaaagtggagaaaatgcacaagctcttggaggtgtacgagcagctgggtggggaagaagacattgtcaacccggccaatgaactgatcaaggagggccaaatccagaaactgtcagccaagaacggcaccccccaggaccgccacctcttcctgttcaacagcatgatcctttactgtgtgcccaagctgcggctcatgggccagaagttcagcgtccgggagaagatggacatctcaggcctccaggtgcaggatatcgtcaagccaaacacagcacatacattcatcataacgggaagaaaaaggtccctggagctgcagacgcggacagaggaagagaagaaagaatggattcagatcatccaggccaccatcgagaagcacaaacagaacagcgaaaccttcaaggcttttggtggcgcctttagccaggatgaggaccccagcctctctccagacatgcctatcacgagcaccagccctgtggagcctgtggtgaccaccgaaggcagttcgggtgcagcagggctcgagcccagaaaactatcctctaagaccagacgtgacaaggagaagcagagctgtaagagctgtggtgagaccttcaactccatcaccaagaggaggcatcactgcaagctgtgtggggcggtcatctgtgggaagtgctccgagttcaaggccgagaacagccggcagagccgtgtctgcagagattgtttcctgacacagccagtggcccctgagagcacagaggtgggtgctcccagctcctgctcccctcctggtggcgcggcagagcctccagacacctgctcctgtgccccagcagctcnagctgcctctgctttcggagtgtccctgggaccaggatagatgtgggtgtgtctcagtggggcccccaggctgggaacacactcggaagatcccgtgtgtgcacgctggcttctcgggaccagccagggccaaggcttgggaaccatttgcatccaggagttagatgggaacaagtgtcactcctggtcacctggttggagggcatggattgaagctgccctcaagtccaggccttgaggcccacctgaggggagatactgcccttctctctgcctgcctcacctccagctgtcagagggtgagcagggccctggaggcaggcaccccctcctcctcctccccgtccccttctcctcctcctccccgtccccttctcctcttcctctccctccttcctctccctccgcctcgctgtctttctccttctcctctccctcctcctcctgctccttctcctccccgtaccctttttctactcttccctctccttctcctcctcctttctctccctcctcctccccctccccttctcctcctctctttctcttcctcttttcctcctccactcctctttctgagagtagctgctgctttccctgccttccttcctcaagaatacagtctattctggggggttgcaggacagctgaaaaagaaaacgtgagtttccagaaaagcacatcgccctttctctccactcgacacagcctgcggtttgcagtgccagctgcacgttggagtctcctgggaagcttctagtgttgatctccctcctagaggctcagtgaggtgatcggggggtcagtgtgttttcagagtcccagctgctctgacttacagctgtggttggagccctgacctaggtccttggtctaagaagtcaaggatgtaagtctattaggactgagtgttgaatggtcttgatggtgaagaaggaccttgcactgcctaccgagctccctcatgcctgcaatttaaataccgaggtgtgttctgagagccccaggtccttggggcacgggcctccagggccctgtaaggtggactctggcctcgaaggggggcccaggtctgaggggtccagctctggcagggggtgtctaagccacgtccaaatggtggacagtagctccaacagtgacatgacagagggagggcctgtgtgtgtggtgtgtgtgtgtgtgctgtgtgtgcacgcacgtgcatgtatatggtgtgtgtagaactgacacgcttgaagtccctgtcccgtgacccaccctcaggtacttgctgttgggttttcctatgattttgatgtgtcctgacccagcatatggatgccctccccttggagggcccagcctgcaaaccccatctgataccacacatgcctatgtcctgcaggcttctagtgacccttgcaagccgggtgaggctggtcccagtctctgtgcagatcttggccatgtctccacagccagctccccccaagcagtggccctggccctaccccagcctcctcagaacaggggtgaccactgcaggggagactgcccctaacctgtgtctttgtgtccccagaagacacccactgcagacccccagcccagcctgctctgcggccccctgcggctgtcagagagcggtgagacctggagcgaggtgtgggccgccatccccatgtcagatccccaggtgctgcacctgcagggaggcagccaggacggccggctgccccgcaccatccctctccccagctgcaaactgagtgtgccggaccctgaggagaggctggactcggggcatgtgtggaagctgcagtgggccaagcagtcctggtacctgagcgcctcctccgcagagctgcagcagcagtggctggaaaccctaagcactgctgcccatggggacacggcccaggacagcccgggggccctgcagcttcaggtccctatgggcgcagctgctccgtgagctgagtctcccactgccctgcacaccaccacattggacctgtgctgtcctgggaggtggtgttggaggccccatgaagagcgccctggactgctgagggtgggccaacagcccagagctcaggacacttggctttggggggaaggaaactgaggcccagagaggggcaaccactggccaagggtcacccagcaagttttggctaagagcctggcctccagccccagcagtgtggcccagagcaggggccgactgccaaagtaaccatcatccatatgggccgtgtggtgatgctggcccggaaggcagaaagaggcagcatgggcactgccagggacagccacatcctgctggtctgcagcgtggtccaccccgcctctgcccagcctgtctacaccgtgtgagctgaatcgtgacttgcttcccacctcctttctctgtcctctcctgaggttctgcctgcagcccccaggaggtgggcctgccccatcctagctggactcatggttcctaaataaccacgctcagaagctctgctaggacttaccccagccactgagtggcaggcgcatgagatttgtggctgttcctgatgctagtggcacacagtgcttatctgcataaataaacactggccacca

SEQ ID NO: 18537 - DNA, 4959 bp, Homo sapiens
  misc_feature (2361)..(2361): n is a, c, g, or t
tgcctgtgggtgccgcggaccttcggggcgggccagggaggcgggaccgctcctcagaaccccaggggcttcagtcctgggctgattggcgcgggaagcacagcccggccctccaggtccccaaggagaccccagcctcctgctgcccactgtgagcgacctccccggggctcctctggaagcggctccggcaagtatcgagtttgcctgtgcggagctgggggagcctccggctttcctgtttgctttgttaattattttcgtccccagaggaaggcgtacctcctaaatggctctactttgaacctgctgggcaaggaagagattttcaaggaaaccatctaccgtgtgcaagctcctgccggccaaccccagaccccagcacggagccaggcgcctgtgcccgccgaccctcagcatcctcctcagaaaggctggtggcatcaggaagcccctggccagcctccacctgagcccagtgagctcagctttaaggatggagtcaggcagggggtcctcaacccctccaggacccattgctgccctagggatgccagacactgggcctggcagttcctccctagggaagcttcaggcgctccctgttgggcccagagcccactgtggggaccctgtcagcctggctgcagcaggggacggctctccagacataggccccacgggagagctgagtggtagcttaaagatccccaaccgggacagcgggatcgacagtccctcctccagtgtggctggagagaactttccctgcgaggagggcttggaggctggcccaagccccactgtactgggggcgcacgcagagatggccctggacagccaggtcccgaaggtcaccccccaggaggaggcggacagcgacgtgggtgaggaacctgactctgagaacaccccccagaaggctgacaaggatgccggcctggcccagcactctggcccccagaagcttctccacattgcccaggagctcctgcacaccgaggagacctatgtgaagcggctgcacctgctggaccaggttttctgcaccaggctgacggatgcggggatccctccagaagtcatcatgggcatattctctaacatctcctccatccaccgcttccacgggcagttcctgctgccggagctgaagacgcggatcacggaggagtgggacacaaacccacggctcggggacatcctgcagaagctggccccattcctgaagatgtacggcgagtatgtcaagaactttgaccgagccgtagggctggtgagcacgtggacccagcgctccccactgtttaaagacgtcgtccacagcatccagaagcaggaggtatgcgggaacctgacgctgcagcaccacatgctggagcccgtgcagagggtcccccggtacgagctgctgctcaaggactatctgaagaggctcccgcaggacgccccagaccggaaggatgcggagaggtccttggagctcatctccacagccgccaaccactccaatgctgccattcggaaagtggagaaaatgcacaagctcttggaggtgtacgagcagctgggtggggaagaagacattgtcaacccggccaatgaactgatcaaggagggccaaatccagaaactgtcagccaagaacggcaccccccaggaccgccacctcttcctgttcaacagcatgatcctttactgtgtgcccaagctgcggctcatgggccagaagttcagcgtccgggagaagatggacatctcaggcctccaggtgcaggatatcgtcaagccaaacacagcacatacattcatcataacgggaagaaaaaggtccctggagctgcagacgcggacagaggaagagaagaaagaatggattcagatcatccaggccaccatcgagaagcacaaacagaacagcgaaaccttcaaggcttttggtggcgcctttagccaggatgaggaccccagcctctctccagacatgcctatcacgagcaccagccctgtggagcctgtggtgaccaccgaaggcagttcgggtgcagcagggctcgagcccagaaaactatcctctaagaccagacgtgacaaggagaagcagagctgtaagagctgtggtgagaccttcaactccatcaccaagaggaggcatcactgcaagctgtgtggggcggtcatctgtgggaagtgctccgagttcaaggccgagaacagccggcagagccgtgtctgcagagattgtttcctgacacagccagtggcccctgagagcacagaggtgggtgctcccagctcctgctcccctcctggtggcgcggcagagcctccagacacctgctcctgtgccccagcagctcnagctgcctctgctttcggagtgtccctgggaccaggatagatgtgggtgtgtctcagtggggcccccaggctgggaacacactcggaagatcccgtgtgtgcacgctggcttctcgggaccagccagggccaaggcttgggaaccatttgcatccaggagttagatgggaacaagtgtcactcctggtcacctggttggagggcatggattgaagctgccctcaagtccaggccttgaggcccacctgaggggagatactgcccttctctctgcctgcctcacctccagctgtcagagggtgagcagggccctggaggcaggcaccccctcctcctcctccccgtccccttctcctcctcctccccgtccccttctcctcttcctctccctccttcctctccctccgcctcgctgtctttctccttctcctctccctcctcctcctgctccttctcctccccgtaccctttttctactcttccctctccttctcctcctcctttctctccctcctcctccccctccccttctcctcctctctttctcttcctcttttcctcctccactcctctttctgagagtagctgctgctttccctgccttccttcctcaagaatacagtctattctggggggttgcaggacagctgaaaaagaaaacgtgagtttccagaaaagcacatcgccctttctctccactcgacacagcctgcggtttgcagtgccagctgcacgttggagtctcctgggaagcttctagtgttgatctccctcctagaggctcagtgaggtgatcggggggtcagtgtgttttcagagtcccagctgctctgacttacagctgtggttggagccctgacctaggtccttggtctaagaagtcaaggatgtaagtctattaggactgagtgttgaatggtcttgatggtgaagaaggaccttgcactgcctaccgagctccctcatgcctgcaatttaaataccgaggtgtgttctgagagccccaggtccttggggcacgggcctccagggccctgtaaggtggactctggcctcgaaggggggcccaggtctgaggggtccagctctggcagggggtgtctaagccacgtccaaatggtggacagtagctccaacagtgacatgacagagggagggcctgtgtgtgtggtgtgtgtgtgtgtgctgtgtgtgcacgcacgtgcatgtatatggtgtgtgtagaactgacacgcttgaagtccctgtcccgtgacccaccctcaggtacttgctgttgggttttcctatgattttgatgtgtcctgacccagcatatggatgccctccccttggagggcccagcctgcaaaccccatctgataccacacatgcctatgtcctgcaggcttctagtgacccttgcaagccgggtgaggctggtcccagtctctgtgcagatcttggccatgtctccacagccagctccccccaagcagtggccctggccctaccccagcctcctcagaacaggggtgaccactgcaggggagactgcccctaacctgtgtctttgtgtccccagaagacacccactgcagacccccagcccagcctgctctgcggccccctgcggctgtcagagagcggtgagacctggagcgaggtgtgggccgccatccccatgtcagatccccaggtgctgcacctgcagggaggcagccaggacggccggctgccccgcaccatccctctccccagctgcaaactgagtgtgccggaccctgaggagaggctggactcggggcatgtgtggaagctgcagtgggccaagcagtcctggtacctgagcgcctcctccgcagagctgcagcagcagtggctggaaaccctaagcactgctgcccatggggacacggcccaggacagcccgggggccctgcagcttcaggtccctatgggcgcagctgctccgtgagctgagtctcccactgccctgcacaccaccacattggacctgtgctgtcctgggaggtggtgttggaggccccatgaagagcgccctggactgctgagggtgggccaacagcccagagctcaggacacttggctttggggggaaggaaactgaggcccagagaggggcaaccactggccaagggtcacccagcaagttttggctaagagcctggcctccagccccagcagtgtggcccagagcaggggccgactgccaaagtaaccatcatccatatgggccgtgtggtgatgctggcccggaaggcagaaagaggcagcatgggcactgccagggacagccacatcctgctggtctgcagcgtggtccaccccgcctctgcccagcctgtctacaccgtgtgagctgaatcgtgacttgcttcccacctcctttctctgtcctctcctgaggttctgcctgcagcccccaggaggtgggcctgccccatcctagctggactcatggttcctaaataaccacgctcagaagctctgctaggacttaccccagccactgagtggcaggcgcatgagatttgtggctgttcctgatgctagtggcacacagtgcttatctgcataaataaacactggccacca

SEQ ID NO: 18538 - DNA, 3298 bp, Homo sapiens
ggccgccgcagctgtgagcctagcacctgatcagtggagagctgtggattgcatgtttgtttgccattgcccccgccaccctgcaagttgcaccttctagaatcagcaagccaagctcctctcacccagcgtaatgatgcggaaatgcaaatgcaccatcatgttgtgacccatattgcgaaaattagaaaaaaggaagttgtgtttcgctattgcacgaagttcagcccagaggagaaactcgctcgccttcagaagacagtacctcctaaatggctctactttgaacctgctgggcaaggaagagattttcaaggaaaccatctaccgtgtgcaagctcctgccggccaaccccagaccccagcacggagccaggcgcctgtgcccgccgaccctcagcatcctcctcagaaaggctggtggcatcaggaagcccctggccagcctccacctgagcccagtgagctcagctttaaggatggagtcaggcagggggtcctcaacccctccaggacccattgctgccctagggatgccagacactgggcctggcagttcctccctagggaagcttcaggcgctccctgttgggcccagagcccactgtggggaccctgtcagcctggctgcagcaggggacggctctccagacataggccccacgggagagctgagtggtagcttaaagatccccaaccgggacagcgggatcgacagtccctcctccagtgtggctggagagaactttccctgcgaggagggcttggaggctggcccaagccccactgtactgggggcgcacgcagagatggccctggacagccaggtcccgaaggtcaccccccaggaggaggcggacagcgacgtgggtgaggaacctgactctgagaacaccccccagaaggctgacaaggatgccggcctggcccagcactctggcccccagaagcttctccacattgcccaggagctcctgcacaccgaggagacctatgtgaagcggctgcacctgctggaccaggttttctgcaccaggctgacggatgcggggatccctccagaagtcatcatgggcatattctctaacatctcctccatccaccgcttccacgggcagttcctgctgccggagctgaagacgcggatcacggaggagtgggacacaaacccacggctcggggacatcctgcagaagctggccccattcctgaagatgtacggcgagtatgtcaagaactttgaccgagccgtagggctggtgagcacgtggacccagcgctccccactgtttaaagacgtcgtccacagcatccagaagcaggaggtatgcgggaacctgacgctgcagcaccacatgctggagcccgtgcagagggtcccccggtacgagctgctgctcaaggactatctgaagaggctcccgcaggacgccccagaccggaaggatgcggagaggtccttggagctcatctccacagccgccaaccactccaatgctgccattcggaaagtggagaaaatgcacaagctcttggaggtgtacgagcagctgggtggggaagaagacattgtcaacccggccaatgaactgatcaaggagggccaaatccagaaactgtcagccaagaacggcaccccccaggaccgccacctcttcctgttcaacagcatgatcctttactgtgtgcccaagctgcggctcatgggccagaagttcagcgtccgggagaagatggacatctcaggcctccaggtgcaggatatcgtcaagccaaacacagcacatacattcatcataacgggaagaaaaaggtccctggagctgcagacgcggacagaggaagagaagaaagaatggattcagatcatccaggccaccatcgagaagcacaaacagaacagcgaaaccttcaaggcttttggtggcgcctttagccaggatgaggaccccagcctctctccagacatgcctatcacgagcaccagccctgtggagcctgtggtgaccaccgaaggcagttcgggtgcagcagggctcgagcccagaaaactatcctctaagaccagacgtgacaaggagaagcagagctgtaagagctgtggtgagaccttcaactccatcaccaagaggaggcatcactgcaagctgtgtggggcggtcatctgtgggaagtgctccgagttcaaggccgagaacagccggcagagccgtgtctgcagagattgtttcctgacacagccagtggcccctgagagcacagagaagacacccactgcagacccccagcccagcctgctctgcggccccctgcggctgtcagagagcggtgagacctggagcgaggtgtgggccgccatccccatgtcagatccccaggtgctgcacctgcagggaggcagccaggacggccggctgccccgcaccatccctctccccagctgcaaactgagtgtgccggaccctgaggagaggctggactcggggcatgtgtggaagctgcagtgggccaagcagtcctggtacctgagcgcctcctccgcagagctgcagcagcagtggctggaaaccctaagcactgctgcccatggggacacggcccaggacagcccgggggccctgcagcttcaggtccctatgggcgcagctgctccgtgagctgagtctcccactgccctgcacaccaccacattggacctgtgctgtcctgggaggtggtgttggaggccccatgaagagcgccctggactgctgagggtgggccaacagcccagagctcaggacacttggctttggggggaaggaaactgaggcccagagaggggcaaccactggccaagggtcacccagcaagttttggctaagagcctggcctccagccccagcagtgtggcccagagcaggggccgactgccaaagtaaccatcatccatatgggccgtgtggtgatgctggcccggaaggcagaaagaggcagcatgggcactgccagggacagccacatcctgctggtctgcagcgtggtccaccccgcctctgcccagcctgtctacaccgtgtgagctgaatcgtgacttgcttcccacctcctttctctgtcctctcctgaggttctgcctgcagcccccaggaggtgggcctgccccatcctagctggactcatggttcctaaataaccacgctcagaagctctgctaggacttaccccagccactgagtggcaggcgcatgagatttgtggctgttcctgatgctagtggcacacagtgcttatctgcataaataaacactggccacca

SEQ ID NO: 18539 - DNA, 3151 bp, Homo sapiens
ggccgccgcagctgtgagcctagcacctgatcagtggagagctgtggattgcatgtttgtttgccattgcccccgccaccctgcaagttgcaccttctagaatcagcaagccaagctcctctcacccagcgtaatgatgcggaaatgcaaatgcaccatcatgttgtgacccatattgcgaaaattagaaaaaaggaagttgtgtttcgctattgcacgaagttcagcccagaggagaaactcgctcgccttcagaagacagtacctcctaaatggctctactttgaacctgctgggcaaggaagagattttcaaggaaaccatctaccgtgtgcaagctcctgccggccaaccccagaccccagcacggagccaggcgcctgtgcccgccgaccctcagcatcctcctcagaaaggctggtggcatcaggaagcccctggccagcctccacctgagcccagtgagctcagctttaaggatggagtcaggcagggggtcctcaacccctccaggacccattgctgccctagggatgccagacactgggcctggcagttcctccctagggaagcttcaggcgctccctgttgggcccagagcccactgtggggaccctgtcagcctggctgcagcaggggacggctctccagacataggccccacgggagagctgagtggtagcttaaagatccccaaccgggacagcgggatcgacagtccctcctccagtgtggctggagagaactttccctgcgaggagggcttggaggctggcccaagccccactgtactgggggcgcacgcagagatggccctggacagccaggtcccgaaggtcaccccccaggaggaggcggacagcgacgtgggtgaggaacctgactctgagaacaccccccagaaggctgacaaggatgccggcctggcccagcactctggcccccagaagcttctccacattgcccaggagctcctgcacaccgaggagacctatgtgaagcggctgcacctgctggaccaggttttctgcaccaggctgacggatgcggggatccctccagaagtcatcatgggcatattctctaacatctcctccatccaccgcttccacgggcagttcctgctgccggagctgaagacgcggatcacggaggagtgggacacaaacccacggctcggggacatcctgcagaagctggccccattcctgaagatgtacggcgagtatgtcaagaactttgaccgagccgtagggctggtgagcacgtggacccagcgctccccactgtttaaagacgtcgtccacagcatccagaagcaggaggtatgcgggaacctgacgctgcagcaccacatgctggagcccgtgcagagggtcccccggtacgagctgctgctcaaggactatctgaagaggctcccgcaggacgccccagaccggaaggatgcggagaggtccttggagctcatctccacagccgccaaccactccaatgctgccattcggaaagtgttcaacagcatgatcctttactgtgtgcccaagctgcggctcatgggccagaagttcagcgtccgggagaagatggacatctcaggcctccaggtgcaggatatcgtcaagccaaacacagcacatacattcatcataacgggaagaaaaaggtccctggagctgcagacgcggacagaggaagagaagaaagaatggattcagatcatccaggccaccatcgagaagcacaaacagaacagcgaaaccttcaaggcttttggtggcgcctttagccaggatgaggaccccagcctctctccagacatgcctatcacgagcaccagccctgtggagcctgtggtgaccaccgaaggcagttcgggtgcagcagggctcgagcccagaaaactatcctctaagaccagacgtgacaaggagaagcagagctgtaagagctgtggtgagaccttcaactccatcaccaagaggaggcatcactgcaagctgtgtggggcggtcatctgtgggaagtgctccgagttcaaggccgagaacagccggcagagccgtgtctgcagagattgtttcctgacacagccagtggcccctgagagcacagagaagacacccactgcagacccccagcccagcctgctctgcggccccctgcggctgtcagagagcggtgagacctggagcgaggtgtgggccgccatccccatgtcagatccccaggtgctgcacctgcagggaggcagccaggacggccggctgccccgcaccatccctctccccagctgcaaactgagtgtgccggaccctgaggagaggctggactcggggcatgtgtggaagctgcagtgggccaagcagtcctggtacctgagcgcctcctccgcagagctgcagcagcagtggctggaaaccctaagcactgctgcccatggggacacggcccaggacagcccgggggccctgcagcttcaggtccctatgggcgcagctgctccgtgagctgagtctcccactgccctgcacaccaccacattggacctgtgctgtcctgggaggtggtgttggaggccccatgaagagcgccctggactgctgagggtgggccaacagcccagagctcaggacacttggctttggggggaaggaaactgaggcccagagaggggcaaccactggccaagggtcacccagcaagttttggctaagagcctggcctccagccccagcagtgtggcccagagcaggggccgactgccaaagtaaccatcatccatatgggccgtgtggtgatgctggcccggaaggcagaaagaggcagcatgggcactgccagggacagccacatcctgctggtctgcagcgtggtccaccccgcctctgcccagcctgtctacaccgtgtgagctgaatcgtgacttgcttcccacctcctttctctgtcctctcctgaggttctgcctgcagcccccaggaggtgggcctgccccatcctagctggactcatggttcctaaataaccacgctcagaagctctgctaggacttaccccagccactgagtggcaggcgcatgagatttgtggctgttcctgatgctagtggcacacagtgcttatctgcataaataaacactggccacca

SEQ ID NO: 18540 - DNA, 3267 bp, Homo sapiens
ggccgccgcagctgtgagcctagcacctgatcagtggagagctgtggattgcatgtttgtttgccattgcccccgccaccctgcaagttgcaccttctagaatcagcaagccaagctcctctcacccagcgtaatgatgcggaaatgcaaatgcaccatcatgttgtgacccatattgcgaaaattagaaaaaaggaagttgtgtttcgctattgcacgaagttcagcccagaggagaaactcgctcgccttcagaagacagtacctcctaaatggctctactttgaacctgctgggcaaggaagagattttcaaggaaaccatctaccgtgtgcaagctcctgccggccaaccccagaccccagcacggagccaggcgcctgtgcccgccgaccctcagcatcctcctcagaaaggctggtggcatcaggaagcccctggccagcctccacctgagcccagtgagctcagctttaaggatggagtcaggcagggggtcctcaacccctccaggacccattgctgccctagggatgccagacactgggcctggcagttcctccctagggaagcttcaggcgctccctgttgggcccagagcccactgtggggaccctgtcagcctggctgcagcaggggacggctctccagacataggccccacgggagagctgagtggtagcttaaagatccccaaccgggacagcgggatcgacagtccctcctccagtgtggctggagagaactttccctgcgaggagggcttggaggctggcccaagccccactgtactgggggcgcacgcagagatggccctggacagccaggtcccgaaggtcaccccccaggaggaggcggacagcgacgtgggtgaggaacctgactctgagaacaccccccagaaggctgacaaggatgccggcctggcccagcactctggcccccagaagcttctccacattgcccaggagctcctgcacaccgaggagacctatgtgaagcggctgcacctgctggaccaggttttctgcaccaggctgacggatgcggggatccctccagaagtcatcatgggcatattctctaacatctcctccatccaccgcttccacgggcagttcctgctgccggagctgaagacgcggatcacggaggagtgggacacaaacccacggctcggggacatcctgcagaagctggccccattcctgaagatgtacggcgagtatgtcaagaactttgaccgagccgtagggctggtgagcacgtggacccagcgctccccactgtttaaagacgtcgtccacagcatccagaagcaggaggtatgcgggaacctgacgctgcagcaccacatgctggagcccgtgcagagggtcccccggtacgagctgctgctcaaggactatctgaagaggctcccgcaggacgccccagaccggaaggatgcggagaggtccttggagctcatctccacagccgccaaccactccaatgctgccattcggaaagtggagaaaatgcacaagctcttggaggtgtacgagcagctgggtggggaagaagacattgtcaacccggccaatgaactgatcaaggagggccaaatccagaaactgtcagccaagaacggcaccccccaggaccgccacctcttcctgttcaacagcatgatcctttactgtgtgcccaagctgcggctcatgggccagaagttcagcgtccgggagaagatggacatctcaggcctccaggtgcaggatatcgtcaagccaaacacagcacatacattcatcataacgggaagaaaaaggtccctggagctgcagacgcgatcatccaggccaccatcgagaagcacaaacagaacagcgaaaccttcaaggcttttggtggcgcctttagccaggatgaggaccccagcctctctccagacatgcctatcacgagcaccagccctgtggagcctgtggtgaccaccgaaggcagttcgggtgcagcagggctcgagcccagaaaactatcctctaagaccagacgtgacaaggagaagcagagctgtaagagctgtggtgagaccttcaactccatcaccaagaggaggcatcactgcaagctgtgtggggcggtcatctgtgggaagtgctccgagttcaaggccgagaacagccggcagagccgtgtctgcagagattgtttcctgacacagccagtggcccctgagagcacagagaagacacccactgcagacccccagcccagcctgctctgcggccccctgcggctgtcagagagcggtgagacctggagcgaggtgtgggccgccatccccatgtcagatccccaggtgctgcacctgcagggaggcagccaggacggccggctgccccgcaccatccctctccccagctgcaaactgagtgtgccggaccctgaggagaggctggactcggggcatgtgtggaagctgcagtgggccaagcagtcctggtacctgagcgcctcctccgcagagctgcagcagcagtggctggaaaccctaagcactgctgcccatggggacacggcccaggacagcccgggggccctgcagcttcaggtccctatgggcgcagctgctccgtgagctgagtctcccactgccctgcacaccaccacattggacctgtgctgtcctgggaggtggtgttggaggccccatgaagagcgccctggactgctgagggtgggccaacagcccagagctcaggacacttggctttggggggaaggaaactgaggcccagagaggggcaaccactggccaagggtcacccagcaagttttggctaagagcctggcctccagccccagcagtgtggcccagagcaggggccgactgccaaagtaaccatcatccatatgggccgtgtggtgatgctggcccggaaggcagaaagaggcagcatgggcactgccagggacagccacatcctgctggtctgcagcgtggtccaccccgcctctgcccagcctgtctacaccgtgtgagctgaatcgtgacttgcttcccacctcctttctctgtcctctcctgaggttctgcctgcagcccccaggaggtgggcctgccccatcctagctggactcatggttcctaaataaccacgctcagaagctctgctaggacttaccccagccactgagtggcaggcgcatgagatttgtggctgttcctgatgctagtggcacacagtgcttatctgcataaataaacactggccacca

SEQ ID NO: 18541 - DNA, 1723 bp, Homo sapiens
aaggatcccatgtgagaagctcactggggcccctggggggacctgcgggcagctctcgttcctcacctgtgccatccctcttgcagttcaacagcatgatcctttactgtgtgcccaagctgcggctcatgggccagaagttcagcgtccgggagaagatggacatctcaggcctccaggtgcaggatatcgtcaagccaaacacagcacatacattcatcataacgggaagaaaaaggtccctggagctgcagacgcggacagaggaagagaagaaagaatggattcagatcatccaggccaccatcgagaagcacaaacagaacagcgaaaccttcaaggcttttggtggcgcctttagccaggatgaggaccccagcctctctccagacatgcctatcacgagcaccagccctgtggagcctgtggtgaccaccgaaggcagttcgggtgcagcagggctcgagcccagaaaactatcctctaagaccagacgtgacaaggagaagcagagctgtaagagctgtggtgagaccttcaactccatcaccaagaggaggcatcactgcaagctgtgtggggcggtcatctgtgggaagtgctccgagttcaaggccgagaacagccggcagagccgtgtctgcagagattgtttcctgacacagccagtggcccctgagagcacagagaagacacccactgcagacccccagcccagcctgctctgcggccccctgcggctgtcagagagcggtgagacctggagcgaggtgtgggccgccatccccatgtcagatccccaggtgctgcacctgcagggaggcagccaggacggccggctgccccgcaccatccctctccccagctgcaaactgagtgtgccggaccctgaggagaggctggactcggggcatgtgtggaagctgcagtgggccaagcagtcctggtacctgagcgcctcctccgcagagctgcagcagcagtggctggaaaccctaagcactgctgcccatggggacacggcccaggacagcccgggggccctgcagcttcaggtccctatgggcgcagctgctccgtgagctgagtctcccactgccctgcacaccaccacattggacctgtgctgtcctgggaggtggtgttggaggccccatgaagagcgccctggactgctgagggtgggccaacagcccagagctcaggacacttggctttggggggaaggaaactgaggcccagagaggggcaaccactggccaagggtcacccagcaagttttggctaagagcctggcctccagccccagcagtgtggcccagagcaggggccgactgccaaagtaaccatcatccatatgggccgtgtggtgatgctggcccggaaggcagaaagaggcagcatgggcactgccagggacagccacatcctgctggtctgcagcgtggtccaccccgcctctgcccagcctgtctacaccgtgtgagctgaatcgtgacttgcttcccacctcctttctctgtcctctcctgaggttctgcctgcagcccccaggaggtgggcctgccccatcctagctggactcatggttcctaaataaccacgctcagaagctctgctaggacttaccccagccactgagtggcaggcgcatgagatttgtggctgttcctgatgctagtggcacacagtgcttatctgcataaataaacactggccacca

SEQ ID NO: 18542 - DNA, 3581 bp, Homo sapiens
ggccgccgcagctgtgagcctagcacctgatcagtggagagctgtggattgcatgtttgtttgccattgcccccgccaccctgcaagttgcaccttctagaatcagcaagccaagctcctctcacccagcgtaatgatgcggaaatgcaaatgcaccatcatgttgtgacccatattgcgaaaattagaaaaaaggaagttgtgtttcgctattgcacgaagttcagcccagaggagaaactcgctcgccttcagaagacagtacctcctaaatggctctactttgaacctgctgggcaaggaagagattttcaaggaaaccatctaccgtgtgcaagctcctgccggccaaccccagaccccagcacggagccaggcgcctgtgcccgccgaccctcagcatcctcctcagaaaggctggtggcatcaggaagcccctggccagcctccacctgagcccagtgagctcagctttaaggatggagtcaggcagggggtcctcaacccctccaggacccattgctgccctagggatgccagacactgggcctggcagttcctccctagggaagcttcaggcgctccctgttgggcccagagcccactgtggggaccctgtcagcctggctgcagcaggggacggctctccagacataggccccacgggagagctgagtggtagcttaaagatccccaaccgggacagcgggatcgacagtccctcctccagtgtggctggagagaactttccctgcgaggagggcttggaggctggcccaagccccactgtactgggggcgcacgcagagatggccctggacagccaggtcccgaaggtcaccccccaggaggaggcggacagcgacgtgggtgaggaacctgactctgagaacaccccccagaaggctgacaaggatgccggcctggcccagcactctggcccccagaagcttctccacattgcccaggagctcctgcacaccgaggagacctatgtgaagcggctgcacctgctggaccaggttttctgcaccaggctgacggatgcggggatccctccagaagtcatcatgggcatattctctaacatctcctccatccaccgcttccacgggcagttcctgctgccggagctgaagacgcggatcacggaggagtgggacacaaacccacggctcggggacatcctgcagaagctggccccattcctgaagatgtacggcgagtatgtcaagaactttgaccgagccgtagggctggtgagcacgtggacccagcgctccccactgtttaaagacgtcgtccacagcatccagaagcaggaggtatgcgggaacctgacgctgcagcaccacatgctggagcccgtgcagagggtcccccggtacgagctgctgctcaaggactatctgaagaggctcccgcaggacgccccagaccggaaggatgcggagaggtccttggagctcatctccacagccgccaaccactccaatgctgccattcggaaagtggagaaaatgcacaagctcttggaggtgtacgagcagctgggtggggaagaagacattgtcaacccggccaatgaactgatcaaggagggccaaatccagaaactgtcagccaagaacggcaccccccaggaccgccacctcttcctgttcaacagcatgatcctttactgtgtgcccaagctgcggctcatgggccagaagttcagcgtccgggagaagatggacatctcaggcctccaggtgcaggatatcgtcaagccaaacacagcacatacattcatcataacgggaagaaaaaggtccctggagctgcagacgcggacagaggaagagaagaaagaatggattcagatcatccaggccaccatcgagaagcacaaacagaacagcgaaaccttcaaggcttttggtggcgcctttagccaggatgaggaccccagcctctctccagacatgcctatcacgagcaccagccctgtggagcctgtggtgaccaccgaaggcagttcgggtgcagcagggctcgagcccagaaaactatcctctaagaccagacgtgacaaggagaagcagagctgtaagagctgtggtgagaccttcaactccatcaccaagaggaggcatcactgcaagctgtgtggggcggtcatctgtgggaagtgctccgagttcaaggccgagaacagccggcagagccgtgtctgcagagattgtttcctgacacagccagtggcccctgagagcacagagaagacacccactgcagacccccagcccagcctgctctgcggccccctgcggctgtcagagagcggtgagacctggagcgaggtgtgggccgccatccccatgtcagatccccaggtgctgcacctgcagggaggcagccaggacggccggctgccccgcaccatccctctccccagctgcaaactgagtgtgccggaccctgaggagaggctggactcggggcatgtgtggaagctgcagtgggccaagcagtcctggtacctgagcgcctcctccgcagagctgcagcagcagtggctggaaaccctaagcactgctgcccatggggacacggcccaggacagcccgggggccctgcagcttcaggtccctatgggcgcagctgctccgtgagctgagtctcccactgccctgcacaccaccacattggacctgtgctgtcctgggaggtggtgttggaggccccatgaagagcgccctggactgctgagggtgggccaacagcccagagctcaggacacttggctttggggggaaggaaactgaggcccagagaggggcaaccactggccaagggtcacccagcaagttttggctaagagcctggcctccagccccagcagtgtggcccagagcaggggccgactgccaaagtaaccatcatccatatgggccgtgtggtgatgctggcccggaaggcagaaagaggcagcatgggcactgccagggacagccacatcctgctggtctgcagcgtggtccaccccgcctctgcccagcctgtctacaccgtgtgagctgaatcgtgacttgcttcccacctcctttctctgtcctctcctgaggttctgcctgcagcccccaggaggtgggcctgccccatcctagctggactcatggttcctaaataaccacgctcagaagctctgctaggacttaccccagccactgagtggcaggcgcatgagatttgtggctgttcctgatgctagtggcacacagtgcttatctgcataaataaacactggccaccaaaaaaaaaaaaaaaaaacgaaccccgcagggactttatttccgggtgcgcgacaaggcgttatcaaggcccttgtcctgagtcgtgtccggccccgttcttgttccaagtgtgatctggcgcccctagggggacgtaaattgaaaccggtactataatgggcagacgccgggctaccagggagggaaggagacacaattgaatctgtgaaataatcatacgacacccctaatcgtctatcatatggcctcgtgtgacactacacgcacctgacgcaccgctca

SEQ ID NO: 18543 - DNA, 1875 bp, Homo sapiens
gagctcggtaccgggcagtacggatgtggagaggtccttggagctcatctccacagccgccaaccactccaatgctgccattcggaaagtggagaaaatgcacaagctcttggaggtgtacgagcagctgggtggggaagaagacattgtcaacccggccaatgaactgatcaaggagggccaaatccagaaactgtcagccaagaacggcaccccccaggaccgccacctcttcctgttcaacagcatgatcctttactgtgtgcccaagctgcggctcatgggccagaagttcagcgtccgggagaagatggacatctcaggcctccaggtgcaggatatcgtcaagccaaacacagcacatacattcatcataacgggaagaaaaaggtccctggagctgcagacgcggacagaggaagagaagaaagaatggattcagatcatccaggccaccatcgagaagcacaaacagaacagcgaaaccttcaaggcttttggtggcgcctttagccaggatgaggaccccagcctctctccagacatgcctatcacgagcaccagccctgtggagcctgtggtgaccaccgaaggcagttcgggtgcagcagggctcgagcccagaaaactatcctctaagaccagacgtgacaaggagaagcagagctgtaagagctgtggtgagaccttcaactccatcaccaagaggaggcatcactgcaagctgtgtggggcggtcatctgtgggaagtgctccgagttcaaggccgagaacagccggcagagccgtgtctgcagagattgtttcctgacacagccagtggcccctgagagcacagagaagacacccactgcagacccccagcccagcctgctctgcggccccctgcggctgtcagagagcggtgagacctggagcgaggtgtgggccgccatccccatgtcagatccccaggtgctgcacctgcagggaggcagccaggacggccggctgccccgcaccatccctctccccagctgcaaactgagtgtgccggaccctgaggagaggctggactcggggcatgtgtggaagctgcagtgggccaagcagtcctggtacctgagcgcctcctccgcagagctgcagcagcagtggctggaaaccctaagcactgctgcccatggggacacggcccaggacagcccgggggccctgcagcttcaggtccctatgggcgcagctgctccgtgagctgagtctcccactgccctgcacaccaccacattggacctgtgctgtcctgggaggtggtgttggaggccccatgaagagcgccctggactgctgagggtgggccaacagcccagagctcaggacacttggctttggggggaaggaaactgaggcccagagaggggcaaccactggccaagggtcacccagcaagttttggctaagagcctggcctccagccccagcagtgtggcccagagcaggggccgactgccaaagtaaccatcatccatatgggccgtgtggtgatgctggcccggaaggcagaaagaggcagcatgggcactgccagggacagccacatcctgctggtctgcagcgtggtccaccccgcctctgcccagcctgtctacaccgtgtgagctgaatcgtgacttgcttcccacctcctttctctgtcctctcctgaggttctgcctgcagcccccaggaggtgggcctgccccatcctagctggactcatggttcctaaataaccacgctcagaagctctgctaggacttaccccagccactgagtggcaggcgcatgagatttgtggctgttcctgatgctagtggcacacagtgcttatctgcataaataaacactggccacca

SEQ ID NO: 18544 - DNA, 1796 bp, Homo sapiens
gagttccaagcacagaagatgagcggtcatagctgtgtctgagcaggatgggaggcccgctgtccctgatggaccagctcatgtagcagccacgctgacctgagcctctgcacccctctccctgcagaactgtggggctgcaggctcacctctgttacctccttggggaaacacttctaagtcagaaaacatgaggctggagctaaaatgaccagcttgggtttgctttgttctttgttcttgccccttcaggtgcaggatatcgtcaagccaaacacagcacatacattcatcataacgggaagaaaaaggtccctggagctgcagacgcggacagaggaagagaagaaagaatggattcagatcatccaggccaccatcgagaagcacaaacagaacagcgaaaccttcaaggcttttggtggcgcctttagccaggatgaggaccccagcctctctccagacatgcctatcacgagcaccagccctgtggagcctgtggtgaccaccgaaggcagttcgggtgcagcagggctcgagcccagaaaactatcctctaagaccagacgtgacaaggagaagcagagctgtaagagctgtggtgagaccttcaactccatcaccaagaggaggcatcactgcaagctgtgtggggcggtcatctgtgggaagtgctccgagttcaaggccgagaacagccggcagagccgtgtctgcagagattgtttcctgacacagccagtggcccctgagagcacagagaagacacccactgcagacccccagcccagcctgctctgcggccccctgcggctgtcagagagcggtgagacctggagcgaggtgtgggccgccatccccatgtcagatccccaggtgctgcacctgcagggaggcagccaggacggccggctgccccgcaccatccctctccccagctgcaaactgagtgtgccggaccctgaggagaggctggactcggggcatgtgtggaagctgcagtgggccaagcagtcctggtacctgagcgcctcctccgcagagctgcagcagcagtggctggaaaccctaagcactgctgcccatggggacacggcccaggacagcccgggggccctgcagcttcaggtccctatgggcgcagctgctccgtgagctgagtctcccactgccctgcacaccaccacattggacctgtgctgtcctgggaggtggtgttggaggccccatgaagagcgccctggactgctgagggtgggccaacagcccagagctcaggacacttggctttggggggaaggaaactgaggcccagagaggggcaaccactggccaagggtcacccagcaagttttggctaagagcctggcctccagccccagcagtgtggcccagagcaggggccgactgccaaagtaaccatcatccatatgggccgtgtggtgatgctggcccggaaggcagaaagaggcagcatgggcactgccagggacagccacatcctgctggtctgcagcgtggtccaccccgcctctgcccagcctgtctacaccgtgtgagctgaatcgtgacttgcttcccacctcctttctctgtcctctcctgaggttctgcctgcagcccccaggaggtgggcctgccccatcctagctggactcatggttcctaaataaccacgctcagaagctctgctaggacttaccccagccactgagtggcaggcgcatgagatttgtggctgttcctgatgctagtggcacacagtgcttatctgcataaataaacactggccacca

SEQ ID NO: 18545 - DNA, 3221 bp, Homo sapiens
ggccgccgcagctgtgagcctagcacctgatcagtggagagctgtggattgcatgtttgtttgccattgcccccgccaccctgcaagttgcaccttctagaatcagcaagccaagctcctctcacccagcgtaatgatgcggaaatgcaaatgcaccatcatgttgtgacccatattgcgaaaattagaaaaaaggaagttgtgtttcgctattgcacgaagttcagcccagaggagaaactcgctcgccttcagaagacagtacctcctaaatggctctactttgaacctgctgggcaaggaagagattttcaaggaaaccatctaccgtgtgcaagctcctgccggccaaccccagaccccagcacggagccaggcgcctgtgcccgccgaccctcagcatcctcctcagaaaggctggtggcatcaggaagcccctggccagcctccacctgagcccagtgagctcagctttaaggatggagtcaggcagggggtcctcaacccctccaggacccattgctgccctagggatgccagacactgggcctggcagttcctccctagggaagcttcaggcgctccctgttgggcccagagcccactgtggggaccctgtcagcctggctgcagcaggggacggctctccagacataggccccacgggagagctgagtggtagcttaaagatccccaaccgggacagcgggatcgacagtccctcctccagtgtggctggagagaactttccctgcgaggagggcttggaggctggcccaagccccactgtactgggggcgcacgcagagatggccctggacagccaggtcccgaaggtcaccccccaggaggaggcggacagcgacgtgggtgaggaacctgactctgagaacaccccccagaaggctgacaaggatgccggcctggcccagcactctggcccccagaagcttctccacattgcccaggagctcctgcacaccgaggagacctatgtgaagcggctgcacctgctggaccaggttttctgcaccaggctgacggatgcggggatccctccagaagtcatcatgggcatattctctaacatctcctccatccaccgcttccacgggcagttcctgctgccggagctgaagacgcggatcacggaggagtgggacacaaacccacggctcggggacatcctgcagaagctggccccattcctgaagatgtacggcgagtatgtcaagaactttgaccgagccgtagggctggtgagcacgtggacccagcgctccccactgtttaaagacgtcgtccacagcatccagaagcaggaggtatgcgggaacctgacgctgcagcaccacatgctggagcccgtgcagagggtcccccggtacgagctgctgctcaaggactatctgaagaggctcccgcaggacgccccagaccggaaggatgcggagaggtccttggagctcatctccacagccgccaaccactccaatgctgccattcggaaagtggagaaaatgcacaagctcttggaggtgtacgagcagctgggtggggaagaagacattgtcaacccggccaatgaactgatcaaggagggccaaatccagaaactgtcagccaagaacggcaccccccaggaccgccacctcttcctgttcaacagcatgatcctttactgtgtgcccaagctgcggctcatgggccagaagttcagcgtccgggagaagatggacatctcaggcctccaggtgcaggatatcgtcaagccaaacacagcacatacattcatcataacgggaagaaaaaggtccctggagctgcagacgcggacagaggaagagaagaaagaatggattcagatcatccaggccaccatcgagaagcacaaacagaacagcgaaaccttcaaggcttttggtggcgcctttagccaggatgaggaccccagcctctctccagacatgcctatcacgagcaccagccctgtggagcctgtggtgaccaccgaaggcagttcgggtgcagcagggctcgagcccagaaaactatcctctaagaccagacgtgacaaggagaagcagagctgtaagagctgtggtgagaccttcaactccatcaccaagaggaggcatcactgcaagctgtgtggggcggtcatctgtgggaagtgctccgagttcaaggccgagaacagccggcagagccgtgtctgcagagattgtttcctgacacagccagtggcccctgagagcacagagaagacacccactgcagacccccagcccagcctgctctgcggccccctgcggctgtcagagagcggtgagacctggagcgaggtgtgggccgccatccccatgtcagatccccaggtgctgcacctgcagggaggcagccaggacggccggctgccccgcaccatccctctccccagctgcaaactgagtgtgccggaccctgaggagaggctggactcggggcatgtgtggaagctgcagtgggccaagcagtcctggtacctgagcgcctcctccgcagagctgcagcagcagtggctggaaaccctaagcactgctgcccatggggacacggcccaggacagcccgggggccctgcagcttcaggtccctatgggcgcagctgctccgtgagctgagtctcccactgccctgcacaccaccacattggacctgtgctgtcctgggaggtggtgttggaggccccatgaagagcgccctggactgctgagggtgggccaacagcccagagctcaggacacttggctttggggggaaggaaactgaggcccagagaggggcaaccactggccaagggtcacccagcaagttttggctaagagcctggcctccagccccagcagtgtggcccagagcaggggccgactgccaaagtaaccatcatccatatgggccgtgtggtgatgctggcccggaaggcagaaagaggcagcatgggcactgccagggacagccacatcctgctggtctgcagcgtggtccaccccgcctctgcccagcctgtctacaccgtgtgagctgaatcgtgacttgcttcccacctcctttctctgtcctctcctgaggttctgcctgcagcccccaggaggtgggcctgccccatcctagctggactcatgctgttcctgatgctagtggcacacagtgcttatctgcataaataaacactggccacca

SEQ ID NO: 18546 - DNA, 1425 bp, Homo sapiens
  misc_feature (1)..(1): n is a, c, g, or t
  misc_feature (35)..(35): n is a, c, g, or t
nctgtcaatcactggtcatttggttactttcactnttagaagcttcacctgaatccattctttcttctcttcctctgtcctctcctctccagacatgcctatcacgagcaccagccctgtggagcctgtggtgaccaccgaaggcagttcgggtgcagcagggctcgagcccagaaaactatcctctaagaccagacgtgacaaggagaagcagagctgtaagagctgtggtgagaccttcaactccatcaccaagaggaggcatcactgcaagctgtgtggggcggtcatctgtgggaagtgctccgagttcaaggccgagaacagccggcagagccgtgtctgcagagattgtttcctgacacagccagtggcccctgagagcacagagaagacacccactgcagacccccagcccagcctgctctgcggccccctgcggctgtcagagagcggtgagacctggagcgaggtgtgggccgccatccccatgtcagatccccaggtgctgcacctgcagggaggcagccaggacggccggctgccccgcaccatccctctccccagctgcaaactgagtgtgccggaccctgaggagaggctggactcggggcatgtgtggaagctgcagtgggccaagcagtcctggtacctgagcgcctcctccgcagagctgcagcagcagtggctggaaaccctaagcactgctgcccatggggacacggcccaggacagcccgggggccctgcagcttcaggtccctatgggcgcagctgctccgtgagctgagtctcccactgccctgcacaccaccacattggacctgtgctgtcctgggaggtggtgttggaggccccatgaagagcgccctggactgctgagggtgggccaacagcccagagctcaggacacttggctttggggggaaggaaactgaggcccagagaggggcaaccactggccaagggtcacccagcaagttttggctaagagcctggcctccagccccagcagtgtggcccagagcaggggccgactgccaaagtaaccatcatccatatgggccgtgtggtgatgctggcccggaaggcagaaagaggcagcatgggcactgccagggacagccacatcctgctggtctgcagcgtggtccaccccgcctctgcccagcctgtctacaccgtgtgagctgaatcgtgacttgcttcccacctcctttctctgtcctctcctgaggttctgcctgcagcccccaggaggtgggcctgccccatcctagctggactcatggttcctaaataaccacgctcagaagctctgctaggacttaccccagccactgagtggcaggcgcatgagatttgtggctgttcctgatgctagtggcacacagtgcttatctgcataaataaacactggccacca

SEQ ID NO: 18547 - DNA, 1335 bp, Homo sapiens
tgaggcttacgacccagggaccagtcacccatcccattttacaggtgaggaaactgaggctcagaaaggagagctcgagcccagaaaactatcctctaagaccagacgtgacaaggagaagcagagctgtaagagctgtggtgagaccttcaactccatcaccaagaggaggcatcactgcaagctgtgtggggcggtcatctgtgggaagtgctccgagttcaaggccgagaacagccggcagagccgtgtctgcagagattgtttcctgacacagccagtggcccctgagagcacagagaagacacccactgcagacccccagcccagcctgctctgcggccccctgcggctgtcagagagcggtgagacctggagcgaggtgtgggccgccatccccatgtcagatccccaggtgctgcacctgcagggaggcagccaggacggccggctgccccgcaccatccctctccccagctgcaaactgagtgtgccggaccctgaggagaggctggactcggggcatgtgtggaagctgcagtgggccaagcagtcctggtacctgagcgcctcctccgcagagctgcagcagcagtggctggaaaccctaagcactgctgcccatggggacacggcccaggacagcccgggggccctgcagcttcaggtccctatgggcgcagctgctccgtgagctgagtctcccactgccctgcacaccaccacattggacctgtgctgtcctgggaggtggtgttggaggccccatgaagagcgccctggactgctgagggtgggccaacagcccagagctcaggacacttggctttggggggaaggaaactgaggcccagagaggggcaaccactggccaagggtcacccagcaagttttggctaagagcctggcctccagccccagcagtgtggcccagagcaggggccgactgccaaagtaaccatcatccatatgggccgtgtggtgatgctggcccggaaggcagaaagaggcagcatgggcactgccagggacagccacatcctgctggtctgcagcgtggtccaccccgcctctgcccagcctgtctacaccgtgtgagctgaatcgtgacttgcttcccacctcctttctctgtcctctcctgaggttctgcctgcagcccccaggaggtgggcctgccccatcctagctggactcatggttcctaaataaccacgctcagaagctctgctaggacttaccccagccactgagtggcaggcgcatgagatttgtggctgttcctgatgctagtggcacacagtgcttatctgcataaataaacactggccacca

SEQ ID NO: 18548 - DNA, 1464 bp, Homo sapiens
tgaggcttacgacccagggaccagtcacccatcccattttacagctcgagcccagaaaactatcctctaagaccagacgtgacaaggagaagcagagctgtaagagctgtggtgagaccttcaactccatcaccaagaggaggcatcactgcaagctgtgtggggcgccatgctgaggggtgagaggtggtttctggttatgaatttgatttgcgtttccctgatggccagtgatggggcatcttcccctgtgcttggtggctcttcacactcttcctcccacgcacacaagactcctggactctggaccctccaggacagaagggtcatctgtgggaagtgctccgagttcaaggccgagaacagccggcagagccgtgtctgcagagattgtttcctgacacagccagtggcccctgagagcacagagaagacacccactgcagacccccagcccagcctgctctgcggccccctgcggctgtcagagagcggtgagacctggagcgaggtgtgggccgccatccccatgtcagatccccaggtgctgcacctgcagggaggcagccaggacggccggctgccccgcaccatccctctccccagctgcaaactgagtgtgccggaccctgaggagaggctggactcggggcatgtgtggaagctgcagtgggccaagcagtcctggtacctgagcgcctcctccgcagagctgcagcagcagtggctggaaaccctaagcactgctgcccatggggacacggcccaggacagcccgggggccctgcagcttcaggtccctatgggcgcagctgctccgtgagctgagtctcccactgccctgcacaccaccacattggacctgtgctgtcctgggaggtggtgttggaggccccatgaagagcgccctggactgctgagggtgggccaacagcccagagctcaggacacttggctttggggggaaggaaactgaggcccagagaggggcaaccactggccaagggtcacccagcaagttttggctaagagcctggcctccagccccagcagtgtggcccagagcaggggccgactgccaaagtaaccatcatccatatgggccgtgtggtgatgctggcccggaaggcagaaagaggcagcatgggcactgccagggacagccacatcctgctggtctgcagcgtggtccaccccgcctctgcccagcctgtctacaccgtgtgagctgaatcgtgacttgcttcccacctcctttctctgtcctctcctgaggttctgcctgcagcccccaggaggtgggcctgccccatcctagctggactcatggttcctaaataaccacgctcagaagctctgctaggacttaccccagccactgagtggcaggcgcatgagatttgtggctgttcctgatgctagtggcacacagtgcttatctgcataaataaacactggccacca

SEQ ID NO: 18549 - DNA, 1719 bp, Homo sapiens
ggccgccgcagctgtgagcctagcacctgatcagtggagagctgtggattgcatgtttgtttgccattgcccccgccaccctgcaagttgcaccttctagaatcagcaagccaagctcctctcacccagcgtaatgatgcggaaatgcaaatgcaccatcatgttgtgacccatattgcgaaaattagaaaaaaggaagttgtgtttcgctattgcacgaagttcagcccagaggagaaactcgctcgccttcagaagacagtacctcctaaatggctctactttgaacctgctgggcaaggaagagattttcaaggaaaccatctaccgtgtgcaagctcctgccggccaaccccagaccccagcacggagccaggcgcctgtgcccgccgaccctcagcatcctcctcagaaaggctggtggcatcaggaagcccctggccagcctccacctgagcccagtgagctcagctttaaggatggagtcaggcagggggtcctcaacccctccaggacccattgctgccctagggatgccagacactgggcctggcagttcctccctagggaagcttcaggcgctccctgttgggcccagagcccactgtggggaccctgtcagcctggctgcagcaggggacggctctccagacataggccccacgggagagctgagtggtagcttaaagatccccaaccgggacagcgggatcgacagtccctcctccagtgtggctggagagaactttccctgcgaggagggcttggaggctggcccaagccccactgtactgggggcgcacgcagagatggccctggacagccaggtcccgaaggtcaccccccaggaggaggcggacagcgacgtgggtgaggaacctgactctgagaacaccccccagaaggctgacaaggatgccggcctggcccagcactctggcccccagaagcttctccacattgcccaggagctcctgcacaccgaggagacctatgtgaagcggctgcacctgctggaccaggttttctgcaccaggctgacggatgcggggatccctccagaagtcatcatgggcatattctctaacatctcctccatccaccgcttccacgggcagttcctgctgccggagctgaagacgcggatcacggaggagtgggacacaaacccacggctcggggacatcctgcagaagctggccccattcctgaagatgtacggcgagtatgtcaagaactttgaccgagccgtagggctggtgagcacgtggacccagcgctccccactgtttaaagacgtcgtccacagcatccagaagcaggaggtatgcgggaacctgacgctgcagcaccacatgctggagcccgtgcagagggtcccccggtacgagctgctgctcaaggactatctgaagaggctcccgcaggacgccccagaccggaaggatgcggagaggtccttggagctcatctccacagccgccaaccactccaatgctgccattcggaaagtggagaaaatgcacaagctcttggaggtgtacgagcagctgggtggggaagaagacattgtcaacccggccaatgaactgatcaaggagggccaaatccagaaactgtcagccaagaacggcaccccccaggaccgccacctcttcctgctgttcctgatgctagtggcacacagtgcttatctgcataaataaacactggccacca

SEQ ID NO: 18550 - DNA, 1340 bp, Homo sapiens
  misc_feature (1333)..(1333): n is a, c, g, or t
ggccgccgcagctgtgagcctagcacctgatcagtggagagctgtggattgcatgtttgtttgccattgcccccgccaccctgcaagttgcaccttctagaatcagcaagccaagctcctctcacccagcgtaatgatgcggaaatgcaaatgcaccatcatgttgtgacccatattgcgaaaattagaaaaaaggaagttgtgtttcgctattgcacgaagttcagcccagaggagaaactcgctcgccttcagaagacagtacctcctaaatggctctactttgaacctgctgggcaaggaagagattttcaaggaaaccatctaccgtgtgcaagctcctgccggccaaccccagaccccagcacggagccaggcgcctgtgcccgccgaccctcagcatcctcctcagaaaggctggtggcatcaggaagcccctggccagcctccacctgagcccagtgagctcagctttaaggatggagtcaggcagggggtcctcaacccctccaggacccattgctgccctagggatgccagacactgggcctggcagttcctccctagggaagcttcaggcgctccctgttgggcccagagcccactgtggggaccctgtcagcctggctgcagcaggggacggctctccagacataggccccacgggagagctgagtggtagcttaaagatccccaaccgggacagcgggatcgacagtccctcctccagtgtggctggagagaactttccctgcgaggagggcttggaggctggcccaagccccactgtactgggggcgcacgcagagatggccctggacagccaggtcccgaaggtcaccccccaggaggaggcggacagcgacgtgggtgaggaacctgactctgagaacaccccccagaaggctgacaaggatgccggcctggcccagcactctggcccccagaagcttctccacattgcccaggagctcctgcacaccgaggagacctatgtgaagcggctgcacctgctggaccaggttttctgcaccaggctgacggatgcggggatccctccagaagtcatcatgggcatattctctaacatctcctccatccaccgcttccacgggcagttcctgctgccggagctgaagacgcggatcacggaggagtggtgagtaccatctgcgcatgcccatggggcccctcaagtgttctctagacctgggttcatgtgcctgagagcgaggcaagtgctgggggactgtctcatggtggctgggcgcctcccttctctgcacggtcctgggtccgatccagactccagcctgggcaacagagcaagacnctgtctc

SEQ ID NO: 18551 - DNA, 337 bp, Homo sapiens
tgcggaacaaacaattttaaaacaaaacattttccattttctgttctttaaaagcctgtctgtacaagacccagctgaagctgaccagggcattcacacttcacacacaacccccagcccacctgctccaggctttcggtggggggcggagggtactgcctgggagctgcatttgggggttgcacctgagggtgctggtccatgcctggctagcactgactctggcttgtttctcccctacaggaagcccctggccagcctccacctgagcccagtgagctcagctttaaggatggagtcaggcagggggtcctcaacccctccaggacccattgct

SEQ ID NO: 18552 - DNA, 610 bp, Homo sapiens
attccactgtacagacagaccatgacaacttcatccattcatctgccgatggacacgggttgcttccagcttttggctattgtgaataacgctgctatggacatgaatgtacaaacatcccttcagatcctcctttcagttcttgtgggtacataccccgagtggaactgtggcatcatatggtaactctgtgtttaacattttgaggaaccaccctactgcttcccacagaggctgtaccagtttacttcccaccaacagtgcaaggattccaatttctccacatccgtgccaacactattttctttttgtcgctgttgtcattgtttgtctggaaaatagccatgctgaggggtgagaggtggtttctggttatgaatttgatttgcgtttccctgatggccagtgatggggcatcttcccctgtgcttggtggctcttcacactcttcctcccacgcacacaagactcctggactctggaccctccaggacagaagggtgggtaccagacgcccagcagggccagccttgctctctgccctcagacagggctcccctcaaggagaagctcttatccctcgccacacgccacactgtgttaagtctcc

SEQ ID NO: 18553 - DNA, 564 bp, Homo sapiens
caggcttcagtttccctgactggagaggttgagataaacatttctagtggcagttccagctctgacatcctggggaactcgatacatatctttgccttttcctaaagtcttcttaacagtggtttcggcacccataacaaagtgtctcaagggaggcacctcctccccagagaggaaatgctgggtgtggaccaagcttcaaaagcccaggaagttatttcatcaaatgatggggcctttccaggggttgcaggctattgtaacaggaaacggtaattagcaacttgccaaacgcagtcggggttttatgtactgtgatgaggcttacgacccagggaccagtcacccatcccattttacaggtgaggaaactgaggctcagaaaggagaggtgagtcatccagggttgcagggctgacaggaggcaggagactggggtctctccacctggcactgttcataatcagacagggaaaccaaggctggactgggcagccccaggctacacctgctccagcctccacaccaccctcctctgtaggcagttcaggcacaggagacaga

SEQ ID NO: 18554 - DNA, 352 bp, Homo sapiens
gatggaccagctcatgtagcagccacgctgacctgagcctctgcacccctctccctgcagaactgtggggctgcaggctcacctctgttacctccttggggaaacacttctaagtcagaaaacatgaggctggagctaaaatgaccagcttgggtttgctttgttctttgttcttgccccttcaggtgcaggatatcgtcaagccaaacacagcacatacattcatcataacgggaagaaaaaggtccctggagctgcagacgcggtatggaacgggctgtttctagtgaatgtctttgacctcatgtcttctttttctaaactggttaaccttgtaatatatttttattta

SEQ ID NO: 18555 - DNA, 351 bp, Homo sapiens
caggcgcgtccctcctgtgggtagcatcctcccatgcccctttatagtcctcactgttgtgttgctgtgtccagatcatccaggccaccatcgagaagcacaaacagaacagcgaaaccttcaaggcttttggtggcgcctttagccaggatgaggaccccagcctctctccagacatgcctgtgagtcagtggcccggggtgcagagagacctccaggggacgggctacctgtggagagcagaaggcactggcgtctgggtgggcagcttgacctccaggctttcctcctgctacaccagggaccaggacagcgggcactcccttgtgttaaaataaaaacttaagacaa

SEQ ID NO: 18556 - DNA, 1377 bp, Homo sapiens
tacaaacatatgatgacaggtaattgatcaaaccaactcaagaaacatgagaatcctgagctgtcagtgggggaagctgaagactaacctgtatttatacttcagaattttccagagactcccaaattgatagtatcagagccctctggactttaaaaagcagtgaaaaacaccgcattcctttggcacaggatgaagaccagctcagctcttcagttgttgatcattgtctattgttctccaaacagtaaaccagtatttcacactgagattgtcggctgcgggtatattccaattccccgtctcctcatgaatatgaagtgaagggctctgaccctggaagtggttctaagcagggcaaaatggggtctcggaagtgtggaggctgcctaagttgtttgctgattccgcttgcactttggagtataatcgtgaacatattattgtatttcccgaatgggcaaacttcctatgcatccagcaataaactcaccaactacgtgtggtattttgaaggaatctgtttctcaggcatcatgatgcttatagtaacaacagttcttctggtactggagaataataacaactataaatgttgccagagtgaaaactgcagcaaaaaatatgtgacactgctgtcaattatcttttcttccctcggaattgctttttctggatactgcctggtcatctctgccttgggtcttgtccaagggccatattgccgcacccttgatggctgggagtatgcttttgaaggcactgctggacgtttccttacagattctagcatatggattcagtgcctggaacctgcacatgttgtggagtggaacatcattttattttccattctcataaccctcagtgggcttcaagtgatcatctgcctcatcagagtagtcatgcaactatccaagatactgtgtggaagctattcagtgatcttccagcctggaatcatttgaataaggacaaaatgttttccattatcaagacatggccatctatctaaatattatatcaactgtgtagacttgagggcaatattgaaatgatggtgctttctgcatttggtgtttatttgtaaaaaatttgcagtcctcactgcacatgcaagtataccacccttccatttagtatgttttttaagtaatatgcatcagaaacttcagaaatacttctgccctttgatcaaacaaatccatttccaagaatctgtactagggaagtaaataagaatatgagagaaacctttatgcaaatatgtatattgcaacattatttaatattctggaaaattggaaacaccccaaaattctaaactcagaggaaggattaagtaaagagtggtacatactgtaaatgttttctgat

SEQ ID NO: 18557 - DNA, 1430 bp, Homo sapiens
tacaaacatatgatgacaggtaattgatcaaaccaactcaagaaacatgagaatcctgagctgtcagtgggggaagctgaagactaacctgtatttatacttcagaattttccagagactcccaaattgatagtatcagagccctctggactttaaaaagcagtgaaaaacaccgcattcctttggcacaggatgaagaccagctcagctcttcagttgttgatcattgtctattgttctccaaacagtaaaccagtatttcacactgagattgtcggctgcgggtatattccaattccccgtctcctcatgaatatgaagtgaagggctctgaccctggaagtggttctaagcagggcaaaatggggtctcggaagtgtggaggctgcctaagttgtttgctgattccgcttgcactttggagtataatcgtgaacatattattgtatttcccgaatgggcaaacttcctatgcatccagcaataaactcaccaactacgtgtggtattttgaaggaatctgtttctcaggcatcatgatgcttatagtaacaacagttcttctggtactggagaataataacaactataaatgttgccagagtgaaaactgcagcaaaaaatatgtgacactgctgtcaattatcttttcttccctcggaattgctttttctggatactgcctggtcatctctgccttgggtcttgtccaagggccatattgccgcacccttgatggctgggagtatgcttttgaaggcactgctggacgtttccttacagattctagcatatggattcagtgcctggaacctgcacatgttgtggagtggaacatcattttattttccattctcataaccctcagtgggcttcaagtgatcatctgcctcatcagagtagtcatgcaactatccaagatactgtgtggaagctattcagtgatcttccagcctggaatcatttgaataaggacaaaatgttttccattatcaagacatggccatctatctaaatattatatcaactgtgtagacttgagggcaatattgaaatgatggtgctttctgcatttggtgtttatttgtaaaaaatttgcagtcctcactgcacatgcaagtataccacccttccatttagtatgttttttaagtaatatgcatcagaaacttcagaaatacttctgccctttgatcaaacaaatccatttccaagaatctgtactagggaagtaaataagaatatgagagaaacctttatgcaaatatgtatattgcaacattatttaatattctggaaaattggaaacaccccaaaattctaaactcagaggaaggattaagtaaagagtggtacatactgtaaatgttttctgatattaaaaaaaaaattaaataaaaaataaagagtactacaaagttgtaaaatta

SEQ ID NO: 18558 - DNA, 1169 bp, Homo sapiens
agagagagagagagaaaaaaaaggtcaggtaggaagaagaaaaatagactttctgtgactgtatactcttgaaatctcccgcaggttctaagcagggcaaaatggggtctcggaagtgtggaggctgcctaagttgtttgctgattccgcttgcactttggagtataatcgtgaacatattattgtatttcccgaatgggcaaacttcctatgcatccagcaataaactcaccaactacgtgtggtattttgaaggaatctgtttctcaggcatcatgatgcttatagtaacaacagttcttctggtactggagaataataacaactataaatgttgccagagtgaaaactgcagcaaaaaatatgtgacactgctgtcaattatcttttcttccctcggaattgctttttctggatactgcctggtcatctctgccttgggtcttgtccaagggccatattgccgcacccttgatggctgggagtatgcttttgaaggcactgctggacgtttccttacagattctagcatatggattcagtgcctggaacctgcacatgttgtggagtggaacatcattttattttccattctcataaccctcagtgggcttcaagtgatcatctgcctcatcagagtagtcatgcaactatccaagatactgtgtggaagctattcagtgatcttccagcctggaatcatttgaataaggacaaaatgttttccattatcaagacatggccatctatctaaatattatatcaactgtgtagacttgagggcaatattgaaatgatggtgctttctgcatttggtgtttatttgtaaaaaatttgcagtcctcactgcacatgcaagtataccacccttccatttagtatgttttttaagtaatatgcatcagaaacttcagaaatacttctgccctttgatcaaacaaatccatttccaagaatctgtactagggaagtaaataagaatatgagagaaacctttatgcaaatatgtatattgcaacattatttaatattctggaaaattggaaacaccccaaaattctaaactcagaggaaggattaagtaaagagtggtacatactgtaaatgttttctgatattaaaaaaaaaattaaataaaaaataaagagtactacaaagttgtaaaatta

SEQ ID NO: 18559 - DNA, 1055 bp, Homo sapiens
tgtttacatactaattgatcacaaccagtctacagatttctgggttccttctccactcccactgcttcacttgatgtaggccttataaaaaaaaaaaaaaaaaaagaaaaaaagaaagatgtgtgctgcgccggactcagtgggcactgtggcaaggatttgtaaaagacacgctggcggttgggggtgagcggtggagcccctcgctgtccgtaatgtgatcatctttgcgtgtccctcgtgtgtttcgcttaggactcgccctggcgtgcctgggtcgtgcctctgggcttcgcgcgtcctttttacaagggcccgcggtgggcagcacccttgtttggcaagagacccatgctgggtgtacggcgcgtggcttggacggggtccttacagagtggctacccatagtggagtcccagttgtctcatgaggataccggcccctggtgggggcagtggaacatcattttattttccattctcataaccctcagtgggcttcaagtgatcatctgcctcatcagagtagtcatgcaactatccaagatactgtgtggaagctattcagtgatcttccagcctggaatcatttgaataaggacaaaatgttttccattatcaagacatggccatctatctaaatattatatcaactgtgtagacttgagggcaatattgaaatgatggtgctttctgcatttggtgtttatttgtaaaaaatttgcagtcctcactgcacatgcaagtataccacccttccatttagtatgttttttaagtaatatgcatcagaaacttcagaaatacttctgccctttgatcaaacaaatccatttccaagaatctgtactagggaagtaaataagaatatgagagaaacctttatgcaaatatgtatattgcaacattatttaatattctggaaaattggaaacaccccaaaattctaaactcagaggaaggattaagtaaagagtggtacatactgtaaatgttttctgatattaaaaaaaaaattaaataaaaaataaagagtactacaaagttgtaaaatta

SEQ ID NO: 18560 - DNA, 176 bp, Homo sapiens
catttataccagtttcagaagcttacaagtgcacaaaaatgtttcctgccgcccccaccaagatggaacagggacaagaagaactgatctgcatcatcctctagattctgtgtgcgcttcctgatccatgcctccaaatgacaagggttacaggcatgcagcaatgaatgtaggca

SEQ ID NO: 18561 - DNA, 228 bp, Homo sapiens
gctaaatggcctttggattgagtctcagcagtcacctactatagtagtcaagctgcataaacttagaattgatttctgtctgggtgcacattaggagggtaaaaataaaaccaacctcaacaaagctgagttggctaataacattcagtgcttggttttatgtggagcgcttcatagcactgctttgtattgtgatagaaaagggtgcagggccacctttgcctcttt

SEQ ID NO: 18562 - DNA, 654 bp, Homo sapiens
gagatagggtctgtctctattgcttaggctggagtgcagtggcacaaccatggcttactgcaaccccaacctcccaggctcaagcaatcctcttgccttagcctcctgagtgactggaactacaggtgcaaatggccatgcctggctaatttttgtattttttatgtagataggctctcactacattgcccaggctggtcttgaactcctgggctcaagcaatcctcctgccttggcctccagaactgttgggattacaagcatgagccaacacacctggccagcatatttttaataaatagcagtctgtgttcccactgcagacaactgaaccagagtttctaaggatggggcaagggcttgggtattttgtaaccatgttgtggttatgcttatatgcagcccaggttgaaaagcatgacgtagttcttgcacatcaaagatttttattttgatttttttctttttgtattcttttcaacattgtattaacatacagtgcacatctaagatttaaagatcttctgagacctgttaccttaaacttttgctccatttagtaaagctccttcttccagccagcttgtttcagaaactacacaaatcatgaattagaacaaaaacatgtatacaaaacctttgattgttagttgg

SEQ ID NO: 18563 - DNA, 321 bp, Homo sapiens
ctaaattgtggttcacatttatgctaaaaattgttccttatctgaaattcccaatgttaaataaggatcttatatttttatttgctaaatccaacaacactacattgtgttttaaagtgaattcggaaagaagctttggtggttttacattgcagtctttctcactgttttagcattagtcctatacacaaaattttccaactatatgtatttatggtgctgtagagagtctactgtaactctaattctaatttttgaaacagttagtgctcaaataaagatcgataactcctctggccatccagtagcacactgacagaa

SEQ ID NO: 18564 - DNA, 493 bp, Homo sapiens
gaaaagtggcctctcttccggaatgacacatactgacttttgaagaagcaaaaggatacctgctggccagtcatatcagccaaaaaactctggtgagcagtgagttggcagatgttgcaactggaagactgtggcatcaacagagccccaaagcaataatctctctttctcttcgcccccactaatccagcaatcaaataatcacttttaagcatttactgtgcaccaccatataacataaaatgtgatgaatagctaggtatatatatgacaacctctaaattctcaaaatattataataaattaagaaagcaagagttgtgcatgtaaaaagacaattaactacataggggaggaggcagtgaacacatttagtgcatctcccctgttaccggtcactgtgtgagggtgctgtacaagtactaattttatcttaatccccaccaaatcccggggaggcatttctatccttgttctgtggatgatgtgggag

SEQ ID NO: 18565 - DNA, 313 bp, Homo sapiens
gcagatgtttatcagcattgattcagtggctcagtggggtcaaggcctttctcttctgataggggtgtcacagccgtgatcaacgcactcctatcaaggcaggaataatgtggaaggatgatggcagaacatatctacccttctttgaagaaagtgaaagctttcccagaaatcccttcgttagccattaggtcccattagctacggctagatgatggggccaccctagtttcaagggagcctaggaaagcagggaacagaattgtcccatttacttacatgcattgtaatccaagtcctgggacttccccaa

SEQ ID NO: 18566 - DNA, 400 bp, Homo sapiens
tcaaatggtaggtgtcccccttctaacccccgcaacattggtacattgtgtctctcccattctgttctcctgcatttggtttgggagtctcaggtacagactatgacctctatcctttttgaatttcatcctgtatgttgcaccagatttcagcagaacaaaagccacgagccacttgtcccagtgacacgccagccacacatttctaaatacatcctctgtatcttctgagaagttctccttctggaaagatttacactttaaacaaagaggcctaagagatgcccattttatagataaggaaccaagcccccggggtgaagtacctgcccagggcatgggggcctttgcagcctaaccccagatcagtgagctttgctgtaccccccaaaacccctgg

SEQ ID NO: 18567 - DNA, 512 bp, Homo sapiens
gccgttctcatgatagtgaataagtctcatgagatctgatggttttataaggggcagttcacctgcacatgcactcttgcctgccactatgtaagacatgcctttgctcctccttgaccttctgccatgattgtcaggcctccccagccttgtggaactgttgagtccattaaacctctttttctttataaattacccagtcctgggtatgtctttattagcagtgtgggaacagactaatacagatgtcttgcagtagtttgcaaagtgtggacccccaaacaacaatataagcatcacaagctgtttgtctttcctgtggctgttgttagaaattaccacaaatttagtggcttaaaacaccaatttaggctgggcatggtggtgcactcctgtagtcccagctcctcaggggagctgaggtgggaggatcgcttgagccggggaattcgtgaaccgagactgcactactgcactccagcctgggtgacatagcaagaccctgtctcaaa

SEQ ID NO: 18568 - DNA, 440 bp, Homo sapiens
cacgagcaactcctctgtagtgtcagttaaggtatgcgtgaaacccaaacaggataaacccaaaagaatccacatctacatatatcataatcaaacttttgaaaaccaaagacaaaaaaagtcttgtgtgcagtgaaaaagatataacacctaacttacaggggaagaacaaatgatattggatttttcatcaggaactacagaggccagaaaatgaaaaggcagcatttttcaagtgctgaaagataagtattgtctaccaagaattccatatcaatcagaaatacccttcaggatgatgggaaaataaagacattctcaagtgaaagaaaactaaaagaatccgttcccagcagaccagtcctaaaagagtagctaaaggatgttcttaccacagaaaggaaataatgaaagagggaatccagaaacatcaggaagga

SEQ ID NO: 18569 - DNA, 544 bp, Homo sapiens
tttttttatgttttaatttcctcatcagccatttaactttatgccatatggtgatggcagagctgtccccacttctgtgagaagaccctagtggttccatgaacatcttttgagaaagcagacccactgagcgtttgcttagaagagcagaagggaggctggggaggatgcagtagccatctccttttcatcttcatctcctagaccttaactcatctgctaccatttgactggcattgtcatctagctcctctggcgtgcacacacacatgcataggcagtgtcagtctgttggcagcacctcccaggacagacttgcgatcccacgggctctgcagtcccaaattgctagggctctcttttgagttaagtgtcaggctggccatggaaacctgggattgggccctggctgccttagtggctttgagtaagagggccgggcatttaatatttgttgaagtgactgagctctcagtgcgctcatttatctgtctgaatagtggatagtaatacttctcagctccatggagataatggtaatgat

SEQ ID NO: 18570 - DNA, 366 bp, Homo sapiens
aggcaaaggacacaggataggcagtaggaaaccaaaaatgtccagatcataagaggcaacttccaaaataagaaagctgaatttcaacacatgaactcgtgagaacagcaagagacaaacaagatcatgagtggtacaaagcacaaaaaggtgtggttgcctgaaaaaatccaaacttaatcttcttctgtgtttgctgaaagctaattttgctctccctcttccacatcacaactgagtccaattttgcataccttggtttaaagcttacacaataagcacttttctcaaatggtaagccagcacacacattttggattgtagagcatgaacagaggtttagtgcagctttgagtttctttaagg

SEQ ID NO: 18571 - DNA, 467 bp, Homo sapiens
gtgttgctcaggctggtctcgaactcctagcctcaagtgatcctcccaactcagcctcccaaagcagtgaaattataggagtgagctaccacgcccagccttgaggcttctttatattcttaaaaattactgaggaccctaaagagattatatcttttaatacttagaatcagaaatttaaactgagaattgtaaaaatatttattaattcattttaaaagagcaagatatgttactgttagtactttttcataaaaaataactatattttccaaaacaaataaactaaaaatagtgaaaaggctggatgtggtggaatgtgcctataatcccagctactggggagactgagatcagaggatcaactgagcccaggagttcgagtccagcctcccaaagtgctgggattatgggattacaggcatgagtcaccacgcccagccagctgtttcaactcttaggggtga

SEQ ID NO: 18572 - DNA, 440 bp, Homo sapiens
gcctttctcactaagggacccctgtgctggcatggatgcatggcacctgttggcatcttcagcagaactctgggtgctgtgcaggaggcaaacttgggggacagtttaaatccctctcaattgtacagctgttcggcccgactgaactgcagtggtggctgatggaagcaaggagactgggctagaatggaaggaaccaaagagatctcattggaacagctttcaaatcttcatcttacattcacttttgggaacattaccccccttcttgccaaggattgacaactctttctcacttaaccacacaacatccttcctggaattattggggtgcgtatgatggcatggcatagtttggttagagatgctgtgtccagttagccttatgatagaatgactacactagaacttttttcaagaaataaaaacataaaaatatt

SEQ ID NO: 18573 - DNA, 721 bp, Homo sapiens
ttaattgtagtgcttaccaatcagtaacttcactatcactcagggctttcgtaccttctaggtaaaacttctttcattgtgtttttttaagatactgtatttttttttaagtgccatcatttaaatttcacttagtaagtggcagattacattattcagtcccacaagcacagaaacatagtaacactaggagatatttgaacatttattttacaatcgactgaatatattatgtaaatgaggtaagcaacttttgtagagattgtatgtgtgagataatgtaatgttcttttccagtttttggactacagttgaataaactttttaattatttaaaaacatctttaccgaataacatgtgatggttttttgtataatgtatttgattttgtaaatacgtatttcctgatgtgatttttgtgagaaatgctaaatcttttagtatatcatgtcctctcaaaattggcaggagctaaataatagtttgtgggcgatttgtattgtgtactgtacaataactggggaacttttataattataaaaatatatattaacttttagtgtgttgtttaaacaaatgactggaacatactaaagatattagtaggatttttctgaatatttcagacttgaactcaggctagctttcttgtgtttttcaaaacaaaatggtgtcttgtcttttaaaatcaataaatttgtttccttgttacaaataaat

SEQ ID NO: 18574 - DNA, 283 bp, Homo sapiens
atacagataaacacgggagaggctgggtcacggtgaggccggaaattattcatcagcaggagcttctgttctgggatgggcaccacggcgctgacattaactggccagaaggctgaatcaagacagaggaaatggaagaggaaggggtgtcttccccgtgatagcattcaccacctgtgctgagattgggacattcgagcctccgttgataagtggctctggagccagctcacctgggctcaccggggctcaaaccctggcttcccatccaccagtggggtgt

SEQ ID NO: 18575 - DNA, 744 bp, Homo sapiens
ttttagacagagtctcggctcactgcaacctctgcctcccgggttcaagcaattctactgcctcagcctcccaagtagctgggatccaacaccacgcctggcttattttttaatttttagtagagatggggtttcaccatgttggccatgctggtcttgaatcctgatctcagatgatctgcccacttcggtctcccaaactgctgcaattacaggtatgagccactgcacctagccacatattttcacctggcatataagtaaaactggctaattagcaactcccctagattttttgctgttctattttattgcaagaacagaaacatacttttcccctttgttgaaagatctccagtggcttcccatcttttataagggcctgctcctcactaccattctgccctcaacccctgctgctccttctcactccattcacaccaaccacactggtctccttactgttccctcaacacacaaagcatgctgctgtctcagggcctttgcacttgctatcctattttcatggaatgttcttcccctaactaaatgcatcgcatatctccctcctcttcattggggtctctgcttaaaagctaactactcagataagctttccctgaccacccccctaaaagaacaccccatcccacattgactctatgtttctctagtttgctctgtcttcacagccacttcttcccatctggcgtagtagacacttatttgtctatttattgctaa

SEQ ID NO: 18576 - DNA, 1131 bp, Homo sapiens
gccagacatggtatattaaagcaattctagccaatctcacactcaaaaattacccaggtaactccaaaaagtacctccatacagtttgttaaagctggaaggaagccagcttagttaccataatcctttcattttacagagaagctaaccaaggctcagagggagtaaagtgacatgcccaacgtcacacaactcatagtgtcttacgccatttgtctcttatttggcattcacctcctgcttagggacacatatatgggtgtctaaccaataaaagatgtttgcttgtagaataaaggtgaacagttctggatggaatgtatattttctttcttttttttttgagacagtctcactctgtcacctaggctggagggcagtggtgcaacctcgactcactataacctccacctcctggggtcaagccattcccctacttcagcctccccagtagctgggactacaggcacacgccaccacgcgcctggcttattttttaatttttagtagagatggggtttcaccatgttggccatgctggtcttgaatcctgatctcagatgatctgcccacttcggtctcccaaactgctgcaattacaggtatgagccactgcacctagccacatattttcacctggcatataagtaaaactggctaattagcaactcccctagattttttgctgttctattttattgcaagaacagaaacatacttttcccctttgttgaaagatctccagtggcttcccatcttttataagggcctgctcctcactaccattctgccctcaacccctgctgctccttctcactccattcacaccaaccacactggtctccttactgttccctcaacacacaaagcatgctgctgtctcagggcctttgcacttgctatcctattttcatggaatgttcttcccctaactaaatgcatcgcatatctccctcctcttcattggggtctctgcttaaaagctaactactcagataagctttccctgaccacccccctaaaagaacaccccatcccacattgactctatgtttctctagtttgctctgtcttcacagccacttcttcccatctggcgtagtagacacttatttgtctatttattgctaa

SEQ ID NO: 18577 - DNA, 479 bp, Homo sapiens
gccagacatggtatattaaagcaattctagccaatctcacactcaaaaattacccaggtaactccaaaaagtacctccatacagtttgttaaagctggaaggaagccagcttagttaccataatcctttcattttacagagaagctaaccaaggctcagagggagtaaagtgacatgcccaacgtcacacaactcatagtgtcttacgccatttgtctcttatttggcattcacctcctgcttagggacacatatatgggtgtctaaccaataaaagatgtttgcttgtagaataaaggtgaacagttctggatggaatgtatattttctttcttttttttttgagacagtctcaccactgcactccagcctgggcaacaaagcaagaccctgtctcttgcaacaacaaaaaaaattaaaaaccacgtctagccgtgggtaaaacaacaacaaaaacaaaaaaaacacaacaacaaaac

SEQ ID NO: 18578 - DNA, 1119 bp, Homo sapiens
taaaactaccatcattcacagatgacatgcttgtgtatgcagaaaattctaaggaagctacagattaaaattattaagagattagcaaagtcagtgtacaatatcaacatcaaaagaccagttatatttctatataccatcaacaagcccttagaaaatgaaatttaaaccaatatttaatttatagtagtatacacaattaccttgaactaaatgtaataatagacgtacaaaacctcaagcaaaagttatgaagctttgttgacaatgtcaagtgtttgtgaggatgtggagcaacaggaactctcaaacattgatggtggaagtgggaattggtacaactttgatatacagtttggtggtatctagtgaagttgaaaatatacacaatctatgagccagcaattcctctcctacatatataccttgtgtgtgcacatatgtaccaggagacattaaaaacatgttcttagcaacatttttcataattgtccccaactggaaacagtccaaatgtccaccgacagtaaaaggataatttcttgtaaagtcgtagaatggaaagctgtaacacaatactgagaatgatgaaccgatgccgcatgcaaccaggttgaatctcagaagcataattgtaagggcaatgagctggatatagaaggatatatgcattatagttctatttatataaagctccagaaacagtagtgtttgggcatctatatttgagtggtaaagctataaaggaaagtaagaaagcaacagctaaaactgtcatgagagtgttttgttttgttttggagagaggaaagaggttgtgattgggcaaggacttatgggaatttctggagttctgatctgttctgtttcttgatctttatggtgatttgctttataataatttgttaagctgtaaatttatattttatgcactttcctctgctccccccgccccccgcttaaagagtgttttagaatgtggaaattttaagataagatctatctcagggcttgttgtaagaatgaaatgaagtataaagccatgtagagcttgtagaatatgcctggcactttgtaagaccttaataaatgttaactatctaaacacaaaaaaaaatt

SEQ ID NO: 18579 - DNA, 423 bp, Homo sapiens
attttttaaaactttttaaaaatacacacaaaaagcagtttgtggtctaatttctttttccttgctcagcctcatcttttagcacctgtttatacacatatcacctctattcttgtaacaaaaataggtagaactggccagacacagtggctcatgcctgtaatcccagcactttgggagaccaagatgggaggctcaatagtttgagcccaggaattcaagaccagccagggcaacacaccagaccctatccctactaaaaattaaaaattagccaggcatgctgcacaccagtagttctaggaacttaggaggctgaggcaggaggatcatttgagcccaggagttcaaggctgcaattagtgatgatcatgccactgtactcccacttaggtgacaaaacgagactttgtctaagtaaaa

SEQ ID NO: 18580 - DNA, 924 bp, Homo sapiens
tagctaggcgagtatggtatcacagaagctaagagaggagtgtgtttcagggagggggagagagatttaacagtgttggatgctggtgggaaatagccaagtaatttaataacatggagatcattggtgatcttattggcatggtgagcactgctgcatatgagccaaggaggtacaagcagatgagagagggagtgtataatgttctctagagggcaggagggctggaatctggagcactgatgaggagagtgagggaaggtttgagcgttagataaaaggaagggcaatttcatataatgtgtcttttaaaacattaaaaatgtttgcttacagtcacagattgtcacaatgacatcaatcatttgtcccctgggaattaatctataggtacctggttttgcagaacatattttatgtgattcacatgtctatatgcagtcttggcacacttgttttccttttgtgattattatcattaagacaagtgatgtattcaatcaaataacgttctagattcagttgagcaatgaactttgctctcattcttttttaaggcagctcaactgtacatttgtattagctctttttcaacacacatatttagccctgggttaaatatcagaaattttcatatttctggtaaacctctggccagtcatttgaccccaaggggaaatcagttctatctatatatagtagatttttaaaaaaaggaatattgtatattattgaaaatgctggtcattctaaatcgccacttttcacttagtatagtgtcagctgaaaaccgtaagaagagaaacaccttccatctgatttaaaatatgttttagggccaggtgcagtggctcatgcctgtaatcccagcaacttgggaagctgaggcaggaagactgcttgaagccacgagtttgagatcag

SEQ ID NO: 18581 - DNA, 767 bp, Homo sapiens
tagctaggcgagtatggtatcacagaagctaagagaggagtgtgtttcagggagggggagagagatttaacagtgttggatgctggtgggaaatagccaagtaatttaataacatggagatcattggtgatcttattggcatggtgagcactgctgcatatgagccaaggaggtacaagcagatgagagagggagtgtataatgttctctagagggcaggagggctggaatctggagcactgatgaggagagtgagggaaggtttgagcgttagataaaaggaagggcaatttcatataatgtgtcttttaaaacattaaaaatgtttgcttacagtcacagattgtcacaatgacatcaatcatttgtcccctgggaattaatctataggtacctggttttgcagaacatattttatgtgattcacatgtctatatgcagtcttggcacacttgttttccttttgtgattattatcattaagacaagtgatgtattcaatcaaataacgttctagattcagttgagcaatgaactttgctctcattcttttttaaggcagctcaactgtacatttgtattagctctttttcaacacacatatttagccctgggtgaccctgcctcaaaaaaaaaaaaaaaaaaaaaattaaaggccaggcatggtggctcacacctgttgagaagttgaggtggaatgatcccttgagcccaggaactcaagaccagcctgggtaacatagagtccctgtatctatcaaaaaaaaa

SEQ ID NO: 18582 - DNA, 381 bp, Homo sapiens
catgccaccgcactctagtctgggcaacagagtgagaccctgtctctaaaaaaattaagtagatagataataaataatacatttttataattatctattttataaccaggcatggtggcgtgtgactgtagtcccagctactcaggaggctgaggtgggaggatcacctgagcctgagaggttgaggctgcaatgggccatggtcatgccactgcactccagcctgggtgaccctgcctcaaaaaaaaaaaaaaaaaaaaaattaaaggccaggcatggtggctcacacctgttgagaagttgaggtggaatgatcccttgagcccaggaactcaagaccagcctgggtaacatagagtccctgtatctatcaaaaaaaaa

SEQ ID NO: 18583 - DNA, 501 bp, Homo sapiens
ctgaaaccctggggaaaaagttgggagtgtcaaaggtctcaggccatcaacttgttgccaatcaccagctctgtccagttccccaggactgcctgggctctgttacatgaggtctcatcctaggaacgaccattggtacccacctggctggcagagggctttctgctttctaacctcctctcgcagggttcaggctatctctggccacgatcttcccttcttctgctgagtcaaagcaaatatctgaggcattctgagggacacttagaactgaggagcaattaagaaatgccctccaggagggactggcctccatgttacatggtcatcctacaagtcctaatggaggccctgagaatggcattgccttaatggccatagtaggaaaaatgagcaatgttgcctgatcgctgcaattgaatatcaaagatgttaactgagaggcacatgtatacacactgccaaacattaaaccatcttcctacacattgcagggcatga

SEQ ID NO: 18584 - DNA, 470 bp, Homo sapiens
atgctcttacttctatgaaccttatttttcttacctttaaaactgaatgaaatttcctttcttagaaggcttatagactgagtcttgtctttagttcagcggttatcttctactggtttggaaaagagatatttgaatatctgtatcatcttactaggctgcagacttctagagagcaaagactagatcataaatacctacttgcccttcatacctcccacatacataatccatgcatcatgaatacttgttaacttaaatgcatgacatgtaaaagaaatgcttgtaaaaaaaataggcgatttgacggcatcttcttatattggactatagtctcttgaatgttttcccatatatttctttttcttggggtctttccagctagttcttaggaaagtgaaaagctaataatattgattcccctcctcacccctgggactttgcaagacagaaccaaaaaaataaaaaat

SEQ ID NO: 18585 - DNA, 919 bp, Homo sapiens
ttgggaagcagcgatttctccttagtcacagtcagagagggtgatgcgacacactgggcttcactgtgctcgtgaagcggagccagggtgaaaggatcatatggcctaaccctaaccctaatgggagtaacttcacctgcgtcccacaggccccgcaagagtgacgctgccaggcaggcgccgccctgttcggttcctgctgctgtcgctcctcgctccccaccacctccagagctccggtgggtcaccatggaaagggaagccgctgcctgcaaggccagcagacacagaggtcaccctccaattttttcgggtaacattctgtaaggacagaacaccaggaggctactcctaccaccaggagcatgtcaggtaaacatccagagagatgaaggaagaaaaaattttattttagccaccaagaaatacaagccgttctaaagattatacttaaaagaaaaaaaaaacaaaaaaaggaaggaaaaaggggaccgatgatcttgcaatcacggaagttgtagagagctggctgcctagagacactgtgcccttccctcctccctcttttcctcttatcaaccagaggcagagactaagaatgccttcaagcaactaaagcctaaaataaaaaagaaagaaaagaggaagagggagagggagggagagagagagagagagagagagagagagagagagagagagagactgttgctttatgctattacaagtccaagaaaaaaaaaaaaagagatgaactttaaactttaaatacttagcagctgccaggtctagcaaacatgctagccctagatcacttactgatttataaacaaacccctagatacagagggggaaaaaggtaattaaataaaagttatatataatattttaacataaatatatgttgataaatggtgta

SEQ ID NO: 18586 - DNA, 2870 bp, Homo sapiens
  misc_feature (1232)..(1232): n is a, c, g, or t
cgcccgggcaggtcaaacacgcagccccctcccgctggagcgacaactggccagcatactctaggctgttgtccctttaaaacttgaatccaagggggtaatgatttatcaaacttgtattatcaagaaaatgtcaaaccaagggcaccttgctttgcactgacgcaaacccggcctttcccaaggagatatagaaagcgcctctcctgcctgagccaaacccagtcttgtcaatagcgggtttcaccctccaccagttcagtctgttgcctgtgtcagacatggattgcagtgctcccaaggaaatgaataaactgccagccaacagcccggaggcggcggcggcgcagggccacccggatggcccatgcgctcccaggacgagcccggagcaggagcttcccgcggctgccgccccgccgccgccacgtgtgcccaggtccgcttccaccggcgcccaaactttccagtcagcggacgcgcgagcctgcgaggctgagcggccaggagtggggtcttgcaaactcagtagcccgcgggcgcaggcggcctctgcagctctgcgggacttgagagaggcgcaaggcgcgcaggcctcgccccctcccgggagctccgggcccggcaacgcgttgcactgtaagatcccttctctgcgaggcccggagggggatgcgaacgtgagtgtgggcaagggcaccctggagcggaacaatacccctgttgtgggctgggtgaacatgagccagagcaccgtggtgctgggcacggatggaatcacgtccgtgctcccgggcagcgtggccaccgttgccacccaggaggacgagcaaggggatgagaataaggcccgagggaactggtccagcaaactggacttcatcctgtccatggtggggtacgcagtggggctgggcaatgtctggaggtttccctacctggccttccagaacgggggaggtgctttcctcatcccttacctgatgatgctggctctggctggattacccatcttcttcttggaggtgtcgctgggccagtttgccagccagggaccagtgtctgtgtggaaggccatcccagctctacaaggctgtggcatcgcgatgctgatcatctctgtcctaatagccatatactacaatgtgattatttgctatacacttttctacctgtttgcctcctttgtgtctgtactaccctggggctcctgcaacaacccttggaatacnccagaatgcaaagataaaaccaaacttttattagattcctgtgttatcagtgaccatcccaaaatacagatcaagaactcgactttctgcatgaccgcttatcccaacgtgacaatggttaatttcaccagccaggccaataagacatttgtcagtggaagtgaagagtacttcaagtactttgtgctgaagatttctgcagggattgaatatcctggcgagatcaggtggccactagctctctgcctcttcctggcttgggtcattgtgtatgcatcgttggctaaaggaatcaagacttcaggaaaagtggtgtacttcacggccacgttcccgtatgtcgtactcgtgatcctcctcatccgaggagtcaccctgcctggagctggagctgggatctggtacttcatcacacccaagtgggagaaactcacggatgccacggtgtggaaagatgctgccactcagattttcttctctttatctgctgcatggggaggcctgatcactctctcttcttacaacaaattccacaacaactgctacagggacactctaattgtcacctgcaccaacagtgccacaagcatctttgccggcttcgtcatcttctccgttatcggcttcatggccaatgaacgcaaagtcaacattgagaatgtggcagaccaagggccaggcattgcatttgtggtttacccggaagccttaaccaggctgcctctctctccgttctgggccatcatctttttcctgatgctcctcactcttggacttgacactatgtttgccaccatcgagaccatagtgacctccatctcagacgagtttcccaagtacctacgcacacacaagccagtgtttactctgggctgctgcatttgtttcttcatcatgggttttccaatgatcactcagggtggaatttacatgtttcagcttgtggacacctatgctgcctcctatgcccttgtcatcattgccatttttgagctcgtggggatctcttatgtgtatggcttgcaaagattctgtgaagatatagagatgatgattggattccagcctaacatcttctggaaagtctgctgggcatttgtaaccccaaccattttaacctttatcctttgcttcagcttttaccagtgggagcccatgacctatggctcttaccgctatcctaactggtccatggtgctcggatggctaatgctcgcctgttccgtcatctggatcccaattatgtttgtgataaaaatgcatctggcccctggaagatttattgagaggctgaagttggtgtgctcgccacagccggactggggcccattcttagctcaacaccgcggggagcgttacaagaacatgatcgaccccttgggaacctcttccttgggactcaaactgccagtgaaggatttggaactgggcactcagtgctagtccagtggtgtgggatggtccagacttgatcctgtttttcctctctgcctcctcctaatgttttccatagctctcctcccatttttcttcatctttcttcctacatcttggttcacatccacgcatgagagtgattatgtagaaaagtaggcatagtgtcgcatgctgcagtaaagagctacatagaccacctga

SEQ ID NO: 18587 - DNA, 1898 bp, Homo sapiens
tcctatccaccctccactcccctgtcccttggtgactcatccctgagcttcccaaggaagcccccaccctctgccctttcctcccgccttccatgagtggaaaatccacctccgccccctatagcaggccagcccccttcctccccagtctccgaccccatcccccagccgaccagtttcctctccaggaccagggagcaatcacagctgccccgaccttggcttcctctgctgggtgggattgggggctgggcccccaaatgggcccctggcttcccccttcctctgggcaggggacagagagacacaggctcggggagcaggactgacttcctcttgtcccggaatgagcatgcctgccctttgcaagcaggtttgggtctcacgcagaggaaaccaaaagcaataagagggagggaaggcagagcaaccaatcaagggcagggtgagactcaaaacgagcgggctccctggggagccagacagaggctgggggtgatggcggagctacagcagctgcaggagtttgagatccccactggccgggaggctctgaggggcaaccacagtgccctgctgcgggtcgctgactactgcgaggacaactatgtgcaggccacagacaagcggaaggcgctggaggagaccatggccttcactacccaggcactggccagcgtggcctaccaggtgggcaacctggccgggcacactctgcgcatgttggacctgcagggggccgccctgcggcaggtggaagcccgtgtaagcacgctgggccagatggtgaacatgcatatggagaaggtggcccgaagggagatcggcaccttagccactgtccagcggctgccccccggccagaaggtcatcgccccagagaacctaccccctctcacgccctactgcaggagacccctcaactttggctgcctggacgacattggccatgggatcaaggacctcagcacgcagctgtcaagaacaggcaccctgtctcgaaagagcatcaaggcccctgccacacccgcctccgccaccttggggagaccaccccggattcccgagccagtgcacctgccggtggtgcccgacggcagactctccgccgcctcctctgcgtcttccctggcctcggccggcagcgccgaaggtgtcggtggggcccccacgcccaaggggcaggcagcacctccagccccacctctccccagctccttggacccacctcctccaccagcagccgtcgaggtgttccagcggcctcccacgctggaggagttgtccccacccccaccggacgaagagctgcccctgccactggacctgcctcctcctccacccctggatggagatgaattggggctgcctccacccccaccaggatttgggcctgatgagcccagctgggtgcctgcctcatacttggagaaagtggtgacactgtacccatacaccagccagaaggacaatgagctctccttctctgagggcactgtcatctgtgtcactcgccgctactccgatggctggtgcgagggcgtcagctcagaggggactggattcttccctgggaactatgtggagcccagctgctgacagcccagggctctctgggcagctgatgtctgcactgagtgggtttcatgagccccaagccaaaaccagctccagtcacagctggactgggtctgcccacctcttgggctgtgagctgtgttctgtccttcctcccatcggagggagaaggggtcctggggagagagaatttatccagaggcctgctgcagatggggaagagctggaaaccaagaagtttgtcaacagaggacccctactccatgcaggacagggtctcctgctgcaagtcccaactttgaataaaacagatgatgtcc

SEQ ID NO: 18588 - DNA, 2593 bp, Homo sapiens
tcctatccaccctccactcccctgtcccttggtgactcatccctgagcttcccaaggaagcccccaccctctgccctttcctcccgccttccatgagtggaaaatccacctccgccccctatagcaggccagcccccttcctccccagtctccgaccccatcccccagccgaccagtttcctctccaggaccagggagcaatcacagctgccccgaccttggcttcctctgctgggtgggattgggggctgggcccccaaatgggcccctggcttcccccttcctctgggcaggggacagagagacacaggctcggggagcaggactgacttcctcttgtcccggaatgagcatgcctgccctttgcaagcaggtttgggtctcacgcagaggaaaccaaaagcaataagagggagggaaggcagagcaaccaatcaagggcagggtgagactcaaaacgagcgggctccctggggagccagacagaggctgggggtgatggcggagctacagcagctgcaggagtttgagatccccactggccgggaggctctgaggggcaaccacagtgccctgctgcgggtcgctgactactgcgaggacaactatgtgcaggccacagacaagcggaaggcgctggaggagaccatggccttcactacccaggcactggccagcgtggcctaccaggtgggcaacctggccgggcacactctgcgcatgttggacctgcagggggccgccctgcggcaggtggaagcccgtgtaagcacgctgggccagatggtgaacatgcatatggagaaggtggcccgaagggagatcggcaccttagccactgtccagcggctgccccccggccagaaggtcatcgccccagagaacctaccccctctcacgccctactgcaggagacccctcaactttggctgcctggacgacattggccatgggatcaaggacctcagcacgcagctgtcaagaacaggcaccctgtctcgaaagagcatcaaggcccctgccacacccgcctccgccaccttggggagaccaccccggattcccgagccagtgcacctgccggtggtgcccgacggcagactctccgccgcctcctctgcgtcttccctggcctcggccggcagcgccgaaggtgtcggtggggcccccacgcccaaggggcaggcagcacctccagccccacctctccccagctccttggacccacctcctccaccagcagccgtcgaggtgttccagcggcctcccacgctggaggagttgtccccacccccaccggacgaagagctgcccctgccactggacctgcctcctcctccacccctggatggagatgaattggggctgcctccacccccaccaggatttgggcctgatgagcccagctgggtgcctgcctcatacttggagaaagtggtgacactgtacccatacaccagccagaaggacaatgagctctccttctctgagggcactgtcatctgtgtcactcgccgctactccgatggctggtgcgagggcgtcagctcagaggggactggattcttccctgggaactatgtggagcccagctgctgacagcccagggctctctgggcagctgatgtctgcactgagtgggtttcatgagccccaagccaaaaccagctccagtcacagctggactgggtctgcccacctcttgggctgtgagctgtgttctgtccttcctcccatcggagggagaaggggtcctggggagagagaatttatccagaggcctgctgcagatggggaagagctggaaaccaagaagtttgtcaacagaggacccctactccatgcaggacagggtctcctgctgcaagtcccaactttgaataaaacagatgatgtcctgtgactgccccacagagataaggggccaggagggattgaaaggcatcccagttctaaggctgctgctaattacagcccccaacctccaacccaccagctgacctagaagcagcatcttcccatttcctcagtacccacaaagtgcagcccacattggaccccagacacccctctgcagccattgactgcaacttgttcttttgcccattgaaaaaaaaaaaaaaaaaaaaaaaaaaaaaaaaaaaaaaaaaaagaacaaaaaaagaaagaaaacaaaaaaaaaaaaaaaaggggggggggcgccgcagcaaaacactcgccagggggggacccacattatgacagacccacgacttgttgtaggagcaagagggcgcccactagtagggggcatataaaacacgcagcggcgagggcagcgatataaaaacagggaccgtgaggggagggaaaaaggggtcaacagtggagggactacatggagggacagagccacaccacaatcgcgggggggggggggcacacatgaggggcggcacccaacacccaccgagcgagatataaacgcccccgaaggggcacaaatcacacaagagaggttaatgaggtgtggaacacacaacgcgatataagagcaggagcgacaaagaagtgcgcccaccagcaggaatcacaagaagaaaaaaccacgggg

SEQ ID NO: 18589 - DNA, 2125 bp, Homo sapiens
tgcaggctgtactggtccgaaggtcttatgatggcggagctacagcagctgcaggagtttgagatccccactggccgggaggctctgaggggcaaccacagtgccctgctgcgggtcgctgactactgcgaggacaactatgtgcaggccacagacaagcggaaggcgctggaggagaccatggccttcactacccaggcactggccagcgtggcctaccaggtgggcaacctggccgggcacactctgcgcatgttggacctgcagggggccgccctgcggcaggtggaagcccgtgtaagcacgctgggccagatggtgaacatgcatatggagaaggtggcccgaagggagatcggcaccttagccactgtccagcggctgccccccggccagaaggtcatcgccccagagaacctaccccctctcacgccctactgcaggagacccctcaactttggctgcctggacgacattggccatgggatcaaggacctcagcacgcagctgtcaagaacaggcaccctgtctcgaaagagcatcaaggcccctgccacacccgcctccgccaccttggggagaccaccccggattcccgagccagtgcacctgccggtggtgcccgacggcagactctccgccgcctcctctgcgtcttccctggcctcggccggcagcgccgaaggtgtcggtggggcccccacgcccaaggggcaggcagcacctccagccccacctctccccagctccttggacccacctcctccaccagcagccgtcgaggtgttccagcggcctcccacgctggaggagttgtccccacccccaccggacgaagagctgcccctgccactggacctgcctcctcctccacccctggatggagatgaattggggctgcctccacccccaccaggatttgggcctgatgagcccagctgggtgcctgcctcatacttggagaaagtggtgacactgtacccatacaccagccagaaggacaatgagctctccttctctgagggcactgtcatctgtgtcactcgccgctactccgatggctggtgcgagggcgtcagctcagaggggactggattcttccctgggaactatgtggagcccagctgctgacagcccagggctctctgggcagctgatgtctgcactgagtgggtttcatgagccccaagccaaaaccagctccagtcacagctggactgggtctgcccacctcttgggctgtgagctgtgttctgtccttcctcccatcggagggagaaggggtcctggggagagagaatttatccagaggcctgctgcagatggggaagagctggaaaccaagaagtttgtcaacagaggacccctactccatgcaggacagggtctcctgctgcaagtcccaactttgaataaaacagatgatgtcctgtgactgccccacagagataaggggccaggagggattgaaaggcatcccagttctaaggctgctgctaattacagcccccaacctccaacccaccagctgacctagaagcagcatcttcccatttcctcagtacccacaaagtgcagcccacattggaccccagacacccctctgcagccattgactgcaacttgttcttttgcccattgaaaaaaaaaaaaaaaaaaaaaaaaaaaaaaaaaaaaaaaaaaagaacaaaaaaagaaagaaaacaaaaaaaaaaaaaaaaggggggggggcgccgcagcaaaacactcgccagggggggacccacattatgacagacccacgacttgttgtaggagcaagagggcgcccactagtagggggcatataaaacacgcagcggcgagggcagcgatataaaaacagggaccgtgaggggagggaaaaaggggtcaacagtggagggactacatggagggacagagccacaccacaatcgcgggggggggggggcacacatgaggggcggcacccaacacccaccgagcgagatataaacgcccccgaaggggcacaaatcacacaagagaggttaatgaggtgtggaacacacaacgcgatataagagcaggagcgacaaagaagtgcgcccaccagcaggaatcacaagaagaaaaaaccacgggg

SEQ ID NO: 18590 - DNA, 253 bp, Homo sapiens
ctcctccaccagcagccgtcgaggtgttccagcggcctcccacgctggaggagttgtccccacccccaccgggtaaggaggtccaccctcttcttcccaaccgtggggtcgcttttctgcctcctgccactccccagcccacctctcttggatctgccccggccagcctcagtgaatgcctcctccaaggagcgcagcacaggggcgaaaggagacagaggaagtgaactaacataacttagcgcctgctgta

SEQ ID NO: 18591 - DNA, 396 bp, Homo sapiens
ggaagtgggaactggctatgccgggctctccctcccggttcccgtccgcccctcctccatttcctcttggggatgagggtggagggaggcccctcaccccaaatgtaagccctacctcccgctccctcgcaggacctcagcacgcagctgtcaagaacaggcaccctgtctcgaaagagcatcaaggcccctgccacacccgcctccgccaccttggggtgaggcctcgccgcgacgccaactagcctagccctgccccgcgcgaccctgaaactctcctcccccagcctcgccacccacccctggcgcccccgggtgctcaggccgtcatgctggatgcctggcgccaaacctccccctcggccacctgcccttcctgctcgcacccgacccctg

SEQ ID NO: 18592 - DNA, 682 bp, Homo sapiens
aagagctgcccctgccactggacctgcctcctcctccacccctggatggagatgaattggggctgcctccacccccaccaggatttgggcctgatgagcccagctgggtgcctgcctcatacttggagaaaggtacctgacttctgggactgaggggcaccggatcccacttcctctgttgccctgatccccattctcctccctctgcaaaggtgtgaatctatcccccgggccccccacacaatttttctgacgaactgacagaactggggagagggcagctggcctggtattaaatattaactaagctggggaggggtcctgaaggcttgcaagaaggcccccaagatggcccctagagtctagtacttgagaccgtgcatccccatggtggtggggggtgagggggagagggcaagaggcattatctcacggcaccctcttctcttgccctgcagtggtgacactgtacccatacaccagccagaaggacaatgagctctccttctctgagggcactgtcatctgtgtcactcgccgctactccgatggctggtgcgagggcgtcagctcagaggggactggattcttccctgggaactatgtggagcccagctgctgacagcccagggctctctgggcagctgatgtctgcactgagtgggtttcatgagccccaagc

SEQ ID NO: 18593 - DNA, 1919 bp, Homo sapiens
tcctatccaccctccactcccctgtcccttggtgactcatccctgagcttcccaaggaagcccccaccctctgccctttcctcccgccttccatgagtggaaaatccacctccgccccctatagcaggccagcccccttcctccccagtctccgaccccatcccccagccgaccagtttcctctccaggaccagggagcaatcacagctgccccgaccttggcttcctctgctgggtgggattgggggctgggcccccaaatgggcccctggcttcccccttcctctgggcaggggacagagagacacaggctcggggagcaggactgacttcctcttgtcccggaatgagcatgcctgccctttgcaagcaggtttgggtctcacgcagaggaaaccaaaagcaataagagggagggaaggcagagcaaccaatcaagggcagggtgagactcaaaacgagcgggctccctggggagccagacagaggctgggggtgatggcggagctacagcagctgcaggagtttgagatccccactggccgggaggctctgaggggcaaccacagtgccctgctgcgggtcgctgactactgcgaggacaactatgtgcaggccacagacaagcggaaggcgctggaggagaccatggccttcactacccaggcactggccagcgtggcctaccaggtgggcaacctggccgggcacactctgcgcatgttggacctgcagggggccgccctgcggcaggtggaagcccgtgtaagcacgctgggccagatggtgaacatgcatatggagaaggtggcccgaagggagatcggcaccttagccactgtccagcggctgccccccggccagaaggtcatcgccccagagaacctaccccctctcacgccctactgcaggagacccctcaactttggctgcctggacgacattggccatgggatcaaggacctcagcacgcagctgtcaagaacaggcaccctgtctcgaaagagcatcaaggcccctgccacacccgcctccgccaccttggggagaccaccccggattcccgagccagtgcacctgccggtggtgcccgacggcagactctccgccgcctcctctgcgtcttccctggcctcggccggcagcgccgaaggtgtcggtggggcccccacgcccaaggggcaggcagcacctccagccccacctctccccagctccttggacccacctcctccaccagcagccgtcgaggtgttccagcggcctcccacgctggaggagttgtccccacccccaccggcctttctgcttttcccccaagacgaagagctgcccctgccactggacctgcctcctcctccacccctggatggagatgaattggggctgcctccacccccaccaggatttgggcctgatgagcccagctgggtgcctgcctcatacttggagaaagtggtgacactgtacccatacaccagccagaaggacaatgagctctccttctctgagggcactgtcatctgtgtcactcgccgctactccgatggctggtgcgagggcgtcagctcagaggggactggattcttccctgggaactatgtggagcccagctgctgacagcccagggctctctgggcagctgatgtctgcactgagtgggtttcatgagccccaagccaaaaccagctccagtcacagctggactgggtctgcccacctcttgggctgtgagctgtgttctgtccttcctcccatcggagggagaaggggtcctggggagagagaatttatccagaggcctgctgcagatggggaagagctggaaaccaagaagtttgtcaacagaggacccctactccatgcaggacagggtctcctgctgcaagtcccaactttgaataaaacagatgatgtcc

SEQ ID NO: 18594 - DNA, 2107 bp, Homo sapiens
tgcaggctgtactggtccgaaggtcttatgatggcggagctacagcagctgcaggagtttgagatccccactggccgggaggctctgaggggcaaccacagtgccctgctgcgggtcgctgactactgcgaggacaactatgtgcaggccacagacaagcggaaggcgctggaggagaccatggccttcactacccaggcactggccagcgtggcctaccaggtgggcaacctggccgggcacactctgcgcatgttggacctgcagggggccgccctgcggcaggtggaagcccgtatggtgaacatgcatatggagaaggtggcccgaagggagatcggcaccttagccactgtccagcggctgccccccggccagaaggtcatcgccccagagaacctaccccctctcacgccctactgcaggagacccctcaactttggctgcctggacgacattggccatgggatcaaggacctcagcacgcagctgtcaagaacaggcaccctgtctcgaaagagcatcaaggcccctgccacacccgcctccgccaccttggggagaccaccccggattcccgagccagtgcacctgccggtggtgcccgacggcagactctccgccgcctcctctgcgtcttccctggcctcggccggcagcgccgaaggtgtcggtggggcccccacgcccaaggggcaggcagcacctccagccccacctctccccagctccttggacccacctcctccaccagcagccgtcgaggtgttccagcggcctcccacgctggaggagttgtccccacccccaccggacgaagagctgcccctgccactggacctgcctcctcctccacccctggatggagatgaattggggctgcctccacccccaccaggatttgggcctgatgagcccagctgggtgcctgcctcatacttggagaaagtggtgacactgtacccatacaccagccagaaggacaatgagctctccttctctgagggcactgtcatctgtgtcactcgccgctactccgatggctggtgcgagggcgtcagctcagaggggactggattcttccctgggaactatgtggagcccagctgctgacagcccagggctctctgggcagctgatgtctgcactgagtgggtttcatgagccccaagccaaaaccagctccagtcacagctggactgggtctgcccacctcttgggctgtgagctgtgttctgtccttcctcccatcggagggagaaggggtcctggggagagagaatttatccagaggcctgctgcagatggggaagagctggaaaccaagaagtttgtcaacagaggacccctactccatgcaggacagggtctcctgctgcaagtcccaactttgaataaaacagatgatgtcctgtgactgccccacagagataaggggccaggagggattgaaaggcatcccagttctaaggctgctgctaattacagcccccaacctccaacccaccagctgacctagaagcagcatcttcccatttcctcagtacccacaaagtgcagcccacattggaccccagacacccctctgcagccattgactgcaacttgttcttttgcccattgaaaaaaaaaaaaaaaaaaaaaaaaaaaaaaaaaaaaaaaaaaagaacaaaaaaagaaagaaaacaaaaaaaaaaaaaaaaggggggggggcgccgcagcaaaacactcgccagggggggacccacattatgacagacccacgacttgttgtaggagcaagagggcgcccactagtagggggcatataaaacacgcagcggcgagggcagcgatataaaaacagggaccgtgaggggagggaaaaaggggtcaacagtggagggactacatggagggacagagccacaccacaatcgcgggggggggggggcacacatgaggggcggcacccaacacccaccgagcgagatataaacgcccccgaaggggcacaaatcacacaagagaggttaatgaggtgtggaacacacaacgcgatataagagcaggagcgacaaagaagtgcgcccaccagcaggaatcacaagaagaaaaaaccacgggg

SEQ ID NO: 18595 - DNA, 515 bp, Homo sapiens
aaaagctcaaagaattgaacagctattggtgctaagttataattgtgttctataaaataaatgtgattcactattctttgtaattgctacctcctggtatgtataagataaagaaattgaattttacctattttctcacatactaatttggtgacgtatccttttaactgttggcaaatgttataggctctcttggcctgttttttattccattattttaacatcttttgcagttttctcacataagattgaaaactgaatctatgtgaaataagcaggtgtctatcagtaatgatatttaaaatatgtcacagctggattccctgttttgtaggagcatctgaaatcagccatagcggaacagatggaaatgccccatttgttggggtcaagaaggaaaagttcttacatagttttacacatttggctggtgattgattttgtgaaaagatatgttaaaatttgtttgttttttgagacggaggctcactgtgttgccctggctggagtgcagt

SEQ ID NO: 18596 - DNA, 290 bp, Homo sapiens
tatttttagtagagatagggtttcaccatgttggtcaagctggtcttgaactcctggggtcaagtgacttgcccacctcagcctcctaaagtgttgggattacaggcatgagccaccatgcccagcctctagagctatcttagccctattaatatagcatgatctttctgggatgttactaaatgccttgggtgttcagtgaggttcctctagtctgacttggtagagcttgattgtttcctgcttgtgagctctggaaattgactggcctgtggctccttggcaactac

SEQ ID NO: 18597 - DNA, 283 bp, Homo sapiens
aaatactcttctcagattatctcatttaaccatcatcaataactctataagataggccacttggaaatatgggaccattcaggaaaaagtctaaattcttgtttctgtttttaagaaattcagttttattacagttaacaccccaaatattataacatttttaacaaggtgttaccaagaaaggtatgctactgatgagttttaatgaacatataaaaattcattttaaattatacaaatgcaaggtattattctttttaaaaacttcatgttataaagcttt

SEQ ID NO: 18598 - DNA, 393 bp, Homo sapiens
aaaagtaatctgaaaaaagatgatgtggtagttaaaatgaatttgaatcatgtattctttttaccacagaatgatttcataaccttgagaaagtcactgacctcctatatgcctctattcttatctctttaaagtaaagctaatatcttcaccttattatctacttcagtaatgaaggtgtaaagactaataaccataaaaagcacatcaggctttctggaagtcaggctcagtataaatataaagtatttatgaagcagagcacagcacgaatttataaatctaaagacaaagtttttttaatgtatcttggaaaaaaaatacacaggagaaataaatcatctttgatattcatttttctgaaggtactcctgtgtccaccatattccctgc

SEQ ID NO: 18599 - DNA, 489 bp, Homo sapiens
gggcagtggcacgatctcggctcactgcatcctctacctcccaggttcaagcgattctcctgtctcagcctcccgggtggctgggactacaggtgcgtgccaccacacccagttaattttttttgtatttttacagagacagagtgtcaccattttggccaggctggtctagaactcctagccttaagggatccacccaccttggcctcccaaagtgctgggattacaggcgtgagccacagtgcccagcttagatttcttaatctgattatctgatgaacccaaagcaggcctcaaacaagtactaaacctacccattcattctagggagtcttggtaaatttttactaacatgacttggattgcacaggattagataactatgaaaaatcagacctgtaagtcagatcctgttgcctataaatctgatatttcaggtgactgtaacagtggaaaacaaatggcataaactgaacattgaagaatagg

SEQ ID NO: 18600 - DNA, 377 bp, Homo sapiens
gtgatagaagtgggtggccctgcagagagcacacaagggagagcagggctgggttggataagccaggccaggagacacagagaccatgctcatgggaagagtggacgtgcagtctgcactttcctttctttggatccactcttcccagcttgttagctcaagctaggagcacacagtgtgtctccagtccttcaccaagaggacaggagatcgagatgtggaggtggcccctgggcagataactgaggtgacaaaccatagaattggttccacatgtagaagaaagtctacaaatgtagccgatcttataatagcatgcagcaccctccagccgagccacacaagctccacctgcccctccagctccacctgccgtg

SEQ ID NO: 18601 - DNA, 479 bp, Homo sapiens
atattcttccagttgaaaggtaaccagaactggagactatattgtaaataagcttttagttaggtgtgaggtcccaagagccaatggtctagagccatttggtatgagtcctgaaaagcaccaagcttctttgaggtttgtctacattcaacttaggatacatgtggaattctctcacatctaaactgaatctttccttctcagggactcagtccatcctgcacatgccaaaggcttcttattcttcttatagtctgtaaaagtgctttcaccgatcagcttaggtcatctgtcccccaagatcttctgcacagagggacactcaaaccaataactatgtcttcttagaatcatttcggaatgactgataggaaaaaaaaattgccataaagaggccgaggcgggtggatcacaagatcaggagatcgagaccatcctggctaacacagtgaaaccccgtctctactaaaaaagataca

SEQ ID NO: 18602 - DNA, 333 bp, Homo sapiens
tcgctttgttgattgtttccttcgctgtgcagaagctttttcacttgatgtaattccatttgtctctttctgctttcgttgcctgtgcttttgagattttacccaaaaaatctttatccagaccaatgtcctgtagtgtttccccaatgttttcttccagttctttcatcgtctcaggtcttccctctaagtctttaatccattttgagttgatttctgtatatagtggaagatgaggctgtgtttcattctgttgtatagattattctgggactgctgcatgtgctgtttcatctacttcaaatgccccctcctcctgtcttcaggcaaata

SEQ ID NO: 18603 - DNA, 419 bp, Homo sapiens
tccaacttatggatgaggctcagtgtaaataactggtctaaggtcacttagtaagtaacagtgagaatctgagtcaccacactctattcaatgggatttttgtctcttgacctctcaacggcatttcccattaggagccctccctttgttctctacttttactttcctgattatgcccctttggtttgtcttttgcccttttctctagtggcttattctcagtttcctttgtaaactctgacttctctacaggcactttaattgctagtattcctcaggaatctgtccagtctttctccatacattctactcattctctccgggtaatcccagctcttccctgggccatacctccagcttctacatgctaaggatgcccttagtctccaggtccctccagtttctcctgctcaaccctc

SEQ ID NO: 18604 - DNA, 2193 bp, Homo sapiens
cacagagagagagagagagttagtgtgtgtgtgtgtgtgtgtgtgtgtgtgtgtgtgtgcatgcatgctgtgtgtgtgtgtgtgtgtgtttaccaatctgtgaaggtcctgatttgtgaccatcaatgtctttttaatgtatctgctcaacttctaggacttcaggggacatttcatgcgctttgtgctcttctgagcaccatatatactttccaagaattttgaatgtgaattcctagaaatttcagtagagaaaacaatagctattctttaattatagtaaagttcaggtagaaggagaaattatttgttcaccaaaattatgggatctcattaatgttggctaagtaaatgtaattttttaaaggctcactttttaatacttcatatatttccctcttacaaaacagcatgtcatgaagttcttatgtggtaaagattcaactagtaaatatttttaggttaaatacctgaactagttaaaattccacctaagaatagtcttaaaatatttaaaaagcatctctcatatctacctctttgtcattgctgccattttaactgaagcaaatctttatgacatctgaaatgatggttggatgcaattaaaaaaaaatctatgttggtgcttttctcaggctttgtcatttaagttatattgtattaagatgtcacaaatcagactgaaaggcttagaattaattttgtttttctttgaaagaattgcttaaaattaaccatcaatgtttttagcgagtggagataatgaatctttggttggtgtctgtctgtgtgatgttttcaaccaatagccaaataattattgaacttacatgaaaaagagtgctaactataattttatttagattactttattctttgaaagtgactacaaggctattaagtacataatcattcattttatttactcagaagttgcctctccattactgttaacttgtttagtaatttatataattgcagtacttttaagtgttggacactgggattcaggttgtatacaaagtagtagctgacgaaaaatatgtatatttttgtgaaatgtatcaagccctaaagttcattttagagaaaggcccagaaaaacgtatctgtgtttaaaaacaaaggacaggtcattcgtcaatttgaatcatttttacttttgccactacaaactttttaattggcaatatccatcatccaactggatcttcatgtcagtgtcagggatgccaggttgacaaagtatttaacagatcctttcagtttttgttttgtttttttaattctaaaaaaaacaaatgttaggccaaacagatccctagatcccactcattgattctggcggtattcctaaagtggtgcttagggggtcagaattttctggatctttgctaatccaagctttagatttaatttaaccaggaccacatgcttgtcatctctctgatgcaaattttcaaaatcattttaatttagattctaatgtctgcctgggtttttaacaggctgtgaaccagtgagtgccttgttaatgtagaatgatttttcccccctgggtgggtgttagttagctcctctctgaaaatgtctcagagaatggtattttaattgacttgtagagagctgctaaatttgttattatcagcaatcagaaagtctttggtctaccacacatctccctccctactatctcttcattgtttggctgaagtttgcctcttgtgagaaaacaatacaactccccttctccacacactttttttccagcccagattaataggtatcccctaccctaatcccaactctatgatctaataccttttttaggaggaaccacttctttttaatattgaaatctgctggttactttatgttttctcaagttcagttgactagagctgaccacagggtgtcatcaattcagattcctaaataaccctttctctccacacccagtcctccagctggtgagccctgggccagattgtttgatcttcaggtattttaaattttagttacatcaattaatgtaaattaatccaaatgctaatttttgtggtgcaagaagtttcttatgtaaattcagggtatggataagctaattaagatatccatctttggtggctctaagtgtattatttgtttttaaataaagtgtacaaatatagataacatgctaaaaaaaaa

SEQ ID NO: 18605 - DNA, 2140 bp, Homo sapiens
cacagagagagagagagagttagtgtgtgtgtgtgtgtgtgtgtgtgtgtgtgtgtgtgcatgcatgctgtgtgtgtgtgtgtgtgtgtttaccaatctgtgaaggtcctgatttgtgaccatcaatgtctttttaatgtatctgctcaacttctaggacttcaggggacatttcatgcgctttgtgctcttctgagcaccatatatactttccaagaattttgaatgtgaattcctagaaatttcagtagagaaaacaatagctattctttaattatagtaaagttcaggtagaaggagaaattatttgttcaccaaaattatgggatctcattaatgttggctaagtaaatgtaattttttaaaggctcactttttaatacttcatatatttccctcttacaaaacagcatgtcatgaagttcttatgtggtaaagattcaactagtaaatatttttaggttaaatacctgaactagttaaaattccacctaagaatagtcttaaaatatttaaaaagcatctctcatatctacctctttgtcattgctgccattttaactgaagcaaatctttatgacatctgaaatgatggttggatgcaattaaaaaaaaatctatgttggtgcttttctcaggctttgtcatttaagttatattgtattaagatgtcacaaatcagactgaaaggcttagaattaattttgtttttctttgaaagaattgcttaaaattaaccatcaatgtttttagcgagtggagataatgaatctttggttggtgtctgtctgtgtgatgttttcaaccaatagccaaataattattgaacttacatgaaaaagagctattaagtacataatcattcattttatttactcagaagttgcctctccattactgttaacttgtttagtaatttatataattgcagtacttttaagtgttggacactgggattcaggttgtatacaaagtagtagctgacgaaaaatatgtatatttttgtgaaatgtatcaagccctaaagttcattttagagaaaggcccagaaaaacgtatctgtgtttaaaaacaaaggacaggtcattcgtcaatttgaatcatttttacttttgccactacaaactttttaattggcaatatccatcatccaactggatcttcatgtcagtgtcagggatgccaggttgacaaagtatttaacagatcctttcagtttttgttttgtttttttaattctaaaaaaaacaaatgttaggccaaacagatccctagatcccactcattgattctggcggtattcctaaagtggtgcttagggggtcagaattttctggatctttgctaatccaagctttagatttaatttaaccaggaccacatgcttgtcatctctctgatgcaaattttcaaaatcattttaatttagattctaatgtctgcctgggtttttaacaggctgtgaaccagtgagtgccttgttaatgtagaatgatttttcccccctgggtgggtgttagttagctcctctctgaaaatgtctcagagaatggtattttaattgacttgtagagagctgctaaatttgttattatcagcaatcagaaagtctttggtctaccacacatctccctccctactatctcttcattgtttggctgaagtttgcctcttgtgagaaaacaatacaactccccttctccacacactttttttccagcccagattaataggtatcccctaccctaatcccaactctatgatctaataccttttttaggaggaaccacttctttttaatattgaaatctgctggttactttatgttttctcaagttcagttgactagagctgaccacagggtgtcatcaattcagattcctaaataaccctttctctccacacccagtcctccagctggtgagccctgggccagattgtttgatcttcaggtattttaaattttagttacatcaattaatgtaaattaatccaaatgctaatttttgtggtgcaagaagtttcttatgtaaattcagggtatggataagctaattaagatatccatctttggtggctctaagtgtattatttgtttttaaataaagtgtacaaatatagataacatgctaaaaaaaaa

SEQ ID NO: 18606 - DNA, 270 bp, Homo sapiens
gcagacacggacggttctgctgggcagtgccgggctgggctcatgagacccacggcaaagtcggcgggggattctcaggaaaaatgtccccattcacaaaaggagccccacagagacaggggaccctgttctgccaaaccagagccactgcctttcagccaggggaggaactgacccagcagaggccccgggaaggcggtcggtctcccgtggctgccctaacagatccccacaaacggggcttaagacaacagaaatgggccggacgcg

SEQ ID NO: 18607 - DNA, 121 bp, Homo sapiens
aaatcaccatttccatacactaacaatgaactatctgaaaaagattaagagaacaattccacttacaatagcatttaaaaagtataatacttaggagtaaatttaaccaatgtggtgaaag

SEQ ID NO: 18608 - DNA, 182 bp, Homo sapiens
gggcaacacagcaagaccccatctctataatttttttttaattggctgggcatggtggtgcatgcctgtggtcctggctgcttggcagtatgaggtggagcccaggagtcaaaggctgcatggagccatgatcacggcactgtactccaggctgggtgacaaagtgagaccctgtctcaaag

SEQ ID NO: 18609 - DNA, 410 bp, Homo sapiens
ttttccctgctttcctcaattagaaaagaatcttgctcctaagcaagttcccagtttccagggaatgatgacaacctggtcactactatttgtgggacatcttgtgggggattcagaccttgaggtctctgaatgaggcttgaaatgaatgcagtcaaaatgacactttaatatttataagcatgcttcaataaggcatgtagtccacatagaaaatccctttagcatactcgttttctttccttttgagctaccgtgtctactcggtgagatggttttactctaggatttgcattccagttagcttttggaactctttatcaaagatacttttgtcatctgtatgtaaacccttagctctcactgcgaaattagagaagctacagaagaatataaagagcttagctgtt

SEQ ID NO: 18610 - DNA, 748 bp, Homo sapiens
tatgaaatgaagattgtagtttttatttcatagagtcatgaagattgagttaatctctgaaatatccacacagtgttgtcactcaggaatgatttggaatgttagggatagtcacccaccaccacagtgctaggtttcagtgaccaggagcgatgtggagctgagtctagtgggagtccagaggtaaagacacagtaaggtcacatgtgacccaggagggaggaggcacaggcagggcaatctgaggagactgtgccatggctggaggagcaggggctccaggaaggaggcagcatctgcactggaaatgcagcaggagggcccagtgagggaggcctggaaagtccacttggacttgacaatgaggagctctctgctgtcacctgctgtgattcctagagtcagaatcagactgcagtggccacaggcacaagtgggaagtgatgcagctcaaaggtttggatgagatgggatgtgcagcgattgagtcgtagctggagcgaaggatgtgctaagttagggattggaggggcgtgcatttacatgggaaagtaatgctaattagaaatcagttggacttcaacattctcaagtacttccacaaagcatcccttggttttattccagtttgttgctttacgtatttgtaagtattaaacaccaattactaaattatctgtaattcagatttgtcatttggaggaaaatcaacataatctgaatataaagcaggcagcattgagaaact

SEQ ID NO: 18611 - DNA, 501 bp, Homo sapiens
catcatctcataaaaggaattcagaaggtgctggtttaggtttagtgggaaaacgacttctgttttgacatgtagagtttgaagattaggagattgacagatgatgttgtctgacaggtggttggctgtcccagagagagatagagactccccagcatgtagggggcagagtcacaagagtgctggcctgggagatatgccagccaaggtggggcacctgggacaacagcacagctgagccgcagacacgaagacatttgttaagttatcagccacgtctgcatcacagactacaggtactaccatttagcggagttatctttgaaaagacatcaacattctcaagtacttccacaaagcatcccttggttttattccagtttgttgctttacgtatttgtaagtattaaacaccaattactaaattatctgtaattcagatttgtcatttggaggaaaatcaacataatctgaatataaagcaggcagcattgagaaact

SEQ ID NO: 18612 - DNA, 1583 bp, Homo sapiens
ggaaaagacgccagacttcagacgtctctctcctcggtgggcacctcattctaaccctggcacccccttcgcacgcttcccctccaccatcctcacccccgacctcccagggcagaagggcgagagggggcagactctatgagtcacctcccaggcctggagttgaggagggaagcgccgcctctccttgggccccttctctccccctttcccctccctgcgtggttcctggcatcgccagatgctgcgcagcagtctccgattccccatcaccaattcggctggcgtctccgagaccgcggactcccgtagggtccccgtggccccgagttgtagtcgggacaccccggccgcgggtgatcgtcgggtctccacgcgcccgggtcgctgacgcggatccggcctcggcgccttctcagggcgccctgcaaggccgcaggcaggatgaacattctggcacccgtgcggagggatcgcgtcctggcggagctgccccagtgcctgaggaaggaggccgctttgcacgggcacaaagacttccacccccgcgtcacctgcgcctgccaggagcaccggacaggcaccgtgggatttaagatctccaaggtcattgtggtgggggacctgtcggtggggaagacttgcctcattaataggttctgcaaagacacctttgataagaattacaaggccaccattggagtggacttcgagatggaacgatttgaggtgctgggcattcccttcagtttgcagctttgggataccgctgggcaggagaggttcaaatgcattgcatcaacctactatagaggagctcaagccatcatcattgtcttcaacctgaatgatgtggcatctctggaacataccaagcagtggctggccgatgccctgaaggagaatgacccttccagtgtgcttctcttccttgtaggttccaagaaggatctgagtacccctgctcagtatgcgctgatggagaaagacgccctccaggtggcccaggagatgaaggctgagtactgggcagtctcatctctcactggtgagaatgtccgagaattcttcttccgtgtggcagcactgacctttgaggccaatgtgctggctgagctggagaaatcgggggctcgacgcattggggatgttgtccgcatcaacagtgatgacagcaacctctacctaactgccagcaagaagaagcccacatgttgcccatgagggctgaggagactgttcagagactgcccagccctagggcactgtgccaccctcattcctccagagcttgacccctggacatttgcactgactttatccagaccaaagagctgcctcttggtggcagtattcccacagaggggtagctgggatcatgctagtcacttcctgcccccaggcaccgtgccaaagactggatgccccctactcctcaggggactgtccagggcgcccagtggtagtgagggagagtgtctctgttcttttgctcagcctgctgggccctttgtgtttgaggatgcttaatgattccagcctctcactgtgccttatgcattaaaatttctttgttacgagca

SEQ ID NO: 18613 - DNA, 484 bp, Homo sapiens
  misc_feature (46)..(46): n is a, c, g, or t
cgttcacaggatcttacgtctgagaatcgggggctcgacgcattgnggatgttgtccgcatcaacagtgatgacagcaacctctacctaactgccagcaagaagaagcccacatgttgcccatgagggctgaggagactgttcagagactgcccagccctagggcactgtgccaccctcattcctccagagcttgacccctggacatttgcactgactttatccagaccaaagagctgcctcttggtggcagtattcccacagaggggtagctgggatcatgctagtcacttcctgcccccaggcaccgtgccaaagactggatgccccctactcctcaggggactgtccagggcgcccagtggtagtgagggagagtgtctctgttcttttgctcagcctgctgggccctttgtgtttgaggatgcttaatgattccagcctctcactgtgccttatgcattaaaatttctttgttacgagca

SEQ ID NO: 18614 - DNA, 1231 bp, Homo sapiens
ggaaaagacgccagacttcagacgtctctctcctcggtgggcacctcattctaaccctggcacccccttcgcacgcttcccctccaccatcctcacccccgacctcccagggcagaagggcgagagggggcagactctatgagtcacctcccaggcctggagttgaggagggaagcgccgcctctccttgggccccttctctccccctttcccctccctgcgtggttcctggcatcgccagatgctgcgcagcagtctccgattccccatcaccaattcggctggggcgccctgcaaggccgcaggcaggatgaacattctggcacccgtgcggagggatcgcgtcctggcggagctgccccagtgcctgaggaaggaggccgctttgcacgggcacaaagacttccacccccgcgtcacctgcgcctgccaggagcaccggacaggcaccgtgggatttaagatctccaaggtcattgtggtgggggacctgtcggtggggaagacttgcctcattaataggttctgcaaagacacctttgataagaattacaaggccaccattggagtggacttcgagatggaacgatttgaggtgctgggcattcccttcagtttgcagctttgggataccgctgggcaggagaggttcaaatgcattgcatcaacctactatagaggagctcaagccatcatcattgtcttcaacctgaatgatgtggcatctctggaacataccaagcagtggctggccgatgccctgaaggagaatgacccttccagtgtgcttctcttccttgtaggttccaagaaggatctgagtacccctgctcagtatgcgctgatggagaaagacgccctccaggtggcccaggagatgaagactgttcagagactgcccagccctagggcactgtgccaccctcattcctccagagcttgacccctggacatttgcactgactttatccagaccaaagagctgcctcttggtggcagtattcccacagaggggtagctgggatcatgctagtcacttcctgcccccaggcaccgtgccaaagactggatgccccctactcctcaggggactgtccagggcgcccagtggtagtgagggagagtgtctctgttcttttgctcagcctgctgggccctttgtgtttgaggatgcttaatgattccagcctctcactgtgccttatgcattaaaatttctttgttacgagca

SEQ ID NO: 18615 - DNA, 1220 bp, Homo sapiens
aacgcagaagggtggagaggagggggtggcgagggcgggcagcgaggcctggagccgccaggagaggggcggggggcggcccttctccaggaatttccggggatcgtgttacagcgttggcggagcccgagcggagtgggactcgaggccctgtagccggactgggcccctcgccccctcctccagcggcctgcgggccttggcagcgccgcccctgcccacactgaccccgtgtggcggggccgctccgcgcccccgggccgctctgtaatggtagggcagcctcagccccgagatgacgtcgggtctccgcggccccgggttattgtaggaaccatccggccccgcgtaatcgtaggaactatccggccccgcgtaatcgtagggtctgcgcgggcccggcccccaccagacgggactccccgcccccaattggcggccgaagagtctcctcgccccagagtcatcttcgggacgcccagggcccgggtgattttgggctcgccgcggccccgggtgattgtttcatctccgtggcccgcggtggtcgtagcgtctccgagaccgcggactcccgtagggtccccgtggccccgagttgtagtcgggacaccccggccgcgggtgatcgtcgggtctccacgcgcccgggtcgctgacgcggatccggcctcggcgccttctcagggcgccctgcaaggccgcaggcaggatgaacattctggcacccgtgcggagggatcgcgtcctggcggagctgccccagtgcctgaggaaggaggccgctttgcacgggcacaaagacttccacccccgcgtcacctgcgcctgccaggagcaccggacaggcaccgtggggtgagttagggacacccacaacaaagagaggaggtcccaggaaactctgtagtcatagcgagggtaaacaaccacccccttggggcttcatttcagcccctaccagctatatggttatttccccctctttaagcccctgtatcccctccttttctcccaacaaggttgttgtgagttctatgagatggggttgggtagaagggtggcagctggatttctgagtagagactaaggtgtctgaaatgggaaggtggtcacctgctcagatccccacatagcatccatggagccccagggcaggggtctggctgtgcttacagggatgagtcttattgtgggttttaaaggtaatactaataaca

SEQ ID NO: 18616 - DNA, 1136 bp, Homo sapiens
  misc_feature (1073)..(1073): n is a, c, g, or t
  misc_feature (1076)..(1076): n is a, c, g, or t
  misc_feature (1082)..(1082): n is a, c, g, or t
ggaaaagacgccagacttcagacgtctctctcctcggtgggcacctcattctaaccctggcacccccttcgcacgcttcccctccaccatcctcacccccgacctcccagggcagaagggcgagagggggcagactctatgagtcacctcccaggcctggagttgaggagggaagcgccgcctctccttgggccccttctctccccctttcccctccctgcgtggttcctggcatcgccagatgctgcgcagcagtctccgattccccatcaccaattcggctggcgtctccgagaccgcggactcccgtagggtccccgtggccccgagttgtagtcgggacaccccggccgcgggtgatcgtcgggtctccacgcgcccgggtcgctgacgcggatccggcctcggcgccttctcagggcgccctgcaaggccgcaggcaggatgaacattctggcacccgtgcggagggatcgcgtcctggcggagctgccccagtgcctgaggaaggaggccgctttgcacgggcacaaagacttccacccccgcgtcacctgcgcctgccaggagcaccggacaggcaccgtgggatttaagatctccaaggtcattgtggtgggggacctgtcggtggggaagacttgcctcattaataggttctgcaaagacacctttgataagaattacaaggccaccattggagtggacttcgagatggaacgatttgaggtgctgggcattcccttcagtttgcagctttgggataccgctgggcaggagaggttcaaatgcattgcatcaacctactatagaggagctcaagccatcatcattgtcttcaacctgaatgatgtggcatctctggaacataccaagcagtggctggccgatgccctgaaggagaatgacccttccagtgtgcttctcttccttgtaggttccaagaaggatctgagtacccctgctcagtatgcgctgatggagaaagacgccctccaggtggcccaggagatgaaggctgagtactgggcagtctcatctctcactggtgagaatgtcgagattctttcggnggnggctgncttgggcagggtgggggggaacggggcggcatgggggcgagaagggaggcttcc

SEQ ID NO: 18617 - DNA, 367 bp, Homo sapiens
ctagggcactgtgccaccctcattcctccagagctggtggaagaccacgcccccccccctttggggggggaaaaacccaaattttttgtgggcacctgactttatccagaccaaagagctgcctcttggtggcagtattcccacagaggggtagctgggatcatgctagtcacttcctgcccccaggcaccgtgccaaagactggatgccccctactcctcaggggactgtccagggcgcccagtggtagtgagggagagtgtctctgttcttttgctcagcctgctgggccctttgtgtttgaggatgcttaatgattccagcctctcactgtgccttatgcattaaaatttctttgttacgagca

SEQ ID NO: 18618 - DNA, 926 bp, Homo sapiens
ggaaaagacgccagacttcagacgtctctctcctcggtgggcacctcattctaaccctggcacccccttcgcacgcttcccctccaccatcctcacccccgacctcccagggcagaagggcgagagggggcagactctatgagtcacctcccaggcctggagttgaggagggaagcgccgcctctccttgggccccttctctccccctttcccctccctgcgtggttcctggcatcgccagatgctgcgcagcagtctccgattccccatcaccaattcggctggatttaagatctccaaggtcattgtggtgggggacctgtcggtggggaagacttgcctcattaataggttctgcaaagacacctttgataagaattacaaggccaccattggagtggacttcgagatggaacgatttgaggtgctgggcattcccttcagtttgcagctttgggataccgctgggcaggagaggttcaaatgcattgcatcaacctactatagaggagctcaagccatcatcattgtcttcaacctgaatgatgtggcatctctggaacataccaagcagtggctggccgatgccctgaaggagaatgacccttccagtgtgcttctcttccttgtaggttccaagaaggatctgagtacccctgctcagtatgcgctgatggagaaagacgccctccaggtggcccaggagatgaaggctgagtactgggcagtctcatctctcactggtgagaatgtccgagaattcttcttccgtgtggcagcactgacctttgaggccaatgtgctggctgagctggagaaatcgggggctcgacgcattggggatgttgtccgcatacgggagacgaacctcctaatgcgaaaaagccatgtgcccacgggggaccgtcagcccctgccgccccaac

SEQ ID NO: 18619 - DNA, 1851 bp, Homo sapiens
aacgcagaagggtggagaggagggggtggcgagggcgggcagcgaggcctggagccgccaggagaggggcggggggcggcccttctccaggaatttccggggatcgtgttacagcgttggcggagcccgagcggagtgggactcgaggccctgtagccggactgggcccctcgccccctcctccagcggcctgcgggccttggcagcgccgcccctgcccacactgaccccgtgtggcggggccgctccgcgcccccgggccgctctgtaatggtagggcagcctcagccccgagatgacgtcgggtctccgcggccccgggttattgtaggaaccatccggccccgcgtaatcgtaggaactatccggccccgcgtaatcgtagggtctgcgcgggcccggcccccaccagacgggactccccgcccccaattggcggccgaagagtctcctcgccccagagtcatcttcgggacgcccagggcccgggtgattttgggctcgccgcggccccgggtgattgtttcatctccgtggcccgcggtggtcgtagcgtctccgagaccgcggactcccgtagggtccccgtggccccgagttgtagtcgggacaccccggccgcgggtgatcgtcgggtctccacgcgcccgggtcgctgacgcggatccggcctcggcgccttctcagggcgccctgcaaggccgcaggcaggatgaacattctggcacccgtgcggagggatcgcgtcctggcggagctgccccagtgcctgaggaaggaggccgctttgcacgggcacaaagacttccacccccgcgtcacctgcgcctgccaggagcaccggacaggcaccgtgggatttaagatctccaaggtcattgtggtgggggacctgtcggtggggaagacttgcctcattaataggttctgcaaagacacctttgataagaattacaaggccaccattggagtggacttcgagatggaacgatttgaggtgctgggcattcccttcagtttgcagctttgggataccgctgggcaggagaggttcaaatgcattgcatcaacctactatagaggagctcaagccatcatcattgtcttcaacctgaatgatgtggcatctctggaacataccaagcagtggctggccgatgccctgaaggagaatgacccttccagtgtgcttctcttccttgtaggttccaagaaggatctgagtacccctgctcagtatgcgctgatggagaaagacgccctccaggtggcccaggagatgaaggctgagtactgggcagtctcatctctcactggtgagaatgtccgagaattcttcttccgtgtggcagcactgacctttgaggccaatgtgctggctgagctggagaaatcgggggctcgacgcattggggatgttgtccgcatcaacagtgatgacagcaacctctacctaactgccagcaagaagaagcccacatgttgcccatgagggctgaggagactgttcagagactgcccagccctagggcactgtgccaccctcattcctccagagcttgacccctggacatttgcactgactttatccagaccaaagagctgcctcttggtggcagtattcccacagaggggtagctgggatcatgctagtcacttcctgcccccaggcaccgtgccaaagactggatgccccctactcctcaggggactgtccagggcgcccagtggtagtgagggagagtgtctctgttcttttgctcagcctgctgggccctttgtgtttgaggatgcttaatgattccagcctctcactgtgccttatgcattaaaatttctttgttacgagca

SEQ ID NO: 18620 - DNA, 1644 bp, Homo sapiens
ggacgcgtgggtccggacgcgtgggtcgacccacgcgtgcgcgcgcccccgggccgctctgtaatggtagggcagcctcagccccgagatgacgtcgggtctccgcggccccgggttattgtaggaaccatccggccccgcgtaatcgtaggaactatccggccccgcgtaatcgtagggtctgcgcgggcccggcccccaccagacgggactccccgcccccaattggcggccgaagagtctcctcgccccagagtcatcttcgggacgcccagggcccgggtgattttgggctcgccgcggccccgggtgattgtttcatctccgtggcccgcggtggtcgtagcgtctccgagaccgcggactcccgtagggtccccgtggccccgagttgtagtcgggacaccccggccgcgggtgatcgtcgggtctccacgcgcccgggtcgctgacgcggatccggcctcggcgccttctcagggcgccctgcaaggccgcaggcaggatgaacattctggcacccgtgcggagggatcgcgtcctggcggagctgccccagtgcctgaggaaggaggccgctttgcacgggcacaaagacttccacccccgcgtcacctgcgcctgccaggagcaccggacaggcaccgtgggatttaagatctccaaggtcattgtggtgggggacctgtcggtggggaagacttgcctcattaataggttctgcaaagacacctttgataagaattacaaggccaccattggagtggacttcgagatggaacgatttgaggtgctgggcattcccttcagtttgcagctttgggataccgctgggcaggagaggttcaaatgcattgcatcaacctactatagaggagctcaagccatcatcattgtcttcaacctgaatgatgtggcatctctggaacataccaagcagtggctggccgatgccctgaaggagaatgacccttccagtgtgcttctcttccttgtaggttccaagaaggatctgagtacccctgctcagtatgcgctgatggagaaagacgccctccaggtggcccaggagatgaaggctgagtactgggcagtctcatctctcactggtgagaatgtccgagaattcttcttccgtgtggcagcactgacctttgaggccaatgtgctggctgagctggagaaatcgggggctcgacgcattggggatgttgtccgcatcaacagtgatgacagcaacctctacctaactgccagcaagaagaagcccacatgttgcccatgagggctgaggagactgttcagagactgcccagccctagggcactgtgccaccctcattcctccagagcttgacccctggacatttgcactgactttatccagaccaaagagctgcctcttggtggcagtattcccacagaggggtagctgggatcatgctagtcacttcctgcccccaggcaccgtgccaaagactggatgccccctactcctcaggggactgtccagggcgcccagtggtagtgagggagagtgtctctgttcttttgctcagcctgctgggccctttgtgtttgaggatgcttaatgattccagcctctcactgtgccttatgcattaaaatttctttgttacgagca

SEQ ID NO: 18621 - DNA, 1502 bp, Homo sapiens
aacggacagaaacatcggctagtgcgaggctgggtggtgctgcgcgggcccggcccccaccagacgggactccccgcccccaattggcggccgaagagtctcctcgccccagagtcatcttcgggacgcccagggcccgggtgattttgggctcgccgcggccccgggtgattgtttcatctccgtggcccgcggtggtcgtagcgtctccgagaccgcggactcccgtagggtccccgtggccccgagttgtagtcgggacaccccggccgcgggtgatcgtcgggtctccacgcgcccgggtcgctgacgcggatccggcctcggcgccttctcagggcgccctgcaaggccgcaggcaggatgaacattctggcacccgtgcggagggatcgcgtcctggcggagctgccccagtgcctgaggaaggaggccgctttgcacgggcacaaagacttccacccccgcgtcacctgcgcctgccaggagcaccggacaggcaccgtgggatttaagatctccaaggtcattgtggtgggggacctgtcggtggggaagacttgcctcattaataggttctgcaaagacacctttgataagaattacaaggccaccattggagtggacttcgagatggaacgatttgaggtgctgggcattcccttcagtttgcagctttgggataccgctgggcaggagaggttcaaatgcattgcatcaacctactatagaggagctcaagccatcatcattgtcttcaacctgaatgatgtggcatctctggaacataccaagcagtggctggccgatgccctgaaggagaatgacccttccagtgtgcttctcttccttgtaggttccaagaaggatctgagtacccctgctcagtatgcgctgatggagaaagacgccctccaggtggcccaggagatgaaggctgagtactgggcagtctcatctctcactggtgagaatgtccgagaattcttcttccgtgtggcagcactgacctttgaggccaatgtgctggctgagctggagaaatcgggggctcgacgcattggggatgttgtccgcatcaacagtgatgacagcaacctctacctaactgccagcaagaagaagcccacatgttgcccatgagggctgaggagactgttcagagactgcccagccctagggcactgtgccaccctcattcctccagagcttgacccctggacatttgcactgactttatccagaccaaagagctgcctcttggtggcagtattcccacagaggggtagctgggatcatgctagtcacttcctgcccccaggcaccgtgccaaagactggatgccccctactcctcaggggactgtccagggcgcccagtggtagtgagggagagtgtctctgttcttttgctcagcctgctgggccctttgtgtttgaggatgcttaatgattccagcctctcactgtgccttatgcattaaaatttctttgttacgagca

SEQ ID NO: 18622 - DNA, 1748 bp, Homo sapiens
ggaaaagacgccagacttcagacgtctctctcctcggtgggcacctcattctaaccctggcacccccttcgcacgcttcccctccaccatcctcacccccgacctcccagggcagaagggcgagagggggcagactctatgagtcacctcccaggcctggagttgaggagggaagcgccgcctctccttgggccccttctctccccctttcccctccctgcgtggttcctggcatcgccagatgctgcgcagcagtctccgattccccatcaccaattcggctggctgcgcgggcccggcccccaccagacgggactccccgcccccaattggcggccgaagagtctcctcgccccagagtcatcttcgggacgcccagggcccgggtgattttgggctcgccgcggccccgggtgattgtttcatctccgtggcccgcggtggtcgtagcgtctccgagaccgcggactcccgtagggtccccgtggccccgagttgtagtcgggacaccccggccgcgggtgatcgtcgggtctccacgcgcccgggtcgctgacgcggatccggcctcggcgccttctcagggcgccctgcaaggccgcaggcaggatgaacattctggcacccgtgcggagggatcgcgtcctggcggagctgccccagtgcctgaggaaggaggccgctttgcacgggcacaaagacttccacccccgcgtcacctgcgcctgccaggagcaccggacaggcaccgtgggatttaagatctccaaggtcattgtggtgggggacctgtcggtggggaagacttgcctcattaataggttctgcaaagacacctttgataagaattacaaggccaccattggagtggacttcgagatggaacgatttgaggtgctgggcattcccttcagtttgcagctttgggataccgctgggcaggagaggttcaaatgcattgcatcaacctactatagaggagctcaagccatcatcattgtcttcaacctgaatgatgtggcatctctggaacataccaagcagtggctggccgatgccctgaaggagaatgacccttccagtgtgcttctcttccttgtaggttccaagaaggatctgagtacccctgctcagtatgcgctgatggagaaagacgccctccaggtggcccaggagatgaaggctgagtactgggcagtctcatctctcactggtgagaatgtccgagaattcttcttccgtgtggcagcactgacctttgaggccaatgtgctggctgagctggagaaatcgggggctcgacgcattggggatgttgtccgcatcaacagtgatgacagcaacctctacctaactgccagcaagaagaagcccacatgttgcccatgagggctgaggagactgttcagagactgcccagccctagggcactgtgccaccctcattcctccagagcttgacccctggacatttgcactgactttatccagaccaaagagctgcctcttggtggcagtattcccacagaggggtagctgggatcatgctagtcacttcctgcccccaggcaccgtgccaaagactggatgccccctactcctcaggggactgtccagggcgcccagtggtagtgagggagagtgtctctgttcttttgctcagcctgctgggccctttgtgtttgaggatgcttaatgattccagcctctcactgtgccttatgcattaaaatttctttgttacgagca

SEQ ID NO: 18623 - DNA, 2167 bp, Homo sapiens
aacgcagaagggtggagaggagggggtggcgagggcgggcagcgaggcctggagccgccaggagaggggcggggggcggcccttctccaggaatttccggggatcgtgttacagcgttggcggagcccgagcggagtgggactcgaggccctgtagccggactgggcccctcgccccctcctccagcggcctgcgggccttggcagcgccgcccctgcccacactgaccccgtgtggcggggccgctccgcgcccccgggccgctctgtaatggtagggcagcctcagccccgagatgacgtcgggtctccgcggccccgggttattgtaggaaccatccggccccgcgtaatcgtaggaactatccggccccgcgtaatcgtagggtctgcgcgggcccggcccccaccagacgggactccccgcccccaattggcggccgaagagtctcctcgccccagagtcatcttcgggacgcccagggcccgggtgattttgggctcgccgcggccccgggtgattgtttcatctccgtggcccgcggtggtcgtagcgtctccgagaccgcggactcccgtagggtccccgtggccccgagttgtagtcgggacaccccggccgcgggtgatcgtcgggtctccacgcgcccgggtcgctgacgcggatccggcctcggcgccttctcagggcgccctgcaaggccgcaggcaggatgaacattctggcacccgtgcggagggatcgcgtcctggcggagctgccccagtgcctgaggaaggaggccgctttgcacgggcacaaagacttccacccccgcgtcacctgcgcctgccaggagcaccggacaggcaccgtgggatttaagatctccaaggtcattgtggtgggggacctgtcggtggggaagacttgcctcattaataggttctgcaaagacacctttgataagaattacaaggccaccattggagtggacttcgagatggaacgatttgaggtgctgggcattcccttcagtttgcagctttgggataccgctgggcaggagaggttcaaatgcattgcatcaacctactatagaggagctcaagccatcatcattgtcttcaacctgaatgatgtggcatctctggaacataccaagcagtggctggccgatgccctgaaggagaatgacccttccagtgtgcttctcttccttgtaggttccaagaaggatctgagtacccctgctcagtatgcgctgatggagaaagacgccctccaggtggcccaggagatgaaggctgagtactgggcagtctcatctctcactggtgagaatgtccgagaattcttcttccgtgtggcagcactgacctttgaggccaatgtgctggctgagctggagaaatcgggggctcgacgcattggggatgttgtccgcatcaacagtgatgacagcaacctctacctaactgccagcaagaagaagcccacatgttgcccatgagggctgaggagactgttcagagactgcccagccctagggcactgtgccaccctcattcctccagagcttgacccctggacatttgcactgactttatccagaccaaagagctgcctcttggtggcagtattcccacagaggggtagctgggatcatgctagtcacttcctgcccccaggcaccgtgccaaagactggatgccccctactcctcaggggactgtccagggcgcccagtggtagtgagggagagtgtctctgttcttttgctcagcctgctgggccctttgtgtttgaggatgcttaatgattccagcctctcactgtgccttatgcattaaaatttctttgttacgagcaaaaaaaacacacggcgagccgccctagaaagaaccccgcaagcgcccgaagcatcagcgaacagcttttgggacccaagtggcccatgcaggaaacgccaactaagcacgccggggcccggagtacaacagcagggacggcgaccgcatccgcggcaggaggaccccaccgggcggcggcccagaccaccacccgcgacagccgagcagaaccacgcgaagcggcaccccgaggaaccgacttaacacaccagcccaccagcgcccacctaaccacgatccgcgccccagatcgacgagagcgggcgggggagcga

SEQ ID NO: 18624 - DNA, 1449 bp, Homo sapiens
tgagtcgtggtgaatcggacgaggccccaattggcggccgaagagtctcctcgccccagagtcatcttcgggacgcccagggcccgggtgattttgggctcgccgcggccccgggtgattgtttcatctccgtggcccgcggtggtcgtagcgtctccgagaccgcggactcccgtagggtccccgtggccccgagttgtagtcgggacaccccggccgcgggtgatcgtcgggtctccacgcgcccgggtcgctgacgcggatccggcctcggcgccttctcagggcgccctgcaaggccgcaggcaggatgaacattctggcacccgtgcggagggatcgcgtcctggcggagctgccccagtgcctgaggaaggaggccgctttgcacgggcacaaagacttccacccccgcgtcacctgcgcctgccaggagcaccggacaggcaccgtgggatttaagatctccaaggtcattgtggtgggggacctgtcggtggggaagacttgcctcattaataggttctgcaaagacacctttgataagaattacaaggccaccattggagtggacttcgagatggaacgatttgaggtgctgggcattcccttcagtttgcagctttgggataccgctgggcaggagaggttcaaatgcattgcatcaacctactatagaggagctcaagccatcatcattgtcttcaacctgaatgatgtggcatctctggaacataccaagcagtggctggccgatgccctgaaggagaatgacccttccagtgtgcttctcttccttgtaggttccaagaaggatctgagtacccctgctcagtatgcgctgatggagaaagacgccctccaggtggcccaggagatgaaggctgagtactgggcagtctcatctctcactggtgagaatgtccgagaattcttcttccgtgtggcagcactgacctttgaggccaatgtgctggctgagctggagaaatcgggggctcgacgcattggggatgttgtccgcatcaacagtgatgacagcaacctctacctaactgccagcaagaagaagcccacatgttgcccatgagggctgaggagactgttcagagactgcccagccctagggcactgtgccaccctcattcctccagagcttgacccctggacatttgcactgactttatccagaccaaagagctgcctcttggtggcagtattcccacagaggggtagctgggatcatgctagtcacttcctgcccccaggcaccgtgccaaagactggatgccccctactcctcaggggactgtccagggcgcccagtggtagtgagggagagtgtctctgttcttttgctcagcctgctgggccctttgtgtttgaggatgcttaatgattccagcctctcactgtgccttatgcattaaaatttctttgttacgagca

SEQ ID NO: 18625 - DNA, 1923 bp, Homo sapiens
aacgcagaagggtggagaggagggggtggcgagggcgggcagcgaggcctggagccgccaggagaggggcggggggcggcccttctccaggaatttccggggatcgtgttacagcgttggcggagcccgagcggagtgggactcgaggccctgtagccggactgggcccctcgccccctcctccagcggcctgcgggccttggcagcgccgcccctgcccacactgaccccgtgtggcggggccgctccgcgcccccgggccgctctgtaatggtagggcagcctcagccccgagatgacgtcgggtctccgcggccccgggttattgtaggaaccatccggccccgcgtaatcgtaggaactatccggccccgcgtaatcgtagggtctgcgcgggcccggcccccaccagacgggactccccgcccccaattggcggccgaagagtctcctcgccccagagtcatcttcgggacgcccagggcccgggtgattttgggctcgccgcggccccgggtgattgtttcatctccgtggcccgcggtggtcgtagcgtctccgagaccgcggactcccgtagggtccccgtggccccgagttgtagtcgggacaccccggccgcgggtgatcgtcgggtctccacgcgcccgggtcgctgacgcggatccggcctcggcgccttctcagggcgccctgcaaggccgcaggcaggatgaacattctggcacccgtgcggagggatcgcgtcctggcggagctgccccagtgcctgaggaaggaggccgctttgcacgggcacaaagacttccacccccgcgtcacctgcgcctgccaggagcaccggacaggcaccgtgggatttaagatctccaaggtcattgtggtgggggacctgtcggtggggaagacttgcctcattaataggttctgcaaagacacctttgataagaattacaaggccaccattggagtggacttcgagatggaacgatttgaggtgctgggcattcccttcagtttgcagctttgggataccgctgggcaggagaggttcaaatgcattgcatcaacctactatagaggagctcaagccatcatcattgtcttcaacctgaatgatgtggcatctctggaacataccaagcagtggctggccgatgccctgaaggagaatgacccttccagtgtgcttctcttccttgtaggttccaagaaggatctgagtgtgagtgtgccagtggggggacttcccagcttggtgagggaatgcccccctctgactctggccttccctcagacccctgctcagtatgcgctgatggagaaagacgccctccaggtggcccaggagatgaaggctgagtactgggcagtctcatctctcactggtgagaatgtccgagaattcttcttccgtgtggcagcactgacctttgaggccaatgtgctggctgagctggagaaatcgggggctcgacgcattggggatgttgtccgcatcaacagtgatgacagcaacctctacctaactgccagcaagaagaagcccacatgttgcccatgagggctgaggagactgttcagagactgcccagccctagggcactgtgccaccctcattcctccagagcttgacccctggacatttgcactgactttatccagaccaaagagctgcctcttggtggcagtattcccacagaggggtagctgggatcatgctagtcacttcctgcccccaggcaccgtgccaaagactggatgccccctactcctcaggggactgtccagggcgcccagtggtagtgagggagagtgtctctgttcttttgctcagcctgctgggccctttgtgtttgaggatgcttaatgattccagcctctcactgtgccttatgcattaaaatttctttgttacgagca

SEQ ID NO: 18626 - DNA, 2082 bp, Homo sapiens
aacgcagaagggtggagaggagggggtggcgagggcgggcagcgaggcctggagccgccaggagaggggcggggggcggcccttctccaggaatttccggggatcgtgttacagcgttggcggagcccgagcggagtgggactcgaggccctgtagccggactgggcccctcgccccctcctccagcggcctgcgggccttggcagcgccgcccctgcccacactgaccccgtgtggcggggccgctccgcgcccccgggccgctctgtaatggtagggcagcctcagccccgagatgacgtcgggtctccgcggccccgggttattgtaggaaccatccggccccgcgtaatcgtaggaactatccggccccgcgtaatcgtagggtctgcgcgggcccggcccccaccagacgggactccccgcccccaattggcggccgaagagtctcctcgccccagagtcatcttcgggacgcccagggcccgggtgattttgggctcgccgcggccccgggtgattgtttcatctccgtggcccgcggtggtcgtagcgtctccgagaccgcggactcccgtagggtccccgtggccccgagttgtagtcgggacaccccggccgcgggtgatcgtcgggtctccacgcgcccgggtcgctgacgcggatccggcctcggcgccttctcagggcgccctgcaaggccgcaggcaggatgaacattctggcacccgtgcggagggatcgcgtcctggcggagctgccccagtgcctgaggaaggaggccgctttgcacgggcacaaagacttccacccccgcgtcacctgcgcctgccaggagcaccggacaggcaccgtgggatttaagatctccaaggtcattgtggtgggggacctgtcggtggggaagacttgcctcattaataggttctgcaaagacacctttgataagaattacaaggccaccattggagtggacttcgagatggaacgatttgaggtgctgggcattcccttcagtttgcagctttgggataccgctgggcaggagaggttcaaatgcattgcatcaacctactatagaggagctcaagccatcatcattgtcttcaacctgaatgatgtggcatctctggaacataccaagcagtggctggccgatgccctgaaggagaatgacccttccagtgtgcttctcttccttgtaggttccaagaaggatctgagtacccctgctcagtatgcgctgatggagaaagacgccctccaggtggcccaggagatgaaggctgagtactgggcagtctcatctctcactggtgagaatgtccgagaattcttcttccgtgtggcagcactgacctttgaggccaatgtgctggctgagctggagaaatcgggggctcgacgcattggggatgttgtccgcatcaacagtgatgacagcaacctctacctaactgccagcaagaagaagcccacatgttgcccatgagggctgaggagactgttcagagactgcccagccctagggcactgtgccaccctcattcctccagagcttgacccctggacatttgcactgactttatccagaccaaagagctgcctcttggtggcagtattcccacagaggggtagctgggatcatgctagtcacttcctgcccccaggcaccgtgccaaagactggatgccccctactcctcaggggactgtccagggcgcccagtggtagtgagggagagtgtctctgttcttttgctcagcctgctgggccctttgtgtttgaggatgcttaatgattccagcctctcactgtgccttatgcattaaaatttctttgttacgagcaaaaaaaaaaaaaaaaaaaaattggagagggcatttaatgttgggggtggggaaaaaagaaggtaatggaatgggccccatgtggccattagcgtgtgttcccttgaacccaagctttctcttggttcccaaagggggggtaaaacctcttgcgcgggtcctcccttaatcggagagtcggaatttaattccgagaaaaacgccagggtttacccctggggcttttaagggc

SEQ ID NO: 18627 - DNA, 1914 bp, Homo sapiens
aacgcagaagggtggagaggagggggtggcgagggcgggcagcgaggcctggagccgccaggagaggggcggggggcggcccttctccaggaatttccggggatcgtgttacagcgttggcggagcccgagcggagtgggactcgaggccctgtagccggactgggcccctcgccccctcctccagcggcctgcgggccttggcagcgccgcccctgcccacactgaccccgtgtggcggggccgctccgcgcccccgggccgctctgtaatggtagggcagcctcagccccgagatgacgtcgggtctccgcggccccgggttattgtaggaaccatccggccccgcgtaatcgtaggaactatccggccccgcgtaatcgtagggtctgcgcgggcccggcccccaccagacgggactccccgcccccaattggcggccgaagagtctcctcgccccagagtcatcttcgggacgcccagggcccgggtgattttgggctcgccgcggccccgggtgattgtttcatctccgtggcccgcggtggtcgtagcgtctccgagaccgcggactcccgtagggtccccgtggccccgagttgtagtcgggacaccccggccgcgggtgatcgtcgggtctccacgcgcccgggtcgctgacgcggatccggcctcggcgccttctcagggcgccctgcaaggccgcaggcaggatgaacattctggcacccgtgcggagggatcgcgtcctggcggagctgccccagtgcctgaggaaggaggccgctttgcacgggcacaaagacttccacccccgcgtcacctgcgcctgccaggagcaccggacaggcaccgtgggatttaagatctccaaggtcattgtggtgggggacctgtcggtggggaagacttgcctcattaataggttctgcaaagacacctttgataagaattacaaggccaccattggagtggacttcgagatggaacgatttgaggtgctgggcattcccttcagtttgcagctttgggataccgctgggcaggagaggttcaaatgcattgcatcaacctactatagaggagctcaagccatcatcattgtcttcaacctgaatgatgtggcatctctggaacataccaagcagtggctggccgatgccctgaaggagaatgacccttccagtgtgcttctcttccttgtaggttccaagaaggatctgagtacccctgctcagtatgcgctgatggagaaagacgccctccaggtggcccaggagatgaaggctgagtactgggcagtctcatctctcactggtgagaatgtccgagaattcttcttccgtgtggcagcactgacctttgaggccaatgtgctggctgagctggagaaatcgggggctcgacgcattggggatgttgtccgcatcaacagtgatgacagcaacctctacctaactgccagcaagaagaagcccacatgttgcccatgagggctgaggagactgttcagagactgcccagccctagggcactgtgccaccctcattcctccagagcttgacccctggacatttgcactgactttatccagaccaaagagctgcctcttggtggcagtattcccacagaggggtagctgggatcatgctagtcacttcctgcccccaggcaccgtgccaaagactggatgccccctactcctcaggggactgtccagggcgcccagtggtagtgagggagagtgtctctgttcttttgctcagcctgctgggccctttgtgtttgaggatgcttaatgattccagcctctcactgtgccttatgcattaaaatttctttgttacgagcaagcactttggggctggagttctttgttggggatgatggatgtggaatgggcatgactgtgtgg

SEQ ID NO: 18628 - DNA, 1827 bp, Homo sapiens
aacgcagaagggtggagaggagggggtggcgagggcgggcagcgaggcctggagccgccaggagaggggcggggggcggcccttctccaggaatttccggggatcgtgttacagcgttggcggagcccgagcggagtgggactcgaggccctgtagccggactgggcccctcgccccctcctccagcggcctgcgggccttggcagcgccgcccctgcccacactgaccccgtgtggcggggccgctccgcgcccccgggccgctctgtaatggtagggcagcctcagccccgagatgacgtcgggtctccgcggccccgggttattgtaggaaccatccggccccgcgtaatcgtaggaactatccggccccgcgtaatcgtagggtctgcgcgggcccggcccccaccagacgggactccccgcccccaattggcggccgaagagtctcctcgccccagagtcatcttcgggacgcccagggcccgggtgattttgggctcgccgcggccccgggtgattgtttcatctccgtggcccgcggtggtcgtagcgtctccgagaccgcggactcccgtagggtccccgtggccccgagttgtagtcgggacaccccggccgcgggtgatcgtcgggtctccacgcgcccgggtcgctgacgcggatccggcctcggcgccttctcagggcgccctgcaaggccgcaggcaggatgaacattctggcacccgtgcggagggatcgcgtcctggcggagctgccccagtgcctgaggaaggaggccgctttgcacgggcacaaagacttccacccccgcgtcacctgcgcctgccaggagcaccggacaggcaccgtgggatttaagatctccaaggtcattgtggtgggggacctgtcggtggggaagacttgcctcattaataggttctgcaaagacacctttgataagaattacaaggccaccattggagtggacttcgagatggaacgatttgaggtgctgggcattcccttcagtttgcagctttgggataccgctgggcaggagaggttcaaatgcattgcatcaacctactatagaggagctcaagccatcatcattgtcttcaacctgaatgatgtggcatctctggaacataccaagcagtggctggccgatgccctgaaggagaatgacccttccagtgtgcttctcttccttacccctgctcagtatgcgctgatggagaaagacgccctccaggtggcccaggagatgaaggctgagtactgggcagtctcatctctcactggtgagaatgtccgagaattcttcttccgtgtggcagcactgacctttgaggccaatgtgctggctgagctggagaaatcgggggctcgacgcattggggatgttgtccgcatcaacagtgatgacagcaacctctacctaactgccagcaagaagaagcccacatgttgcccatgagggctgaggagactgttcagagactgcccagccctagggcactgtgccaccctcattcctccagagcttgacccctggacatttgcactgactttatccagaccaaagagctgcctcttggtggcagtattcccacagaggggtagctgggatcatgctagtcacttcctgcccccaggcaccgtgccaaagactggatgccccctactcctcaggggactgtccagggcgcccagtggtagtgagggagagtgtctctgttcttttgctcagcctgctgggccctttgtgtttgaggatgcttaatgattccagcctctcactgtgccttatgcattaaaatttctttgttacgagca

SEQ ID NO: 18629 - DNA, 1797 bp, Homo sapiens
aacgcagaagggtggagaggagggggtggcgagggcgggcagcgaggcctggagccgccaggagaggggcggggggcggcccttctccaggaatttccggggatcgtgttacagcgttggcggagcccgagcggagtgggactcgaggccctgtagccggactgggcccctcgccccctcctccagcggcctgcgggccttggcagcgccgcccctgcccacactgaccccgtgtggcggggccgctccgcgcccccgggccgctctgtaatggtagggcagcctcagccccgagatgacgtcgggtctccgcggccccgggttattgtaggaaccatccggccccgcgtaatcgtaggaactatccggccccgcgtaatcgtagggtctgcgcgggcccggcccccaccagacgggactccccgcccccaattggcggccgaagagtctcctcgccccagagtcatcttcgggacgcccagggcccgggtgattttgggctcgccgcggccccgggtgattgtttcatctccgtggccccgagttgtagtcgggacaccccggccgcgggtgatcgtcgggtctccacgcgcccgggtcgctgacgcggatccggcctcggcgccttctcagggcgccctgcaaggccgcaggcaggatgaacattctggcacccgtgcggagggatcgcgtcctggcggagctgccccagtgcctgaggaaggaggccgctttgcacgggcacaaagacttccacccccgcgtcacctgcgcctgccaggagcaccggacaggcaccgtgggatttaagatctccaaggtcattgtggtgggggacctgtcggtggggaagacttgcctcattaataggttctgcaaagacacctttgataagaattacaaggccaccattggagtggacttcgagatggaacgatttgaggtgctgggcattcccttcagtttgcagctttgggataccgctgggcaggagaggttcaaatgcattgcatcaacctactatagaggagctcaagccatcatcattgtcttcaacctgaatgatgtggcatctctggaacataccaagcagtggctggccgatgccctgaaggagaatgacccttccagtgtgcttctcttccttgtaggttccaagaaggatctgagtacccctgctcagtatgcgctgatggagaaagacgccctccaggtggcccaggagatgaaggctgagtactgggcagtctcatctctcactggtgagaatgtccgagaattcttcttccgtgtggcagcactgacctttgaggccaatgtgctggctgagctggagaaatcgggggctcgacgcattggggatgttgtccgcatcaacagtgatgacagcaacctctacctaactgccagcaagaagaagcccacatgttgcccatgagggctgaggagactgttcagagactgcccagccctagggcactgtgccaccctcattcctccagagcttgacccctggacatttgcactgactttatccagaccaaagagctgcctcttggtggcagtattcccacagaggggtagctgggatcatgctagtcacttcctgcccccaggcaccgtgccaaagactggatgccccctactcctcaggggactgtccagggcgcccagtggtagtgagggagagtgtctctgttcttttgctcagcctgctgggccctttgtgtttgaggatgcttaatgattccagcctctcactgtgccttatgcattaaaatttctttgttacgagca

SEQ ID NO: 18630 - DNA, 1449 bp, Homo sapiens
ggaaaagacgccagacttcagacgtctctctcctcggtgggcacctcattctaaccctggcacccccttcgcacgcttcccctccaccatcctcacccccgacctcccagggcagaagggcgagagggggcagactctatgagtcacctcccaggcctggagttgaggagggaagcgccgcctctccttgggccccttctctccccctttcccctccctgcgtggttcctggcatcgccagatgctgcgcagcagtctccgattccccatcaccaattcggctggggcgccctgcaaggccgcaggcaggatgaacattctggcacccgtgcggagggatcgcgtcctggcggagctgccccagtgcctgaggaaggaggccgctttgcacgggcacaaagacttccacccccgcgtcacctgcgcctgccaggagcaccggacaggcaccgtgggatttaagatctccaaggtcattgtggtgggggacctgtcggtggggaagacttgcctcattaataggttctgcaaagacacctttgataagaattacaaggccaccattggagtggacttcgagatggaacgatttgaggtgctgggcattcccttcagtttgcagctttgggataccgctgggcaggagaggttcaaatgcattgcatcaacctactatagaggagctcaagccatcatcattgtcttcaacctgaatgatgtggcatctctggaacataccaagcagtggctggccgatgccctgaaggagaatgacccttccagtgtgcttctcttccttgtaggttccaagaaggatctgagtacccctgctcagtatgcgctgatggagaaagacgccctccaggtggcccaggagatgaaggctgagtactgggcagtctcatctctcactggtgagaatgtccgagaattcttcttccgtgtggcagcactgacctttgaggccaatgtgctggctgagctggagaaatcgggggctcgacgcattggggatgttgtccgcatcaacagtgatgacagcaacctctacctaactgccagcaagaagaagcccacatgttgcccatgagggctgaggagactgttcagagactgcccagccctagggcactgtgccaccctcattcctccagagcttgacccctggacatttgcactgactttatccagaccaaagagctgcctcttggtggcagtattcccacagaggggtagctgggatcatgctagtcacttcctgcccccaggcaccgtgccaaagactggatgccccctactcctcaggggactgtccagggcgcccagtggtagtgagggagagtgtctctgttcttttgctcagcctgctgggccctttgtgtttgaggatgcttaatgattccagcctctcactgtgccttatgcattaaaatttctttgttacgagca

SEQ ID NO: 18631 - DNA, 2054 bp, Homo sapiens
aacgcagaagggtggagaggagggggtggcgagggcgggcagcgaggcctggagccgccaggagaggggcggggggcggcccttctccaggaatttccggggatcgtgttacagcgttggcggagcccgagcggagtgggactcgaggccctgtagccggactgggcccctcgccccctcctccagcggcctgcgggccttggcagcgccgcccctgcccacactgaccccgtgtggcggggccgctccgcgcccccgggccgctctgtaatggtagggcagcctcagccccgagatgacgtcgggtctccgcggccccgggttattgtaggaaccatccggccccgcgtaatcgtaggaactatccggccccgcgtaatcgtagggtctgcgcgggcccggcccccaccagacgggactccccgcccccaattggcggccgaagagtctcctcgccccagagtcatcttcgggacgcccagggcccgggtgattttgggctcgccgcggccccgggtgattgtttcatctccgtggcccgcggtggtcgtagcgtctccgagaccgcggactcccgtagggtccccgtggccccgagttgtagtcgggacaccccggccgcgggtgatcgtcgggtctccacgcgcccgggtcgctgacgcggatccggcctcggcgccttctcagggcgccctgcaaggccgcaggcaggatgaacattctggcacccgtgcggagggatcgcgtcctggcggagctgccccagtgcctgaggaaggaggccgctttgcacgggcacaaagacttccacccccgcgtcacctgcgcctgccaggagcaccggacaggcaccgtgggatttaagatctccaaggtcattgtggtgggggacctgtcggtggggaagacttgcctcattaataggttctgcaaagacacctttgataagaattacaaggccaccattggagtggacttcgagatggaacgatttgaggtgctgggcattcccttcagtttgcagctttgggataccgctgggcaggagaggttcaaatgcattgcatcaacctactatagaggagctcaagccatcatcattgtcttcaacctgaatgatgtggcatctctggaacataccaagcagtggctggccgatgccctgaaggagaatgacccttccagtgtgcttctcttccttgtaggttccaagaaggatctgagtgtgagtgtgccagtggggggacttcccagcttggtgagggaatgcccccctctgactctggccttccctcagacccctgctcagtatgcgctgatggagaaagacgccctccaggtggcccaggagatgaaggctgagtactgggcagtctcatctctcactggtgagttggaggctttagggctctgctgtgacactcttgcctggctctcctctcactgctacacctccagctgtgccctgtgtccccagacccagcactgcccctgagcacctatctgctctctgtgtcaggtgagaatgtccgagaattcttcttccgtgtggcagcactgacctttgaggccaatgtgctggctgagctggagaaatcgggggctcgacgcattggggatgttgtccgcatcaacagtgatgacagcaacctctacctaactgccagcaagaagaagcccacatgttgcccatgagggctgaggagactgttcagagactgcccagccctagggcactgtgccaccctcattcctccagagcttgacccctggacatttgcactgactttatccagaccaaagagctgcctcttggtggcagtattcccacagaggggtagctgggatcatgctagtcacttcctgcccccaggcaccgtgccaaagactggatgccccctactcctcaggggactgtccagggcgcccagtggtagtgagggagagtgtctctgttcttttgctcagcctgctgggccctttgtgtttgaggatgcttaatgattccagcctctcactgtgccttatgcattaaaatttctttgttacgagca

SEQ ID NO: 18632 - DNA, 1769 bp, Homo sapiens
aacgcagaagggtggagaggagggggtggcgagggcgggcagcgaggcctggagccgccaggagaggggcggggggcggcccttctccaggaatttccggggatcgtgttacagcgttggcggagcccgagcggagtgggactcgaggccctgtagccggactgggcccctcgccccctcctccagcggcctgcgggccttggcagcgccgcccctgcccacactgaccccgtgtggcggggccgctccgcgcccccgggccgctctgtaatggtagggcagcctcagccccgagatgacgtcgggtctccgcggccccgggttattgtaggaaccatccggccccgcgtaatcgtaggaactatccggccccgcgtaatcgtagggtctgcgcgggcccggcccccaccagacgggactccccgcccccaattggcggccgaagagtctcctcgccccagagtcatcttcgggacgcccagggcccgggtgattttgggctcgccgcggccccgggtgattgtttcatctccgtggcccgcggtggtcgtagcgtctccgagaccgcggactcccgtagggtccccgtggccccgagttgtagtcgggacaccccggccgcgggtgatcgtcgggtctccacgcgcccgggtcgctgacgcggatccggcctcggcgccttctcagggcgccctgcaaggccgcaggcaggatgaacattctggcacccgtgcggagggatcgcgtcctggcggagctgccccagtgcctgaggaaggaggccgctttgcacgggcacaaagacttccacccccgcgtcacctgcgcctgccaggagcaccggacaggcaccgtgggatttaagatctccaaggtcattgtggtgggggacctgtcggtggggaagacttgcctcattaataggttctgcaaagacacctttgataagaattacaaggccaccattggagtggacttcgagatggaacgatttgaggtgctgggcattcccttcagtttgcagctttgggataccgctgggcaggagaggttcaaatgcattgcatcaacctactatagaggagctcaagccatcatcattgtcttcaacctgaatgatgtggcatctctggaacataccaaacccctgctcagtatgcgctgatggagaaagacgccctccaggtggcccaggagatgaaggctgagtactgggcagtctcatctctcactggtgagaatgtccgagaattcttcttccgtgtggcagcactgacctttgaggccaatgtgctggctgagctggagaaatcgggggctcgacgcattggggatgttgtccgcatcaacagtgatgacagcaacctctacctaactgccagcaagaagaagcccacatgttgcccatgagggctgaggagactgttcagagactgcccagccctagggcactgtgccaccctcattcctccagagcttgacccctggacatttgcactgactttatccagaccaaagagctgcctcttggtggcagtattcccacagaggggtagctgggatcatgctagtcacttcctgcccccaggcaccgtgccaaagactggatgccccctactcctcaggggactgtccagggcgcccagtggtagtgagggagagtgtctctgttcttttgctcagcctgctgggccctttgtgtttgaggatgcttaatgattccagcctctcactgtgccttatgcattaaaatttctttgttacgagca

SEQ ID NO: 18633 - DNA, 1933 bp, Homo sapiens
aacgcagaagggtggagaggagggggtggcgagggcgggcagcgaggcctggagccgccaggagaggggcggggggcggcccttctccaggaatttccggggatcgtgttacagcgttggcggagcccgagcggagtgggactcgaggccctgtagccggactgggcccctcgccccctcctccagcggcctgcgggccttggcagcgccgcccctgcccacactgaccccgtgtggcggggccgctccgcgcccccgggccgctctgtaatggtagggcagcctcagccccgagatgacgtcgggtctccgcggccccgggttattgtaggaaccatccggccccgcgtaatcgtaggaactatccggccccgcgtaatcgtagggtctgcgcgggcccggcccccaccagacgggactccccgcccccaattggcggccgaagagtctcctcgccccagagtcatcttcgggacgcccagggcccgggtgattttgggctcgccgcggccccgggtgattgtttcatctccgtggcccgcggtggtcgtagcgtctccgagaccgcggactcccgtagggtccccgtggccccgagttgtagtcgggacaccccggccgcgggtgatcgtcgggtctccacgcgcccgggtcgctgacgcggatccggcctcggcgccttctcagggcgccctgcaaggccgcaggcaggatgaacattctggcacccgtgcggagggatcgcgtcctggcggagctgccccagtgcctgaggaaggaggccgctttgcacgggcacaaagacttccacccccgcgtcacctgcgcctgccaggagcaccggacaggcaccgtgggatttaagatctccaaggtcattgtggtgggggacctgtcggtggggaagacttgcctcattaataggttctgcaaagacacctttgataagaattacaaggccaccattggagtggacttcgagatggaacgatttgaggtgctgggcattcccttcagtttgcagctttgggataccgctgggcaggagaggttcaaatgcattgcatcaacctactatagaggagctcaagccatcatcattgtcttcaacctgaatgatgtggcatctctggaacataccaagcagtggctggccgatgccctgaaggagaatgacccttccagtgtgcttctcttccttgtaggttccaagaaggatctgagtacccctgctcagtatgcgctgatggagaaagacgccctccaggtggcccaggagatgaaggctgagtactgggcagtctcatctctcactggtgagaatgtccgagaattcttcttccgtgtggcagcactgacctttgaggccaatgtgctggctgagctggagaaatcgggggctcgacgcattggggatgttgtccgtgagtgcttgcctggttgagggtggcagagggcacagtgagcctccaatccctgcttcacatattttccacccttctttaggcatcaacagtgatgacagcaacctctacctaactgccagcaagaagaagcccacatgttgcccatgagggctgaggagactgttcagagactgcccagccctagggcactgtgccaccctcattcctccagagcttgacccctggacatttgcactgactttatccagaccaaagagctgcctcttggtggcagtattcccacagaggggtagctgggatcatgctagtcacttcctgcccccaggcaccgtgccaaagactggatgccccctactcctcaggggactgtccagggcgcccagtggtagtgagggagagtgtctctgttcttttgctcagcctgctgggccctttgtgtttgaggatgcttaatgattccagcctctcactgtgccttatgcattaaaatttctttgttacgagca

SEQ ID NO: 18634 - DNA, 1759 bp, Homo sapiens
aacgcagaagggtggagaggagggggtggcgagggcgggcagcgaggcctggagccgccaggagaggggcggggggcggcccttctccaggaatttccggggatcgtgttacagcgttggcggagcccgagcggagtgggactcgaggccctgtagccggactgggcccctcgccccctcctccagcggcctgcgggccttggcagcgccgcccctgcccacactgaccccgtgtggcggggccgctccgcgcccccgggccgctctgtaatggtagggcagcctcagccccgagatgacgtcgggtctccgcggccccgggttattgtaggaaccatccggccccgcgtaatcgtaggaactatccggccccgcgtaatcgtagggtctgcgcgggcccggcccccaccagacgggactccccgcccccaattggcggccgaagagtctcctcgccccagagtcatcttcgggacgcccagggcccgggtgattttgggctcgccgcggccccgggtgattgtttcatctccgtggcccgcggtggtcgtagcgtctccgagaccgcggactcccgtagggtccccgtggccccgagttgtagtcgggacaccccggccgcgggtgatcgtcgggtctccacgcgcccgggtcgctgacgcggatccggcctcggcgccttctcagggcgccctgcaaggccgcaggcaggatgaacattctggcacccgtgcggagggatcgcgtcctggcggagctgccccagatttaagatctccaaggtcattgtggtgggggacctgtcggtggggaagacttgcctcattaataggttctgcaaagacacctttgataagaattacaaggccaccattggagtggacttcgagatggaacgatttgaggtgctgggcattcccttcagtttgcagctttgggataccgctgggcaggagaggttcaaatgcattgcatcaacctactatagaggagctcaagccatcatcattgtcttcaacctgaatgatgtggcatctctggaacataccaagcagtggctggccgatgccctgaaggagaatgacccttccagtgtgcttctcttccttgtaggttccaagaaggatctgagtacccctgctcagtatgcgctgatggagaaagacgccctccaggtggcccaggagatgaaggctgagtactgggcagtctcatctctcactggtgagaatgtccgagaattcttcttccgtgtggcagcactgacctttgaggccaatgtgctggctgagctggagaaatcgggggctcgacgcattggggatgttgtccgcatcaacagtgatgacagcaacctctacctaactgccagcaagaagaagcccacatgttgcccatgagggctgaggagactgttcagagactgcccagccctagggcactgtgccaccctcattcctccagagcttgacccctggacatttgcactgactttatccagaccaaagagctgcctcttggtggcagtattcccacagaggggtagctgggatcatgctagtcacttcctgcccccaggcaccgtgccaaagactggatgccccctactcctcaggggactgtccagggcgcccagtggtagtgagggagagtgtctctgttcttttgctcagcctgctgggccctttgtgtttgaggatgcttaatgattccagcctctcactgtgccttatgcattaaaatttctttgttacgagca

SEQ ID NO: 18635 - DNA, 2069 bp, Homo sapiens
aacgcagaagggtggagaggagggggtggcgagggcgggcagcgaggcctggagccgccaggagaggggcggggggcggcccttctccaggaatttccggggatcgtgttacagcgttggcggagcccgagcggagtgggactcgaggccctgtagccggactgggcccctcgccccctcctccagcggcctgcgggccttggcagcgccgcccctgcccacactgaccccgtgtggcggggccgctccgcgcccccgggccgctctgtaatggtagggcagcctcagccccgagatgacgtcgggtctccgcggccccgggttattgtaggaaccatccggccccgcgtaatcgtaggaactatccggccccgcgtaatcgtagggtctgcgcgggcccggcccccaccagacgggactccccgcccccaattggcggccgaagagtctcctcgccccagagtcatcttcgggacgcccagggcccgggtgattttgggctcgccgcggccccgggtgattgtttcatctccgtggcccgcggtggtcgtagcgtctccgagaccgcggactcccgtagggtccccgtggccccgagttgtagtcgggacaccccggccgcgggtgatcgtcgggtctccacgcgcccgggtcgctgacgcggatccggcctcggcgccttctcagggcgccctgcaaggccgcaggcaggatgaacattctggcacccgtgcggagggatcgcgtcctggcggagctgccccaggtaggcgccggggccacgtcgggcttcagtctacagcccggggtgtgggcgaggaggaggcggcaccagaccagttagaggactgggcccagccctgccacccagctaggcctggtgcttctgggtggtccctgcactccacccctacccgggccgcttggctgcgggacaagggccaggagtaggaagctccattctcttccatccttcccactaagtgcctgaggaaggaggccgctttgcacgggcacaaagacttccacccccgcgtcacctgcgcctgccaggagcaccggacaggcaccgtgggatttaagatctccaaggtcattgtggtgggggacctgtcggtggggaagacttgcctcattaataggttctgcaaagacacctttgataagaattacaaggccaccattggagtggacttcgagatggaacgatttgaggtgctgggcattcccttcagtttgcagctttgggataccgctgggcaggagaggttcaaatgcattgcatcaacctactatagaggagctcaagccatcatcattgtcttcaacctgaatgatgtggcatctctggaacataccaagcagtggctggccgatgccctgaaggagaatgacccttccagtgtgcttctcttccttgtaggttccaagaaggatctgagtacccctgctcagtatgcgctgatggagaaagacgccctccaggtggcccaggagatgaaggctgagtactgggcagtctcatctctcactggtgagaatgtccgagaattcttcttccgtgtggcagcactgacctttgaggccaatgtgctggctgagctggagaaatcgggggctcgacgcattggggatgttgtccgcatcaacagtgatgacagcaacctctacctaactgccagcaagaagaagcccacatgttgcccatgagggctgaggagactgttcagagactgcccagccctagggcactgtgccaccctcattcctccagagcttgacccctggacatttgcactgactttatccagaccaaagagctgcctcttggtggcagtattcccacagaggggtagctgggatcatgctagtcacttcctgcccccaggcaccgtgccaaagactggatgccccctactcctcaggggactgtccagggcgcccagtggtagtgagggagagtgtctctgttcttttgctcagcctgctgggccctttgtgtttgaggatgcttaatgattccagcctctcactgtgccttatgcattaaaatttctttgttacgagca

SEQ ID NO: 18636 - DNA, 1785 bp, Homo sapiens
aacgcagaagggtggagaggagggggtggcgagggcgggcagcgaggcctggagccgccaggagaggggcggggggcggcccttctccaggaatttccggggatcgtgttacagcgttggcggagcccgagcggagtgggactcgaggccctgtagccggactgggcccctcgccccctcctccagcggcctgcgggccttggcagcgccgcccctgcccacactgaccccgtgtggcggggccgctccgcgcccccgggccgctctgtaatggtagggcagcctcagccccgagatgacgtcgggtctccgcggccccgggttattgtaggaaccatccggccccgcgtaatcgtaggaactatccggccccgcgtaatcgtagggtctgcgcgggcccggcccccaccagacgggactccccgcccccaattggcggccgaagagtctcctcgccccagagtcatcttcgggacgcccagggcccgggtgattttgggctcgccgcggccccgggtgattgtttcatctccgtggcccgcggtggtcgtagcgtctccgagaccgcggactcccgtagggtccccgtggccccgagttgtagtcgggacaccccggccgcgggtgatcgtcgggtctccacgcgcccgggtcgctgacgcggatccggcctcggcgccttctcagggcgccctgcaaggccgcaggcaggatgaacattctggcacccgtgcggagggatcgcgtcctggcggagctgccccagtgcctgaggaaggaggccgctttgcacgggcacaaagacttccacccccgcgtcacctgcgcctgccaggagcaccggacaggcaccgtggggttctgcaaagacacctttgataagaattacaaggccaccattggagtggacttcgagatggaacgatttgaggtgctgggcattcccttcagtttgcagctttgggataccgctgggcaggagaggttcaaatgcattgcatcaacctactatagaggagctcaagccatcatcattgtcttcaacctgaatgatgtggcatctctggaacataccaagcagtggctggccgatgccctgaaggagaatgacccttccagtgtgcttctcttccttgtaggttccaagaaggatctgagtacccctgctcagtatgcgctgatggagaaagacgccctccaggtggcccaggagatgaaggctgagtactgggcagtctcatctctcactggtgagaatgtccgagaattcttcttccgtgtggcagcactgacctttgaggccaatgtgctggctgagctggagaaatcgggggctcgacgcattggggatgttgtccgcatcaacagtgatgacagcaacctctacctaactgccagcaagaagaagcccacatgttgcccatgagggctgaggagactgttcagagactgcccagccctagggcactgtgccaccctcattcctccagagcttgacccctggacatttgcactgactttatccagaccaaagagctgcctcttggtggcagtattcccacagaggggtagctgggatcatgctagtcacttcctgcccccaggcaccgtgccaaagactggatgccccctactcctcaggggactgtccagggcgcccagtggtagtgagggagagtgtctctgttcttttgctcagcctgctgggccctttgtgtttgaggatgcttaatgattccagcctctcactgtgccttatgcattaaaatttctttgttacgagca

SEQ ID NO: 18637 - DNA, 2136 bp, Homo sapiens
aacgcagaagggtggagaggagggggtggcgagggcgggcagcgaggcctggagccgccaggagaggggcggggggcggcccttctccaggaatttccggggatcgtgttacagcgttggcggagcccgagcggagtgggactcgaggccctgtagccggactgggcccctcgccccctcctccagcggcctgcgggccttggcagcgccgcccctgcccacactgaccccgtgtggcggggccgctccgcgcccccgggccgctctgtaatggtagggcagcctcagccccgagatgacgtcgggtctccgcggccccgggttattgtaggaaccatccggccccgcgtaatcgtaggaactatccggccccgcgtaatcgtagggtctgcgcgggcccggcccccaccagacgggactccccgcccccaattggcggccgaagagtctcctcgccccagagtcatcttcgggacgcccagggcccgggtgattttgggctcgccgcggccccgggtgattgtttcatctccgtggcccgcggtggtcgtagcgtctccgagaccgcggactcccgtagggtccccgtggccccgagttgtagtcgggacaccccggccgcgggtgatcgtcgggtctccacgcgcccgggtcgctgacgcggatccggcctcggcgccttctcagggcgccctgcaaggccgcaggcaggatgaacattctggcacccgtgcggagggatcgcgtcctggcggagctgccccagtgcctgaggaaggaggccgctttgcacgggcacaaagacttccacccccgcgtcacctgcgcctgccaggagcaccggacaggcaccgtgggatttaagatctccaaggtcattgtggtgggggacctgtcggtggggaagacttgcctcattaataggttctgcaaagacacctttgataagaattacaaggccaccattggagtggacttcgagatggaacgatttgaggtgctgggcattcccttcagtttgcagctttgggataccgctgggcaggagaggttcaaatgcattgcatcaacctactatagaggagctcaagccatcatcattgtcttcaacctgaatgatgtggcatctctggaacataccaagcagtggctggccgatgccctgaaggagaatgacccttccagtgtgcttctcttccttgtaggttccaagaaggatctgagtgtgagtgtgccagtggggggacttcccagcttggtgagggaatgcccccctctgactctggccttccctcagacccctgctcagtatgcgctgatggagaaagacgccctccaggtggcccaggagatgaaggctgagtactgggcagtctcatctctcactggtgagttggaggctttagggctctgctgtgacactcttgcctggctctcctctcactgctacacctccagctgtgccctgtgtccccagacccagcactgcccctgagcacctatctgctctctgtgtcaggtgagaatgtccgagaattcttcttccgtgtggcagcactgacctttgaggccaatgtgctggctgagctggagaaatcgggggctcgacgcattggggatgttgtccgtgagtgcttgcctggttgagggtggcagagggcacagtgagcctccaatccctgcttcacatattttccacccttctttaggcatcaacagtgatgacagcaacctctacctaactgccagcaagaagaagcccacatgttgcccatgagggctgaggagactgttcagagactgcccagccctagggcactgtgccaccctcattcctccagagcttgacccctggacatttgcactgactttatccagaccaaagagctgcctcttggtggcagtattcccacagaggggtagctgggatcatgctagtcacttcctgcccccaggcaccgtgccaaagactggatgccccctactcctcaggggactgtccagggcgcccagtggtagtgagggagagtgtctctgttcttttgctcagcctgctgggccctttgtgtttgaggatgcttaatgattccagcctctcactgtgccttatgcattaaaatttctttgttacgagca

SEQ ID NO: 18638 - DNA, 1652 bp, Homo sapiens
aacgcagaagggtggagaggagggggtggcgagggcgggcagcgaggcctggagccgccaggagaggggcggggggcggcccttctccaggaatttccggggatcgtgttacagcgttggcggagcccgagcggagtgggactcgaggccctgtagccggactgggcccctcgccccctcctccagcggcctgcgggccttggcagcgccgcccctgcccacactgaccccgtgtggcggggccgctccgcgcccccgggccgctctgtaatggtagggcagcctcagccccgagatgacgtcgggtctccgcggccccgggttattgtaggaaccatccggccccgcgtaatcgtaggaactatccggccccgcgtaatcgtagggtctgcgcgggcccggcccccaccagacgggactccccgcccccaattggcggccgaagagtctcctcgccccagagtcatcttcgggacgcccagggcccgggtgattttgggctcgccgcggccccgggtgattgtttcatctccgtggcccgcggtggtcgtagcgtctccgagaccgcggactcccgtagggtccccgtggccccgagttgtagtcgggacaccccggccgcgggtgatcgtcgggtctccacgcgcccgggtcgctgacgcggatccggcctcggcgccttctcagggcgccctgcaaggccgcaggcaggatgaacattctggcacccgtgcggagggatcgcgtcctggcggagctgccccagtgcctgaggaaggaggccgctttgcacgggcacaaagacttccacccccgcgtcacctgcgcctgccaggagcaccggacaggcaccgtgggatttaagatctccaaggtcattgtggtgggggacctgtcggtggggaagacttgcctcattaataggttctgcaaagacacctttgataagaattacaaggccaccattggagtggacttcgagatggaacgatttgaggtgctgggcattcccttcagtttgcagctacccctgctcagtatgcgctgatggagaaagacgccctccaggtggcccaggagatgaaggctgagtactgggcagtctcatctctcactggtgagaatgtccgagaattcttcttccgtgtggcagcactgacctttgaggccaatgtgctggctgagctggagaaatcgggggctcgacgcattggggatgttgtccgcatcaacagtgatgacagcaacctctacctaactgccagcaagaagaagcccacatgttgcccatgagggctgaggagactgttcagagactgcccagccctagggcactgtgccaccctcattcctccagagcttgacccctggacatttgcactgactttatccagaccaaagagctgcctcttggtggcagtattcccacagaggggtagctgggatcatgctagtcacttcctgcccccaggcaccgtgccaaagactggatgccccctactcctcaggggactgtccagggcgcccagtggtagtgagggagagtgtctctgttcttttgctcagcctgctgggccctttgtgtttgaggatgcttaatgattccagcctctcactgtgccttatgcattaaaatttctttgttacgagca

SEQ ID NO: 18639 - DNA, 1735 bp, Homo sapiens
aacgcagaagggtggagaggagggggtggcgagggcgggcagcgaggcctggagccgccaggagaggggcggggggcggcccttctccaggaatttccggggatcgtgttacagcgttggcggagcccgagcggagtgggactcgaggccctgtagccggactgggcccctcgccccctcctccagcggcctgcgggccttggcagcgccgcccctgcccacactgaccccgtgtggcggggccgctccgcgcccccgggccgctctgtaatggtagggcagcctcagccccgagatgacgtcgggtctccgcggccccgggttattgtaggaaccatccggccccgcgtaatcgtaggaactatccggccccgcgtaatcgtagggtctgcgcgggcccggcccccaccagacgggactccccgcccccaattggcggccgaagagtctcctcgccccagagtcatcttcgggacgcccagggcccgggtgattttgggctcgccgcggccccgggtgattgtttcatctccgtggcccgcggtggtcgtagcgtctccgagaccgcggactcccgtagggtccccgtggccccgagttgtagtcgggacaccccggccgcgggtgatcgtcgggtctccacgcgcccgggtcgctgacgcggatccggcctcggcgccttctcagggcgccctgcaaggccgcaggcaggatgaacattctggcacccgtgcggagggatcgcgtcctggcggagctgccccagatttaagatctccaaggtcattgtggtgggggacctgtcggtggggaagacttgcctcattaataggttctgcaaagacacctttgataagaattacaaggccaccattggagtggacttcgagatggaacgatttgaggtgctgggcattcccttcagtttgcagctttgggataccgctgggcaggagaggttcaaatgcattgcatcaacctactatagaggagctcaagccatcatcattgtcttcaacctgaatgatgtggcatctctggaacataccaagcagtggctggccgatgccctgaaggagaatgacccttccagtgtgcttctcttccttacccctgctcagtatgcgctgatggagaaagacgccctccaggtggcccaggagatgaaggctgagtactgggcagtctcatctctcactggtgagaatgtccgagaattcttcttccgtgtggcagcactgacctttgaggccaatgtgctggctgagctggagaaatcgggggctcgacgcattggggatgttgtccgcatcaacagtgatgacagcaacctctacctaactgccagcaagaagaagcccacatgttgcccatgagggctgaggagactgttcagagactgcccagccctagggcactgtgccaccctcattcctccagagcttgacccctggacatttgcactgactttatccagaccaaagagctgcctcttggtggcagtattcccacagaggggtagctgggatcatgctagtcacttcctgcccccaggcaccgtgccaaagactggatgccccctactcctcaggggactgtccagggcgcccagtggtagtgagggagagtgtctctgttcttttgctcagcctgctgggccctttgtgtttgaggatgcttaatgattccagcctctcactgtgccttatgcattaaaatttctttgttacgagca

SEQ ID NO: 18640 - DNA, 1513 bp, Homo sapiens
  misc_feature (1328)..(1328): n is a, c, g, or t
  misc_feature (1344)..(1344): n is a, c, g, or t
  misc_feature (1347)..(1347): n is a, c, g, or t
  misc_feature (1358)..(1358): n is a, c, g, or t
aacgcagaagggtggagaggagggggtggcgagggcgggcagcgaggcctggagccgccaggagaggggcggggggcggcccttctccaggaatttccggggatcgtgttacagcgttggcggagcccgagcggagtgggactcgaggccctgtagccggactgggcccctcgccccctcctccagcggcctgcgggccttggcagcgccgcccctgcccacactgaccccgtgtggcggggccgctccgcgcccccgggccgctctgtaatggtagggcagcctcagccccgagatgacgtcgggtctccgcggccccgggttattgtaggaaccatccggccccgcgtaatcgtaggaactatccggccccgcgtaatcgtagggtctgcgcgggcccggcccccaccagacgggactccccgcccccaattggcggccgaagagtctcctcgccccagagtcatcttcgggacgcccagggcccgggtgattttgggctcgccgcggccccgggtgattgtttcatctccgtggcccgcggtggtcgtagcgtctccgagaccgcggactcccgtagggtccccgtggccccgagttgtagtcgggacaccccggccgcgggtgatcgtcgggtctccacgcgcccgggtcgctgacgcggatccggcctcggcgccttctcagggcgccctgcaaggccgcaggcaggatgaacattctggcacccgtgcggagggatcgcgtcctggcggagctgccccagtgcctgaggaaggaggccgctttgcacgggcacaaagacttccacccccgcgtcacctgcgcctgccaggagcaccggacaggcaccgtgggatttaagatctccaaggtcattgtggtgggggacctgtcggtggggaagacttgcctcattaataggttctgcaaagacacctttgataagaattacaaggccaccattggagtggacttcgagatggaacgatttgaggtgctgggcattcccttcagtttgcagctttgggataccgctgggcaggagaggttcaaatgcattgcatcaacctactatagaggagctcaagccatcatcattgtcttcaacctgaatgatgtggcatctctggaacataccaagcagtggctggccgatgccctgaaggagaatgacccttccagtgtgcttctcttccttgtaggttccaagaaggatctgagtacccctgctcagtatgcgctgatggagaaagacgccctccaggtggcccaggagatgaaggctgagtactgggcagtctcatctctcactggtgagatgtccngaatctctccgggggngcnggcttgggcanggtggctgcttggaaacgggccacctgggattgggccctcaagggtgaggccttttttggggaaccttgtccggggggggaataccgcggggggccctccacagcgcgtgtttacacctgggcgggggttcccgcgacacccgggtgtggtgtac

SEQ ID NO: 18641 - DNA, 794 bp, Homo sapiens
  misc_feature (26)..(26): n is a, c, g, or t
  misc_feature (73)..(73): n is a, c, g, or t
cacatcattcacggttgaagacaatnatgatggcttgacctcctctatagtaggttgatgcaatgcatttaancctctcctgcccagcagtggctggccgatgccctgaaggagaatgacccttccagtgtgcttctcttccttgtaggttccaagaaggatctgagtacccctgctcagtatgcgctgatggagaaagacgccctccaggtggcccaggagatgaaggctgagtactgggcagtctcatctctcactggtgagaatgtccgagaattcttcttccgtgtggcagcactgacctttgaggccaatgtgctggctgagctggagaaatcgggggctcgacgcattggggatgttgtccgcatcaacagtgatgacagcaacctctacctaactgccagcaagaagaagcccacatgttgcccatgagggctgaggagactgttcagagactgcccagccctagggcactgtgccaccctcattcctccagagcttgacccctggacatttgcactgactttatccagaccaaagagctgcctcttggtggcagtattcccacagaggggtagctgggatcatgctagtcacttcctgcccccaggcaccgtgccaaagactggatgccccctactcctcaggggactgtccagggcgcccagtggtagtgagggagagtgtctctgttcttttgctcagcctgctgggccctttgtgtttgaggatgcttaatgattccagcctctcactgtgccttatgcattaaaatttctttgttacgagca

SEQ ID NO: 18642 - DNA, 1303 bp, Homo sapiens
tccgagtggggtcccgagggtgccctctgctcaggcctccctagcacctccccctaaccaaattctccctggaccccattctgagctccccatcaccatgggaggtggggcctcaatctaaggccttccctgtcagaagggggttgtggcaaaagccacattacaagctgccatcccctccccgtttcagtggaccctgtggccaggtgcttttccctatccacaggggtgttcggtgtgtgtgcgcgtgtgcgtttcaataaaggtttggtacactttaaaataaaaaaaaaaaaaggatacaatagtgaaagaaagagaaacagaaagaagaagaagcagcgggccctcattgaggtggggtggcggacaaaggaggtgtctttgaattgggaactttgggaggaccagcgtttgccggtgaccctttttttttgggtaacgagggggaggggtgtctggggggtcccctcaggtggggggggctttgataataccgaagggccaggttacgcgtgcgttttgtttagtgctgtcaaaaccctatatagaagggagctcaaaggcccatcatcattgtcttcaacctgaatgatgtggcatctctggaacataccaagcagtggctggccgatgccctgaaggagaatgacccttccagtgtgcttctcttccttacccctgctcagtatgcgctgatggagaaagacgccctccaggtggcccaggagatgaaggctgagtactgggcagtctcatctctcactggtgagaatgtccgagaattcttcttccgtgtggcagcactgacctttgaggccaatgtgctggctgagctggagaaatcgggggctcgacgcattggggatgttgtccgcatcaacagtgatgacagcaacctctacctaactgccagcaagaagaagcccacatgttgcccatgagggctgaggagactgttcagagactgcccagccctagggcactgtgccaccctcattcctccagagcttgacccctggacatttgcactgactttatccagaccaaagagctgcctcttggtggcagtattcccacagaggggtagctgggatcatgctagtcacttcctgcccccaggcaccgtgccaaagactggatgccccctactcctcaggggactgtccagggcgcccagtggtagtgagggagagtgtctctgttcttttgctcagcctgctgggccctttgtgtttgaggatgcttaatgattccagcctctcactgtgccttatgcattaaaatttctttgttacgagca

SEQ ID NO: 18643 - DNA, 1438 bp, Homo sapiens
aacgcagaagggtggagaggagggggtggcgagggcgggcagcgaggcctggagccgccaggagaggggcggggggcggcccttctccaggaatttccggggatcgtgttacagcgttggcggagcccgagcggagtgggactcgaggccctgtagccggactgggcccctcgccccctcctccagcggcctgcgggccttggcagcgccgcccctgcccacactgaccccgtgtggcggggccgctccgcgcccccgggccgctctgtaatggtagggcagcctcagccccgagatgacgtcgggtctccgcggccccgggttattgtaggaaccatccggccccgcgtaatcgtaggaactatccggccccgcgtaatcgtagggtctgcgcgggcccggcccccaccagacgggactccccgcccccaattggcggccgaagagtctcctcgccccagagtcatcttcgggacgcccagggcccgggtgattttgggctcgccgcggccccgggtgattgtttcatctccgtggcccgcggtggtcgtagcgtctccgagaccgcggactcccgtagggtccccgtggccccgagttgtagtcgggacaccccggccgcgggtgatcgtcgggtctccacgcgcccgggtcgctgacgcggatccggcctcggcgccttctcagggcgccctgcaaggccgcaggcaggatgaacattctggcacccgtgcggagggatcgcgtcctggcggagctgccccaggtaggcgccggggccacgtcgggcttcagtctacagcccggggtgtgggcgaggaggaggcggcaccagaccagttagaggactgggcccagccctgccacccagctaggcctggtgcttctgggtggtccctgcactccacccctacccgggccgcttggctgcgggacaagggccaggagtaggaagctccattctcttccatccttcccactaagtgcctgaggaaggaggccgctttgcacgggcacaaagacttccacccccgcgtcacctgcgcctgccaggagcaccggacaggcaccgtggggtgagttagggacacccacaacaaagagaggaggtcccaggaaactctgtagtcatagcgagggtaaacaaccacccccttggggcttcatttcagcccctaccagctatatggttatttccccctctttaagcccctgtatcccctccttttctcccaacaaggttgttgtgagttctatgagatggggttgggtagaagggtggcagctggatttctgagtagagactaaggtgtctgaaatgggaaggtggtcacctgctcagatccccacatagcatccatggagccccagggcaggggtctggctgtgcttacagggatgagtcttattgtgggttttaaaggtaatactaataaca

SEQ ID NO: 18644 - DNA, 440 bp, Homo sapiens
gggatgcctggtgtctataataacctcagccatgggtgcagctacctttctggacctagtcgggagcattggaactccctagggtatgaacaatccggcccactccccttgcccactcttgtgtccagcaatttaagatctccaaggtcattgtggtgggggacctgtcggtggggaagacttgcctcattaataggtaagggggtgctggagctgagctgggcagggtggggccaagcctagccaggtgggctggctccagatcacagcatctggtaccctctcaggttctgcaaagacacctttgataagaattacaaggccaccattggagtggacttcgagatggaacgatttgaggtgctgggcattcccttcagtttgcagctgtgagtgcttccacaccccttccagctatcccttctccccagcacccacac

SEQ ID NO: 18645 - DNA, 330 bp, Homo sapiens
agccctagggcactgtgccaccctcattcctccagagcttgacccctggacatttgcactgactttatccagaccaaagagctgcctcttggtggcagtattcccacagaggggtagctgggatcatgctagtcacttcctgcccccaggcaccgtgccaaagactggatgccccctactcctcaggggactgtccagggcgcccagtggtagtgagggagagtgtctctgttcttttgctcagcctgctgggccctttgtgtttgaggatgcttaatgattccagcctctcactgtgccttatgcattaaaatttctttgttacgagca

SEQ ID NO: 18646 - DNA, 2817 bp, Homo sapiens
  misc_feature (1017)..(1017): n is a, c, g, or t
  misc_feature (2816)..(2816): n is a, c, g, or t
tgatattttgaccttctcctttgaattatgaatgttcttaatggcatctagaatggttaatactttcgcagaagattgtcaatttattttgcccagatccatcggaggaataactgtggcagctttagccctaggaaatgttatttcttaaataataagactttaaagtcaaaattactccttaatccatgggctgcagactagatgtatcagcagacatgaaaacattaatcgttttatacatctccatcagagttcttgggtgactatgtgcattgtcaatgagcagtaatattttgaaaggcatcttttctaagcaataggtcttaacagtggacttaaaatttcagtaaaccatgctgtaaacagatgtgctgtcatccagaccttgttgttccccttatagcacataggcagagtagattaaacataattcttacaggccctagaatttttagtatggtaaatgtgcattgacttcaacttaaagtcaccagctgcattagccccaaacaagagagtcagactgtcctttgaagctttgtttccatgcattgacttctctctagctataaaagcctcagatcgcatcttcttccaatggaaagctattttgtctgcattaaaaatccgttgcttagtgtattagtccattttcatgctgctgataaagacgtacccaaggctgggcaatttataaagaaaaagaagtttaatggactcacagttccacgtggctggggaggcctaacaatcatagcagaaggtgaaaggcatatcttacatggctgcagggaagagagaaaatgagagacaagcaaaagaggtttccccttataaacccaccagatctcttgagacttattcactaccatgagaacagcacaggaaagacccatccacatgattcaattacctcccacgggtccctcccacaacacatgggaattgtggaagctacaattcaagatgagatttgagtggggcacagtcaaaccatatcacttagtgtggccnccttcatcaatgttcttagctagctcttctggataacttgctgtagcttctgcattagcacttgctgcttcaccttgcactttaatgttgcagagatggcttctttccctaaacctcatgaaccaacctctgctagcttcaaacttttcttctgcagctttctcacctctctcaacccagatagagttgagttagggccttgctctgaattaggttttggctttagggaatgttgtggctggtttgatcttagaagatcactttagacagcccactaaaactttctccatatcagcaatatgaggctgtttcacttgcttatcattcatgtgtttcctggaattgcatgtttaatttctttcaagaacttttctttgtgttcataacttggccaactgtttggcaggagaggcctcgcttttggcctttcttggctttcaacatgccttcctcactaagcttaatagttcctagtttttgatttaaattgagagatgtgagactctttctttcacttgaatgcttagtagccattgtaggattattaattgacttaatttcaatattgttgtgtctcaggcaatggggaggcccaaggagagggaaagagatgtgggaatgaccggagcagtcagaacacacacaacatttatcaattacatttgccatcttatatgggtggggcttctagtgccccagaacaattactaggataacatcaaagattactgattacaaatcactattacagataaaataataaagtttgaaatacattttttttttgagacggagtcttgctctgtcgcccaggctggagtgcagtggcactatctcagctcactgcaagctctgcctcctgggctcacgccattctcctgcctcagcctcacgagtagctggaactacaggcgcccaccacgacgcctggctaattttttatatttttagtagagacggggtttcaccgtgttagccaggatggtcttgatctcctgacctcatgatccacccacctcagcctcccaaagtgctgggattacaggcgtgagccactgcacccagccataaagtttgaaatattgctaagcattaccaaaatatgacagagacatgaagtgtgcacaaaccattgaaaaaatgtcaccaatggatttgctccatgcagggatgctagaaaccttcagtttgttaaaaaaaaaaaaaaatgcagtacctgcaaagcacagtcaagtgaagcatgataaaacaaggtattcttgaacaatgtaagaaaatgaaattccaagtgagtccatgctcaaaaaggaaaacaacgaagataccagttgaacccgtagccttatattagaagatagacaaagaaatgaacatgttatatgttttaagttcaaacattttgtggtacatataattcatcttttttattttctgctttaatcaactttttaaatgtaaccaaccaattcaaaataagaatgcttctattgtacagcagaggtatcacttcatatcagaagagttttcgtttggagggatagaaataaatgtgttctgtgtcgtgaagcatgtttttccaaggagttctaatctaaatttgggaatagttttattttttaaaatgcaccagtatattgaattgataacttgatatatttggtcctaaagtgtttttgtagccagttcttaaaatttagtttcatcatcagatttgtttctctctctctcattttaaaatctcctattaattgtgataaatatgtttctgaatgtttataataaagttatttttcgtatgnc

SEQ ID NO: 18647 - DNA, 538 bp, Homo sapiens
tcatctttccttggtttctaagtaaataacaagcatgttttctagatctgaattgttcttgcaaatatgtaatggaaaggacacaaggagaaagaacaaaaaatagcattgctttgtgaaagggcatgtggtggtatcggaaaccctacctaactgacccaaccaccagccttatggcgtcctgggcctttttggcctcttctggactgcttcatcatcctgcttcttgtcagtttcaggcgttttagagtaaattattttccctgtttgatttttctcctcactgctaaaggtttctgtaaaagcagacctgtctgtcatatcgagtaactagagaaaaggggcttttaatgttcagattttgcaggggaaaggaaaataaactaaagcaagtgactcaagagttataaatcagaaaaaacaataatgcagatattcttcttaaatgcacaggttcctgtctacacatttctcttaagttaatttgatttttcccattagctcttatttaaaaagcaaaacagacattttcctcttc

SEQ ID NO: 18648 - DNA, 695 bp, Homo sapiens
gtaaaatgcttgaaggcaggaatgtgtagatgaatttaggcaatagttggagatgtttcacctttattctgaaaatgctgaagactaaaaatttttttatgaagaataaaaatacaactgtctggaaataagattggaggagaaaacatgaaggcagggagatagcaaatcctgttgattaaaataactcagataggagagaaaaaggggtggagcaatagagaatggaaggaatacctaaaatgtgttaacaaaggaaaaacaaaatgttttatactggatatgagaaatcggaaagaggagagggaaaagttaatagacgttcaaacatagattttaaaattttctgtccaaattagtgggtaaaacaccatagcatttgtacaactgccaaaactgtttttcaggtctaaataatttgcataattactgtcagcatttctttgttccttcgttattttccaactctatttgttgaccttgagaaaattagtttccgtagtctcatacgtcttccaatgtctgtgttttctagtggaaaaagaaaagggaattgaaaacgaagacagctacattacattttgtctgatattgaatcactggccatttaatctgctccttaaaactctctttgagtcattttttccactttgaaatgtagcttcatagattcaaggacttttagtagtaaaaaa

SEQ ID NO: 18649 - DNA, 501 bp, Homo sapiens
atcggccaattagactcctgtaaaaatgtgtctccatgtttgtcctccctcctgaaataagaaattcatagctgggggtggggagtagatgggggctgggggaaaaactttctcacattcacagagcagcttccctcaaagcggcacggaatcgggaaccccactcgggacaggggaaaacggccaagttcctagaaatttgttttctttgtggggagcaattcatgatgggcgttcttgtctggtttccccccactccgtcccctgacgccgagtaacacttaaacctttctagttgcaaagtcttttcagagttttttttttaggaaataagttttgaaaattctagtgcttaaaaaatgtatatatatatatatatgtatatttatagccttttattttccctgagtacatgttggccactacattccaaattgatctcaaatggttttccagcttgttggggggtgaggaaaaataaatggagaatatatttaaatg

SEQ ID NO: 18650 - DNA, 462 bp, Homo sapiens
ctttctattcttttcctgcattaaagtttaagcattgaggaagcacttcccaagactacctgagttcttttcagctgagtctagaggtagggatagccatggttcaaaagcagcctaccacttggggtcgccctggcgtgcaccccattaaggtccctacttcaaggagcagattcttcaggctttccatcttggggtctcctagtctatcagcagtggaggaaacctctacagatgctgcactgtgtggtatggaaggcactggccacgcgtgactactgagtatgtgaaatgcatctggtccacactgagaagtgttccaagtacaaaacacacatcagattttaaagacgtagtgaaaaagaatgtaaaagatctcaatcactatcagaattgctcattgaaatgataccattcaattggatgaagtaaaatctgttattaaaattcgatttacctgtc

SEQ ID NO: 18651 - DNA, 1027 bp, Homo sapiens
  misc_feature (41)..(41): n is a, c, g, or t
  misc_feature (141)..(141): n is a, c, g, or t
  misc_feature (149)..(149): n is a, c, g, or t
  misc_feature (154)..(154): n is a, c, g, or t
  misc_feature (197)..(197): n is a, c, g, or t
  misc_feature (199)..(199): n is a, c, g, or t
  misc_feature (201)..(201): n is a, c, g, or t
  misc_feature (206)..(206): n is a, c, g, or t
  misc_feature (208)..(208): n is a, c, g, or t
  misc_feature (211)..(211): n is a, c, g, or t
  misc_feature (215)..(215): n is a, c, g, or t
  misc_feature (220)..(220): n is a, c, g, or t
  misc_feature (228)..(229): n is a, c, g, or t
  misc_feature (233)..(234): n is a, c, g, or t
  misc_feature (237)..(237): n is a, c, g, or t
  misc_feature (240)..(240): n is a, c, g, or t
  misc_feature (285)..(285): n is a, c, g, or t
  misc_feature (296)..(296): n is a, c, g, or t
  misc_feature (300)..(300): n is a, c, g, or t
  misc_feature (303)..(303): n is a, c, g, or t
acctcattaatactctaggtgtcattttatatgactagttnacaaataggacaataggtttcaaagtattgagataagggaatataaatagtattatatgtatcaggaaatctctcatcctgtttttgtttcatgtatttntaaagttntcatntgtgcacaaaaatctgtcgtggaatatattttattctcattantncngtgangntgngacntcatngtaatttnngaanncanctngagggtaaaaattttactttgtcaatactgagtctctggcgtaanccttataatcnttcnccngagaacataatattgtcaaatagatacacatttttctaataggtatttagaagcacttgaaatattcttaatctctgcatgtgttacaattcagttatttctgtagtttgtaaactctaaagtgacattactattattttagagatgtctaagttgtaattttgatttttgtggaaccattgtttgttaatgttgggattctctgcacttttgaatgtgaaagcttatatccctgaattctgatacttaagagttttctatttcagacatctctgtgtggaagttgagactaagaataatcctagggatgtcatgaatttaggcaatgtttctcatttggaaaatgaaatgagaaataatttccttctttaaagcaagtatatatagtatgagaaacttggaggcatttcatacacacgtttcttaggaaaatggacacattgaaaatgtcctcttttttatattagagattctgcagctctttgctcttaagagcaaatcacaacaggattcttaatgtatgatttctttgttcatatattatgaatgtattattttatttgcttcgtaataaagtttataaggaagagcatctcatacatatcattatcgtggaacacgttgaatgtttgtgattctgtgtggcctttttggggctggaaaatgtatgaattcttcaactgtcttacaagagatctgctaataaattttattattaaataag

SEQ ID NO: 18652 - DNA, 819 bp, Homo sapiens
  misc_feature (41)..(41): n is a, c, g, or t
  misc_feature (141)..(141): n is a, c, g, or t
  misc_feature (149)..(149): n is a, c, g, or t
  misc_feature (154)..(154): n is a, c, g, or t
  misc_feature (197)..(197): n is a, c, g, or t
  misc_feature (199)..(199): n is a, c, g, or t
  misc_feature (201)..(201): n is a, c, g, or t
  misc_feature (206)..(206): n is a, c, g, or t
  misc_feature (208)..(208): n is a, c, g, or t
  misc_feature (211)..(211): n is a, c, g, or t
  misc_feature (215)..(215): n is a, c, g, or t
  misc_feature (220)..(220): n is a, c, g, or t
  misc_feature (228)..(229): n is a, c, g, or t
  misc_feature (233)..(234): n is a, c, g, or t
  misc_feature (237)..(237): n is a, c, g, or t
  misc_feature (240)..(240): n is a, c, g, or t
acctcattaatactctaggtgtcattttatatgactagttnacaaataggacaataggtttcaaagtattgagataagggaatataaatagtattatatgtatcaggaaatctctcatcctgtttttgtttcatgtatttntaaagttntcatntgtgcacaaaaatctgtcgtggaatatattttattctcattantncngtgangntgngacntcatngtaatttnngaanncanctngagggtaaaaattttactttgtcaatactgaagtctctcctgtgggcgtaatatatcttctcccacagaacataatattgtcaaatagatacacatttttctaataggtatttagaagcacttgaaatattcttaatctctgcatgtgttacaattcagttatttctgtagtttgtaaactctaaagtgacattactattattttagagatgtctaagttgtaattttgatttttgtggaaccattgtttgttaatgttgggattctctgcacttttgaatgtgaaagcttatatccctgaattctgatacttaagagttttctatttcagacatctctgtgtggaagttgagactaagaataatcctagggatgtcatgaatttaggcaatgtttctcatttggaaaatgaaatgagaaataatttccttctttaaagcaagtatatatagtatgagaaattatcgtggaacacgttgaatgtttgtgattctgtgtggcctttttggggctggaaaatgtatgaattcttcaactgtcttacaagagatctgctaataaattttattattaaataag

SEQ ID NO: 18653 - DNA, 781 bp, Homo sapiens
ccccatatacactatgttttttcctacacatacatacctatgataaagtttaatttatgaattaggcacagtaagaaattaacaacaataacttataacaaaatagaacacataatatgctgtaataaaagtaaataagacttgcttgaacgcaagcacggcaataccacaacagccaatctgagggttcctgagtgactagcaagcaggcaggtagatggcgtgagtacactagacagatgattcatgtccgggaggatggagtgggatggcatgaaattcgtcacactactcacaatggcacacaacttaaaacttatgaattgcttatttccggaattttccatttcatatttttagactgcagttgaccatgggtaactgaacctgcagataagtggggattaccatattgctgttttaagccactaaatgtggggcaatctgttatgaagcaatacgtagttaatatcccaccctaacattactgtgggtcttttgtgagcttttcgatgtccctctcgtcacaccccagccctaacccccaagtcctggggtagagagctgggagctggaagccaggcagcctggagtgagttccagccccactaattccagctgtgtgaacttggacaggtttcccagctcccctcaattccagctgtgtgaacttgaacggtttctgagcctccttccacttcaattttctcccctgccaaacatcagtcctaatggtacctacctcacatggttatgtattaaatgagttacttcatgcaaa

SEQ ID NO: 18654 - DNA, 473 bp, Homo sapiens
ctcccatgttctgtttttgtcctatcagagtgcccttttttcaatcctccctgcccttagctacttttaggatcctagtgattggtgtgttttacagagcaatgattggtgcattttacagagtgctgattggtgcattttacaatcctcttgctagctacagagcgctgattggtgcattttataatcctcttgtaagacagaaaagttctccaagtccccactcgacccaggaagtccagatggcttcacctctcagtaggcagactgagcctatttttctagaaaagggttaaaactaggaagaaaatagtgctaaggcttgaacatgttgagcccaacctcagatctaagagaatgctggtagaggaggtaagaagagaagaaagggccaaatgatccagttctaagtttcaatctttttattattaatattattgtaaagataataaagtcttaaggttaacttctaa

SEQ ID NO: 18655 - DNA, 422 bp, Homo sapiens
tcccaagtaactggaactacaggcacacgccagcacaactggctaactttttaacttttttgtagagacaggatcctgctttgttacccaggctagtcttggactcctggactcgagcgaccctcccaccttggcctcccaaagtgctgggattacaggtgtgagccatcatgcctgggtattttgaaaaccttaagatacacaggtataagatgttattatttactcatccattctgcaaataaaataacctatcacctaaactgagttttcatgggataaataagagttcagggccgggtgcggtggctcacacctgtaatcccagcactttgggaggccaaggcgggtggatcatgaagtcaggagattgagaccatccaggctaacacagtgaaaccccatctctactaaaaaataca

SEQ ID NO: 18656 - DNA, 485 bp, Homo sapiens
tcccaagtaactggaactacaggcacacgccagcacaactggctaactttttaacttttttgtagagacaggatcctgctttgttacccaggctagtcttggactcctggactcgagcgaccctcccaccttggcctcccaaagtgctgggattacaggtgtgagccatcatgcctgggtattttgaaaaccttaagatacacaggtataagatgttattatttactcatccattctgcaaatatatacccctattacctagactctgttgaggatagaggccgtgctttttcccacgtgtggagtagagcaacatagaagagtgccctgcagtgggtgctgtaatggagatgtgtaccaggtacaacaggaacctaaggaaggaacccctgagtttatcggggggcaccagggaaggcttcacagaggagatgatgtgagttgccatttgaagaatgagaaattgtttttctgatgaactaaac

SEQ ID NO: 18657 - DNA, 2641 bp, Homo sapiens
aattctagggacaacctgagtgctcagtcgtaaagaggaaaggcagaatttttccttgctatggctggaacaaacgcacttttgatgctggaaaacttcatagatggaaaatttttaccttgtagctcatatatagattcttacgacccatcaacaggggaagtgtattgcagagtgccaaatagtggaaaagacgagatcgaagccgcggtcaaggccgccagagaagcctttcccagctggtcatcccgcagcccccaggagcgctcacgggtcctgaaccaggtggcggatttgctggagcagtccctggaggagtttgcccaggccgagtctaaagaccaagggaaaaccttagcactggcaagaaccatggacattccccggtctgtgcagaacttcaggttcttcgcttcctccagcctgcaccacacgtcagagtgcacgcagatggaccacctgggctgcatgcactacacggtgcgggccccggtgggagtcgctggtctgatcagcccctggaatttgccactctacttgctgacctggaagatagctccagcgatggctgcagggaacactgtgatagccaagcccagtgagctgacttcagtgactgcgtggatgttgtgcaaactcctggataaagcaggtgttccaccaggtgtggtcaatattgtgtttggaaccgggcccagggtgggtgaggccctggtgtcccacccagaggtgcccctgatctccttcaccgggagccagcccaccgctgagcggatcacccagctgagcgctccccactgcaaaaagctctccctggagctggggggcaagaatcctgccatcatctttgaggacgccaacctggatgagtgcattccggcaaccgtcaggtccagctttgccaaccagggtgaaatctgtctctgtaccagcaggatctttgtccagaagagcatctatagtgaatttttaaagagatttgtagaagctaccagaaagtggaaagtcggcattccctctgatccactggtgagcataggtgctctgataagtaaagcacatttggagaaagtcagaagttacgtcaagagagctcttgctgaaggtgcccaaatttggtgcggtgagggagtggataagttgagcctccctgccaggaaccaggcaggctactttatgcttcccacggtgataacagacattaaggatgaatcctgctgcatgacggaagagatatttggtccagtgacgtgtgtcgtcccctttgatagtgaagaggaggtgattgaaagagccaacaacgttaagtatgggctggcggctaccgtgtggtccagcaatgtggggcgcgtccaccgggtggctaagaagctgcagtctggcttggtctggaccaactgctggctcatcagggagctgaaccttcctttcggggggatgaagagttctggaataggtagagagggagccaaggactcttacgacttcttcactgagatcaaaaccatcaccgttaaacactgatctttgctaatggtggagccactatggccaatgcctggctgcaggcatcaattgttcaatgtggtagatgaaaatcatggcatgaattccagctatgccttgacctggcagaaggttatctctagcttatcctcagttcttagtaactttacccactagtgaagagatactgtctattttcaatgtggactcggaaaaaaagacttataagtaggaagacagaacaatgatgccagttgtcaggctcctcccaggttatgttttcatagtgtttctttcatcatcttcattgaactcttgggaatctccagataatcagattatttcatttggtaaattttaaaaaatatgcaatcaggcacagtgcctcatgcctataatcccagcactttgggaggccaaggtgggtggatcacttgagttcaggagttcgagatcagcctaggcaacatggtgaaatcctgtctttaccaaaagtttaaaaattagcttggtgtggtgccctctgcctatagccccagctacttgggaggctgaggtgggaggatcgcttgagcccaggcggttgaggctgcagtgagccatgatcattccactgcatttcagcctgggggatacagtgagaccttgtctttaaaaaaaaaatgctgcaaaaccaaaaataaatagccataatttgccatctttggagagattatggagataatctccttgtctattagccactagcatggctaattgatcattgattggacctcattacataagggggctgtggacgtctttggaatttgttaggggaaggctatgtggtaagctctactaaatgtatctgtacaaggatgaagaaaaacaaaataactactacttttggaggaaacttggaacaagaagagtacatagtttgatccattcctacggtcgagtctaatcaattccatttcttagtgtatgcatctaatgaggcttacaacttgctaaccccaaaagaagcaataaatgttaagcaattttagtaaccagtatggcatgtatcttatttttgaatgcattcctccttatccccatcctcttaggaatatggacgttttactaagtaataaagatttcaaatgct

SEQ ID NO: 18658 - DNA, 887 bp, Homo sapiens
aattctagggacaacctgagtgctcagtcgtaaagaggaaaggcagaatttttccttgctatggctggaacaaacgcacttttgatgctggaaaacttcatagatggaaaatttttaccttgtagctcatatatagattcttacgacccatcaacaggggaagtgtattgcagagtgccaaatagtggaaaagacgagatcgaagccgcggtcaaggccgccagagaagcctttcccagctggtcatcccgcagcccccaggagcgctcacgggtcctgaaccaggtggcggatttgctggagcagtccctggaggatcgcttgagcccaggcggttgaggctgcagtgagccatgatcattccactgcatttcagcctgggggatacagtgagaccttgtctttaaaaaaaaaatgctgcaaaaccaaaaataaatagccataatttgccatctttggagagattatggagataatctccttgtctattagccactagcatggctaattgatcattgattggacctcattacataagggggctgtggacgtctttggaatttgttaggggaaggctatgtggtaagctctactaaatgtatctgtacaaggatgaagaaaaacaaaataactactacttttggaggaaacttggaacaagaagagtacatagtttgatccattcctacggtcgagtctaatcaattccatttcttagtgtatgcatctaatgaggcttacaacttgctaaccccaaaagaagcaataaatgttaagcaattttagtaaccagtatggcatgtatcttatttttgaatgcattcctccttatccccatcctcttaggaatatggacgttttactaagtaataaagatttcaaatgct

SEQ ID NO: 18659 - DNA, 2302 bp, Homo sapiens
tctcccatttgctcctcaaagatcgaagccgcggtcaaggccgccagagaagcctttcccagctggtcatcccgcagcccccaggagcgctcacgggtcctgaaccaggtggcggatttgctggagcagtccctggaggagtttgcccaggccgagtctaaagaccaagggaaaaccttagcactggcaagaaccatggacattccccggtctgtgcagaacttcaggttcttcgcttcctccagcctgcaccacacgtcagagtgcacgcagatggaccacctgggctgcatgcactacacggtgcgggccccggtgggagtcgctggtctgatcagcccctggaatttgccactctacttgctgacctggaagatagctccagcgatggctgcagggaacactgtgatagccaagcccagtgagctgacttcagtgactgcgtggatgttgtgcaaactcctggataaagcaggtgttccaccaggtgtggtcaatattgtgtttggaaccgggcccagggtgggtgaggccctggtgtcccacccagaggtgcccctgatctccttcaccgggagccagcccaccgctgagcggatcacccagctgagcgctccccactgcaaaaagctctccctggagctggggggcaagaatcctgccatcatctttgaggacgccaacctggatgagtgcattccggcaaccgtcaggtccagctttgccaaccaggtcagaagttacgtcaagagagctcttgctgaaggtgcccaaatttggtgcggtgagggagtggataagttgagcctccctgccaggaaccaggcaggctactttatgcttcccacggtgataacagacattaaggatgaatcctgctgcatgacggaagagatatttggtccagtgacgtgtgtcgtcccctttgatagtgaagaggaggtgattgaaagagccaacaacgttaagtatgggctggcggctaccgtgtggtccagcaatgtggggcgcgtccaccgggtggctaagaagctgcagtctggcttggtctggaccaactgctggctcatcagggagctgaaccttcctttcggggggatgaagagttctggaataggtagagagggagccaaggactcttacgacttcttcactgagatcaaaaccatcaccgttaaacactgatctttgctaatggtggagccactatggccaatgcctggctgcaggcatcaattgttcaatgtggtagatgaaaatcatggcatgaattccagctatgccttgacctggcagaaggttatctctagcttatcctcagttcttagtaactttacccactagtgaagagatactgtctattttcaatgtggactcggaaaaaaagacttataagtaggaagacagaacaatgatgccagttgtcaggctcctcccaggttatgttttcatagtgtttctttcatcatcttcattgaactcttgggaatctccagataatcagattatttcatttggtaaattttaaaaaatatgcaatcaggcacagtgcctcatgcctataatcccagcactttgggaggccaaggtgggtggatcacttgagttcaggagttcgagatcagcctaggcaacatggtgaaatcctgtctttaccaaaagtttaaaaattagcttggtgtggtgccctctgcctatagccccagctacttgggaggctgaggtgggaggatcgcttgagcccaggcggttgaggctgcagtgagccatgatcattccactgcatttcagcctgggggatacagtgagaccttgtctttaaaaaaaaaatgctgcaaaaccaaaaataaatagccataatttgccatctttggagagattatggagataatctccttgtctattagccactagcatggctaattgatcattgattggacctcattacataagggggctgtggacgtctttggaatttgttaggggaaggctatgtggtaagctctactaaatgtatctgtacaaggatgaagaaaaacaaaataactactacttttggaggaaacttggaacaagaagagtacatagtttgatccattcctacggtcgagtctaatcaattccatttcttagtgtatgcatctaatgaggcttacaacttgctaaccccaaaagaagcaataaatgttaagcaattttagtaaccagtatggcatgtatcttatttttgaatgcattcctccttatccccatcctcttaggaatatggacgttttactaagtaataaagatttcaaatgct

SEQ ID NO: 18660 - DNA, 1318 bp, Homo sapiens
aattctagggacaacctgagtgctcagtcgtaaagaggaaaggcagaatttttccttgctatggctggaacaaacgcacttttgatgctggaaaacttcatagatggaaaatttttaccttgtagctcatatatagattcttacgacccatcaacaggggaagtgtattgcagagtgccaaatagtggaaaagacgagatcgaagccgcggtcaaggccgccagagaagcctttcccagctggtcatcccgcagcccccaggagcgctcacgggtcctgaaccaggtggcggatttgctggagcagtccctggaggagtttgcccaggccgagtctaaagaccaagggaaaaccttagcactggcaagaaccatggacattccccggtctgtgcagaacttcaggttcttcgcttcctccagcctgcaccacacgtcagagtgcacgcagatggaccacctgggctgcatgcactacacggtgcgggccccggtgggagtcgctggtctgatcagcccctggaatttgccactctacttgctgacctggaagatagctccagcgatggctgcagggaacactgtgatagccaagcccagtgagctgacttcagtgactgcgtggatgttgtgcaaactcctggataaagcaggtgttccaccaggtgtggtcaatattgtgtttggaaccgggcccagggtgggtgaggccctggtgtcccacccagaggtgcccctgatctccttcaccgggagccagcccaccgctgagcggatcacccagctgagcgctccccactgcaaaaagctctccctggagctggggggcaagaatcctgccatcatctttgaggacgccaacctggatgagtgcattccggcaaccgtcaggtccagctttgccaaccagggtgaaatctgtctctgtaccagcaggatctttgtccagaagagcatctatagtgaatttttaaagagatttgtagaagctaccagaaagtggaaagtcggcattccctctgatccactggtgagcataggtgctctgataagtaaagcacatttggagaaagtaagtaaatttctgccatgtaagttacagaataagttcttatttgaagagaagctcagtacaggcatagcacaatcagactctgaaatattgttagttactaccccatttttgaaaaattataacctgggagaaattgtggacacagagtctaaacattgtggatatgaatatgcaaatgcagtcccggtgaaagtgcatccacatgaaattaatgaacttgagaagtcagcatggagataccacc

SEQ ID NO: 18661 - DNA, 2599 bp, Homo sapiens
aattctagggacaacctgagtgctcagtcgtaaagaggaaaggcagaatttttccttgctatggctggaacaaacgcacttttgatgctggaaaacttcatagatggaaaatttttaccttgtagctcatatatagattcttacgacccatcaacaggggaagtgtattgcagagtgccaaatagtggaaaagacgagatcgaagccgcggtcaaggccgccagagaagcctttcccagctggtcatcccgcagcccccaggagcgctcacgggtcctgaaccaggtggcggatttgctggagcagtccctggaggagtttgcccaggccgagtctaaagaccaagggaaaaccttagcactggcaagaaccatggacattccccggtctgtgcagaacttcaggttcttcgcttcctccagcctgcaccacacgtcagagtgcacgcagatggaccacctgggctgcatgcactacacggtgcgggccccggtgggagtcgctggtctgatcagcccctggaatttgccactctacttgctgacctggaagatagctccagcgatggctgcagggaacactgtgatagccaagcccagtgagctgacttcagtgactgcgtggatgttgtgcaaactcctggataaagcaggtgttccaccaggtgtggtcaatattgtgtttggaaccgggcccagggtgggtgaggccctggtgtcccacccagaggtgcccctgatctccttcaccgggagccagcccaccgctgagcggatcacccagctgagcgctccccactgcaaaaagctctccctggagctggggggcaagaatcctgccatcatctttgaggacgccaacctggatgagtgcattccggcaaccgtcaggtccagctttgccaaccagggtgaaatctgtctctgtaccagcaggatctttgtccagaagagcatctatagtgaatttttaaagagatttgtagaagctaccagaaagtggaaagtcggcattccctctgatccactggtcagaagttacgtcaagagagctcttgctgaaggtgcccaaatttggtgcggtgagggagtggataagttgagcctccctgccaggaaccaggcaggctactttatgcttcccacggtgataacagacattaaggatgaatcctgctgcatgacggaagagatatttggtccagtgacgtgtgtcgtcccctttgatagtgaagaggaggtgattgaaagagccaacaacgttaagtatgggctggcggctaccgtgtggtccagcaatgtggggcgcgtccaccgggtggctaagaagctgcagtctggcttggtctggaccaactgctggctcatcagggagctgaaccttcctttcggggggatgaagagttctggaataggtagagagggagccaaggactcttacgacttcttcactgagatcaaaaccatcaccgttaaacactgatctttgctaatggtggagccactatggccaatgcctggctgcaggcatcaattgttcaatgtggtagatgaaaatcatggcatgaattccagctatgccttgacctggcagaaggttatctctagcttatcctcagttcttagtaactttacccactagtgaagagatactgtctattttcaatgtggactcggaaaaaaagacttataagtaggaagacagaacaatgatgccagttgtcaggctcctcccaggttatgttttcatagtgtttctttcatcatcttcattgaactcttgggaatctccagataatcagattatttcatttggtaaattttaaaaaatatgcaatcaggcacagtgcctcatgcctataatcccagcactttgggaggccaaggtgggtggatcacttgagttcaggagttcgagatcagcctaggcaacatggtgaaatcctgtctttaccaaaagtttaaaaattagcttggtgtggtgccctctgcctatagccccagctacttgggaggctgaggtgggaggatcgcttgagcccaggcggttgaggctgcagtgagccatgatcattccactgcatttcagcctgggggatacagtgagaccttgtctttaaaaaaaaaatgctgcaaaaccaaaaataaatagccataatttgccatctttggagagattatggagataatctccttgtctattagccactagcatggctaattgatcattgattggacctcattacataagggggctgtggacgtctttggaatttgttaggggaaggctatgtggtaagctctactaaatgtatctgtacaaggatgaagaaaaacaaaataactactacttttggaggaaacttggaacaagaagagtacatagtttgatccattcctacggtcgagtctaatcaattccatttcttagtgtatgcatctaatgaggcttacaacttgctaaccccaaaagaagcaataaatgttaagcaattttagtaaccagtatggcatgtatcttatttttgaatgcattcctccttatccccatcctcttaggaatatggacgttttactaagtaataaagatttcaaatgct

SEQ ID NO: 18662 - DNA, 1696 bp, Homo sapiens
atttttcaaaaagagaagatctggcccttgatggcaatttagggttattttaatttattaccacatgtgactcccatgagggaaacttgtccccatcagccagccaatgagagacagagcatttacgtcagaagttacgtcaagagagctcttgctgaaggtgcccaaatttggtgcggtgagggagtggataagttgagcctccctgccaggaaccaggcaggctactttatgcttcccacggtgataacagacattaaggatgaatcctgctgcatgacggaagagatatttggtccagtgacgtgtgtcgtcccctttgatagtgaagaggaggtgattgaaagagccaacaacgttaagtatgggctggcggctaccgtgtggtccagcaatgtggggcgcgtccaccgggtggctaagaagctgcagtctggcttggtctggaccaactgctggctcatcagggagctgaaccttcctttcggggggatgaagagttctggaataggtagagagggagccaaggactcttacgacttcttcactgagatcaaaaccatcaccgttaaacactgatctttgctaatggtggagccactatggccaatgcctggctgcaggcatcaattgttcaatgtggtagatgaaaatcatggcatgaattccagctatgccttgacctggcagaaggttatctctagcttatcctcagttcttagtaactttacccactagtgaagagatactgtctattttcaatgtggactcggaaaaaaagacttataagtaggaagacagaacaatgatgccagttgtcaggctcctcccaggttatgttttcatagtgtttctttcatcatcttcattgaactcttgggaatctccagataatcagattatttcatttggtaaattttaaaaaatatgcaatcaggcacagtgcctcatgcctataatcccagcactttgggaggccaaggtgggtggatcacttgagttcaggagttcgagatcagcctaggcaacatggtgaaatcctgtctttaccaaaagtttaaaaattagcttggtgtggtgccctctgcctatagccccagctacttgggaggctgaggtgggaggatcgcttgagcccaggcggttgaggctgcagtgagccatgatcattccactgcatttcagcctgggggatacagtgagaccttgtctttaaaaaaaaaatgctgcaaaaccaaaaataaatagccataatttgccatctttggagagattatggagataatctccttgtctattagccactagcatggctaattgatcattgattggacctcattacataagggggctgtggacgtctttggaatttgttaggggaaggctatgtggtaagctctactaaatgtatctgtacaaggatgaagaaaaacaaaataactactacttttggaggaaacttggaacaagaagagtacatagtttgatccattcctacggtcgagtctaatcaattccatttcttagtgtatgcatctaatgaggcttacaacttgctaaccccaaaagaagcaataaatgttaagcaattttagtaaccagtatggcatgtatcttatttttgaatgcattcctccttatccccatcctcttaggaatatggacgttttactaagtaataaagatttcaaatgct

SEQ ID NO: 18663 - DNA, 500 bp, Homo sapiens
ttatattatttatcgagtttatttacttgtgttcttatttgtctttcccacaagactatgtgttccacatggtgggaactttgtcttatttaccattgtaccccattgcctagaccagtgcctgatacatggcaggtactcaaaagtgcagggtgctctatccatgaaggagagtgtccgcagccttatccctgttctcattcttggcagggtgaaatctgtctctgtaccagcaggatctttgtccagaagagcatctatagtgaatttttaaagagatttgtagaagctaccagaaagtggaaagtcggcattccctctgatccactggtgagcataggtgctctgataagtaaagcacatttggagaaagtaagtaaatttctgccatgtaagttacagaataagttcttatttgaagagaagctcagtacaggcatagcacaatcagactctgaaatattgttagttactaccccatttttgaaaaattataacct

SEQ ID NO: 18664 - DNA, 1208 bp, Homo sapiens
cttcacagtagcgtgataactgaataatacatgtaacaattacatgaacaaattattacaagtttgaggtacatcaggtttaaattaaggaaaaatgtttaaagaattttcctcctcaatgtttcttagggtcgaagaggcgtttatgtttgtttatgaataggtcctcgaaggtaaaacataggctttaacattctgaggccaaggatggagctgtgtctgatttataaagtttcagacgcagtagaacaattgacatgagaaactagtcttcctctgaggctggtgaagctgcagatcagcacacactcagacttggtacagagaaacagaccattctcccattagcctttggtatacttcagtcacctggggtagagtgatttctgtgatttctaaaccttctgtcctactcatcttacaggccatgtccatcctcagaactcatgctttcctttattgtagcttctgttctacgactcctctaatacatttttcttaggagcttcattgagatataatttatatcccataacattcacatttgaaatgtggcatccagtgttttttattgtagtcacagacttatgcaactatcacatcgaattttagaatattttcaccgccctctgaaaaaaactaaataacaattagcagtagctccccgtttcttttctctgccaaaccactagcaactattaatctattttctgtctttagccatttggcattccgaacatttaatacaaatacgatcatttaatatgtggtcatttgttagtttgtttctttttaaaatatgggctttttgactggcttctttcactttgcataatgctttcaaggttcatccagattttagcaggtacacatacttcattccttttttatgcctgaatgatattttgtggtattttttgctgttatgaataattcactgtttggccaccgtaaatatgcatgtataagtcttttggggacatgattttattttggaggatagatacttagatgttgaaatattggttcatataatagatctgtgtttaaatatttgaggaacacttcttgatggtattgtgacacaaatctattatgcatatatgtatgtatttacattgagtatgcttttggtgtaatatctatcaaaggttatgaagatttactgttatattttcttctaagaatttacaattttacctcttaca

SEQ ID NO: 18665 - DNA, 284 bp, Homo sapiens
aaccttggagggacattataaacttttatactttttgtttttcttttgcaatctttaaaatgtataagattaagattttttatttctggagcaaaaactaattgctatactgaatgaactgttgcttttaaaactgttgtttttaaagtctatatgaagagatataaggattactttttatattctgccattatatttgtaataaaagtaactttttttttttgtctgagacagactgttgttctgtcccccaggctggagtgcagtggcgcgatctcagctca

SEQ ID NO: 18666 - DNA, 218 bp, Homo sapiens
aaagtcccacagggattccaagatccacctggtacttaccaagcatcagcccaaacactctggacacggagaggtgtggcgccttttaaaggagacacgtggaattaaatttgctaatcacttctcgtggactgggcgggcactccaactgtatttactgagccaaatgataaagagttgatctctggattcatctgtactcaacatgaagtggtact

SEQ ID NO: 18667 - DNA, 295 bp, Homo sapiens
agagagcattataacatgccccaagggctttggggttgcaggcacccccatctgggcactgtcacacagagcttgctcttatgtcagtgcccagagagtctggccaagtcccacactcacttgctcacattctccctctcacaaggggttgagcatggtaggctgagaaaacatatacccctgttatgagtccaaaaaatggtctgagaaaatcctgcatcactttaattatcaattagactctatctcttttatatttcttaactccctctttccttttattcctgtaataggt

SEQ ID NO: 18668 - DNA, 461 bp, Homo sapiens
gggaagaagcgaggggtgtgcacatgtatgcatatttatgtacatgcatacaataagtacaaatgtctatgtctatgtttaatatattatttatgtggtttcaagttgaattttttactttgttctattttgcttattttcattgttaaattagatttcctgtttgtttgtttgtttgtttgtttcttgagatggagtcttgttctgttttgtttgtttgtttgttgagatggggtcttgttcttttcctcaggctggactgcaatggcatgtagctcactgtaactttgaactcctggactcaagcaatcctcctgcctcagtcttccaagtaactgggacctaagccctttctatttttctcttcattgccaaacttttaagagtgtgcacgcagtaactgctttccagatactcaactgcttaccttaagagccctgaagcctgacttctgtctctct

SEQ ID NO: 18669 - DNA, 490 bp, Homo sapiens
agtaatcagggtctctgtggtgtggggtgggctcaggcaaaacgtgtaacagtggcttaggtattgccagtgcacggccagggttgaggaccactggcctagagttgagggccacagcatggctgccttccagagcccagtgggagctgcagatatatgaaggataaaaggactattaggaagaggagagcaagaccaaatcaaggacattcagatttttaaaaaatcaatgtaggctgggtgcggtggctcaagcctataatcccagcactttgggaggccgaggcgggcagatcatgaggtcaggagatcgagaccatcctggctaacatggtgaaaccctgtctctactaaaaatacaaaacaattagctgggcatggtggcgggcacctgtagtcccagctactcaggaggctgaggcagcagaatggcgtgaacctgggaggcagaggttgcagtgagccgagatcgcgccactgtactccagcc

SEQ ID NO: 18670 - DNA, 394 bp, Homo sapiens
ttctggatagtcatacataaaacactatacagcgatgagagttaacagtctactacaacaggcaaaataaaatagataactcacactaccataatgttgggcaaatgaaaccacactcaaaagagtaggattctacttacattaagtataaaacaggcacaactaatctgtagttttacaagtcaagaaaataccggtagtgatggaaaagaacaagcaggggcttctggtaactttggtggtggtcgtggaggtggtttcggtgggaatgacaacttcggtcgtggaggaaacttcagtggtcgtggtggctttggtggcagccgtggtggtggtggatatggtggcagtggggatggctataatggatttggtaatgatggaaccggaattc

SEQ ID NO: 18671 - DNA, 868 bp, Homo sapiens
aatttttaaattttattctagtttcaggggtacatgtgtaggttggttctataaataaattgcgtgtcttggggcttggtatacatattatctcatcacccaggtaataaaaaatacagaaagcttcacaaatttgtgccatccatgtgcagaggccatgctaacctctgtattattcaaattttaatatatgtcctgctgaagtgagtactggatgtggtttttaaaaagaatttgtgtattcttaggagacgcatgttaaaatatttaaggattaagtgtcacgatatcggcaacctactgtgaaatggttcagaaaaataaagataaagctaatctggccaactgttaactgttgaatgtaggttgcagctatattagtgtttattatggttctttcaacttactggtaaacttaaaatttttattttaaaaaattttttagagatacggtctcactctattgcccaggctgtagtacaatggcaccatcatagcctattgtaacctcctactcctagactcaagtgatcttctccgctgagcctcctaaatagctaggactacaagcatgtcaccatgccaggctaatttttcattttcttggagagatagggtcttgctatgttgcctaggctggtcctgagcttctggcctcaagcaatcctcccgccttgaactcccagagcactaggattaactttgcctaacccccaaattttcatagtaaaaaaacgaaaaaagaaaacttctgaataacttcctcctatcagctattactccatttcctttctccattttgaagcaaaactcttagagctgtccattctccaccctggctaacatggtgaaacccgcctttactgaa

SEQ ID NO: 18672 - DNA, 277 bp, Homo sapiens
tgcagggtttgctcctgtccaccgtgccgtgttcctgtcctggggtatttgggtgtgtggcgtgtggggaggggagaaggagcaaggcggcagggaggggatgaggaccaccctgtccatgggacaggccctgggccccgcacacaccccaagccccgcgtcccgcgtcctcactgtcctgggacaccccccaccccaccccaccgccacagcccagagcggtgccaggaagccgcctcgacgcagccgtatcttgaggctccagccccatccccag

SEQ ID NO: 18673 - DNA, 601 bp, Homo sapiens
tttccagcaggattgagttcttggtgaacatcctcttcctggtctacagagtactgtgttacttaagtggaaaaagtagggtgagctggttctctggcctcttcttttaggggactaattcatgagggctccaccctcatgacctatttacctcccaaaggctccatctccaaataccatcacaatggggattagaattcaacataggagttttgggaggacacaaacattcagtccataacaccaagtacagtccacaaggagcacaactgcccttgggataagaataatagtaatagctaacatatatggagtacttaaagaaagacagtctacctagcacttgacatacattatctaacttaatctctgagactctatgaggtaactactattattgttttaagtaaaagggtatcaaaaccttgacaggtcaactaacttttccaagtagcatctagtaaatggaacagctaagctagatttgctggattccaaagccccagcttttagccaaaccctctgtagatctacatatcattattttttgtttcccagtcatgagaaattccattgtaaataaatatgcttccacttgaaa

SEQ ID NO: 18674 - DNA, 462 bp, Homo sapiens
cacttaacatatgtccaccaagtggtatgtacaagaatatccacagcatctttattcataactgcccaaggacaaacaagccaaatgtcccatcattaggagaatggatgaataaattgtggtaaaatcataaaagggattactacatagctataatcacataattgatgaaaaaaaggcatgattccaattatatgaaggtcaaaaacaggccagatgactctcaagtgacagaagtcagaatagtggttacctcaagggatgggggcttctgactaggaaggtaccagggaggcttatgtggtgatggaaatgttctattattttgatctgggtggtgagcacccaggtacatgaatgtgtaagaattcatcaagttgcacagttaagatctgtgcatttactgtacacatgttctacctcaataaaaaatttaatatcatatcttaaatgtatcaagcc

SEQ ID NO: 18675 - DNA, 173 bp, Homo sapiens
acctgaggctgggtaatttgtaaagaaaagaggtttatttggctcatgttctgcatgctgtacaatcatggcaccagaaacctgcttggcctcaggtgaggctgcaggtaggttttactcatggcggaaggtgaagggggaacaggcgtgtcgcatggcaagaggggagcaag

SEQ ID NO: 18676 - DNA, 413 bp, Homo sapiens
ctatatgatctcacttatttgtaggatctaaacaaaacaaaacgaaatgaaacttcaagtacatggaaacagagaatagaagagtggttaccaggaatgaagggtgtgggagaaatgggcagatggaggtcaacgagagtataaaatttcagttatgtaggacacgtaagcacagagatttactgtatagcatgaggactgtagttaataatattgtatactggaaatgtgctaagagagtagattttaggtacttgtaccacacacatacaaagagtaacagtgtgagatgatggatatgttaattggcttgattacagtaatcatttcactatgtgtatatatatcaaaacatcatgttatataccttaaagagatacaattaaaaaatagccaatgcaaaaatgcaaagt

SEQ ID NO: 18677 - DNA, 706 bp, Homo sapiens
  misc_feature (540)..(540): n is a, c, g, or t
  misc_feature (549)..(549): n is a, c, g, or t
atatgcaagtcaatagatgtgatacatcatatagatagaattaaaaacaaaaaccatatgatcatctcaatagacacagaaaaagcattctataaaattcaacatccctttattctaaaaccctcaaaaaaatacacatagaaggggcttacctcaaaataacaaaagccatataaggtaaacccacaggcaacattacgctgaatggcgaagagtttaaagcattccccctgagaactggaacaagacaaggatgcccacttttaccgcttctattcaacataatactggaagtcctaaccagagcaatcaaacaagggaaagaaataaaaagcatctgaagtggaaaagaataactcagattgtcacgattcatcaatgatatgataatatgcttagaaaaccctaaagactcatccaaaaagctcctagatctcataaacaaattcagtaaggtctcaggctacaaaatcaatgtacacaaatcagtaggcaccaacaatgactaagccaaaaataaaatcaagaactcaatccctnttcaactgntgctgaaaaaaaaaaaaaaacctatgaatatacttaatcaaggaggtgaaagacttctgcaaggaaaatgacacagcactgctgagagagatcatagatggcacaaacatgtggaaacacataccatgctcatggatgtgaaagaatcaatattgtg

SEQ ID NO: 18678 - DNA, 323 bp, Homo sapiens
ccagtatgaattaagagaggagccacttttaaagtaatcctggagaaacagttttgttactttcaagtatatataataacctgaacagactagtggtgtcgtttacatacagattttcagtgaatctatattaatgaatggataagtgtctagagactgagctggcagttaatagatctcaagatacgcactttctctgtagatgttaggtactgatgatagcctcaaagatgttttaacaaatgagacaggctattcttttggttggatatacagtttgccctccatatctgcaggttctgcatccatggattcaacctacc

SEQ ID NO: 18679 - DNA, 486 bp, Homo sapiens
attgggataaatgcttgagggaatggataccccattctctgtgatgtgcttatttcacattgcatgcctgtattcaaacatctcatgtaccccatgcatatatacacctactacgtacccacaaaaattaaaacaaagcacggccgtttgtgcagctttgcatttccatgttctgggacttctctcttgtcttaaatcactttcctctgcacaagagtggcatggcccacacaggacgagctccctgcctcctctccccagagccaatctagatagaaacacggcgacgcagctgttgtcacacgcacccatgccagaggctgcagacgatggctagacctctacaaagaggcattttccaagtgatcctgtgaccccacgcagaatgatggtccccgcctagatatcagagcgttcctcacactgcaccgagctggcccatctcttcctcagtttgcactccctgagtgacctgtcttattcacc

SEQ ID NO: 18680 - DNA, 389 bp, Homo sapiens
ggccccagcctctttttctttcctcctgtaacttgtgtcctgtttctgatttctcaccaattatgccatctgcctgtgcccttggtaacatctgggtattgtgtgtgctgcagacctcacccatgtgagacaggtcccctcactcgccggccaccagaccccagtgtagtgggcgtctccagcgtagtgggcgtctccagtgtagtgggcatctccagtgtagtagacctctccagtgtaccaggcctctccagcccacactctctgagatgtaagatcacgtagttctcaagtatttattggcttgtatttttctctttgtgaagtgaattccaatctagtagctgcagctatgtacgaataaagaagggtttatttttctgtccgta

SEQ ID NO: 18681 - DNA, 188 bp, Homo sapiens
ggggagctccctattgttttagtattatgaatagccaagtatacttaccaaatattagaattggtaaatatttaggttttttatgtaaggggataacggaatgggaaggtattgctgacttttcagataagctcctggttgtattatgaatgcagggaaatctccttttattagacatcaaatccttc

SEQ ID NO: 18682 - DNA, 399 bp, Homo sapiens
tactttccctctctgattttccagtctttgttacctgtaaatgtaacaatgcctttctctatgttgttgcgaagtccacataaagtgacatgaaattgattataaaatacaacacaggctgggcacagtggctcacgcctgtaatcccagcactttgggaggtggaggagggcagatcacttgaggttgggagttcaagaccaacctgactaacatggagaaaccccgtctctactaaaaatacaaaattagccaggcatggtggcacatgactgtaatcccagctactcgggaggctgaggcaggagaatcgcttgaacctgggaggtggaggttgcagtgagcggagatcacaccattgcactccagcctgggcaacaagaacaaaactccatctca

SEQ ID NO: 18683 - DNA, 749 bp, Homo sapiens
agtttaaccagcttaattaatgatttttccagtttgaagcacttattttcccaatgtgaataaagggaaaagatcagcaatttgtccctggcctttttcgaggccatttttagttttctgcccccatttcccagtcctggtataaaatgaattacgggtatccctctaagtccctataaccctttttgggggtcacagatatctttgataatctgatgacagtgtgatggatcctctacccaagaaaaaaaaaatgcccatccctggataattttgcatacaacttcaggggcatcacacatcttctgaaacccaagttaaagatctctgctctaagtaaattgtagagaattttagtgcaaatcgttgataaaattaggaaccaactattggcttaaaacctttcatattggaattattgttagatggtggcccctactagcaaaatgtgacattgcaaccagcttcgttagacattataacaaccagagagaagggaaaaaagcaaagttctgaaagctatttataaggagtcagggcatctctagacatgggagccttcctggttcaaggcaggggtcagggtgcctgacaatttctagcagggtagagtttgataaaccacaatgctcaggatgccaaggggttagccattatcttaaccccttcctcaccaaaagattttagttttgtctgttgggaaacaagatgtcactagggaaaaaaagatttgccttacaactttgctg

SEQ ID NO: 18684 - DNA, 170 bp, Homo sapiens
aaacactttacttttttttaaaacaatccttgctctctggagatattttctcacattttgttacaaattttgtgtagaagcatagccacagtggattttttctggctctttttctttctctgagacgttaatgtccagtagagcaaagctagaaggatatatatatatat

SEQ ID NO: 18685 - DNA, 407 bp, Homo sapiens
gaaacaatagtcatgtgctgacccagctagaaaatatgatgcacttgataagacacagtgggtgaggtctgagaattgttgtcttagtacttacctatccagtccccaaggtcagctgggaggttggaataaaaacaatccaggatcatcatgacaggtttagtccagagctctccaccgccatcagcagcaccaccaccttccccttgattgctccaaaggtcccaaattctgtgggttggagttgaaatgcctcaataagcactagcatttgcagaacagtctcagccaggcattctctgtgccttctctcaagaggtagtgacctggtaactcttcaaacctccttgcaaagagctgctcagccacagtggatagattttgcccctcctggtagccttccactc

SEQ ID NO: 18686 - DNA, 451 bp, Homo sapiens
tatgggcaggcaaattctcaaactttttggttagaactaaccccattgcactcttaaaaattactaaggacccctaagaatcttgatctatatgggttaaatctatcaatatttaccacagggcaattaaaactgaagcatttttgaaatgtttatttattttaaaacaataataataaacccattttatgttaacataaatagcatacttataaaaattattatactaaacaaaatattgagaagaatgtcattatggtatatttctgcaaatctctttaatgtgaggcttcataagagacacgtagaatcttaaatctgctcctacaattaatctgtgacaatatcacactgttcatatgtcaatgtagcctctggaaaactccactgtacactcattggagaataagagtaaaaagacaattaatctcttaaaattatagattattat

SEQ ID NO: 18687 - DNA, 395 bp, Homo sapiens
cccaggcaagagtacagtgacacaatcatagctcaatgcagcctgggactcctgggctcaagtggtcttctggcctcagccccccgagtagctaggccagaagctactgtgtgttatgcccggcttattgttattattattagtagtaatagtagtagagattggatcttgccatgttgcccgggctggtttcttgctatattgcccaggctggtttcaaattcctggcctaaagcgatcctcctcagcctcccaaagtgccgggattacaggtgtgagccaccatgcctggcctcagttatagtatataattggagtcccacaggagaaaggagagatgataatggctttttttcccccaaaaccaatgaaagataccaagccacagtttaaag

SEQ ID NO: 18688 - DNA, 420 bp, Homo sapiens
gaacaccaaggttgcggcagacaccagaagctggaagaggccaggaccgcctctcccctaacgccttcagagaaagcacagcctggccaccaccttcatcttcgatttctggcctccagaactgagagaatgaatgtctattgtttaagctgccagtatgtggcactttgttacagtagccctagcaagctaacattcagtatgtctgaagggtagtcaagaggaagctagaaattaagatgtcggcccatgtttggagtggatttaagccaaacagcgtactatgtgtgccctgctaaaaattataataacgagaaattgttacagcctaagagtgaccccaggatttgtaactgacgttgagtgcccaagaactgcgtgataagtctattaagataaaattatttcaagtcctcactt

SEQ ID NO: 18689 - DNA, 112 bp, Homo sapiens
gcgcgctccacagcctgtcgaaaaacactcgggaagcaaacattgagaagaaaatactccttctgtgggcctttaggaaaaccgagtgacttttttcgtgaggggaacccat

SEQ ID NO: 18690 - DNA, 258 bp, Homo sapiens
gggggcggcaccaggacaaggtgggggcagcccagtgtgcatcccttcctgtctaacccttcgtcactcggctggtccaccaacaagaactgcttaacctggggctgattctgtgactccccatttgaccacttctctgccctagagggcagctgagagagaaggaaggaaggaagtagattctctttggtccttgttcccggcttgggtaagagaaaggaggtgttcgctcctcctgagccaggccctggccacccc

SEQ ID NO: 18691 - DNA, 198 bp, Homo sapiens
ttttgcagggacaatctgttggtgagaaactcccttaatttttccttgtgtgagaatgtctttatttctccttcacttttaaaagataattattctggatacagaattctaggttgatgggtttggcactttttttttcttaacactacaaatattgtagtcccctctcttcttgtttgcattgtttctgaagagatg

SEQ ID NO: 18692 - DNA, 367 bp, Homo sapiens
actaaaaataaaaaaattgccaggcacagtggctcccaaagtactgggattataggcgtgagccgccacatgcagccacacagatttattaatgtgggaagcctgctctgcttgtggtaattgctgttctgtgccctgcccctccccactccccttggcccttttctgtcagttagcaccaaagggctcctaggctacttctcattttcttgttctataaaaatgtggttgaaatccattcagctctttccaggccttccaggaggagccctccacaggggtatttgcacgcgtcagcttttttgcatgttcaactttaacaagagtttgacttctcccagaatttgactctacagcaagctttcct

SEQ ID NO: 18693 - DNA, 343 bp, Homo sapiens
caccagcaggctcccatgctctctgtgtcctttcacggaaaataatatttcccttggagggtgtgtaggttttaaattgggtgatcgtaaaagcatcggcgcatagagtgtagttcagtacatgttaattttctttttttccatccaacctctctttgattttatttgatttttaaaaatctctttagctgggcgcggtggctcacgcctgtcacccaccactttgggaggccaaggaggccagatcacttgaggtcaggagtttgagactggcctggccaacgtgatgaaaccctgtgtctactaaaaatacaaaaattagccaggcatgttgacccaagcc

SEQ ID NO: 18694 - DNA, 868 bp, Homo sapiens
ctggactttggccactacgtatctcacaagaatagaatacaaatagcgaagcctactgttgataccaaacctccagtggcgcacacaaatcacattttaaaattgagcaaactacagggtgaacaaaagaaaatcaacaaaatcgagtatgaaaacaagcaactgtgtcagaaaatcgcaaatgcccatcgcggccctgccaaggtggattgctggaatgaatatttttccaagagcttaaacagagaaacaaggaaccgcgagctagtgagaatcaccatggaaaaccagggcattctgaagaggcttgttgatcgcaaaccccactatgaccgcagggcatctgagatagactggcagaattcaaggcgctatatcagaaataccacgagatatcttctctcccaaaatgaataggttactcaccatggaaaagatacaagagaaggccctaggatttcttggctgctcaggatctcaagacactcccgactggctgaatgctccatcttcagatgcttcaataaagcttggaacataaaatgcgtaagttacatttaggggacccaaaggctttatgttctcattccaaaatggggcaggcagaaggaaagatgcaatgagcatttttatttggggctatgaaaagaagttttaacgagagagagagagagaaatctgagagaactctttaaaacatacaccatcatcaccatcccgtggaagaagaaaagctggggtgagatcatccagccacaagtacagcactgtcaaaatggaaaacgaaatcacatgacaacatcaaggttcagaaaacacaaggaacaaatgccattagttcctctgtgaatacacacgatcggaaaag

SEQ ID NO: 18695 - DNA, 826 bp, Homo sapiens
tgtcgccagccgtttgtgatttattcacagggagaccttcccccaaccagaagttctcaatcctggttttacattataatccttggggaattttaagaaaatgccagtgtgcacggttcacctcagatcaatgaagtagaatcttctcatgggcaacagggttgaggaccactgatataaacctgcgaatgcggtgcatgtttcccggagtgcagtgcagaccaacaggctgtcccaggggcctgtgggctcagcaggacagtttactccctgcacttagacagtctggcatttatgatctcatgacttcatctcccccactcgtcaagatgagcatttccttcttcacccatttcggggttttgtgtttttcaggttactcaccatggaaaagatacaagagaaggccctaggatttcttggctgctcaggatctcaagacactcccgactggctgaatgctccatcttcagatgcttcaataaagcttggaacataaaatgcgtaagttacatttaggggacccaaaggctttatgttctcattccaaaatggggcaggcagaaggaaagatgcaatgagcatttttatttggggctatgaaaagaagttttaacgagagagagagagagaaatctgagagaactctttaaaacatacaccatcatcaccatcccgtggaagaagaaaagctggggtgagatcatccagccacaagtacagcactgtcaaaatggaaaacgaaatcacatgacaacatcaaggttcagaaaacacaaggaacaaatgccattagttcctctgtgaatacacacgatcggaaaag

SEQ ID NO: 18696 - DNA, 1007 bp, Homo sapiens
tgtcgccagccgtttgtgatttattcacagggagaccttcccccaaccagaagttctcaatcctggttttacattataatccttggggaattttaagaaaatgccagtgtgcacggttcacctcagatcaatgaagtagaatcttctcatgggcaacagggttgaggaccactgatataaacctgcgaatgcggtgcatgtttcccggagtgcagtgcagaccaacaggctgtcccaggggcctgtgggctcagcaggacagtttactccctgcacttagacagtctggcatttatgatctcatgacttcatctcccccactcgtcaagatgagcatttccttcttcacccatttcggggttttgtgtttttcagcttaaacagagaaacaaggaaccgcgagctagtgagaatcaccatggaaaaccagggcattctgaagaggcttgttgatcgcaaaccccactatgaccgcagggcatctgagatagactggcagaattcaaggcgctatatcagaaataccacgagatatcttctctcccaaaatgaataggttactcaccatggaaaagatacaagagaaggccctaggatttcttggctgctcaggatctcaagacactcccgactggctgaatgctccatcttcagatgcttcaataaagcttggaacataaaatgcgtaagttacatttaggggacccaaaggctttatgttctcattccaaaatggggcaggcagaaggaaagatgcaatgagcatttttatttggggctatgaaaagaagttttaacgagagagagagagagaaatctgagagaactctttaaaacatacaccatcatcaccatcccgtggaagaagaaaagctggggtgagatcatccagccacaagtacagcactgtcaaaatggaaaacgaaatcacatgacaacatcaaggttcagaaaacacaaggaacaaatgccattagttcctctgtgaatacacacgatcggaaaag

SEQ ID NO: 18697 - DNA, 278 bp, Homo sapiens
gattaatgaaggcatttgtcaaaaagatttgtaaaatgactgtgaattccttaggcattggtatttgagatgtaaaatgaaaattaagcacatcatatctgtttttcaagaagcaatagattgataaatgttatcctgccattatactttgggtaagaaaagtgtgtctcattgattcattcaacaagtttatttacacacatatttgcctgccatgccctgtgctatgcacaagggatacaactgatgatcgatattatgtgtgaccccttagaagg

SEQ ID NO: 18698 - DNA, 414 bp, Homo sapiens
aactgtcattatttccaggtgatgtgattgtttagcatccaaaagaatctacaaaagatttatgagagtcagtaatgaagaaatgctggttgtaaggttgatagaaaaaaacccaattatatgttcatataccagaaacagaaaatgaaaacttaaaattatgatatacggtagcagaaaaagccctgtaaatttgtaggaatgaatcttaacaacaacaaaagtaaaaacaagtaaaggcacaatcaaaaaagctctacatttttgaggctagacatggtgtctccagcctgtaatcctagctctttgggaggcttaggcactggggtggagtgggggtgaggatggcttgagtccaggaattttgagatcagcctgggcaacgtagtgagacctgatgtctacaaaaaagtt

SEQ ID NO: 18699 - DNA, 357 bp, Homo sapiens
aaattagagttaaatactctttatagatagttacttaagaacatcaaactgtaatgtgtggcttagagtatccataaaaataccttatctggtctatattgaaagtgaataatttactcagtcagcagttattcatttaataatttaatttgattttgtatgtttaaatgcttaaagatttcgctacaaaaaaaccccacaaaaaaacctcaattgtaaggaatcttaaatcttaggtgttttatggtttttggcaatttttataaagcaaacaaaccatggattagaagaaatcaattttacagaaaaaggtaattagtgtattttctggatctggtatcttccatggtaccaagt

SEQ ID NO: 18700 - DNA, 388 bp, Homo sapiens
cagggaaagaatgaccccagccccctgggaaaatgagggctgaaggtggtggcgatagagaaggaagaacagatgtttaggaagtggagtggaagggctgaggcagagtaactgtgaggttaataaagggggtgtcaaggaggatgcccacagcctgacttgatgaatgacctgggtggtgggtttatgagtcaacgtaggggatttatggggaagaaggcgtgggtttgagggaagacagaatgatggttaacacttgtcgcttaccatgtgccaacgtctgctgacatgctattctgtactctccgtaacaggcttctgggtgaggtgtccattagtaatgccctcattttataattcagggagtgagttaattaatgtgcccaag

SEQ ID NO: 18701 - DNA, 973 bp, Homo sapiens
ggccattggtgggagggtccctatcagtcctaaatcatactgtggcacaaaggaaagagaaggccagctttgaagcctgtggagatcttgtccaagtcactcttctcctgtgagatggtttcccttcctctgccaaaagcagagtttggatcagatagaagtaattctgcttgcagagttacgtagacgattcagcgatgattatagcacttcagcaattccatcaaataagcccacttttttttcacccccctaaagacgggctctcactattttgcccatgctggtctcagactcctgagcttctcccaccatggcctcccaaagtgctgggattataagtctgagccaccacacccagcctccagacacacttagtattagcaacaaacactgatactgtttggtcttgaaagtgacggtcagtgcccactactagtccatgcaacaaggctagaggttagaaaacttgcttagggcagactggccacaggaaagggactgttgaagggaccactggaagaccaggtacctctagcagcccagacccatgtatagggcagctgatagagtgccagtggcccagcatctggggggtggttagtagtgatcatgagctcaacaggggcaaagcccagggggtccatctgtacctgttttgcccatcagataccaattgggaactttatcttctcttgaaaccatagcctgtaaccaggtcaccatgattaatgtgcatataattagcaaagtacagagaagccatagaaattccctgtgagaagatgcaaaactcagtgtgggaaagcagagtcctcaggaatacacggaagtgggaggaacccggggcttacctcacacatcttggccatagccgggaatatcacaggcaggccgacaactgtgtgacaaagggctgtcttctaatcacacaaccaaatggcaggagaaccaccctttctccatcacctgc

SEQ ID NO: 18702 - DNA, 693 bp, Homo sapiens
tggcaaaatacatgatcgggaagcagtctgaatttaatcaaggggatgtaccattccattgtttatgattatgatctcatggattaggttgggggttagcaaactgcctgcaggctgaatctagcctgatgcttgttcatttatatattgtctgtggctgctttcacacaatggcagagttgaatagttgaggcagagaccatgtggcctgcaaagtctgaaatatatctggcccttcttttacagaaaaagttcgtcagtccctgaaccagatcgtctgtttaagtggagctaaaaagaatggctacgagattaatttttaattattggtctatttaagtaccaggtacacaaatacatttttgtcatattttcttcaaaatttcagtttgagattggagcatttgtataaagatgtaagttaataccattactcagctcacatacgatagcacttaagtggttttcttttgctctcaaatactgaaaatactaatctaattgggtttgttcaagatttttcattgaattgtggggaaaacatttccccagagtctggctatcactgatcagtttgtagtgcccttcatcccacaagccactgtcatacgtaaagggatttcaaatctcttaagttccagccctcgacctccccctcctgatctctgcttcttcctgtcctctggacagttt

SEQ ID NO: 18703 - DNA, 405 bp, Homo sapiens
atctgattatgtacccatttatgaaaacaaacgcttacccatgggaattctgttctaaaatccagttaatgtagttcagttgttacattgcctttttagtgtgttaccaagaaaaaggaaaagaaataaaaataactgaaatattaggtgcaggctggctctaataattagaaagggtgctctagcatgttgcgtctcagtgtgttatccagtgaccaggtatgtcagcacctcctgggagcttatgagaaatgcagaatctcaggctgcaacccagacctcctgagtctgaatctacattcaacaaaaactgcaggtgactggtgtgcacatttaagtttcagaatagccaagtgcatgtcaaaacattaaaataaaaatcaggagatctggtttctggttcta

SEQ ID NO: 18704 - DNA, 563 bp, Homo sapiens
gttactgtaactttgtagtacagtttgaagtgggtagcgtgatgccttcaggtttgttctttttgcttaggattgtcttggctattcagctcttgccactttttaaccatatgaacacgttatcttaaatactctgagcctcagatttttcatcagtgtaatgggaagactatttcccttacaagactgtgatgaaggtggactaagatttgtgtgtatctaaggcttatcatagcaccaaggacaccgttaacttgctgtatttggctgtatgctcctttcccctaccctctacacacccagaatggctctttgataaatagtgacttcctagtaatgatttaccaagaaacatggttagagtgaagagtagatttgctagaagttctcttgcgtggtggtgatttgaattcatttccatctgtaaacaggattccttggaccagtcttggagtacagcttcatatagttgctttaggttttataaacctaccttttaaaatagcctttgcctctctctacattgtctgcagtaaattaagttacaatattataatttaata

SEQ ID NO: 18705 - DNA, 376 bp, Homo sapiens
agaagtaaagaaaacacttgcatatgtttctatttgtgaagcagatacatattgtgaagttcattgtaacagggcagatttgtagcctgttaatattctcgttacttaagaccattaacttttccatctaataaaattattagaagcatagatttgtgtttcagcatatgacaaacatcaggcagatagatgtctgatagcagtcagtgcttgtaggtattctagttgatagtaatgacaaatcttttaaaaagtagatgattaactacagtgatgaagatacacagaaagacgatgagaaacagcatgagcagatagaaaaggaaagaaatagaaaaaaaaaaagtcgacgcggccgcgaatttagtagtagtag

SEQ ID NO: 18706 - DNA, 422 bp, Homo sapiens
gagaaaattctgggagttgcataccggccagtcttattctctaaagttgttccttctaaagggtgtgatgaccgaaaatttcagaaaagcaaaccaccgctgaaaggcaacgttatttctgttggcagaaggcggcctgagcaatctagattttccacggttcaccaattagtttttaaggaaatatggctgtgagaggaataaaacatgattcctacctttaaggaactcagagaagtgaattaaaggaagtcacagatcagacaaccaaccacacaaagtttctaagagcaaactgttcaggtcggcaagtcactcttatccactgttttgccttctaaggtttcagttactctcagtcagtcatggtccaaaaacattaaatgaaaaattccagaaataaacaatacacacgtgttaaa

SEQ ID NO: 18707 - DNA, 446 bp, Homo sapiens
caaaggtgttgtgctatgtaagtaatgtacttattatcacatatgcgatgcaaatggatgcaacattctacagaatacttcgggaaaatagagaacgtaaaaatgttctgattttaatcacaaaataattctattcagaagttagccacgagagggcagcattgtctacacaaacacagaatggcgactgcatttgaacctcagacattttcgtgaggctgtttcaccatttggtttcaatcacagggaatgatcatagaaacagcatcattgatgcttaaattcacagtttttaaaataaaaactctaatctcttcgtctgcgcaaccattaggacaaggctaaatatcgtggaacaatgacacatatttttcttatatttctctgtcttttccagcatgtcttctttacgctctacgctccgtttctgtagtttacttactttg

SEQ ID NO: 18708 - DNA, 468 bp, Homo sapiens
gaggaagctgaggcacagggcatttcagcagcatactcaagattctacagaacgactaagtagcagagccacagtttgaacccaggcagcctggccccatggccagtgcccccaattataatatgaccctcccaggtactgcccaaccctacccaagtaccgaataacgagggatggagttcaggccaccttgcaggcaaagtcctctgccagctcgtggactgccccttgggtcacttcgaatacatcggcatagacttgcactttgcagtgcccccacccccaactcagcagcccacagtcaggctggcaaacagcaccgagacattgataatacagggggtatgtgtgtcaagggcacggggtgcctgtgggcagcttgcccaggctgtgcatggtggcgaggcctggaaggttttgcaagggcaaggcttgagctaaatcttgaaggaggtttagatgttggtc

SEQ ID NO: 18709 - DNA, 252 bp, Homo sapiens
gtcctggcacacagctggccctcaatatctttgaatgaacttagtcaaaaccactttgtaaatataaataaaatggttcctctgctatatatgcaagccaagccgccatagtggaacatttctgagctccttgccattcaaagcatggtccaaggaacacccgcagcaggatcttctggaagcccactggaggtggaaactctctggccccttcccagaactgaatcagaatctgtattccaacctaagtga

SEQ ID NO: 18710 - DNA, 421 bp, Homo sapiens
ccgtgcttccagttttaaacctgacttgcagcgtcaccatcaggatgttaactttcttaagcctttttctgtggctacactgacactcattagtacgtgatgaaaggtaaaacatctcatacttgaaataattggtgggagttggcatccgtgagtcaggatggacactggtgttaaggctacagctgttactaagtcccctcatttagctgggcattcatcttttagttactaaactatgagaagactcaggggttccttggggaatggcaggaggtggggttggtgtaggacaagcactaggaagactctgggggcatctatttaacaaactaaatgaaaacaaacaaacaaacaaaacctcctttaccttcacaacacttctgacattctgagacccaagtgtacgtgtttttcataa

SEQ ID NO: 18711 - DNA, 1046 bp, Homo sapiens
gtttctagacgaagggcatataccagttaaactccgccattttgcctctcagtgttcaagcttgagcccacgcatccaactcctgagatcttactgggaagctgctgatcatcagtttcagggaagtcagcatggatcagccttacgttcatggcctccaggccctattctcctgcctcacagggaccggccaggatctctatccttacagcacgttggaatgtatatgctcctctccccacatcgccttagggagcaggcaggtgtcaggggcagcacaaggacggccaacaggacaggtgcataagtaagactgatacaatttgagggctcagctctgagaatactctaaacaggatccaaataacattgttgcctcctaaccagcaggtgggagctcaagagaaagactagacttgttccacattaaataagtaatagtattttttgccttgaacatcttgatcataatatcaattaaatgtgtggccctgattcaatagctaccatttattgagcatctattttgtgccagacttgctgctggtatttgatagtgcagtgcctgacaagtagacacactggcttaaatgtcattgttactggtattattgttacaatgatgttttaatcctcccaatgtaattaagcctttatcataaagatcataagatgttcactttacgttatttccttgtccttttcttcctccgtgcatgcttgcttgcacaagggaagtcactagtaattgattaacttcctaccctaacccccagggctgcctgcaagattgatgaactgtttttctttcaaagaacaatgatccttaggtcatgcagacctccttgatagcatctaggagtttgtttgggccgaggaactcaaacagttttgagtattgggggaatccatctcctgcatacctgctttgctcataaaagcccccagttatgttaaaaggcagattggatttgagaggctgcttctcctgccttcttgctttagccgagtcaaataaaccttcctctgcttctaagtgctgatgt

SEQ ID NO: 18712 - DNA, 714 bp, Homo sapiens
gtttctagacgaagggcatataccagttaaactccgccattttgcctctcagtgttcaagcttgagcccacgcatccaactcctgagatcttactgggaagctgctgatcatcagtttcaggaagacgggttgaagatccgagaggctgagtcacttccacaaagtaacacagctgattttaaatgcctgcattcagcatccctgcagcaggctccaggtggaattctaatgggaccagcctccagtccctggaccttagccgtggaaggagagaagaggacatctgcacctcctctcagagaaagcctgatgcctactaaaggacttgggtggtggacgcagtgaccctcagtctggagcttgttcactgaacattggagactatcatttgcgcagatggtcttgggcctctatgagcagcaggctgcaccccacagtgacctcctcattctactctgaggcatcttcatgaaagcagatgtccattgaaaagcacccaagtgcagtctcagctgatgaacttcagaggcgattgagacaaaggctctcggtcccctctgcccttggatggtgcctctggtatgcacttggcctctgtgtctttatttagactggtcacttcacaacccatcatgtcaccccacccctaaccgtgcccactctgggtcctcccctcaactgcctgacttcccactttgagctcagcaaaggca

SEQ ID NO: 18713 - DNA, 914 bp, Homo sapiens
acaaattcccctcatgtttttatatgtcattcagttagtcacatagcaacaactaaagtctggcaaaagcacatgctcactaagctaatcattcagctgtaatactagaaaaatcatgacaaccaaactgatttaaagagctaagataaatagcttggccccatcttcaaaaccagatttaaaaaacattctactgaattccttgtactaaataattcatagtatgaattttatcataacgaagttgataaggccttatggaatacaggctagtacttggaaatactttcattagtatgaattatttatggtaaggtcatttgtttttaaaagcctttggtctgtaacaagtactcaataacagaaaaatcacacacaaaaaatgaaaaacacatttaaataaaagaaaaatttaatggaattttcaaaattaacacatggttttacatttaatccttatagaaagacttatcaactgctcatatttattcatttaacaaatattttttgcatacctactctattacagacactgttctatgcattgattattcctgaactttcaaaatcctctcttatttacatactacagtttacaataaaccataaagtagttttaaaagctttcctaacaggcacggtacagtgcctcatgcctgtaatcctagaactttgggaagccacggtgggaggctcacttgagtctcagagtttgagaccagcctaaacaacacaatgagacccccatctgtacaaaaaattaaaatattagcccagtaaggtggttcacacctgtggtcctagctacttggtcagtaaggtgggaggatcacttgagcccaggaggttgaggctgcagtgagccatgatcctgccacaatgctccagcctgggtgacagagcaagaccctgtc

SEQ ID NO: 18714 - DNA, 671 bp, Homo sapiens
tggtttaggcatattttatatgtacatgtcagcatgtctaatcagtacatctgcacctttattataagtagaagagttaatttgctattttaggcacatcataccaactcttaaattggtcagatgaccccttgggaaatgtcctgaatccctcatttaagttttactttccaagttaggtgtttagttcattcttcatatgtgatagtgaaagtaaaagctttcctgactcgtaaggctgacattttcttgttagggaaagagactcgatagcaaggtaaactaacagtatttcccaaataaaggcacacaggagaaaataatgaatcaatagaatctaattaaaattactaccccagggaataaggagtattgaggatttattttattttgaattggttttaagtatggaataatcatctttacagttataaaaaaattagtgtttacaaaatgttgggcatttctgctttgacaaacaaacaggtaagtcccgtggccttcagaggcaggcagcagtagaaactttccaaaaagtaacaatttctctggatttaacatggaaatagaaaaatttaaagaataattaaattaaaaaaccatggtaaatgaaatgtggtgatgatatacagtttcggatgttaatgctagttgaaacttctaaaactagc

SEQ ID NO: 18715 - DNA, 944 bp, Homo sapiens
  misc_feature (827)..(827): n is a, c, g, or t
gatgagcattttttcatgtgtcttttgactgcataaatgtcttttgagaagtgtctgttcatatccttcgcccacttttgatggggttgttgtttttttcttgtaaattgtttgagttcattgtagattctggatattagccctttgtcagatgagtaggttgcgaaaattttctcccatttgtaggttgcctgttcactctgatggtagtttctttgctgtgcagaagctctttagtttaattagatcccattgtcaatttggcttcctcttgggagggtagacagacctcacaatatggaaagacgggacaacctatggaactatctgtgacttccatgtaccaagacaaggacgctatagctagggtagtgagacctagaagagagaaaccagaacaaagcagacaggctgtcctcttcctaattccatgccctgacatcagcccctattttttgcctttagctgtcccccagtttccaacccaatgggaccagagtctgacttccctttgccctttcacagtgtctcagcctccatctgccttgggctccgcctggctccccatctaactcttcccagttttttgtgtaaatggagcatattttatgtgcgaatattttagtaaccgtatgttctgcaagtaaacctgtgttaatacttgtcaacaactgcagagtttatgatacgaataattcttcctacaatgaagaaaaaaacacatttgtttgttttctaagaatgtttatttgtaaacatatgtattcactatattaatatgaatttcttacctggataaatgattttgggaaaaaaaaagggggggnaaaatcccgagggccagttacgaccggttgtaaagggccaagggaataaaagaggggggacgggggagggggtgggacttggggggaaccaaagggaaagtgggtggggtgaaaagt

SEQ ID NO: 18716 - DNA, 399 bp, Homo sapiens
  misc_feature (6)..(6): n is a, c, g, or t
  misc_feature (16)..(16): n is a, c, g, or t
  misc_feature (128)..(128): n is a, c, g, or t
  misc_feature (141)..(141): n is a, c, g, or t
tttccnggattaaaancctacatggataatgaaataaccagggagtttccattgtttaaagtgttgtcagcccttgaacaaggtttcctcataggcctatccttttgaagactgtgtcacatgtctantatgttgtaatcntcaagatttttatcagtgatttggatggagcatattttatgtgcgaatattttagtaaccgtatgttctgcaagtaaacctgtgttaatacttgtcaacaactgcagagtttatgatacgaataattcttcctacaatgaagaaaaaaacacatttgtttgttttctaagaatgtttatttgtaaacatatgtattcactatattaatatgaatttcttacctggcaataaaactgattatatgtgaggctgttggga

SEQ ID NO: 18717 - DNA, 2934 bp, Homo sapiens
aaaaaaaaaaaaaaaaaaaaaaaaaaaaaaaaaaaaaaaaaagctcgcccaccgcccgccccagcagtggctgcaccatgcacgtgaacggcaaagtggcgctggtgaccggcgcggctcagggcataggcagagcctttgcagaggcgctgctgcttaagggcgccaaggtagcgctggtggattggaatcttgaagcaggtgtacagtgtaaagctgccctggatgagcagtttgaacctcagaagactctgttcatccagtgcgatgtggctgaccagcaacaactgagagacacttttagaaaagttgtagaccactttggaagactggacattttggtcaataatgctggagtgaataatgagaaaaactgggaaaaaactctgcaaattaatttggtttctgttatcagtggaacctatcttggtttggattacatgagtaagcaaaatggaggtgaaggcggcatcattatcaatatgtcatctttagcaggactcatgcccgttgcacagcagccggtttattgtgcttcaaagcatggcatagttggattcacacgctcagcagcgttggctgctaatcttatgaacagtggtgtgagactgaatgccatttgtccaggctttgttaacacagccatccttgaatcaattgaaaaagaagaaaacatgggacaatatatagaatataaggatcatatcaaggatatgattaaatactatggaattttggacccaccattgattgccaatggattgataacactcattgaagatgatgctttaaatggtgctattatgaagatcacaacttctaagggaattcattttcaagactatgatacaactccatttcaagcaaaaacccaatgaacagcttatgtgttagccatagctgaaaataagcacaaatagcttatattcagatcctatcttcatttgaatatagcttttaaatgaaatgttacagtttgaagttttccttcatgcacttggtgataaacgttttctaaatttttagttaagtatatggataaaaagttatgaactattaaaaatgtgatgtggaccaaaggctaggttgtaatcttgatagtctaaaaaatgatcaaaacaaatgattttcaaggaatattcaatattctgcctttcagaaagtgtatttatatctgtgcttcataaatattaatgttcttcagaacatcattttaaaggagatacttgaattgttatttaaatcaaaccagatgtaaaacactcacatacaagttcatactttaaaagaggaaagctacttaacaatgacaaatatttcacaataataatttttacttatataccatctttcaactgaacatttcagttcttccaagagcttcttagagtagtatattttgggggcagtcaaggaataaactacagtgtaaacatatcccagatgaaaactgctgtatggaaaaatgacagaaagtaactgattgacactgttgattcacagttcaacctcctatctgggaaagacatttctttcctctgctcactttaagaacttttaccgactccaaaaatctcaggaattaaacttttaacagttacagcaataaagaatagttagtactccaaaaatattatatttaagatgctcaacaagaaaaaaatgcaaatgtaatatttttttcaaattacttctttattgacttgtccaaatttcaaaagtgcctacccttcaataaaacttttttattctgatctccataaattacttagtcttctatgtatagctatcaaggaaataaaaccaattttgccacagccacaactgtaaatgtttttgtacccatgctgaaactcataacaacacagacataaaaatagctgtgaggttttgctttttttgttgtcagctatcttaagaatcattaaatacacctgctttgggtaaaactctttgcaagcagtaattaacactagtaacagtgaaagcacaagatttccaaatcagtcgttttctcaaaaaaatatcgtataagtgactcatcctgtctgctaactccagacctcccagcttgaagccaaatctttccatgtgagattgatatggatttcctagaagtactggaatgttgtcatatcttgccctattttaattctgctatagaaaacaattgccttcacttttaaggagtaatttgaatattaataactctggtctagattttcatataatgtattaaagacaaagtagtgaacatcaatgaacatctgatagagataaactgtaatcaggcataagcttgtttgtatgttctggcagtgactaatcagtaaatgatgtcggtttgcccagtatcacttatcttctgtatttttcctctgtcgtgtaaatagtataaccttttcatttatggacaattttttggactagtagccttcaatatacattctgctttgaattaattttttcaaatcaataaattatgtagacatttaaaatcaaatatcaagtagaattgaaaaatgtgagttacataagttaaaaacttactttaaatcttaccttctataggtagctctaaataaattcatatggttatatggcaaaaaaaaaagcacaacctgcacacaaacaaacacttttttgggcgcctatgggccctctgaaaaaggttcttcagaacaccatcgtttgggcgccgggggcccacataggctaagtcgaagccattctggacaaaagcgtggccccctaaggaaaaaccacggggcaaccgagccatcggggctggagattctcgacaccgcataaaaaacagaccccgcggggtgacaccaccagcgcttccgagaacaatcccgagagggaggtccagagagggaccatacggggagactacacaacagggaagtccaaaggagcacacgagcttaa

SEQ ID NO: 18718 - DNA, 3204 bp, Homo sapiens
gcctctgctccgctctccttctatccagttggtctttagggcactgaaggaaactcttcttcagaaataaccttttaacttttcttctgtcagctgcctgccaatcacggagccagaggctgaggggaggctttgagccggtctgcgagtccggaaggcaaagatcgcgaagcttggcgctccagaacgctcagggggcaggtgacacagtcgtgggttccccggcgggcgctggcttgacagtttcctccccgcccactggcaggggagcgccccgccgggctgcacgcgcgcgcgcgcaggggggcataaaagccgcggccgcgcggagacgcggagctcgcccaccgcccgccccagcagtggctgcaccatgcacgtgaacggcaaagtggcgctggtgaccggcgcggctcagggcataggcagagcctttgcagaggcgctgctgcttaagggcgccaaggtagcgctggtggattggaatcttgaagcaggtgtacagtgtaaagctgccctggatgagcagtttgaacctcagaagactctgttcatccagtgcgatgtggctgaccagcaacaactgagagacacttttagaaaagttgtagaccactttggaagactggacattttggtcaataatgctggagtgaataatgagaaaaactgggaaaaaactctgcaaattaatttggtttctgttatcagtggaacctatcttggtttggattacatgagtaagcaaaatggaggtgaaggcggcatcattatcaatatgtcatctttagcaggactcatgcccgttgcacagcagccggtttattgtgcttcaaagcatggcatagttggattcacacgctcagcagcgttggctgctaatcttatgaacagtggtgtgagactgaatgccatttgtccaggctttgttaacacagccatccttgaatcaattgaaaaagaagaaaacatgggacaatatatagaatataaggatcatatcaaggatatgattaaatactatggaattttggacccaccattgattgccaatggattgataacactcattgaagatgatgctttaaatggtgctattatgaagatcacaacttctaagggaattcattttcaagactatgatacaactccatttcaagcaaaaacccaatgaacagcttatgtgttagccatagctgaaaataagcacaaatagcttatattcagatcctatcttcatttgaatatagcttttaaatgaaatgttacagtttgaagttttccttcatgcacttggtgataaacgttttctaaatttttagttaagtatatggataaaaagttatgaactattaaaaatgtgatgtggaccaaaggctaggttgtaatcttgatagtctaaaaaatgatcaaaacaaatgattttcaaggaatattcaatattctgcctttcagaaagtgtatttatatctgtgcttcataaatattaatgttcttcagaacatcattttaaaggagatacttgaattgttatttaaatcaaaccagatgtaaaacactcacatacaagttcatactttaaaagaggaaagctacttaacaatgacaaatatttcacaataataatttttacttatataccatctttcaactgaacatttcagttcttccaagagcttcttagagtagtatattttgggggcagtcaaggaataaactacagtgtaaacatatcccagatgaaaactgctgtatggaaaaatgacagaaagtaactgattgacactgttgattcacagttcaacctcctatctgggaaagacatttctttcctctgctcactttaagaacttttaccgactccaaaaatctcaggaattaaacttttaacagttacagcaataaagaatagttagtactccaaaaatattatatttaagatgctcaacaagaaaaaaatgcaaatgtaatatttttttcaaattacttctttattgacttgtccaaatttcaaaagtgcctacccttcaataaaacttttttattctgatctccataaattacttagtcttctatgtatagctatcaaggaaataaaaccaattttgccacagccacaactgtaaatgtttttgtacccatgctgaaactcataacaacacagacataaaaatagctgtgaggttttgctttttttgttgtcagctatcttaagaatcattaaatacacctgctttgggtaaaactctttgcaagcagtaattaacactagtaacagtgaaagcacaagatttccaaatcagtcgttttctcaaaaaaatatcgtataagtgactcatcctgtctgctaactccagacctcccagcttgaagccaaatctttccatgtgagattgatatggatttcctagaagtactggaatgttgtcatatcttgccctattttaattctgctatagaaaacaattgccttcacttttaaggagtaatttgaatattaataactctggtctagattttcatataatgtattaaagacaaagtagtgaacatcaatgaacatctgatagagataaactgtaatcaggcataagcttgtttgtatgttctggcagtgactaatcagtaaatgatgtcggtttgcccagtatcacttatcttctgtatttttcctctgtcgtgtaaatagtataaccttttcatttatggacaattttttggactagtagccttcaatatacattctgctttgaattaattttttcaaatcaataaattatgtagacatttaaaatcaaatatcaagtagaattgaaaaatgtgagttacataagttaaaaacttactttaaatcttaccttctataggtagctctaaataaattcatatggttatatgatatctctggtgtatactgattgagaaaataattaaactgaagttaggggagggggaccttggtttcttgtatttttcagtgaatatcctaatgtaaatggtatatatatttttccaatgtgtttttcttagtaaaatgaagttggtacttctcagaacagcaacactagaaatacgtagacattgagaaaaagatcaagacttgataatgcattgaaatgtcctacaaattttattttctcatgtaaaaatgaatttagacacttgtaatatcatttaacattcaagtgattatatgacaatttc

SEQ ID NO: 18719 - DNA, 2472 bp, Homo sapiens
aaaaaaaaaaaaaaaaaaaaaaaaaaaaaaaaaaaaaaaaaagctcgcccaccgcccgccccagcagtggctgcaccatgcacgtgaacggcaaagtggcgctggtgaccggcgcggctcagggcataggcagagcctttgcagaggcgctgctgcttaagggcgccaaggtagcgctggtggattggaatcttgaagcaggtgtacagtgtaaagctgccctggatgagcagtttgaacctcagaagactctgttcatccagtgcgatgtggctgaccagcaacaactgagagacacttttagaaaagttgtagaccactttggaagactggacattttggtcaataatgctggagtgaataatgagaaaaactgggaaaaaactctgcaaattaatttggtttctgttatcagtggaacctatcttggtttggattacatgagtaagcaaaatggaggtgaaggcggcatcattatcaatatgtcatctttagcaggactcatgcccgttgcacagcagccggtttattgtgcttcaaagcatggcatagttggattcacacgctcagcagcgttggctgctaatcttatgaacagtggtgtgagactgaatgccatttgtccaggctttgttaacacagccatccttgaatcaattgaaaaagaagaaaacatgggacaatatatagaatataaggatcatatcaaggatatgattaaatactatggaattttggacccaccattgattgccaatggattgataacactcattgaagatgatgctttaaatggtgctattatgaagatcacaacttctaagggaattcattttcaagactatgatacaactccatttcaagcaaaaacccaatgaacagcttatgtgttagccatagctgaaaataagcacaaatagcttatattcagatcctatcttcatttgaatatagcttttaaatgaaatgttacagtttgaagttttccttcatgcacttggtgataaacgttttctaaatttttagttaagtatatggataaaaagttatgaactattaaaaatgtgatgtggaccaaaggctaggttgtaatcttgatagtctaaaaaatgatcaaaacaaatgattttcaaggaatattcaatattctgcctttcagaaagtgtatttatatctgtgcttcataaatattaatgttcttcagaacatcattttaaaggagatacttgaattgttatttaaatcaaaccagatgtaaaacactcacatacaagttcatactttaaaagaggaaagctacttaacaatgacaaatatttcacaataataatttttacttatataccatctttcaactgaacatttcagttcttccaagagcttcttagagtagtatattttgggggcagtcaaggaataaactacagtgtaaacatatcccagatgaaaactgctgtatggaaaaatgacagaaagtaactgattgacactgttgattcacagttcaacctcctatctgggaaagacatttctttcctctgctcactttaagaacttttaccgactccaaaaatctcaggaattaaacttttaacagttacagcaataaagaatagttagtactccaaaaatattatatttaagatgctcaacaagaaaaaaatgcaaatgtaatatttttttcaaattacttctttattgacttgtccaaatttcaaaagtgcctacccttcaataaaacttttttattctgatctccataaattacttagtcttctatgtatagctatcaaggaaataaaaccaattttgccacagccacaactgtaaatgtttttgtacccatgctgaaactcataacaacacagacataaaaatagctgtgaggttttgctttttttgttgtcagctatcttaagaatcattaaatacacctgctttgggtaaaactctttgcaagcagtaattaacactagtaacagtgaaagcacaagatttccaaatcagtcgttttctcaaaaaaatatcgtataagtgactcatcctgtctgctaactccagacctcccagcttgaagccaaatctttccatgtgagattgatatggatttcctagaagtactggaatgttgtcatatcttgccctattttaattctgctatagaaaacaattgccttcacttttaaggagtaatttgaatattaataactctggtctagattttcatataatgtattaaagacaaagtagtgaacatcaatgaacatctgatagagataaactgtaatcaggcataagcttgtttgtatgttctggcagtgactaatcagtaaatgatgtcggtttgcccagtatcacttatcttctgtatttaatacattatatgaaaatctagaccagagttattaatattcaaattactccttaaaagtgaaggcaattgttttctatagcagaattaaaataggcaag

SEQ ID NO: 18720 - DNA, 3040 bp, Homo sapiens
gcctctgctccgctctccttctatccagttggtctttagggcactgaaggaaactcttcttcagaaataaccttttaacttttcttctgtcagctgcctgccaatcacggagccagaggctgaggggaggctttgagccggtctgcgagtccggaaggcaaagatcgcgaagcttggcgctccagaacgctcagggggcaggtgacacagtcgtgggttccccggcgggcgctggcttgacagtttcctccccgcccactggcaggggagcgccccgccgggctgcacgcgcgcgcgcgcaggggggcataaaagccgcggccgcgcggagacgcggagctcgcccaccgcccgccccagcagtggctgcaccatgcacgtgaacggcaaagtggcgctggtgaccggcgcggctcagggcataggcagagcctttgcagaggcgctgctgcttaagggcgccaaggtagcgctggtggattggaatcttgaagcaggtgtacagtgtaaagctgccctggatgagcagtttgaacctcagaagactctgttcatccagtgcgatgtggctgaccagcaacaactgagagacacttttagaaaagttgtagaccactttggaagactggacattttggtcaataatgctggagtgaataatgagaaaaactgggaaaaaactctgcaaattaatttggtttctgttatcagtggaacctatcttggtttggattacatgagtaagcaaaatggaggtgaaggcggcatcattatcaatatgtcatctttagcaggactcatgcccgttgcacagcagccggtttattgtgcttcaaagcatggcatagttggattcacacgctcagcagcgcccaccattgattgccaatggattgataacactcattgaagatgatgctttaaatggtgctattatgaagatcacaacttctaagggaattcattttcaagactatgatacaactccatttcaagcaaaaacccaatgaacagcttatgtgttagccatagctgaaaataagcacaaatagcttatattcagatcctatcttcatttgaatatagcttttaaatgaaatgttacagtttgaagttttccttcatgcacttggtgataaacgttttctaaatttttagttaagtatatggataaaaagttatgaactattaaaaatgtgatgtggaccaaaggctaggttgtaatcttgatagtctaaaaaatgatcaaaacaaatgattttcaaggaatattcaatattctgcctttcagaaagtgtatttatatctgtgcttcataaatattaatgttcttcagaacatcattttaaaggagatacttgaattgttatttaaatcaaaccagatgtaaaacactcacatacaagttcatactttaaaagaggaaagctacttaacaatgacaaatatttcacaataataatttttacttatataccatctttcaactgaacatttcagttcttccaagagcttcttagagtagtatattttgggggcagtcaaggaataaactacagtgtaaacatatcccagatgaaaactgctgtatggaaaaatgacagaaagtaactgattgacactgttgattcacagttcaacctcctatctgggaaagacatttctttcctctgctcactttaagaacttttaccgactccaaaaatctcaggaattaaacttttaacagttacagcaataaagaatagttagtactccaaaaatattatatttaagatgctcaacaagaaaaaaatgcaaatgtaatatttttttcaaattacttctttattgacttgtccaaatttcaaaagtgcctacccttcaataaaacttttttattctgatctccataaattacttagtcttctatgtatagctatcaaggaaataaaaccaattttgccacagccacaactgtaaatgtttttgtacccatgctgaaactcataacaacacagacataaaaatagctgtgaggttttgctttttttgttgtcagctatcttaagaatcattaaatacacctgctttgggtaaaactctttgcaagcagtaattaacactagtaacagtgaaagcacaagatttccaaatcagtcgttttctcaaaaaaatatcgtataagtgactcatcctgtctgctaactccagacctcccagcttgaagccaaatctttccatgtgagattgatatggatttcctagaagtactggaatgttgtcatatcttgccctattttaattctgctatagaaaacaattgccttcacttttaaggagtaatttgaatattaataactctggtctagattttcatataatgtattaaagacaaagtagtgaacatcaatgaacatctgatagagataaactgtaatcaggcataagcttgtttgtatgttctggcagtgactaatcagtaaatgatgtcggtttgcccagtatcacttatcttctgtatttttcctctgtcgtgtaaatagtataaccttttcatttatggacaattttttggactagtagccttcaatatacattctgctttgaattaattttttcaaatcaataaattatgtagacatttaaaatcaaatatcaagtagaattgaaaaatgtgagttacataagttaaaaacttactttaaatcttaccttctataggtagctctaaataaattcatatggttatatgatatctctggtgtatactgattgagaaaataattaaactgaagttaggggagggggaccttggtttcttgtatttttcagtgaatatcctaatgtaaatggtatatatatttttccaatgtgtttttcttagtaaaatgaagttggtacttctcagaacagcaacactagaaatacgtagacattgagaaaaagatcaagacttgataatgcattgaaatgtcctacaaattttattttctcatgtaaaaatgaatttagacacttgtaatatcatttaacattcaagtgattatatgacaatttc

SEQ ID NO: 18721 - DNA, 2939 bp, Homo sapiens
gcctctgctccgctctccttctatccagttggtctttagggcactgaaggaaactcttcttcagaaataaccttttaacttttcttctgtcagctgcctgccaatcacggagccagaggctgaggggaggctttgagccggtctgcgagtccggaaggcaaagatcgcgaagcttggcgctccagaacgctcagggggcaggtagcgctggtggattggaatcttgaagcaggtgtacagtgtaaagctgccctggatgagcagtttgaacctcagaagactctgttcatccagtgcgatgtggctgaccagcaacaactgagagacacttttagaaaagttgtagaccactttggaagactggacattttggtcaataatgctggagtgaataatgagaaaaactgggaaaaaactctgcaaattaatttggtttctgttatcagtggaacctatcttggtttggattacatgagtaagcaaaatggaggtgaaggcggcatcattatcaatatgtcatctttagcaggactcatgcccgttgcacagcagccggtttattgtgcttcaaagcatggcatagttggattcacacgctcagcagcgttggctgctaatcttatgaacagtggtgtgagactgaatgccatttgtccaggctttgttaacacagccatccttgaatcaattgaaaaagaagaaaacatgggacaatatatagaatataaggatcatatcaaggatatgattaaatactatggaattttggacccaccattgattgccaatggattgataacactcattgaagatgatgctttaaatggtgctattatgaagatcacaacttctaagggaattcattttcaagactatgatacaactccatttcaagcaaaaacccaatgaacagcttatgtgttagccatagctgaaaataagcacaaatagcttatattcagatcctatcttcatttgaatatagcttttaaatgaaatgttacagtttgaagttttccttcatgcacttggtgataaacgttttctaaatttttagttaagtatatggataaaaagttatgaactattaaaaatgtgatgtggaccaaaggctaggttgtaatcttgatagtctaaaaaatgatcaaaacaaatgattttcaaggaatattcaatattctgcctttcagaaagtgtatttatatctgtgcttcataaatattaatgttcttcagaacatcattttaaaggagatacttgaattgttatttaaatcaaaccagatgtaaaacactcacatacaagttcatactttaaaagaggaaagctacttaacaatgacaaatatttcacaataataatttttacttatataccatctttcaactgaacatttcagttcttccaagagcttcttagagtagtatattttgggggcagtcaaggaataaactacagtgtaaacatatcccagatgaaaactgctgtatggaaaaatgacagaaagtaactgattgacactgttgattcacagttcaacctcctatctgggaaagacatttctttcctctgctcactttaagaacttttaccgactccaaaaatctcaggaattaaacttttaacagttacagcaataaagaatagttagtactccaaaaatattatatttaagatgctcaacaagaaaaaaatgcaaatgtaatatttttttcaaattacttctttattgacttgtccaaatttcaaaagtgcctacccttcaataaaacttttttattctgatctccataaattacttagtcttctatgtatagctatcaaggaaataaaaccaattttgccacagccacaactgtaaatgtttttgtacccatgctgaaactcataacaacacagacataaaaatagctgtgaggttttgctttttttgttgtcagctatcttaagaatcattaaatacacctgctttgggtaaaactctttgcaagcagtaattaacactagtaacagtgaaagcacaagatttccaaatcagtcgttttctcaaaaaaatatcgtataagtgactcatcctgtctgctaactccagacctcccagcttgaagccaaatctttccatgtgagattgatatggatttcctagaagtactggaatgttgtcatatcttgccctattttaattctgctatagaaaacaattgccttcacttttaaggagtaatttgaatattaataactctggtctagattttcatataatgtattaaagacaaagtagtgaacatcaatgaacatctgatagagataaactgtaatcaggcataagcttgtttgtatgttctggcagtgactaatcagtaaatgatgtcggtttgcccagtatcacttatcttctgtatttttcctctgtcgtgtaaatagtataaccttttcatttatggacaattttttggactagtagccttcaatatacattctgctttgaattaattttttcaaatcaataaattatgtagacatttaaaatcaaatatcaagtagaattgaaaaatgtgagttacataagttaaaaacttactttaaatcttaccttctataggtagctctaaataaattcatatggttatatgatatctctggtgtatactgattgagaaaataattaaactgaagttaggggagggggaccttggtttcttgtatttttcagtgaatatcctaatgtaaatggtatatatatttttccaatgtgtttttcttagtaaaatgaagttggtacttctcagaacagcaacactagaaatacgtagacattgagaaaaagatcaagacttgataatgcattgaaatgtcctacaaattttattttctcatgtaaaaatgaatttagacacttgtaatatcatttaacattcaagtgattatatgacaatttc

SEQ ID NO: 18722 - DNA, 3000 bp, Homo sapiens
gcctctgctccgctctccttctatccagttggtctttagggcactgaaggaaactcttcttcagaaataaccttttaacttttcttctgtcagctgcctgccaatcacggagccagaggctgaggggaggctttgagccggtctgcgagtccggaaggcaaagatcgcgaagcttggcgctccagaacgctcagggggcaggtgacacagtcgtgggttccccggcgggcgctggcttgacagtttcctccccgcccactggcaggggagcgccccgccgggctgcacgcgcgcgcgcgcaggggggcataaaagccgcggccgcgcggagacgcggagctcgcccaccgcccgccccagcagtggctgcaccatgcacgtgaacggcaaagtggcgctggtgaccggcgcggctcagggcataggcagagcctttgcagaggcgctgctgcttaagggcgccaaggtagcgctggtggattggaatcttgaagcaggtgtacagtgtaaagctgccctggatgagcagtttgaacctcagaagactctgttcatccagtgcgatgtggctgaccagcaacaactgagaggactcatgcccgttgcacagcagccggtttattgtgcttcaaagcatggcatagttggattcacacgctcagcagcgttggctgctaatcttatgaacagtggtgtgagactgaatgccatttgtccaggctttgttaacacagccatccttgaatcaattgaaaaagaagaaaacatgggacaatatatagaatataaggatcatatcaaggatatgattaaatactatggaattttggacccaccattgattgccaatggattgataacactcattgaagatgatgctttaaatggtgctattatgaagatcacaacttctaagggaattcattttcaagactatgatacaactccatttcaagcaaaaacccaatgaacagcttatgtgttagccatagctgaaaataagcacaaatagcttatattcagatcctatcttcatttgaatatagcttttaaatgaaatgttacagtttgaagttttccttcatgcacttggtgataaacgttttctaaatttttagttaagtatatggataaaaagttatgaactattaaaaatgtgatgtggaccaaaggctaggttgtaatcttgatagtctaaaaaatgatcaaaacaaatgattttcaaggaatattcaatattctgcctttcagaaagtgtatttatatctgtgcttcataaatattaatgttcttcagaacatcattttaaaggagatacttgaattgttatttaaatcaaaccagatgtaaaacactcacatacaagttcatactttaaaagaggaaagctacttaacaatgacaaatatttcacaataataatttttacttatataccatctttcaactgaacatttcagttcttccaagagcttcttagagtagtatattttgggggcagtcaaggaataaactacagtgtaaacatatcccagatgaaaactgctgtatggaaaaatgacagaaagtaactgattgacactgttgattcacagttcaacctcctatctgggaaagacatttctttcctctgctcactttaagaacttttaccgactccaaaaatctcaggaattaaacttttaacagttacagcaataaagaatagttagtactccaaaaatattatatttaagatgctcaacaagaaaaaaatgcaaatgtaatatttttttcaaattacttctttattgacttgtccaaatttcaaaagtgcctacccttcaataaaacttttttattctgatctccataaattacttagtcttctatgtatagctatcaaggaaataaaaccaattttgccacagccacaactgtaaatgtttttgtacccatgctgaaactcataacaacacagacataaaaatagctgtgaggttttgctttttttgttgtcagctatcttaagaatcattaaatacacctgctttgggtaaaactctttgcaagcagtaattaacactagtaacagtgaaagcacaagatttccaaatcagtcgttttctcaaaaaaatatcgtataagtgactcatcctgtctgctaactccagacctcccagcttgaagccaaatctttccatgtgagattgatatggatttcctagaagtactggaatgttgtcatatcttgccctattttaattctgctatagaaaacaattgccttcacttttaaggagtaatttgaatattaataactctggtctagattttcatataatgtattaaagacaaagtagtgaacatcaatgaacatctgatagagataaactgtaatcaggcataagcttgtttgtatgttctggcagtgactaatcagtaaatgatgtcggtttgcccagtatcacttatcttctgtatttttcctctgtcgtgtaaatagtataaccttttcatttatggacaattttttggactagtagccttcaatatacattctgctttgaattaattttttcaaatcaataaattatgtagacatttaaaatcaaatatcaagtagaattgaaaaatgtgagttacataagttaaaaacttactttaaatcttaccttctataggtagctctaaataaattcatatggttatatgatatctctggtgtatactgattgagaaaataattaaactgaagttaggggagggggaccttggtttcttgtatttttcagtgaatatcctaatgtaaatggtatatatatttttccaatgtgtttttcttagtaaaatgaagttggtacttctcagaacagcaacactagaaatacgtagacattgagaaaaagatcaagacttgataatgcattgaaatgtcctacaaattttattttctcatgtaaaaatgaatttagacacttgtaatatcatttaacattcaagtgattatatgacaatttc

SEQ ID NO: 18723 - DNA, 2815 bp, Homo sapiens
aaaaaaaaaaaaaaaaaaaaaaaaaaaaaaaaaaaaaaaaaagctcgcccaccgcccgccccagcagtggctgcaccatgcacgtgaacggcaaagtggcgctggtgaccggcgcggctcagggcataggcagagcctttgcagaggcgctgctgcttaagggcgccaaggtagcgctggtggattggaatcttgaagcaggtgtacagtgtaaagctgccctggatgagcagtttgaacctcagaagactctgttcatccagtgcgatgtggctgaccagcaacaactgagagacacttttagaaaagttgtagaccactttggaagactggacattttggtcaataatgctggagtgaataatgagaaaaactgggaaaaaactctgcaaattaatttggtttctgttatcagtggaacctatcttggtttggattacatgagtaagcaaaatggaggtgaaggcggcatcattatcaatatgtcatctttagcaggactcatgcccgttgcacagcagccggtttattgtgcttcaaagcatggcatagttggattcacacgctcagcagcgttggctgctaatcttatgaacagtggtgtgagactgaatgccatttgtccaggctttgttaacacagccatccttgaatcaattgaaaaagaagaaaacatgggacaatatatagaatataaggatcatatcaaggatatgattaaatactatggaattttggacccaccattgattgccaatggattgataacactcattgaagatgatgctttaaatggtgctattatgaagatcacaacttctaagggaattcattttcaagactatgatacaactccatttcaagcaaaaacccaatgaacagcttatgtgttagccatagctgaaaataagcacaaatagcttatattcagatcctatcttcatttgaatatagcttttaaatgaaatgttacagtttgaagttttccttcatgcacttggtgataaacgttttctaaatttttagttaagtatatggataaaaagttatgaactattaaaaatgtgatgtggaccaaaggctaggttgtaatcttgatagtctaaaaaatgatcaaaacaaatgattttcaaggaatattcaatattctgcctttcagaaagtgtatttatatctgtgcttcataaatattaatgttcttcactacttaacaatgacaaatatttcacaataataatttttacttatataccatctttcaactgaacatttcagttcttccaagagcttcttagagtagtatattttgggggcagtcaaggaataaactacagtgtaaacatatcccagatgaaaactgctgtatggaaaaatgacagaaagtaactgattgacactgttgattcacagttcaacctcctatctgggaaagacatttctttcctctgctcactttaagaacttttaccgactccaaaaatctcaggaattaaacttttaacagttacagcaataaagaatagttagtactccaaaaatattatatttaagatgctcaacaagaaaaaaatgcaaatgtaatatttttttcaaattacttctttattgacttgtccaaatttcaaaagtgcctacccttcaataaaacttttttattctgatctccataaattacttagtcttctatgtatagctatcaaggaaataaaaccaattttgccacagccacaactgtaaatgtttttgtacccatgctgaaactcataacaacacagacataaaaatagctgtgaggttttgctttttttgttgtcagctatcttaagaatcattaaatacacctgctttgggtaaaactctttgcaagcagtaattaacactagtaacagtgaaagcacaagatttccaaatcagtcgttttctcaaaaaaatatcgtataagtgactcatcctgtctgctaactccagacctcccagcttgaagccaaatctttccatgtgagattgatatggatttcctagaagtactggaatgttgtcatatcttgccctattttaattctgctatagaaaacaattgccttcacttttaaggagtaatttgaatattaataactctggtctagattttcatataatgtattaaagacaaagtagtgaacatcaatgaacatctgatagagataaactgtaatcaggcataagcttgtttgtatgttctggcagtgactaatcagtaaatgatgtcggtttgcccagtatcacttatcttctgtatttttcctctgtcgtgtaaatagtataaccttttcatttatggacaattttttggactagtagccttcaatatacattctgctttgaattaattttttcaaatcaataaattatgtagacatttaaaatcaaatatcaagtagaattgaaaaatgtgagttacataagttaaaaacttactttaaatcttaccttctataggtagctctaaataaattcatatggttatatgatatctctggtgtatactgattgagaaaataattaaactgaagttaggggagggggaccttggtttcttgtatttttcagtgaatatcctaatgtaaatggtatatatatttttccaatgtgtttttcttagtaaaatgaagttggtacttctcagaacagcaacactagaaatacgtagacattgagaaaaagatcaagacttgataatgcattgaaatgtcctacaaattttattttctcatgtaaaaatgaatttagacacttgtaatatcatttaacattcaagtgattatatgacaatttc

SEQ ID NO: 18724 - DNA, 2679 bp, Homo sapiens
aaaaaaaaaaaaaaaaaaaaaaaaaaaaaaaaaaaaaaaaaagctcgcccaccgcccgccccagcagtggctgcaccatgcacgtgaacggcaaagtggcgctggtgaccggcgcggctcagggcataggcagagcctttgcagaggcgctgctgcttaagggcgccaaggtagcgctggtggattggaatcttgaagcaggtgtacagtgtaaagctgccctggatgagcagtttgaacctcagaagactctgttcatccagtgcgatgtggctgaccagcaacaactgagagacacttttagaaaagttgtagaccactttggaagactggacattttggtcaataatgctggagtgaataatgagaaaaactgggaaaaaactctgcaaattaatttggtttctgttatcagtggaacctatcttggtttggattacatgagtaagcaaaatggaggtgaaggcggcatcattatcaatatgtcatctttagcaggactcatgcccgttgcacagcagccggtttattgtgcttcaaagcatggcatagttggattcacacgctcagcagcgttggctgctaatcttatgaacagtggtgtgagactgaatgccatttgtccaggctttgttaacacagccatccttgaatcaattgaaaaagaagaaaacatgggacaatatatagaatataaggatcatatcaaggatatgattaaatactatggaattttggacccaccattgattgccaatggattgataacactcattgaagatgatgctttaaatggtgctattatgaagatcacaacttctaagggaattcattttcaagactatgatacaactccatttcaagcaaaaacccaatgaacagcttatgtgttagccatagctgaaaataagcacaaatagcttatattcagatcctatcttcatttgaatatagcttttaaatgaaatgttacagtttgaagttttccttcatgcacttggtgataaacgttttctaaatttttagttaagtatatggataaaaagttatgaactattaaaaatgtgatgtggaccaaaggctaggttgtaatcttgatagtctaaaaaatgatcaaaacaaatgattttcaaggaatattcaatattctgcctttcagaaagtgtatttatatctgtgcttcataaatattaatgttcttcagaacatcattttaaaggagatacttgaattgttatttaaatcaaaccagatgtaaaacactcacatacaagttcatactttaaaagaggaaagacatttctttcctctgctcactttaagaacttttaccgactccaaaaatctcaggaattaaacttttaacagttacagcaataaagaatagttagtactccaaaaatattatatttaagatgctcaacaagaaaaaaatgcaaatgtaatatttttttcaaattacttctttattgacttgtccaaatttcaaaagtgcctacccttcaataaaacttttttattctgatctccataaattacttagtcttctatgtatagctatcaaggaaataaaaccaattttgccacagccacaactgtaaatgtttttgtacccatgctgaaactcataacaacacagacataaaaatagctgtgaggttttgctttttttgttgtcagctatcttaagaatcattaaatacacctgctttgggtaaaactctttgcaagcagtaattaacactagtaacagtgaaagcacaagatttccaaatcagtcgttttctcaaaaaaatatcgtataagtgactcatcctgtctgctaactccagacctcccagcttgaagccaaatctttccatgtgagattgatatggatttcctagaagtactggaatgttgtcatatcttgccctattttaattctgctatagaaaacaattgccttcacttttaaggagtaatttgaatattaataactctggtctagattttcatataatgtattaaagacaaagtagtgaacatcaatgaacatctgatagagataaactgtaatcaggcataagcttgtttgtatgttctggcagtgactaatcagtaaatgatgtcggtttgcccagtatcacttatcttctgtatttttcctctgtcgtgtaaatagtataaccttttcatttatggacaattttttggactagtagccttcaatatacattctgctttgaattaattttttcaaatcaataaattatgtagacatttaaaatcaaatatcaagtagaattgaaaaatgtgagttacataagttaaaaacttactttaaatcttaccttctataggtagctctaaataaattcatatggttatatgatatctctggtgtatactgattgagaaaataattaaactgaagttaggggagggggaccttggtttcttgtatttttcagtgaatatcctaatgtaaatggtatatatatttttccaatgtgtttttcttagtaaaatgaagttggtacttctcagaacagcaacactagaaatacgtagacattgagaaaaagatcaagacttgataatgcattgaaatgtcctacaaattttattttctcatgtaaaaatgaatttagacacttgtaatatcatttaacattcaagtgattatatgacaatttc

SEQ ID NO: 18725 - DNA, 2431 bp, Homo sapiens
gatggaaggttacagctaaatttatcaaataatttagttaatatccaattgaaagaaatctaattgaataaattagataaataagatatctaatctagatatctaatatggaattaaataaaaattggaagtagcaatagtttaatgacacacatttccctataacatgttcaacttaatagattcttcagaaaataacttaaaatgaagtggtaatatgcctcattctttcgtttcaaaatactgttttctttatttttagcccaccattgattgccaatggattgataacactcattgaagatgatgctttaaatggtgctattatgaagatcacaacttctaagggaattcattttcaagactatgatacaactccatttcaagcaaaaacccaatgaacagcttatgtgttagccatagctgaaaataagcacaaatagcttatattcagatcctatcttcatttgaatatagcttttaaatgaaatgttacagtttgaagttttccttcatgcacttggtgataaacgttttctaaatttttagttaagtatatggataaaaagttatgaactattaaaaatgtgatgtggaccaaaggctaggttgtaatcttgatagtctaaaaaatgatcaaaacaaatgattttcaaggaatattcaatattctgcctttcagaaagtgtatttatatctgtgcttcataaatattaatgttcttcagaacatcattttaaaggagatacttgaattgttatttaaatcaaaccagatgtaaaacactcacatacaagttcatactttaaaagaggaaagctacttaacaatgacaaatatttcacaataataatttttacttatataccatctttcaactgaacatttcagttcttccaagagcttcttagagtagtatattttgggggcagtcaaggaataaactacagtgtaaacatatcccagatgaaaactgctgtatggaaaaatgacagaaagtaactgattgacactgttgattcacagttcaacctcctatctgggaaagacatttctttcctctgctcactttaagaacttttaccgactccaaaaatctcaggaattaaacttttaacagttacagcaataaagaatagttagtactccaaaaatattatatttaagatgctcaacaagaaaaaaatgcaaatgtaatatttttttcaaattacttctttattgacttgtccaaatttcaaaagtgcctacccttcaataaaacttttttattctgatctccataaattacttagtcttctatgtatagctatcaaggaaataaaaccaattttgccacagccacaactgtaaatgtttttgtacccatgctgaaactcataacaacacagacataaaaatagctgtgaggttttgctttttttgttgtcagctatcttaagaatcattaaatacacctgctttgggtaaaactctttgcaagcagtaattaacactagtaacagtgaaagcacaagatttccaaatcagtcgttttctcaaaaaaatatcgtataagtgactcatcctgtctgctaactccagacctcccagcttgaagccaaatctttccatgtgagattgatatggatttcctagaagtactggaatgttgtcatatcttgccctattttaattctgctatagaaaacaattgccttcacttttaaggagtaatttgaatattaataactctggtctagattttcatataatgtattaaagacaaagtagtgaacatcaatgaacatctgatagagataaactgtaatcaggcataagcttgtttgtatgttctggcagtgactaatcagtaaatgatgtcggtttgcccagtatcacttatcttctgtatttttcctctgtcgtgtaaatagtataaccttttcatttatggacaattttttggactagtagccttcaatatacattctgctttgaattaattttttcaaatcaataaattatgtagacatttaaaatcaaatatcaagtagaattgaaaaatgtgagttacataagttaaaaacttactttaaatcttaccttctataggtagctctaaataaattcatatggttatatgatatctctggtgtatactgattgagaaaataattaaactgaagttaggggagggggaccttggtttcttgtatttttcagtgaatatcctaatgtaaatggtatatatatttttccaatgtgtttttcttagtaaaatgaagttggtacttctcagaacagcaacactagaaatacgtagacattgagaaaaagatcaagacttgataatgcattgaaatgtcctacaaattttattttctcatgtaaaaatgaatttagacacttgtaatatcatttaacattcaagtgattatatgacaatttc

SEQ ID NO: 18726 - DNA, 2084 bp, Homo sapiens
cggacgcgtgggtcgacccacgcgtccgctccatttcaagcaaaaacccaatgaacagcttatgtgttagccatagctgaaaataagcacaaatagcttatattcagatcctatcttcatttgaatatagcttttaaatgaaatgttacagtttgaagttttccttcatgcacttggtgataaacgttttctaaatttttagttaagtatatggataaaaagttatgaactattaaaaatgtgatgtggaccaaaggctaggttgtaatcttgatagtctaaaaaatgatcaaaacaaatgattttcaaggaatattcaatattctgcctttcagaaagtgtatttatatctgtgcttcataaatattaatgttcttcagaacatcattttaaaggagatacttgaattgttatttaaatcaaaccagatgtaaaacactcacatacaagttcatactttaaaagaggaaagctacttaacaatgacaaatatttcacaataataatttttacttatataccatctttcaactgaacatttcagttcttccaagagcttcttagagtagtatattttgggggcagtcaaggaataaactacagtgtaaacatatcccagatgaaaactgctgtatggaaaaatgacagaaagtaactgattgacactgttgattcacagttcaacctcctatctgggaaagacatttctttcctctgctcactttaagaacttttaccgactccaaaaatctcaggaattaaacttttaacagttacagcaataaagaatagttagtactccaaaaatattatatttaagatgctcaacaagaaaaaaatgcaaatgtaatatttttttcaaattacttctttattgacttgtccaaatttcaaaagtgcctacccttcaataaaacttttttattctgatctccataaattacttagtcttctatgtatagctatcaaggaaataaaaccaattttgccacagccacaactgtaaatgtttttgtacccatgctgaaactcataacaacacagacataaaaatagctgtgaggttttgctttttttgttgtcagctatcttaagaatcattaaatacacctgctttgggtaaaactctttgcaagcagtaattaacactagtaacagtgaaagcacaagatttccaaatcagtcgttttctcaaaaaaatatcgtataagtgactcatcctgtctgctaactccagacctcccagcttgaagccaaatctttccatgtgagattgatatggatttcctagaagtactggaatgttgtcatatcttgccctattttaattctgctatagaaaacaattgccttcacttttaaggagtaatttgaatattaataactctggtctagattttcatataatgtattaaagacaaagtagtgaacatcaatgaacatctgatagagataaactgtaatcaggcataagcttgtttgtatgttctggcagtgactaatcagtaaatgatgtcggtttgcccagtatcacttatcttctgtatttttcctctgtcgtgtaaatagtataaccttttcatttatggacaattttttggactagtagccttcaatatacattctgctttgaattaattttttcaaatcaataaattatgtagacatttaaaatcaaatatcaagtagaattgaaaaatgtgagttacataagttaaaaacttactttaaatcttaccttctataggtagctctaaataaattcatatggttatatgatatctctggtgtatactgattgagaaaataattaaactgaagttaggggagggggaccttggtttcttgtatttttcagtgaatatcctaatgtaaatggtatatatatttttccaatgtgtttttcttagtaaaatgaagttggtacttctcagaacagcaacactagaaatacgtagacattgagaaaaagatcaagacttgataatgcattgaaatgtcctacaaattttattttctcatgtaaaaatgaatttagacacttgtaatatcatttaacattcaagtgattatatgacaatttc

SEQ ID NO: 18727 - DNA, 2454 bp, Homo sapiens
gcctctgctccgctctccttctatccagttggtctttagggcactgaaggaaactcttcttcagaaataaccttttaacttttcttctgtcagctgcctgccaatcacggagccagaggctgaggggaggctttgagccggtctgcgagtccggaaggcaaagatcgcgaagcttggcgctccagaacgctcagggggcaggtgacacagtcgtgggttccccggcgggcgctggcttgacagtttcctccccgcccactggcaggggagcgccccgccgggctgcacgcgcgcgcgcgcaggggggcataaaagccgcggccgcgcggagacgcggagctcgcccaccgcccgccccagcagtggctgcaccatgcacgtgaacggcaaagtggcgctggtgaccggcgcggctcagggcataggcagagcctttgcagaggcgctgctgcttaagggcgccaaggtagcgctggtggattggaatcttgaagcaggtgtacagtgtaaagctgccctggatgagcagtttgaacctcagaagactctgttcatccagtgcgatgtggctgaccagcaacaactgagagacacttttagaaaagttgtagaccactttggaagactggacattttggtcaataatgctggagtgaataatgagaaaaactgggaaaaaactctgcaaattaatttggtttctgttatcagtggaacctatcttggtttggattacatgagtaagcaaaatggaggtgaaggcggcatcattatcaatatgtcatctttagcaggactcatgcccgttgcacagcagccggtttattgtgcttcaaagcatgctacttaacaatgacaaatatttcacaataataatttttacttatataccatctttcaactgaacatttcagttcttccaagagcttcttagagtagtatattttgggggcagtcaaggaataaactacagtgtaaacatatcccagatgaaaactgctgtatggaaaaatgacagaaagtaactgattgacactgttgattcacagttcaacctcctatctgggaaagacatttctttcctctgctcactttaagaacttttaccgactccaaaaatctcaggaattaaacttttaacagttacagcaataaagaatagttagtactccaaaaatattatatttaagatgctcaacaagaaaaaaatgcaaatgtaatatttttttcaaattacttctttattgacttgtccaaatttcaaaagtgcctacccttcaataaaacttttttattctgatctccataaattacttagtcttctatgtatagctatcaaggaaataaaaccaattttgccacagccacaactgtaaatgtttttgtacccatgctgaaactcataacaacacagacataaaaatagctgtgaggttttgctttttttgttgtcagctatcttaagaatcattaaatacacctgctttgggtaaaactctttgcaagcagtaattaacactagtaacagtgaaagcacaagatttccaaatcagtcgttttctcaaaaaaatatcgtataagtgactcatcctgtctgctaactccagacctcccagcttgaagccaaatctttccatgtgagattgatatggatttcctagaagtactggaatgttgtcatatcttgccctattttaattctgctatagaaaacaattgccttcacttttaaggagtaatttgaatattaataactctggtctagattttcatataatgtattaaagacaaagtagtgaacatcaatgaacatctgatagagataaactgtaatcaggcataagcttgtttgtatgttctggcagtgactaatcagtaaatgatgtcggtttgcccagtatcacttatcttctgtatttttcctctgtcgtgtaaatagtataaccttttcatttatggacaattttttggactagtagccttcaatatacattctgctttgaattaattttttcaaatcaataaattatgtagacatttaaaatcaaatatcaagtagaattgaaaaatgtgagttacataagttaaaaacttactttaaatcttaccttctataggtagctctaaataaattcatatggttatatgatatctctggtgtatactgattgagaaaataattaaactgaagttaggggagggggaccttggtttcttgtatttttcagtgaatatcctaatgtaaatggtatatatatttttccaatgtgtttttcttagtaaaatgaagttggtacttctcagaacagcaacactagaaatacgtagacattgagaaaaagatcaagacttgataatgcattgaaatgtcctacaaattttattttctcatgtaaaaatgaatttagacacttgtaatatcatttaacattcaagtgattatatgacaatttc

SEQ ID NO: 18728 - DNA, 996 bp, Homo sapiens
gcctctgctccgctctccttctatccagttggtctttagggcactgaaggaaactcttcttcagaaataaccttttaacttttcttctgtcagctgcctgccaatcacggagccagaggctgaggggaggctttgagccggtctgcgagtccggaaggcaaagatcgcgaagcttggcgctccagaacgctcagggggcaggtgacacagtcgtgggttccccggcgggcgctggcttgacagtttcctccccgcccactggcaggggagcgccccgccgggctgcacgcgcgcgcgcgcaggggggcataaaagccgcggccgcgcggagacgcggagctcgcccaccgcccgccccagcagtggctgcaccatgcacgtgaacggcaaagtggcgctggtgaccggcgcggctcagggcataggcagagcctttgcagaggcgctgctgcttaagggcgccaaggtagcgctggtggattggaatcttgaagcaggtgtacagtgtaaagctgccctggatgagcagtttgaacctcagaagactctgttcatccagtgcgatgtggctgaccagcaacaactgagagacacttttagaaaagttgtagaccactttggaagactggacattttggtcaataatgctggagtgaataatgagaaaaactgggaaaaaactctgcaaattaatttggtttctgttatcagtggaacctatcttggtttggattacatgagtaagcaaaatggaggtgaaggcggcatcattatcaatatgtcatctttagcaggactcatgcccgttgcacagcagccggtttattgtgcttcaaagcatggcatagttggattcacacgctcagcagcgttggctgctaatcttatgaacagtggtgtgagactgaatgccatttgtccaggctttgttaacccgagcgctaccaggtagcgctcgggttaaccatgtcattatgcttaaataacttaatgtca

SEQ ID NO: 18729 - DNA, 2908 bp, Homo sapiens
aaaaaaaaaaaaaaaaaaaaaaaaaaaaaaaaaaaaaaaaaagctcgcccaccgcccgccccagcagtggctgcaccatgcacgtgaacggcaaagtggcgctggtgaccggcgcggctcagggcataggcagagcctttgcagaggcgctgctgcttaagggcgccaaggtagcgctggtggattggaatcttgaagcaggtgtacagtgtaaagctgccctggatgagcagtttgaacctcagaagactctgttcatccagtgcgatgtggctgaccagcaacaactgagagacacttttagaaaagttgtagaccactttggaagactggacattttggtcaataatgctggagtgaataatgagaaaaactgggaaaaaactctgcaaattaatttggtttctgttatcagtggaacctatcttggtttggattacatgagtaagcaaaatggaggtgaaggcggcatcattatcaatatgtcatctttagcaggactcatgcccgttgcacagcagccggtttattgtgcttcaaagcatggcatagttggattcacacgctcagcagcgttggctgctaatcttatgaacagtggtgtgagactgaatgccatttgtccaggctttgttaacacagccatccttgaatcaattgaaaaagaagaaaacatgggacaatatatagaatataaggatcatatcaaggatatgattaaatactatggaattttggacccaccattgattgccaatggattgataacactcattgaagatgatgctttaaatggtgctattatgaagatcacaacttctaagggaattcattttcaagactatgatacaactccatttcaagcaaaaacccaatgaacagcttatgtgttagccatagctgaaaataagcacaaatagcttatattcagatcctatcttcatttgaatatagcttttaaatgaaatgttacagtttgaagttttccttcatgcacttggtgataaacgttttctaaatttttagttaagtatatggataaaaagttatgaactattaaaaatgtgatgtggaccaaaggctaggttgtaatcttgatagtctaaaaaatgatcaaaacaaatgattttcaaggaatattcaatattctgcctttcagaaagtgtatttatatctgtgcttcataaatattaatgttcttcagaacatcattttaaaggagatacttgaattgttatttaaatcaaaccagatgtaaaacactcacatacaagttcatactttaaaagaggaaagctacttaacaatgacaaatatttcacaataataatttttacttatataccatctttcaactgaacatttcagttcttccaagagcttcttagagtagtatattttgggggcagtcaaggaataaactacagtgtaaacatatcccagatgaaaactgctgtatggaaaaatgacagaaagtaactgattgacactgttgattcacagttcaacctcctatctgggaaagacatttctttcctctgctcactttaagaacttttaccgactccaaaaatctcaggaattaaacttttaacagttacagcaataaagaatagttagtactccaaaaatattatatttaagatgctcaacaagaaaaaaatgcaaatgtaatatttttttcaaattacttctttattgacttgtccaaatttcaaaagtgcctacccttcaataaaacttttttattctgatctccataaattacttagtcttctatgtatagctatcaaggaaataaaaccaattttgccacagccacaactgtaaatgtttttgtacccatgctgaaactcataacaacacagacataaaaatagctgtgaggttttgctttttttgttgtcagctatcttaagaatcattaaatacacctgctttgggtaaaactctttgcaagcagtaattaacactagtaacagtgaaagcacaagatttccaaatcagtcgttttctcaaaaaaatatcgtataagtgactcatcctgtctgctaactccagacctcccagcttgaagccaaatctttccatgtgagattgatatggatttcctagaagtactggaatgttgtcatatcttgccctattttaattctgctatagaaaacaattgccttcacttttaaggagtaatttgaatattaataactctggtctagattttcatataatgtattaaagacaaagtagtgaacatcaatgaacatctgatagagataaactgtaatcaggcataagcttgtttgtatgttctggcagtgactaatcagtaaatgatgtcggtttgcccagtatcacttatcttctgtatttttcctctgtcgtgtaaatagtataaccttttcatttatggacaattttttggactagtagccttcaatatacattctgctttgaattaattttttcaaatcaataaattatgtagacatttaaaatcaaatatcaagtagaattgaaaaatgtgagttacataagttaaaaacttactttaaatcttaccttctataggtagctctaaataaattcatatggttatatgatatctctggtgtatactgattgagaaaataattaaactgaagttaggggagggggaccttggtttcttgtatttttcagtgaatatcctaatgtaaatggtatatatatttttccaatgtgtttttcttagtaaaatgaagttggtacttctcagaacagcaacactagaaatacgtagacattgagaaaaagatcaagacttgataatgcattgaaatgtcctacaaattttattttctcatgtaaaaatgaatttagacacttgtaatatcatttaacattcaagtgattatatgacaatttc

SEQ ID NO: 18730 - DNA, 2898 bp, Homo sapiens
ttggaggttcagtggtcgttttcgtgcctgcagctcgcccaccgcccgccccagcagtggctgcaccatgcacgtgaacggcaaagtggcgctggtgaccggcgcggctcagggcataggcagagcctttgcagaggcgctgctgcttaagggcgccaaggtagcgctggtggattggaatcttgaagcaggtgtacagtgtaaagctgccctggatgagcagtttgaacctcagaagactctgttcatccagtgcgatgtggctgaccagcaacaactgagagacacttttagaaaagttgtagaccactttggaagactggacattttggtcaataatgctggagtgaataatgagaaaaactgggaaaaaactctgcaaattaatttggtttctgttatcagtggaacctatcttggtttggattacatgagtaagcaaaatggaggtgaaggcggcatcattatcaatatgtcatctttagcaggactcatgcccgttgcacagcagccggtttattgtgcttcaaagcatggcatagttggattcacacgctcagcagcgttggctgctaatcttatgaacagtggtgtgagactgaatgccatttgtccaggctttgttaacacagccatccttgaatcaattgaaaaagaagaaaacatgggacaatatatagaatataaggatcatatcaaggatatgattaaatactatggaattttggacccaccattgattgccaatggattgataacactcattgaagatgatgctttaaatggtgctattatgaagatcacaacttctaagggaattcattttcaagactatgatacaactccatttcaagcaaaaacccaatgaacagcttatgtgttagccatagctgaaaataagcacaaatagcttatattcagatcctatcttcatttgaatatagcttttaaatgaaatgttacagtttgaagttttccttcatgcacttggtgataaacgttttctaaatttttagttaagtatatggataaaaagttatgaactattaaaaatgtgatgtggaccaaaggctaggttgtaatcttgatagtctaaaaaatgatcaaaacaaatgattttcaaggaatattcaatattctgcctttcagaaagtgtatttatatctgtgcttcataaatattaatgttcttcagaacatcattttaaaggagatacttgaattgttatttaaatcaaaccagatgtaaaacactcacatacaagttcatactttaaaagaggaaagctacttaacaatgacaaatatttcacaataataatttttacttatataccatctttcaactgaacatttcagttcttccaagagcttcttagagtagtatattttgggggcagtcaaggaataaactacagtgtaaacatatcccagatgaaaactgctgtatggaaaaatgacagaaagtaactgattgacactgttgattcacagttcaacctcctatctgggaaagacatttctttcctctgctcactttaagaacttttaccgactccaaaaatctcaggaattaaacttttaacagttacagcaataaagaatagttagtactccaaaaatattatatttaagatgctcaacaagaaaaaaatgcaaatgtaatatttttttcaaattacttctttattgacttgtccaaatttcaaaagtgcctacccttcaataaaacttttttattctgatctccataaattacttagtcttctatgtatagctatcaaggaaataaaaccaattttgccacagccacaactgtaaatgtttttgtacccatgctgaaactcataacaacacagacataaaaatagctgtgaggttttgctttttttgttgtcagctatcttaagaatcattaaatacacctgctttgggtaaaactctttgcaagcagtaattaacactagtaacagtgaaagcacaagatttccaaatcagtcgttttctcaaaaaaatatcgtataagtgactcatcctgtctgctaactccagacctcccagcttgaagccaaatctttccatgtgagattgatatggatttcctagaagtactggaatgttgtcatatcttgccctattttaattctgctatagaaaacaattgccttcacttttaaggagtaatttgaatattaataactctggtctagattttcatataatgtattaaagacaaagtagtgaacatcaatgaacatctgatagagataaactgtaatcaggcataagcttgtttgtatgttctggcagtgactaatcagtaaatgatgtcggtttgcccagtatcacttatcttctgtatttttcctctgtcgtgtaaatagtataaccttttcatttatggacaattttttggactagtagccttcaatatacattctgctttgaattaattttttcaaatcaataaattatgtagacatttaaaatcaaatatcaagtagaattgaaaaatgtgagttacataagttaaaaacttactttaaatcttaccttctataggtagctctaaataaattcatatggttatatgatatctctggtgtatactgattgagaaaataattaaactgaagttaggggagggggaccttggtttcttgtatttttcagtgaatatcctaatgtaaatggtatatatatttttccaatgtgtttttcttagtaaaatgaagttggtacttctcagaacagcaacactagaaatacgtagacattgagaaaaagatcaagacttgataatgcattgaaatgtcctacaaattttattttctcatgtaaaaatgaatttagacacttgtaatatcatttaacattcaagtgattatatgacaatttc

SEQ ID NO: 18731 - DNA, 2873 bp, Homo sapiens
taggctagtagaggcccggggtatcggccgagtggctgcaccatgcacgtgaacggcaaagtggcgctggtgaccggcgcggctcagggcataggcagagcctttgcagaggcgctgctgcttaagggcgccaaggtagcgctggtggattggaatcttgaagcaggtgtacagtgtaaagctgccctggatgagcagtttgaacctcagaagactctgttcatccagtgcgatgtggctgaccagcaacaactgagagacacttttagaaaagttgtagaccactttggaagactggacattttggtcaataatgctggagtgaataatgagaaaaactgggaaaaaactctgcaaattaatttggtttctgttatcagtggaacctatcttggtttggattacatgagtaagcaaaatggaggtgaaggcggcatcattatcaatatgtcatctttagcaggactcatgcccgttgcacagcagccggtttattgtgcttcaaagcatggcatagttggattcacacgctcagcagcgttggctgctaatcttatgaacagtggtgtgagactgaatgccatttgtccaggctttgttaacacagccatccttgaatcaattgaaaaagaagaaaacatgggacaatatatagaatataaggatcatatcaaggatatgattaaatactatggaattttggacccaccattgattgccaatggattgataacactcattgaagatgatgctttaaatggtgctattatgaagatcacaacttctaagggaattcattttcaagactatgatacaactccatttcaagcaaaaacccaatgaacagcttatgtgttagccatagctgaaaataagcacaaatagcttatattcagatcctatcttcatttgaatatagcttttaaatgaaatgttacagtttgaagttttccttcatgcacttggtgataaacgttttctaaatttttagttaagtatatggataaaaagttatgaactattaaaaatgtgatgtggaccaaaggctaggttgtaatcttgatagtctaaaaaatgatcaaaacaaatgattttcaaggaatattcaatattctgcctttcagaaagtgtatttatatctgtgcttcataaatattaatgttcttcagaacatcattttaaaggagatacttgaattgttatttaaatcaaaccagatgtaaaacactcacatacaagttcatactttaaaagaggaaagctacttaacaatgacaaatatttcacaataataatttttacttatataccatctttcaactgaacatttcagttcttccaagagcttcttagagtagtatattttgggggcagtcaaggaataaactacagtgtaaacatatcccagatgaaaactgctgtatggaaaaatgacagaaagtaactgattgacactgttgattcacagttcaacctcctatctgggaaagacatttctttcctctgctcactttaagaacttttaccgactccaaaaatctcaggaattaaacttttaacagttacagcaataaagaatagttagtactccaaaaatattatatttaagatgctcaacaagaaaaaaatgcaaatgtaatatttttttcaaattacttctttattgacttgtccaaatttcaaaagtgcctacccttcaataaaacttttttattctgatctccataaattacttagtcttctatgtatagctatcaaggaaataaaaccaattttgccacagccacaactgtaaatgtttttgtacccatgctgaaactcataacaacacagacataaaaatagctgtgaggttttgctttttttgttgtcagctatcttaagaatcattaaatacacctgctttgggtaaaactctttgcaagcagtaattaacactagtaacagtgaaagcacaagatttccaaatcagtcgttttctcaaaaaaatatcgtataagtgactcatcctgtctgctaactccagacctcccagcttgaagccaaatctttccatgtgagattgatatggatttcctagaagtactggaatgttgtcatatcttgccctattttaattctgctatagaaaacaattgccttcacttttaaggagtaatttgaatattaataactctggtctagattttcatataatgtattaaagacaaagtagtgaacatcaatgaacatctgatagagataaactgtaatcaggcataagcttgtttgtatgttctggcagtgactaatcagtaaatgatgtcggtttgcccagtatcacttatcttctgtatttttcctctgtcgtgtaaatagtataaccttttcatttatggacaattttttggactagtagccttcaatatacattctgctttgaattaattttttcaaatcaataaattatgtagacatttaaaatcaaatatcaagtagaattgaaaaatgtgagttacataagttaaaaacttactttaaatcttaccttctataggtagctctaaataaattcatatggttatatgatatctctggtgtatactgattgagaaaataattaaactgaagttaggggagggggaccttggtttcttgtatttttcagtgaatatcctaatgtaaatggtatatatatttttccaatgtgtttttcttagtaaaatgaagttggtacttctcagaacagcaacactagaaatacgtagacattgagaaaaagatcaagacttgataatgcattgaaatgtcctacaaattttattttctcatgtaaaaatgaatttagacacttgtaatatcatttaacattcaagtgattatatgacaatttc

SEQ ID NO: 18732 - DNA, 3117 bp, Homo sapiens
gcctctgctccgctctccttctatccagttggtctttagggcactgaaggaaactcttcttcagaaataaccttttaacttttcttctgtcagctgcctgccaatcacggagccagaggctgaggggaggctttgagccggtctgcgagtccggaaggcaaagatcgcgaagcttggcgctccagaacgctcagggggcaggtgacacagtcgtgggttccccggcgggcgctggcttgacagtttcctccccgcccactggcaggggagcgccccgccgggctgcacgcgcgcgcgcgcaggggggcataaaagccgcggccgcgcggagacgcggagctcgcccaccgcccgccccagcagtggctgcaccatgcacgtgaacggcaaagtggcgctggtgaccggcgcggctcagggcataggcagagcctttgcagaggcgctgctgcttaagggcgccaaggtagcgctggtggattggaatcttgaagcaggtgtacagtgtaaagctgccctggatgagcagtttgaacctcagaagactctgttcatccagtgcgatgtggctgaccagcaacaactgagagacacttttagaaaagttgtagaccactttggaagactggacattttggtcaataatgctggagtgaataatgagaaaaactgggaaaaaactctgcaaattaatttggtttctgttatcagtggaacctatcttggtttggattacaggtttctttagcaggactcactgagttgattcacacgctcagcagcgttggctgctaatcttatgaacagtggtgtgagactgaatgccatttgtccaggctttgttaacacagccatccttgaatcaattgaaaaagaagaaaacatgggacaatatatagaatataaggatcatatcaaggatatgattaaatactatggaattttggacccaccattgattgccaatggattgataacactcattgaagatgatgctttaaatggtgctattatgaagatcacaacttctaagggaattcattttcaagactatgatacaactccatttcaagcaaaaacccaatgaacagcttatgtgttagccatagctgaaaataagcacaaatagcttatattcagatcctatcttcatttgaatatagcttttaaatgaaatgttacagtttgaagttttccttcatgcacttggtgataaacgttttctaaatttttagttaagtatatggataaaaagttatgaactattaaaaatgtgatgtggaccaaaggctaggttgtaatcttgatagtctaaaaaatgatcaaaacaaatgattttcaaggaatattcaatattctgcctttcagaaagtgtatttatatctgtgcttcataaatattaatgttcttcagaacatcattttaaaggagatacttgaattgttatttaaatcaaaccagatgtaaaacactcacatacaagttcatactttaaaagaggaaagctacttaacaatgacaaatatttcacaataataatttttacttatataccatctttcaactgaacatttcagttcttccaagagcttcttagagtagtatattttgggggcagtcaaggaataaactacagtgtaaacatatcccagatgaaaactgctgtatggaaaaatgacagaaagtaactgattgacactgttgattcacagttcaacctcctatctgggaaagacatttctttcctctgctcactttaagaacttttaccgactccaaaaatctcaggaattaaacttttaacagttacagcaataaagaatagttagtactccaaaaatattatatttaagatgctcaacaagaaaaaaatgcaaatgtaatatttttttcaaattacttctttattgacttgtccaaatttcaaaagtgcctacccttcaataaaacttttttattctgatctccataaattacttagtcttctatgtatagctatcaaggaaataaaaccaattttgccacagccacaactgtaaatgtttttgtacccatgctgaaactcataacaacacagacataaaaatagctgtgaggttttgctttttttgttgtcagctatcttaagaatcattaaatacacctgctttgggtaaaactctttgcaagcagtaattaacactagtaacagtgaaagcacaagatttccaaatcagtcgttttctcaaaaaaatatcgtataagtgactcatcctgtctgctaactccagacctcccagcttgaagccaaatctttccatgtgagattgatatggatttcctagaagtactggaatgttgtcatatcttgccctattttaattctgctatagaaaacaattgccttcacttttaaggagtaatttgaatattaataactctggtctagattttcatataatgtattaaagacaaagtagtgaacatcaatgaacatctgatagagataaactgtaatcaggcataagcttgtttgtatgttctggcagtgactaatcagtaaatgatgtcggtttgcccagtatcacttatcttctgtatttttcctctgtcgtgtaaatagtataaccttttcatttatggacaattttttggactagtagccttcaatatacattctgctttgaattaattttttcaaatcaataaattatgtagacatttaaaatcaaatatcaagtagaattgaaaaatgtgagttacataagttaaaaacttactttaaatcttaccttctataggtagctctaaataaattcatatggttatatgatatctctggtgtatactgattgagaaaataattaaactgaagttaggggagggggaccttggtttcttgtatttttcagtgaatatcctaatgtaaatggtatatatatttttccaatgtgtttttcttagtaaaatgaagttggtacttctcagaacagcaacactagaaatacgtagacattgagaaaaagatcaagacttgataatgcattgaaatgtcctacaaattttattttctcatgtaaaaatgaatttagacacttgtaatatcatttaacattcaagtgattatatgacaatttc

SEQ ID NO: 18733 - DNA, 2963 bp, Homo sapiens
gcctctgctccgctctccttctatccagttggtctttagggcactgaaggaaactcttcttcagaaataaccttttaacttttcttctgtcagctgcctgccaatcacggagccagaggctgaggggaggctttgagccggtctgcgagtccggaaggcaaagatcgcgaagcttggcgctccagaacgctcagggggcaggtgacacagtcgtgggttccccggcgggcgctggcttgacagtttcctccccgcccactggcaggggagcgccccgccgggctgcacgcgcgcgcgcgcaggggggcataaaagccgcggccgcgcggagacgcggagctcgcccaccgcccgccccagcagtggctgcaccatgcacgtgaacggcaaagtggcgctggtgaccggcgcggctcagggcataggcagagcctttgcagaggcgctgctgcttaagggcgccaaggtagcgctggtggattggaatcttgaagcaggtgtacagtgtaaagctgccctggatgagcagtttgaacctcagaagactctgttcatccagtgcgatgtggctgaccagcaacaactgagagacacttttagaaaagttgtagaccactttggaagactggacattttggtcaataatgctggagtgaataatgagaaaaactgggaaaaaactctgcaaattaatttggtttctgttatcagtggaacctatcttggtttggattacatgagtaagcaaaatggaggtgaaggcggcatcattatcaatatgtcatctttagcagcccaccattgattgccaatggattgataacactcattgaagatgatgctttaaatggtgctattatgaagatcacaacttctaagggaattcattttcaagactatgatacaactccatttcaagcaaaaacccaatgaacagcttatgtgttagccatagctgaaaataagcacaaatagcttatattcagatcctatcttcatttgaatatagcttttaaatgaaatgttacagtttgaagttttccttcatgcacttggtgataaacgttttctaaatttttagttaagtatatggataaaaagttatgaactattaaaaatgtgatgtggaccaaaggctaggttgtaatcttgatagtctaaaaaatgatcaaaacaaatgattttcaaggaatattcaatattctgcctttcagaaagtgtatttatatctgtgcttcataaatattaatgttcttcagaacatcattttaaaggagatacttgaattgttatttaaatcaaaccagatgtaaaacactcacatacaagttcatactttaaaagaggaaagctacttaacaatgacaaatatttcacaataataatttttacttatataccatctttcaactgaacatttcagttcttccaagagcttcttagagtagtatattttgggggcagtcaaggaataaactacagtgtaaacatatcccagatgaaaactgctgtatggaaaaatgacagaaagtaactgattgacactgttgattcacagttcaacctcctatctgggaaagacatttctttcctctgctcactttaagaacttttaccgactccaaaaatctcaggaattaaacttttaacagttacagcaataaagaatagttagtactccaaaaatattatatttaagatgctcaacaagaaaaaaatgcaaatgtaatatttttttcaaattacttctttattgacttgtccaaatttcaaaagtgcctacccttcaataaaacttttttattctgatctccataaattacttagtcttctatgtatagctatcaaggaaataaaaccaattttgccacagccacaactgtaaatgtttttgtacccatgctgaaactcataacaacacagacataaaaatagctgtgaggttttgctttttttgttgtcagctatcttaagaatcattaaatacacctgctttgggtaaaactctttgcaagcagtaattaacactagtaacagtgaaagcacaagatttccaaatcagtcgttttctcaaaaaaatatcgtataagtgactcatcctgtctgctaactccagacctcccagcttgaagccaaatctttccatgtgagattgatatggatttcctagaagtactggaatgttgtcatatcttgccctattttaattctgctatagaaaacaattgccttcacttttaaggagtaatttgaatattaataactctggtctagattttcatataatgtattaaagacaaagtagtgaacatcaatgaacatctgatagagataaactgtaatcaggcataagcttgtttgtatgttctggcagtgactaatcagtaaatgatgtcggtttgcccagtatcacttatcttctgtatttttcctctgtcgtgtaaatagtataaccttttcatttatggacaattttttggactagtagccttcaatatacattctgctttgaattaattttttcaaatcaataaattatgtagacatttaaaatcaaatatcaagtagaattgaaaaatgtgagttacataagttaaaaacttactttaaatcttaccttctataggtagctctaaataaattcatatggttatatgatatctctggtgtatactgattgagaaaataattaaactgaagttaggggagggggaccttggtttcttgtatttttcagtgaatatcctaatgtaaatggtatatatatttttccaatgtgtttttcttagtaaaatgaagttggtacttctcagaacagcaacactagaaatacgtagacattgagaaaaagatcaagacttgataatgcattgaaatgtcctacaaattttattttctcatgtaaaaatgaatttagacacttgtaatatcatttaacattcaagtgattatatgacaatttc

SEQ ID NO: 18734 - DNA, 1754 bp, Homo sapiens
aaaaaaaaaaaaaaaaaaaaaaaaaaaaaaaaaaaaaaaaaagctcgcccaccgcccgccccagcagtggctgcaccatgcacgtgaacggcaaagtggcgctggtgaccggcgcggctcagggcataggcagagcctttgcagaggcgctgctgcttaagggcgccaaggtagcgctggtggattggaatcttgaagcaggtgtacagtgtaaagctgccctggatgagcagtttgaacctcagaagactctgttcatccagtgcgatgtggctgaccagcaacaactgagagacacttttagaaaagttgtagaccactttggaagactggacattttggtcaataatgctggagtgaataatgagaaaaactgggaaaaaactctgcaaattaatttggtttctgttatcagtggaacctatcttggtttggattacatgagtaagcaaaatggaggtgaaggcggcatcattatcaatatgtcatctttagcaggactcatgcccgttgcacagcagccggtttattgtgcttcaaagcatggcatagttggattcacacgctcagcagcgttggctgctaatcttatgaacagtggtgtgagactgaatgccatttgtccaggctttgttaacacagccatccttgaatcaattgaaaaagaagaaaacatgggacaatatatagaatataaggatcatatcaaggatatgattaaatactatggaattttggacccaccattgattgccaatggattgataacactcattgaagatgatgctttaaatggtgctattatgaagatcacaacttctaagggaattcattttcaagactatgatacaactccatttcaagcaaaaacccaatgaacagcttatgtgttagccatagctgaaaataagcacaaatagcttatattcagatcctatcttcatttgaatatagcttttaaatgaaatgttacagtttgaagttttccttcatgcacttggtgataaacgttttctaaatttttagttaagtatatggataaaaagttatgaactattaaaaatgtgatgtggaccaaaggctaggttgtaatcttgatagtctaaaaaatgatcaaaacaaatgattttcaaggaatattcaatattctgcctttcagaaagtgtatttatatctgtgcttcataaatattaatgttcttcagaacatcattttaaaggagatacttgaattgttatttaaatcaaaccagatgtaaaacactcacatacaagttcatactttaaaagaggaaagctacttaacaatgacaaatatttcacaataataatttttacttatataccatctttcaactgaacatttcagttcttccaagagcttcttagagtagtatattttgggggcagtcaaggaataaactacagtgtaaacatatcccagatgaaaactgctgtatggaaaaatgacagaaagtaactgattgacactgttgattcacagttcaacctcctatctgggaaagacatttctttcctctgctcactttaagaacttttaccgactccaaaaatctcaggaattaaacttttaacagttacagcaataaagaatagttagtactccaaaaatattatatttaagatgctcaacaagaaaaaaatgcaaatgtaatatttttttcaaattacttctttattgacttgtccaaatttcaaaagtgcctacccttcaataaaacttttttattctga

SEQ ID NO: 18735 - DNA, 1346 bp, Homo sapiens
gcctctgctccgctctccttctatccagttggtctttagggcactgaaggaaactcttcttcagaaataaccttttaacttttcttctgtcagctgcctgccaatcacggagccagaggctgaggggaggctttgagccggtctgcgagtccggaaggcaaagatcgcgaagcttggcgctccagaacgctcagggggcaggtgacacagtcgtgggttccccggcgggcgctggcttgacagtttcctccccgcccactggcaggggagcgccccgccgggctgcacgcgcgcgcgcgcaggggggcataaaagccgcggccgcgcggagacgcggagctcgcccaccgcccgccccagcagtggctgcaccatgcacgtgaacggcaaagtggcgctggtgaccggcgcggctcagggcataggcagagcctttgcagaggcgctgctgcttaagggcgccaaggtagcgctggtggattggaatcttgaagcaggtgtacagtgtaaagctgccctggatgagcagtttgaacctcagaagactctgttcatccagtgcgatgtggctgaccagcaacaactgagagacacttttagaaaagttgtagaccactttggaagactggacattttggtcaataatgctggagtgaataatgagaaaaactgggaaaaaactctgcaaattaatttggtttctgttatcagtggaacctatcttggtttggattacatgagtaagcaaaatggaggtgaaggcggcatcattatcaatatgtcatctttagcaggactcatgcccgttgcacagcagccggtttattgtgcttcaaagcatggcatagttggattcacacgctcagcagcgttggctgctaatcttatgaacagtggtgtgagactgaatgccatttgtccaggctttgttaacacagccatccttgaatcaattgaaaaagaagaaaacatgggacccaccattgattgccaatggattgataacactcattgaagatgatgctttaaatggtgctattatgaagatcacaacttctaagggaattcattttcaagactatgatacaactccatttcaagcaaaaacccaatgaacagcttatgtgttagccatagctgaaaataagcacaaatagcttatattcagatcctatcttcatttgaatatagcttttaaatgaaatgttacagtttgaagttttccttcatgcacttggtgataaacgccttcttcccctttcgcttcgcttctcctataccgtctttcctcttcgcactctccctcgtctccctcctgcctctcgccttctcttctctccagctcg

SEQ ID NO: 18736 - DNA, 3193 bp, Homo sapiens
tgggaacgcgttgagacgttcctctttcccgcttctccacctttacgcctgaaagaagactcccaaagattgctttcttctgggacgctgcttgaacgctaaccgcgttgattggaacagattttgtgtcttggctggctttgggtgaagaccggggagaaaaggttgcgctgcgattctcaagatctctggacctggattatcattgcaaatccattaaagaaggagaagcaagcggatttcagagaggttgttcttcagaaaaaaatggttatttctttgaactcatgcctgagctttatttgtttattgttatgccactggattgggacagcatcacctctgaatcttgaagaccctaatgtgtgtagccactgggaaagctactcagtgactgtgcaagagtcatacccacatccctttgatcaaatttactacacgagctgcactgacattctaaactggtttaaatgcacgcggcacagagtcagctatcggacagcctatcgacatggggagaagactatgtataggcgcaagtctcagtgttgtcctggattttatgaaagcggggaaatgtgtgtcccccactgtgctgataaatgtgtccatggtcgctgtattgctccaaacacctgtcagtgtgagcctggctggggagggaccaactgctccagtgcctgcgatggtgatcactggggtccccactgcaccagccggtgccagtgcaaaaatggggctctgtgcaaccccatcaccggggcttgccactgtgctgcgggcttccggggctggcgctgcgaggaccgctgtgagcagggcacctatggtaacgactgtcatcagagatgccagtgccagaatggagccacctgcgaccacgtcacgggggaatgccgctgcccaccaggatacaccggagccttctgtgaggatctttgtcctcctggtaaacatggtccacagtgtgagcagagatgcccttgtcaaaatggaggagtgtgtcatcacgtcactggagaatgctcttgcccttctggctggatgggcacagtgtgtggtcagccttgccccgagggtcgctttggaaagaactgttcccaagaatgccagtgccataatggagggacgtgtgatgctgccacaggccaatgtcattgcagtccaggatacacaggggaacggtgccaggatgagtgtcctgttgggacctatggcgttctctgtgctgagacctgccagtgtgtcaacggagggaagtgttaccacgtgagcggcgcatgcctctgtgaagcaggctttgctggcgagcgctgcgaagcacgcctgtgtcctgaggggctctacggcatcaaatgtgacaaacggtgtccctgccacttggaaaacactcatagctgtcaccccatgtctggagagtgtgcctgcaagccgggctggtcaggactctactgtaatgagacatgttctcctggattctacggggaagcttgccagcagatctgcagctgccaaaatggggcagactgtgacagtgtgactggaaagtgcacctgtgccccaggattcaaaggaattgactgctctaccccatgccctctgggaacctatgggataaactgttcctctcgctgtggctgtaaaaatgatgcagtctgctctcctgtggacgggtcttgtacttgcaaggcaggctggcacggggtggactgctccatcagatgtcccagtggcacatggggctttggctgtaacttaacatgccagtgcctcaacgggggagcctgcaacaccctggacgggacctgcacgtgtgcacctggatggcgcggggagaaatgcgaacttccctgccaggatggcacgtacgggctgaactgtgctgagcgctgcgactgcagccacgcagatggctgccaccctaccacgggccattgccgctgcctccccggatggtcaggtgtccactgtgacagcgtgtgtgctgagggacgctggggccccaactgctccctgccctgctactgtaaaaatggggcttcatgctcccctgatgatggcatctgcgagtgtgcaccaggcttccgaggcaccacttgtcagaggatctgctcccctggtttttatgggcatcgctgcagccagacatgcccacagtgcgttcacagcagcgggccctgccaccacatcaccggcctgtgtgactgcttgcctggcttcacaggcgccctctgcaatgaagtgtgtcccagtggcagatttgggaaaaactgtgcaggaatttgtacctgcaccaacaacggaacctgtaaccccattgacagatcttgtcagtgttaccccggttggattggcagtgactgctctcaaccatgtccacctgcccactggggcccaaactgcatccacacgtgcaactgccataatggagctttctgcagcgcctacgatggggaatgtaaatgcactcctggctggacagggctctactgcactcagagatgtcctctagggttttatggaaaagattgtgcactgatatgccaatgtcaaaacggagctgactgcgaccacatttctgggcagtgtacttgccgcactggattcatgggacggcactgtgagcagaagtgcccttcaggaacatatggctatggctgtcgccagatatgtgattgtctgaacaactccacctgcgaccacatcactgggacctgttactgcagccccggatggaagggagcgagatgtgatcaagctggtgttatcatagttggaaatctgaacagcttaagccgaaccagtactgctctccctgctgattcctaccagatcggggccattgcaggcatcatcattcttgtcctagttgttctcttcctactggcattgttcattatttatagacacaagcagaagggaaaggaatcaagcatgccagcagttacctacacccctgctatgagggtcgtcaatgcagattataccatttcaggaacccttcctcacagcaatggtggaaacgctaatagccactacttcaccaatcccagttaccacacgctcacccagtgtgccacatcccctcacgtcaacaacagggacaggatgactgtcacgaagtcaacaaactttcatgaggagatccaatcactaatgcaacaaactctaatgagttccactgtgaagagag

SEQ ID NO: 18737 - DNA, 7600 bp, Homo sapiens
tgggaacgcgttgagacgttcctctttcccgcttctccacctttacgcctgaaagaagactcccaaagattgctttcttctgggacgctgcttgaacgctaaccgcgttgattggaacagattttgtgtcttggctggctttgggtgaagaccggggagaaaaggttgcgctgcgattctcaagatctctggacctggattatcattgcaaatccattaaagaaggagaagcaagcggatttcagagaggttgttcttcagaaaaaaatggttatttctttgaactcatgcctgagctttatttgtttattgttatgccactggattgggacagcatcacctctgaatcttgaagaccctaatgtgtgtagccactgggaaagctactcagtgactgtgcaagagtcatacccacatccctttgatcaaatttactacacgagctgcactgacattctaaactggtttaaatgcacgcggcacagagtcagctatcggacagcctatcgacatggggagaagactatgtataggcgcaagtctcagtgttgtcctggattttatgaaagcggggaaatgtgtgtcccccactgtgctgataaatgtgtccatggtcgctgtattgctccaaacacctgtcagtgtgagcctggctggggagggaccaactgctccagtgcctgcgatggtgatcactggggtccccactgcaccagccggtgccagtgcaaaaatggggctctgtgcaaccccatcaccggggcttgccactgtgctgcgggcttccggggctggcgctgcgaggaccgctgtgagcagggcacctatggtaacgactgtcatcagagatgccagtgccagaatggagccacctgcgaccacgtcacgggggaatgccgctgcccaccaggatacaccggagccttctgtgaggatctttgtcctcctggtaaacatggtccacagtgtgagcagagatgcccttgtcaaaatggaggagtgtgtcatcacgtcactggagaatgctcttgcccttctggctggatgggcacagtgtgtggtcagccttgccccgagggtcgctttggaaagaactgttcccaagaatgccagtgccataatggagggacgtgtgatgctgccacaggccaatgtcattgcagtccaggatacacaggggaacggtgccaggatgagtgtcctgttgggacctatggcgttctctgtgctgagacctgccagtgtgtcaacggagggaagtgttaccacgtgagcggcgcatgcctctgtgaagcaggctttgctggcgagcgctgcgaagcacgcctgtgtcctgaggggctctacggcatcaaatgtgacaaacggtgtccctgccacttggaaaacactcatagctgtcaccccatgtctggagagtgtgcctgcaagccgggctggtcaggactctactgtaatgagacatgttctcctggattctacggggaagcttgccagcagatctgcagctgccaaaatggggcagactgtgacagtgtgactggaaagtgcacctgtgccccaggattcaaaggaattgactgctctaccccatgccctctgggaacctatgggataaactgttcctctcgctgtggctgtaaaaatgatgcagtctgctctcctgtggacgggtcttgtacttgcaaggcaggctggcacggggtggactgctccatcagatgtcccagtggcacatggggctttggctgtaacttaacatgccagtgcctcaacgggggagcctgcaacaccctggacgggacctgcacgtgtgcacctggatggcgcggggagaaatgcgaacttccctgccaggatggcacgtacgggctgaactgtgctgagcgctgcgactgcagccacgcagatggctgccaccctaccacgggccattgccgctgcctccccggatggtcaggtgtccactgtgacagcgtgtgtgctgagggacgctggggccccaactgctccctgccctgctactgtaaaaatggggcttcatgctcccctgatgatggcatctgcgagtgtgcaccaggcttccgaggcaccacttgtcagaggatctgctcccctggtttttatgggcatcgctgcagccagacatgcccacagtgcgttcacagcagcgggccctgccaccacatcaccggcctgtgtgactgcttgcctggcttcacaggcgccctctgcaatgaagtgtgtcccagtggcagatttgggaaaaactgtgcaggaatttgtacctgcaccaacaacggaacctgtaaccccattgacagatcttgtcagtgttaccccggttggattggcagtgactgctctcaaccatgtccacctgcccactggggcccaaactgcatccacacgtgcaactgccataatggagctttctgcagcgcctacgatggggaatgtaaatgcactcctggctggacagggctctactgcactcagagatgtcctctagggttttatggaaaagattgtgcactgatatgccaatgtcaaaacggagctgactgcgaccacatttctgggcagtgtacttgccgcactggattcatgggacggcactgtgagcagaagtgcccttcaggaacatatggctatggctgtcgccagatatgtgattgtctgaacaactccacctgcgaccacatcactgggacctgttactgcagccccggatggaagggagcgagatgtgatcaagctggtgttatcatagttggaaatctgaacagcttaagccgaaccagtactgctctccctgctgattcctaccagatcggggccattgcaggcatcatcattcttgtcctagttgttctcttcctactggcattgttcattatttatagacacaagcagaagggaaaggaatcaagcatgccagcagttacctacacccctgctatgagggtcgtcaatgcagattataccatttcaggaacccttcctcacagcaatggtggaaacgctaatagccactacttcaccaatcccagttaccacacgctcacccagtgtgccacatcccctcacgtcaacaacagggacaggatgactgtcacgaagtcaaaaaacaatcaactgtttgtgaatcttaaaaatgtgaaccctgggaagagaggccctgtgggggactgcactgggacattgccggctgactggaaacatggcggctacctcaacgagctcggtgcttttggacttgacagaagctatatgggaaaatccttaaaagacctgggaaagaattctgaatataattcaagtaactgctccctaagcagttctgagaacccatatgccactattaaagacccacctgtacttatcccgaaaagctcagagtgtggttatgtggagatgaaatcgccggcacgaagagattccccatatgcagagatcaataactcaacttcagccaacaggaatgtctatgaagttgaacctacagtgagtgttgtccaaggagtattcagcaataatgggcgtctctcccaggatccatatgacctcccaaagaacagtcacatcccttgtcattatgacctgctgccagtccgagacagttcatcctcccctaagcaagaggacagtggaggtagcagcagcaacagcagcagcagcagtgaatgacaccaaaggaccgcttggtagccactggaaccctttccagaactgctgtttggttcttctccatcctcaattttgccactttcatgtgaatgttagtcaattcggtgggcaatttttggacatgaaccagaaagctgaaagctgaggctgacacggactgtaggtgctttttgttcaggtggattcgaaggagttagagatgtgatttgccattgctgttagttttagaactatacccgtgaagcatgacttattgtaagatgttggctgaaagcatgaacttgcagaactccctcggagacgcaggttgcagtggacattgggattgttgcttgaaaaattaaaatttgaatattttctctctcatttgcatcatacagctctacctaggattgtacagtttaccataaaatttacttcatgaaagtgggaatcactgaacatgtagaagacaaggaacatattgttaactcctgattcttaactttattcaactggactcagaattgtagggataatatgaatgcaggaggaaacattctgtcaggcggtatgactggacagactttgaatatactctaaaagtggacagaaaatttacgaaaatcttagattttgtttagaatgagaaaatatacaattagaattattttagaaatagtaggaagtattgcagaagtcaatacacaaatgtgccaggcagaggtggttttctctgtttgactctcaaccaacttcagatctatgacattattctgatcactggctccatcatacatattcaccacttgagattcataacatatcaatagttatttcataaatatagaaatgaaataattttatttttgacagactggatggaatgagtgtgtaatgattgataaaggttgtaaattttaaatgcaagatgacgcttacgttctgtaaaccattagtaatacatgctgtaatatagaattagtggaacattttgattaatctttccctagaagtgactgaaatatttttgtgcatatttgagaaagggaactttccttttattaattgtcaatttagagaaactatgcttaagctggtcttttgcattgctaatgtgacatgtacccaacttttcattaatttgtatttccatttttaaattgcatattctatgttttgtagtgtttggattgttaatgaaaaaatattatatgttcgttattccttgtattattgccacttatcttttgcttgataaaaatgcgttgttcttttttcttttggagggacaagatgaaaatatataatttgaattgattaaaattggtcgttactaaaatagtatagtaaccacaagtgattggcttataaatgaagtagaaatgctttttaatattccaaaatagagttccttttgatctgttggtgctgagccttggttaaaccagggagaaggggagcagaaaggaaacgttgttactgatgagtaccacagactcatcttaaaaaaaactctcattatggtgatcatagaattgaccatccaaactgggacactcttgagagtaaatggagggcattattaataattatcttgtaatgaacttaaatctggactgttccaggcaaaccagacttatcttgcaatatgagaatgctgacacaatgcaggaaagccagtttcccttttgttgatctacttgaccaagcaaaggggctgaaaaactgaataaggaaacaactttataagagaaacagtggtcttcaatcttttaaagacatgaaatcctatatggcattctgtctcagtgagtcagttaacaaatacgtatgtgcaacccttctgctagtagtgcacataagtgattatccctgccaggtatcgagttggaatatccagttatttcatgtcacacatcggcacgtatgatggtggtttggtcagatggataatacagcagacacacttagaacactcactgcactggtggctgttcattttgaggaactccaaagtcaattcaaggaaataaggaatgacctggaacaggccttagaaacaattgatttattccaatagttaaccactggctggctcccaactctaggtgataggcatctaattgagacatgtgtgagtcaatagccatcggggtcctttttggtgagaagaaataagacattttctcccttttaaagatcatctcttcagagctgcatggtaaatttgaatttccccattgttctctagagctaggtcaaaaaaacaactgtttcttttcttattccactattaataaattgaaagcttgctgtacaaaggcaacagcaacttaaaaaagaaaatctggacaatagatgtggactccaaggggccactgccatcccttcctgtgtgctctttttgacaagtaaatcactccagttagctgatgtcctgaaatgacatttgtacctgaggcaattcttattagagcttactcaggacttttcaaacatcaggacacacatagcaatttggatgttgtaaaactacgtgttacatttggagaggtcttgttgagaaggcaaaattttctaaatattttgatatcaatttgggtaaagaaaggaatacttttgttagaatgagaattaaagagaaaacaaaagaatcttggcaaaattttccctctgaaattacaaactttaggaacttttccagatgtatcgaatttaatttgacattgatgtcactcttcataccaagtgaatctattctcatgaactttgaacccatgttaattttggaccctataactaatttcctttctgtatcccatggtggtcaaagcagtaaaggagtttagagatacttagcaaatgccattcatatagtattgttagccaaactattattccttccttagaagttgatgtatcagaaaatttataagttatttgtatttatatataagtacatcagaacttgcccacatgataactcatgtttgctttaataaggaaaatatgttatttgaggttaattatatgatagtgaggaacattttacaattatttacagtgtttgacattaattgctgtcctatgatacagtagtaatgttaacagagagtttaatatgtttagcattatctttatggaatttatattcaccaatttcaggaaaaccaaccatagaactttataataggacagttataacctgactgaaccaaatccatcagcataatgactgtgtgttctgagaaatgcaaacaactttatgaaagtgtggtcatcttgacccccaaagagccacagtagctgtcaattattgagatttttaaatggtaaatattgcaaaagttaaacaagggtaccacaatatcatttataattgatgtcaatattagtagtccactttatgcttaaaataaaatcataaaaaatcaagttttaaggttatattttttaaaataatgaattttctatctctaggcaacatgtctttattattcaagctgaatgtttaagagagattttggtcttaaaggcttcatcatgaaagtgtacatgcatatgcaagtgtgaattacgtggtatggatggttgcttgtttattaactaaagatgtacagcaaactgcccgtttagagtcctgttaatattgatgtcctaacactgggtctgcttatgctagttcagtatttggtctaggcttcattttgatatgactgaattgcaatctatatttttaaaaagaaaaatcaaaatacattagggtttacttggttgtggcaaacaaacaaaaaatgctttcagtgttgaaatatctctattttccaaagatgataaactttcatcgttcttagcctacattgtcatttatatcaccaaatgagtttatagattaatgcaataaactttctaataaaaaaaactctag

SEQ ID NO: 18738 - DNA, 2366 bp, Homo sapiens
atattattcagtgctaaaaagatatgagctatcaaactatgaaagggcatggaggattcaatcttaaatgcattatactaagtgaaagaagccagtctggaaaggctacatactttatgatttcaactctatgtcattgtagaaaaagcaaaactttggagacagtaaaaagatcagtggttatcagggacttcgtgggagggaaaaataggcagagcacagagcattcttagggcagtgaaattattctgtatgatttacaatggtgactatatgtcattgtacatttgtcaaggcccatagaacaggttttgaagttgatgtgatgttgacagtccccggggaggctgtgcctgcgtatagaaagcagcgtatgggaattctctgtactttccacttgattttgctctgagccggaaactgccctgaaaaataaagtctatatttaaaaaaatagtcgtagatactagacacagcatttttatcagcattttaaaatatactatatgcaaagataatattatatggtcaagaataactccttaatgtataaatttaaaagcaccatgaaatctcttaagaaacaatcagaagttttataaaattttaaaaaaggaaagtgaggaaaatgcctaaattaaacagtaaaacacacccagttattcaacaccaggtggcgactggactgggtctggatttttcttagcttgcctgactctgtgactgctgctctctgctttcttgggctccttctccctcaatcttcctgtttccagaacagatgctttttatgtcctcttgcctgtggtgacatcccaggatcccttccatctgcagttttttcttacctgttaaactttatgaggaggaaaggagaaaatattgattatttacctgttttgtaataggcattataatagatgcctgttgtaatctcttttaatcctcacaataacccacatgaaggagtgttattctccccattatatatattaataactaatgtgaaagatgatataatttgttgaaggccagtgaattgtaagtgatgtagtttggatataaaccttggtttcaaaattcaagacacggtaatctgtccattctgtaagaagcaagcacataagtgctaatgatgagtgtttggtcacacacaaaaaataaagatttactaacacatttatttaagaaaactcagacttaagctacatttggttcttaagtgtcttcttcaaaaagaaaggcaatcttgggtaattcctcacctgacttttagaagtgtgctagacctctgtcttttaaaaatgttcagcctacgtttatttttattattcttgttcttcatggtatctttctttccttttctccttttttgagatccattaaggattttactgtgatttataaactttcttctggaatggtggttctccacctgaggtgattttattccacagggatcatttggcaatatctggagacatttttcattgttacagctgggagagggtgctactggcatctagagggtagagccgagggccgctgctaaacatcctaccctgcagaagacagccgcctcaacacaaaattatctagcacaaaacgccagtagctcaaggttgagaaatgctgaactagaggtgtgggcttattatcaggatagcatagcactggattcccattagaatccatagtgtcttcatagcactggattcccgttagaacatttcatgcagcctggtgcttcaattacctggcttccctttttgtagcattggcattagaatatagtttagtctgactacagaagggagaaaatacctatgtaacaaaataggtgaactgacagaattttggtaaaagagataaaacatagtagggtgataggtctacacattttaaaagccagtttgcagtcagtgttgaattttatagtttaattgtgcaatttaaactgtttgtttattctccatgagtgtttcacgttatgcctttgtgcctgcttcagtgctgggggacagaccttctaccctcctggttcatgttgcctctgtcttccattcctctttgctggaatgtgtagttgtggtaactgtgacaattcctaaggtttctgacagtttttgaacaccacaatggtgctgtaaattcctgtcttggccaggagatggacaccacattttgatggtttctcaaaccgtgtgtgaccttttcctggtttctctgttctgtcagtcatggcatggctggacagaattcagggacatctatcaggcctctcaggagcaattaaattattttcatgaaggcaatttgcagttgtaaacaatattgaagacactgtgtggcatttctcattagct

SEQ ID NO: 18739 - DNA, 1964 bp, Homo sapiens
ccctatcctcgaccatataatattatctttgcatatagtatatttcaaatttctgataaaaatgctgtgtctagtatctacgactacattttaaaatatactatatgcaaagataatattatatggtcaagaataactccttaatgtataaatttaaaagcaccatgaaatctcttaagaaacaatcagaagttttataaaattttaaaaaaggaaagtgaggaaaatgcctaaattaaacagtaaaacacacccagttattcaacaccaggtggcgactggactgggtctggatttttcttagcttgcctgactctgtgactgctgctctctgctttcttgggctccttctccctcaatcttcctgtttccagaacagatgctttttatgtcctcttgcctgtggtgacatcccaggatcccttccatctgcagttttttcttacctgttaaactttatgaggaggaaaggagaaaatattgattatttacctgttttgtaataggcattataatagatgcctgttgtaatctcttttaatcctcacaataacccacatgaaggagtgttattctccccattatatatattaataactaatgtgaaagatgatataatttgttgaaggccagtgaattgtaagtgatgtagtttggatataaaccttggtttcaaaattcaagacacggtaatctgtccattctgtaagaagcaagcacataagtgctaatgatgagtgtttggtcacacacaaaaaataaagatttactaacacatttatttaagaaaactcagacttaagctacatttggttcttaagtgtcttcttcaaaaagaaaggcaatcttgggtaattcctcacctgacttttagaagtgtgctagacctctgtcttttaaaaatgttcagcctacgtttatttttattattcttgttcttcatggtatctttctttccttttctccttttttgagatccattaaggattttactgtgatttataaactttcttctggaatggtggttctccacctgaggtgattttattccacagggatcatttggcaatatctggagacatttttcattgttacagctgggagagggtgctactggcatctagagggtagagccgagggccgctgctaaacatcctaccctgcagaagacagccgcctcaacacaaaattatctagcacaaaacgccagtagctcaaggttgagaaatgctgaactagaggtgtgggcttattatcaggatagcatagcactggattcccattagaatccatagtgtcttcatagcactggattcccgttagaacatttcatgcagcctggtgcttcaattacctggcttccctttttgtagcattggcattagaatatagtttagtctgactacagaagggagaaaatacctatgtaacaaaataggtgaactgacagaattttggtaaaagagataaaacatagtagggtgataggtctacacattttaaaagccagtttgcagtcagtgttgaattttatagtttaattgtgcaatttaaactgtttgtttattctccatgagtgtttcacgttatgcctttgtgcctgcttcagtgctgggggacagaccttctaccctcctggttcatgttgcctctgtcttccattcctctttgctggaatgtgtagttgtggtaactgtgacaattcctaaggtttctgacagtttttgaacaccacaatggtgctgtaaattcctgtcttggccaggagatggacaccacattttgatggtttctcaaaccgtgtgtgaccttttcctggtttctctgttctgtcagtcatggcatggctggacagaattcagggacatctatcaggcctctcaggagcaattaaattattttcatgaaggcaatttgcagttgtaaacaatattgaagacactgtgtggcatttctcattagct

SEQ ID NO: 18740 - DNA, 447 bp, Homo sapiens
ttagccaggcgtggtggcacacacctatagtcccagagtagcggggactacaggtgtgcaccgccatgcccagctaatttttgtatttttagtagagacgaggtttcaccatgttggccaggctggtgtcgagctcctgacctcaagtgatccacctgcctcagcctcccaaagtgctgggattacaggcatgagccactgcgcccaacctcacagcatttaaattaattttaccctttgttttcactctttaaaatgttgctactagaaaatttaaaactacataagtgcctgtagtcccagctactcaggaggctgaggcaggaggaccccaggagtttgaaaccagcctaggcaacatagcaagaccacatctttaacaataaaataaaataacctatgtggctcctattacatttctatatttctgttggacaacacaaacat

SEQ ID NO: 18741 - DNA, 447 bp, Homo sapiens
gagaaaataagatggaaccagggttgaaggtgtaaattaagtgtacgccacaaagttgtacactcttgtaacctagaagtcccagttacttcagcccttgtgtttcactgttccctttaatatccaaagcaagaatccaaatatccattccaggtgaccacaggcaatccagtcttcctccaggttcctgtctctgagtgtttctggagctctgcagaaagcttccatctgccacagttctatcttgggggctacttccctcctcagcttgctgtcttactttgggcaagtcacttctggccatctcagatccagctttgtcctgactgccactacattcccatactccttcactccaaacattagggaattccacacttgaggtcggtttctggaatgtatatgactttactaaaagtaagggaactatcacaaagaagttgccac

SEQ ID NO: 18742 - DNA, 3146 bp, Homo sapiens
cgcggtgacttctgggatttgtggtcccggagaagagattggcggaggggaaagactgagtcgtctttcctttgcccgcttctgtggactgttcgaacgcccaggggtgggccaaacccgtttcttaggaaaccaggaatccagggaaggcagaatggcttcctttgggtggaagaggaaaattggtgagaaggtctcaaaggtcacttcccagcagtttgaagctgaagctgctgatgagaaggatgtagttgacaacgatgaagggaactggcttcatgccattaaacgtaggaaagaaattcttcttgaaggctgtgctgagaaaagtaaacagctgaaggatgaaggagccagtttggctgaaaataaaagatatcgggaggcaattcagaagtgggatgaagcactacagttaactccaaatgatgctaccctatacgagatgaaatcacaggtgctaatgtctcttcatgaaatgttcccagcagtacatgcagcagaaatggccgtccagcaaaatccacattcatgggagtcttggcagactttgggacgtgctcaacttggtttaggagagataatcctggcaattcgaagttttcaagtagcccttcacatctatccaatgaaccctgaaatatggaaagaagacctctcttgggcaagaacgctccaggagcagcagaaggtagcacagaggattaaaaaaagtgaagcaccagctgaagtaacacacttttcaccaaagtcaattccagactatgactttgaaagtgatgagattgttgctgtttgtgcagctattgctgagaaagagaagacagtttcagcaaataaaacaatggttattgtgtctgcttctggggccatagagactgtaactgaaaaggaggatggtgctacaccaccagatggctctgtttttatcaaagcccgatgaagcagtatgcataggattatttgaatctgtctttttgattgcctcttgaagttttgacatagagacatttactctggagatagataggagaactcctggttgtaaaatatgtttttcagatgaggcatataaaaactaaaatggcaggattattgtatagtgtttggaatatgctttgataagttatgatttatatttctcaaggttaaaattctgagtaaaatggtctttgattaataaacttagtttaatctgaatatgtaaatgaatacattttaaagacaaaacttgaaaaatgtattcttgaatagtgaataatttgatcaatgttactgaaatgctgtctcaacttttgttttatgataaaggaagtgtgtgatttccctccctctgagaaatatactgcgcttaatatttgctgtctttttcttgcttcattagagtaagtctgtcagaaagcttgaatatttttgacattcattttgattcaaagttgtcatttggttatatgtggaatctttgaaagtttggctgaaaatgcacacaaatgtgtacattctgaacattttctgaagtttctcttaattctgatttgtgtttctgttttgactttgaagttgtaacaatgatagttgtctccttcagtatttggtaaaagtgtaaagtattgataaatatgagaatgatggttttattttttaattgttacagtaagtaatccttaccacaaatgagtcatttttaaaatatgcatttttaaatgaatggcttttacagataggttaatgacaattgtactgctatattatcccagtcaaaaccaatactttcttttctttattttacaaagctttaaaaaccctggaaacaacttacttcttgcttgtgtctttccatttgatgactgggaattacttttctagataactttttttgaaactactcagtgaaatgaaaaataattacaattttaaatagctaattatatctttctaaaaataaaaaagtagggctgttattagagtgccaatgaataaataacttaagcacaaaatacatagaaattggaatgtgatttatagtacaatctcatgagtatgaaaaggctatattaaaaaaaattttattgaaagtccacagtcatattcacaaaccaatactgtcattgctaatctgaactattatttttatactatatattgtagtacaataatatagaactgttgggttctgttacttctgacactcaggaagatactattggtgtattaattttatctttgttagagatgaaagtagcccactttatgttaaagatcttactactgttggagcttataagtaatgatctacattttttatgaagatggtttttaaaacttttgttttattggaatgcatatctcttttcagggttggagaaattagcacttgccttgaaaagaatattctttccttaagttatatcatcagaaaattagctctggttagagaggttagtttcagagtgctccaaaaaatatgttaattattttattttgtttaataaagaacattctcaaaacgtaaataggtatctagagaagtgagtactcaacatttggtatattgttttgagtaatggatgtttgttttttgtgtaatttgtgaataaatagtttttttctgcattttgaagattttcctattattttatgttgttagcttttgaaaaattagattgatctacttagtgtctttcttatatgaacttaatatatttaaagtaccttgcatggtgcctcacacatgaagtaatgccagctatttcagtaaatgctagctatttctatgaagaacttgagttagtttggagatatttaacctcaatttcctctgattttaaaaaaggagaactttttttgtaatcctttccttatctgaaagtaagaagtctctgattccagtattataggagagatagtgggatttttcttgacagggtctatagctcaagtcccaaagaggcaagactcaggatggaatgcatgtggccactaggccctgttataagaacctagtgtttcctctgtactggcatggtaggccaagttagtctctttcttacccagatataagacataaaatagtttagacataagacagaggagaaaaagaaacagtaagttatggagaaggaaggcagctcatttctgcaggcccc

SEQ ID NO: 18743 - DNA, 3014 bp, Homo sapiens
cgcggtgacttctgggatttgtggtcccggagaagagattggcggaggggaaagactgagtcgtctttcctttgcccgcttctgtggactgttcgaacgcccaggggtgggccaaacccgtttcttaggaaaccaggaatccagggaaggcagaatggcttcctttgggtggaagaggaaaattggtgagaaggtctcaaaggtcacttcccagcagtttgaagctgaagctgctgatgagaaggatgtagttgacaacgatgaagggaactggcttcatgccattaaacgtaggaaagaaattcttcttgaaggctgtgctgagaaaagtaaacagctgaaggatgaaggagccagtttggctgaaaataaaagatatcgggaggcaattcagaagtgggatgaagcactacagttaactccaaatgatgctaccctatacgagatgaaatcacaggcaattcgaagttttcaagtagcccttcacatctatccaatgaaccctgaaatatggaaagaagacctctcttgggcaagaacgctccaggagcagcagaaggtagcacagaggattaaaaaaagtgaagcaccagctgaagtaacacacttttcaccaaagtcaattccagactatgactttgaaagtgatgagattgttgctgtttgtgcagctattgctgagaaagagaagacagtttcagcaaataaaacaatggttattgtgtctgcttctggggccatagagactgtaactgaaaaggaggatggtgctacaccaccagatggctctgtttttatcaaagcccgatgaagcagtatgcataggattatttgaatctgtctttttgattgcctcttgaagttttgacatagagacatttactctggagatagataggagaactcctggttgtaaaatatgtttttcagatgaggcatataaaaactaaaatggcaggattattgtatagtgtttggaatatgctttgataagttatgatttatatttctcaaggttaaaattctgagtaaaatggtctttgattaataaacttagtttaatctgaatatgtaaatgaatacattttaaagacaaaacttgaaaaatgtattcttgaatagtgaataatttgatcaatgttactgaaatgctgtctcaacttttgttttatgataaaggaagtgtgtgatttccctccctctgagaaatatactgcgcttaatatttgctgtctttttcttgcttcattagagtaagtctgtcagaaagcttgaatatttttgacattcattttgattcaaagttgtcatttggttatatgtggaatctttgaaagtttggctgaaaatgcacacaaatgtgtacattctgaacattttctgaagtttctcttaattctgatttgtgtttctgttttgactttgaagttgtaacaatgatagttgtctccttcagtatttggtaaaagtgtaaagtattgataaatatgagaatgatggttttattttttaattgttacagtaagtaatccttaccacaaatgagtcatttttaaaatatgcatttttaaatgaatggcttttacagataggttaatgacaattgtactgctatattatcccagtcaaaaccaatactttcttttctttattttacaaagctttaaaaaccctggaaacaacttacttcttgcttgtgtctttccatttgatgactgggaattacttttctagataactttttttgaaactactcagtgaaatgaaaaataattacaattttaaatagctaattatatctttctaaaaataaaaaagtagggctgttattagagtgccaatgaataaataacttaagcacaaaatacatagaaattggaatgtgatttatagtacaatctcatgagtatgaaaaggctatattaaaaaaaattttattgaaagtccacagtcatattcacaaaccaatactgtcattgctaatctgaactattatttttatactatatattgtagtacaataatatagaactgttgggttctgttacttctgacactcaggaagatactattggtgtattaattttatctttgttagagatgaaagtagcccactttatgttaaagatcttactactgttggagcttataagtaatgatctacattttttatgaagatggtttttaaaacttttgttttattggaatgcatatctcttttcagggttggagaaattagcacttgccttgaaaagaatattctttccttaagttatatcatcagaaaattagctctggttagagaggttagtttcagagtgctccaaaaaatatgttaattattttattttgtttaataaagaacattctcaaaacgtaaataggtatctagagaagtgagtactcaacatttggtatattgttttgagtaatggatgtttgttttttgtgtaatttgtgaataaatagtttttttctgcattttgaagattttcctattattttatgttgttagcttttgaaaaattagattgatctacttagtgtctttcttatatgaacttaatatatttaaagtaccttgcatggtgcctcacacatgaagtaatgccagctatttcagtaaatgctagctatttctatgaagaacttgagttagtttggagatatttaacctcaatttcctctgattttaaaaaaggagaactttttttgtaatcctttccttatctgaaagtaagaagtctctgattccagtattataggagagatagtgggatttttcttgacagggtctatagctcaagtcccaaagaggcaagactcaggatggaatgcatgtggccactaggccctgttataagaacctagtgtttcctctgtactggcatggtaggccaagttagtctctttcttacccagatataagacataaaatagtttagacataagacagaggagaaaaagaaacagtaagttatggagaaggaaggcagctcatttctgcaggcccc

SEQ ID NO: 18744 - DNA, 2932 bp, Homo sapiens
cgcggtgacttctgggatttgtggtcccggagaagagattggcggaggggaaagactgagtcgtctttcctttgcccgcttctgtggactgttcgaacgcccaggggtgggccaaacccgtttcttaggaaaccaggaatccagggaaggcagaatggcttcctttgggtggaagaggaaaattggtgagaaggtctcaaaggtcacttcccagcagtttgaagctgaagctgctgatgagaaggatgtagttgacaacgatgaagggaactggcttcatgccattaaacgtaggaaagaaattcttcttgaaggctgtgctgagaaaagtaaacagctgaaggatgaaggagccagtttggctgaaaataaaaggcaattcgaagttttcaagtagcccttcacatctatccaatgaaccctgaaatatggaaagaagacctctcttgggcaagaacgctccaggagcagcagaaggtagcacagaggattaaaaaaagtgaagcaccagctgaagtaacacacttttcaccaaagtcaattccagactatgactttgaaagtgatgagattgttgctgtttgtgcagctattgctgagaaagagaagacagtttcagcaaataaaacaatggttattgtgtctgcttctggggccatagagactgtaactgaaaaggaggatggtgctacaccaccagatggctctgtttttatcaaagcccgatgaagcagtatgcataggattatttgaatctgtctttttgattgcctcttgaagttttgacatagagacatttactctggagatagataggagaactcctggttgtaaaatatgtttttcagatgaggcatataaaaactaaaatggcaggattattgtatagtgtttggaatatgctttgataagttatgatttatatttctcaaggttaaaattctgagtaaaatggtctttgattaataaacttagtttaatctgaatatgtaaatgaatacattttaaagacaaaacttgaaaaatgtattcttgaatagtgaataatttgatcaatgttactgaaatgctgtctcaacttttgttttatgataaaggaagtgtgtgatttccctccctctgagaaatatactgcgcttaatatttgctgtctttttcttgcttcattagagtaagtctgtcagaaagcttgaatatttttgacattcattttgattcaaagttgtcatttggttatatgtggaatctttgaaagtttggctgaaaatgcacacaaatgtgtacattctgaacattttctgaagtttctcttaattctgatttgtgtttctgttttgactttgaagttgtaacaatgatagttgtctccttcagtatttggtaaaagtgtaaagtattgataaatatgagaatgatggttttattttttaattgttacagtaagtaatccttaccacaaatgagtcatttttaaaatatgcatttttaaatgaatggcttttacagataggttaatgacaattgtactgctatattatcccagtcaaaaccaatactttcttttctttattttacaaagctttaaaaaccctggaaacaacttacttcttgcttgtgtctttccatttgatgactgggaattacttttctagataactttttttgaaactactcagtgaaatgaaaaataattacaattttaaatagctaattatatctttctaaaaataaaaaagtagggctgttattagagtgccaatgaataaataacttaagcacaaaatacatagaaattggaatgtgatttatagtacaatctcatgagtatgaaaaggctatattaaaaaaaattttattgaaagtccacagtcatattcacaaaccaatactgtcattgctaatctgaactattatttttatactatatattgtagtacaataatatagaactgttgggttctgttacttctgacactcaggaagatactattggtgtattaattttatctttgttagagatgaaagtagcccactttatgttaaagatcttactactgttggagcttataagtaatgatctacattttttatgaagatggtttttaaaacttttgttttattggaatgcatatctcttttcagggttggagaaattagcacttgccttgaaaagaatattctttccttaagttatatcatcagaaaattagctctggttagagaggttagtttcagagtgctccaaaaaatatgttaattattttattttgtttaataaagaacattctcaaaacgtaaataggtatctagagaagtgagtactcaacatttggtatattgttttgagtaatggatgtttgttttttgtgtaatttgtgaataaatagtttttttctgcattttgaagattttcctattattttatgttgttagcttttgaaaaattagattgatctacttagtgtctttcttatatgaacttaatatatttaaagtaccttgcatggtgcctcacacatgaagtaatgccagctatttcagtaaatgctagctatttctatgaagaacttgagttagtttggagatatttaacctcaatttcctctgattttaaaaaaggagaactttttttgtaatcctttccttatctgaaagtaagaagtctctgattccagtattataggagagatagtgggatttttcttgacagggtctatagctcaagtcccaaagaggcaagactcaggatggaatgcatgtggccactaggccctgttataagaacctagtgtttcctctgtactggcatggtaggccaagttagtctctttcttacccagatataagacataaaatagtttagacataagacagaggagaaaaagaaacagtaagttatggagaaggaaggcagctcatttctgcaggcccc

SEQ ID NO: 18745 - DNA, 265 bp, Homo sapiens
gtcccggagaagagattggcggaggggaaagactgagtcgtctttcctttgcccgcttctgtggactgttcgaacgcccaggggtgggccaaacccgtttcttaggaaaccaggaatccagggaaggcaggtaggaatttgggcgtgataatttctgcttccagtgggaaagaatgtaaacacggggccttgggagccgttatcgggtaactggggctgcccggtcggcggtggaagctgaggaagaggaggaaaaagaggcgag

SEQ ID NO: 18746 - DNA, 657 bp, Homo sapiens
cgcggtgacttctgggatttgtggtcccggagaagagattggcggaggggaaagactgagtcgtctttcctttgcccgcttctgtggactgttcgaacgcccaggggtgggccaaacccgtttcttaggaaaccaggaatccagggaaggcagaatggcttcctttgggtggaagaggaaaattggtgagaaggtctcaaaggtcacttcccagcagtttgaagctgaagctgctgatgagaaggatgtagttgacaacgatgaagggaactggcttcatgccattaaacgtaggaaagaaattcttcttgaaggctgtgctgagaaaagtaaacagctgaaggatgaaggagccagtttggctgaaaataaaaggtatgtatttaaagatttttttttatggagaagagcttacattttctagctcactgtccgtaatgggatgaagagttatgaatttgataaattcatgtttaaaaatctattctaggtgctaaattaatcaaagaaataaggtgtttcaaagtcacctgaaaaatgaaagtttgtaaaatagttttcaggatgcaatgaaagtttgtaaaatagttttcaggatgctaattatgtccctgctttgccatcatttttgttgtgcctaaagaagagtaaatgcta

SEQ ID NO: 18747 - DNA, 1040 bp, Homo sapiens
cttatgataggcattggttgattcagagagatatcacattcggtcatagccttctggaagtccagagggagagaagaaaaggtggggtcatgggcttaatgaatccaatgcaagagagcccagcctgtgtgctggacaattcttatctgactgaatgctgtgggaatccattagaagggagatgagtaagggtagggttacttggaggaggaggaacttgaactaggaggaggaagaagggcaaagaagaagtaattgagagttgttcttctaaggcatgcttaactatcagcacctcaccttcatcccagctcctcatcaagcgacaactcttgatcccgaggaaaacgggatccacagaatttgtataagaagggaaattagtgtttacttagtctagccctcatattttatggagggagaaattgagttctgtggagattaaataaataatacaagaattggaggtagagccagaactggaacccatctttctttttctcagttcatatccttctgcaaattcctctagagcagagaatacaatttttacttctttgagtgccctcaaaaatggagacattggccggggggcggtgactcacgcctgtaatcccagcacaagctaggaggctgaggcaggtggaatacttgagtccaggagttcgagactagcctgggcaacatagacctcatcttcattaaaataaaaaaaaaggagacatttatttatgggattactaagctggttcatagtagtgaccactattagataaggtggacacttgcatctcgcattctttaccattcccaccctaccttgttgttctttgactcagaggccaggtatcaagtgtcatttatcatcaagcttgcaatatttttctcatagtagcactaagagcaaagtgagatatttcttgaactcatgtctaccaataaagagaaaatgaaaggtagatggtaaatcagaattaggtttggttgcatttgatagaaaacctaactaattggcttaaagaggaaacattaatttatct

SEQ ID NO: 18748 - DNA, 494 bp, Homo sapiens
acacaagtgacccatttggattctgacaattttcacaaagttaagatgaggtcattagggtggtccctaatctaatatgactaatgactttatgaaaagaaaaatttggacacagagataacacacacagggcgaatgccatgtaaaaatgaaggcagaattctgggtgatgatgtgtttataagccaggaatgccaaaagggaccagcaagctgccagaacctaggagagaggctggtaacagattcttcccgacagcctcagaaggaaccaaccctgccgacacgctgatcttggacttccgcctccagagctgtgaggcagtaaatttctattatatgagacatccagtttatggaactttgttatgtcagccccaggactctaatgtgcaaagaccctgcagcacagggccaccaggtgacccaggcagttggagcataaggggcaggtgcctcccacccttgccacgctgataggagctggtcaggttg

SEQ ID NO: 18749 - DNA, 1033 bp, Homo sapiens
ttccacaatgtcacagtggttattcaagtgagtcctgttcagcgtgggaggaaataacacaagaggcaaagatcactctggtccaccttgtatattggctaccacagaacccaacacaagcagtaagttaaaatcatgaagctcctgacgtcagaggacatggctctgccatttgttaggtagggatcctgttaaaggctcagcttcctcatctggaaatggaaatataggccttgcctggtttgctgtaatgggtcgtgatgaggaccaaactacaaagagtggtacagatgttaattacaatgatttttcctatgccacccatggaaacaaaaatagcaagatagagaaggctaaatcccagttttttttgactgctattcagcaaagcctaggagactttcatgacacctggagaggcggccgtagtgtatgtgtaagagtaccggttccagagtggggctccccgagctcagccccaccacttaccaacagcggaccttgggccagatgctgaagccctttgtgccttggtttcctgacctattactgtggaaatgatgacagtaccctcctcatggcatcgtgagaattaaattagctaattcaggtgaagcatttagaagaggacctcctgacacttaataactgcttgatataaataatagcttctgctacagagtggccatgaagtctggacatgtagatattatattatcatgcatcataaggtagttgatctggtgtgagattccaacctcgtgtgagagaggagaagaccttcattacactaattcatgctggcccagcctccaggccaccccagatgtgaggtgctgttaacactgctctcagtagggacggggtttcgccatgttggccagcctggtctcgaactcctgacctcaggtgatccatccgcttcggcctcccaaagtggtgggatcacaggtgcaagccaccgtgcccaggctgctatcttattttcaagaatttgactcacgtctttctgaagaacatctatcacttagaa

SEQ ID NO: 18750 - DNA, 274 bp, Homo sapiens
gaggtacaagtcatgacacagcagccagagccggcttggaaattctgagattgactcctgcggcccagggccagtaactaccaacctggtgtcagacgagcaatcaatcgcaaaggaaaccttggggaagtatcccagcagagtccccataaacgagcagtttaagattggataagagattcctgtgatcagagaagctggggaacaaaggaaaccagttgttctccttattcttaggcaatatgcctgcaacctgctttcaaatggttcagcc

SEQ ID NO: 18751 - DNA, 897 bp, Homo sapiens
atttctttatgcaaaccaattaaaaaaaagtacccagactggtctgatgtgagctaatcttttgtctgtgtgtttctgcaatatcgtgtggtaaaaatcagtgttaaaattgatgattctgaggaataagatctaaagatatcaaagatttgaatgttactaacgagagggaaggaaagtattaatagaattttcagtgaatgacagtgaaaatattgtacttcaagtttatgaaaatccttttttttcttttgattattcaggatctgattttcatattcagatcagcaaactattggtctaattctgcctactgatttttgtaaacaaaattttattggaaaacagctgcagtttttcagttacaaacaaactgaaaaagtgtctgttgtttgtggctgtttccacattacaaaggctaagctgagtagttacaacagagaacatacggcctgtagagctgaaaaaatttcccgttttacccttcacataacctgtttgccaaactcttgatctaattaatgatccagctctcttgtgtaactttttgttttacttctgtcatttaagattgtatcccaaatctctggctgttgctgccattctaatatagtaaccttttatatagaaaattgccagtttaacagtcttatcctccagtaactggcaaattgttgtttagaataaacatgcaaaatctgcaattgtgttaaaaactaatataaaataattagactataaaaatgaatcttagctgggtatggtggcacacacctttagtcccagctactcaggtggctgaggtgggaggatcacttaagcccgggagttcagggttacactgagctatgattgtgccactgcacttgatcctggagcaagattctgccgcttaaa

SEQ ID NO: 18752 - DNA, 953 bp, Homo sapiens
agctcatgagaaccccaggcaagtgcggacctacaaagtttgtccgctccggggcactgtagtggcttttaccctggccgggcgggcggggctcagccgggctgggctgggctccgcggctggagccgggctctacccagagcaagaccctgatggctgcggtgtttctggtaacgctttatgaatactcgccgcttttctacatcgcggtggtctttacctgcttcatcgtgaccaccggcctggtattgggatggtttggttgggatgttccagtaattctgagaaattcagaagagacccagttcagcacaagagttttcaaaaagcaaatgagacaagtcaagaatccttttggcttagagatcactaatccatcttcagcttcaattacaactggcataaccttgacaacagattgccttgaagatagcctccttacatgctactgggggtgcagtgttcaaaaattatatgaagctctgcagaagcatgtttattgcttcagaataagcactccccaagcattagaagatgctctgtatagtgaatatctctatcaggaacagtatttgtatcctttcgtctgatatacccattagcactgaaaattagacttcttatggataaagtgttgctaacttattgatcattcttggtatactagaagcatgtttattgcttcagaataagcactcctcaagcattagaagatgctctgtggagtgaatatctctatcaggaacagtatttgtatcctttcatctgatatacccattagcactgaaaattagacttcttatggataaagtgttgctaacttattgatcatttttggtatactagaagcatgtttattgcttcagaataagcactccccaagcattagaagatgctctgtggagtgaatatctctatcaggaacagtatttgtatcctttcatctgatatac

SEQ ID NO: 18753 - DNA, 2074 bp, Homo sapiens
agctcatgagaaccccaggcaagtgcggacctacaaagtttgtccgctccggggcactgtagtggcttttaccctggccgggcgggcggggctcagccgggctgggctgggctccgcggctggagccgggctctacccagagcaagaccctgatggctgcggtgtttctggtaacgctttatgaatactcgccgcttttctacatcgcggtggtctttacctgcttcatcgtgaccaccggcctggtattgggatggtttggttgggatgttccagtaattctgagaaattcagaagagacccagttcagcacaagagttttcaaaaagcaaatgagacaagtcaagaatccttttggcttagagatcactaatccatcttcagcttcaattacaactggcataaccttgacaacagattgccttgaagatagcctccttacatgctactgggggtgcagtgttcaaaaattatatgaagctctgcagaagcatgtttattgcttcagaataagcactccccaagcattagaagatgctctgtatagtgaatatctctatcaggaacagtattttattaaaaaggatagcaaagaagaaatatattgccagttaccaagagatactaaaattgaagactttggtacagtacccagatctcgctatccattggtagcgctattgaccttagctgatgaggatgaccgggaaatttatgatattatttccatggtgtcagtgattcatattcctgataggacttataaactatcctgcagaatattgtatcaatatttactcttggctcaaggtcaatttcatgatcttaagcaacttttcatgtctgcaaataataatttcactccctccaacaattcctcttcagaagaaaaaaacacagacagaagtttgttggaaaaggtgggactctctgaaagtgaagttgagccatcggaagagaacagcaaggactgtgttgtttgccagaatgggactgtgaactgggtactcttaccatgcagacacacatgcctgtgtgatggctgtgtgaagtattttcagcagtgcccaatgtgcaggcagtttgttcaggaatcttttgcactttgcagtcaaaaagagcaagataaagacaaaccgaagactctttgaagacatcgtaacactgaaaagtacactttctactaaagatgcagaaattgatgatcttggaattcatcataacatggaatctacagtactgaccatcaatgaaaattatattttaacttcatatttgtatggtacttggatgataaaaattaattattcctttctgcttagtgaatgaatactggaatccatctgtgttgatacataaaaattcattcaactcttgaaaagaatctaagagtttggccttttattagctagatttcctctcatgttaattagaaaaatcattctgaaaggcaatccattgaaaatttgaggaggttaaattcttaagatcactaaatgttttacctttgatgtaatcggagtgcaattaagaaaaaacttaattctacttaaagtaattgtgtgttccctagtttatacaaaggagttggaatgagcttctttagatcttttcctgaaataacagcttttataaatatccatctgtttggtttctaatgtcccttattatagttacgtaaatacaggtcatagttttaaatataggttcttaaatcataaatacaagatataattcttgactgttctccgtgtattataaaatgatactcatctataggaggcagatatataaaattcggataataagattttttggataattaaatttattaaattgatagtcaagtgtgattagattagcagaatgtgatctccagggaagatctgtgagacctttaatgccttaccttagatttctgcctgcacagcaaatccatccagaactgaggtgggaggtggaggttatagagctagaaaaatcactaaaagaaacaaataactatttttttctagtgtatttttattccaaataaaccctgtattcttctgaatagtaaattactttattcatc

SEQ ID NO: 18754 - DNA, 2533 bp, Homo sapiens
agctcatgagaaccccaggcaagtgcggacctacaaagtttgtccgctccggggcactgtagtggcttttaccctggccgggcgggcggggctcagccgggctgggctgggctccgcggctggagccgggctctacccagagcaagaccctgatggctgcggtgtttctggtaacgctttatgaatactcgccgcttttctacatcgcggtggtctttacctgcttcatcgtgaccaccggcctggtattgggatggtttggttgggatgttccagtaattctgagaaattcagaagagacccagttcagcacaagagttttcaaaaagcaaatgagacaagtcaagaatccttttggcttagagatcactaatccatcttcagcttcaattacaactggcataaccttgacaacagattgccttgaagatagcctccttacatgctactgggggtgcagtgttcaaaaattatatgaagctctgcagaagcatgtttattgcttcagaataagcactccccaagcattagaagatgctctgtatagtgaatatctctatcaggaacagtattttattaaaaaggatagcaaagaagaaatatattgccagttaccaagagatactaaaattgaagactttggtacagtacccagatctcgctatccattggtagcgctattgaccttagctgatgaggatgaccgggaaatttatgatattatttccatggtgtcagtgattcatattcctgataggacttataaactatcctgcagaatattgtatcaatatttactcttggctcaaggtcaatttcatgatcttaagcaacttttcatgtctgcaaataataatttcactccctccaacaattcctcttcagaagaaaaaaacacagacagaagtttgttggaaaaggtgggactctctgaaagtgaagttgagccatcggaagagaacagcaaggactgtgttgtttgccagaatgggactgtgaactgggtactcttaccatgcagacacacatgcctgtgtgatggctgtgtgaagtattttcagcagtgcccaatgtgcaggcagtttgttcaggaatcttttgcactttgcagtcaaaaagagcaagataaagacaaaccgaagactctttgaagacatcgtaacactgaaaagtacactttctactaaagatgcagaaattgatgatcttggaattcatcataacatggaatctacagtactgaccatcaatgaaaattatattttaacttcatatttgtatggtacttggatgataaaaattaattattcctttctgcttagtgaatgaatactggaatccatctgtgttgatacataaaaattcattcaactcttgaaaagaatctaagagtttggccttttattagctagatttcctctcatgttaattagaaaaatcattctgaaaggcaatccattgaaaatttgaggaggttaaattcttaagatcactaaatgttttacctttgatgtaatcggagtgcaattaagaaaaaacttaattctacttaaagtaattgtgtgttccctagtttatacaaaggagttggaatgagcttctttagatcttttcctgaaataacagcttttataaatatccatctgtttggtttctaatgtcccttattatagttacgtaaatacaggtcatagttttaaatataggttcttaaatcataaatacaagatataattcttgactgttctccgtgtattataaaatgatactcatctataggaggcagatatataaaattcggataataagattttttggataattaaatttattaaattgatagtcaagtgtgattagattagcagaatgtgatctccagggaagatctgtgagacctttaatgccttaccttagatttctgcctgcacagcaaatccatccagaactgaggtgggaggtggaggttatagagctagaaaaatcactaaaagaaacaaataactatttttttctagtgtatttttattccaaataaaccctgtattcttctgaatagtaaattactttattcatccattgttctgtctgtaagaattttgaaacttggtaggcagaaagaccccacccttttctctttccaagataactaaaagaaaaaggtaaatcagagctttccatgttttcagtgagaattatcataactcaccaagaaagcagatcatggcaaataaactgtgaccttcagggagatttttcaagcccctttttgtcctgtttgtattaagaataatgccttacctttgtatctgcatttttatataattccattccaaccaggtatagcactctgaagaagacattatctattctccattatataaaccaaatcaaactttcatctacattcactagctatgtaataaataccttctaggagccagatacttgttgagagtctgggctacaaagaatcaggcaagactcctgatgtcaggtatttgagcataaaaagagcattgatggctaattagaa

SEQ ID NO: 18755 - DNA, 2168 bp, Homo sapiens
agctcatgagaaccccaggcaagtgcggacctacaaagtttgtccgctccggggcactgtagtggcttttaccctggccgggcgggcggggctcagccgggctgggctgggctccgcggctggagccgggctctacccagagcaagaccctgatggctgcggtgtttctggtaacgctttatgaatactcgccgcttttctacatcgcggtggtctttacctgcttcatcgtgaccaccggcctggtattgggatgtagagatggggtttcatcatgttggccaggatggtctcgatcgcttgacctcatgatctgcccgcgatgacctcccgaagtgctgggattacaggtttggttgggatgttccagtaattctgagaaattcagaagagacccagttcagcacaagagttttcaaaaagcaaatgagacaagtcaagaatccttttggcttagagatcactaatccatcttcagcttcaattacaactggcataaccttgacaacagattgccttgaagatagcctccttacatgctactgggggtgcagtgttcaaaaattatatgaagctctgcagaagcatgtttattgcttcagaataagcactccccaagcattagaagatgctctgtatagtgaatatctctatcaggaacagtattttattaaaaaggatagcaaagaagaaatatattgccagttaccaagagatactaaaattgaagactttggtacagtacccagatctcgctatccattggtagcgctattgaccttagctgatgaggatgaccgggaaatttatgatattatttccatggtgtcagtgattcatattcctgataggacttataaactatcctgcagaatattgtatcaatatttactcttggctcaaggtcaatttcatgatcttaagcaacttttcatgtctgcaaataataatttcactccctccaacaattcctcttcagaagaaaaaaacacagacagaagtttgttggaaaaggtgggactctctgaaagtgaagttgagccatcggaagagaacagcaaggactgtgttgtttgccagaatgggactgtgaactgggtactcttaccatgcagacacacatgcctgtgtgatggctgtgtgaagtattttcagcagtgcccaatgtgcaggcagtttgttcaggaatcttttgcactttgcagtcaaaaagagcaagataaagacaaaccgaagactctttgaagacatcgtaacactgaaaagtacactttctactaaagatgcagaaattgatgatcttggaattcatcataacatggaatctacagtactgaccatcaatgaaaattatattttaacttcatatttgtatggtacttggatgataaaaattaattattcctttctgcttagtgaatgaatactggaatccatctgtgttgatacataaaaattcattcaactcttgaaaagaatctaagagtttggccttttattagctagatttcctctcatgttaattagaaaaatcattctgaaaggcaatccattgaaaatttgaggaggttaaattcttaagatcactaaatgttttacctttgatgtaatcggagtgcaattaagaaaaaacttaattctacttaaagtaattgtgtgttccctagtttatacaaaggagttggaatgagcttctttagatcttttcctgaaataacagcttttataaatatccatctgtttggtttctaatgtcccttattatagttacgtaaatacaggtcatagttttaaatataggttcttaaatcataaatacaagatataattcttgactgttctccgtgtattataaaatgatactcatctataggaggcagatatataaaattcggataataagattttttggataattaaatttattaaattgatagtcaagtgtgattagattagcagaatgtgatctccagggaagatctgtgagacctttaatgccttaccttagatttctgcctgcacagcaaatccatccagaactgaggtgggaggtggaggttatagagctagaaaaatcactaaaagaaacaaataactatttttttctagtgtatttttattccaaataaaccctgtattcttctgaatagtaaattactttattcatc

SEQ ID NO: 18756 - DNA, 1545 bp, Homo sapiens
gttcttatggttatagtggcaatttacctttacattttcaaaaagtattaaaaaggatagcaaagaagaaatatattgccagttaccaagagatactaaaattgaagactttggtacagtacccagatctcgctatccattggtagcgctattgaccttagctgatgaggatgaccgggaaatttatgatattatttccatggtgtcagtgattcatattcctgataggacttataaactatcctgcagaatattgtatcaatatttactcttggctcaaggtcaatttcatgatcttaagcaacttttcatgtctgcaaataataatttcactccctccaacaattcctcttcagaagaaaaaaacacagacagaagtttgttggaaaaggtgggactctctgaaagtgaagttgagccatcggaagagaacagcaaggactgtgttgtttgccagaatgggactgtgaactgggtactcttaccatgcagacacacatgcctgtgtgatggctgtgtgaagtattttcagcagtgcccaatgtgcaggcagtttgttcaggaatcttttgcactttgcagtcaaaaagagcaagataaagacaaaccgaagactctttgaagacatcgtaacactgaaaagtacactttctactaaagatgcagaaattgatgatcttggaattcatcataacatggaatctacagtactgaccatcaatgaaaattatattttaacttcatatttgtatggtacttggatgataaaaattaattattcctttctgcttagtgaatgaatactggaatccatctgtgttgatacataaaaattcattcaactcttgaaaagaatctaagagtttggccttttattagctagatttcctctcatgttaattagaaaaatcattctgaaaggcaatccattgaaaatttgaggaggttaaattcttaagatcactaaatgttttacctttgatgtaatcggagtgcaattaagaaaaaacttaattctacttaaagtaattgtgtgttccctagtttatacaaaggagttggaatgagcttctttagatcttttcctgaaataacagcttttataaatatccatctgtttggtttctaatgtcccttattatagttacgtaaatacaggtcatagttttaaatataggttcttaaatcataaatacaagatataattcttgactgttctccgtgtattataaaatgatactcatctataggaggcagatatataaaattcggataataagattttttggataattaaatttattaaattgatagtcaagtgtgattagattagcagaatgtgatctccagggaagatctgtgagacctttaatgccttaccttagatttctgcctgcacagcaaatccatccagaactgaggtgggaggtggaggttatagagctagaaaaatcactaaaagaaacaaataactatttttttctagtgtatttttattccaaataaaccctgtattcttctgaatagtaaattactttattcatc

SEQ ID NO: 18757 - DNA, 2019 bp, Homo sapiens
agctcatgagaaccccaggcaagtgcggacctacaaagtttgtccgctccggggcactgtagtggcttttaccctggccgggcgggcggggctcagccgggctgggctgggctccgcggctggagccgggctctacccagagcaagaccctgatggctgcggtgtttctggtaacgctttatgaatactcgccgcttttctacatcgcggtggtctttacctgcttcatcgtgaccaccggcctggtattgggatggtttggttgggatgttccagtaattctgagaaattcagaagagacccagttcagcacaagagttttcaaaaagcaaatgagacaagtcaagaatccttttggcttagagatcactaatccatcttcagcttcaattacaactggcataaccttgacaacagattgccttgaagatagcctccttacatgctactgggggtgcagtgttcaaaaattatatgaagctctgcagaagcatgtttattgcttcagaataagcactccccaagcattagaagatgctctgtatagtgaatatctctatcaggaacagtattttattaaaaaggatagcaaagaagaaatatattgccagttaccaagagatactaaaattgaagactttggtacagtacccagatctcgctatccattggtagcgctattgaccttagctgatgaggatgaccgggaaatttatgatattatttccatggtgtcagtgattcatattcctgataggacttataaactatcctgcagaatattgtatcaatatttactcttggctcaaggtcaatttcatgatcttaagaagaaaaaaacacagacagaagtttgttggaaaaggtgggactctctgaaagtgaagttgagccatcggaagagaacagcaaggactgtgttgtttgccagaatgggactgtgaactgggtactcttaccatgcagacacacatgcctgtgtgatggctgtgtgaagtattttcagcagtgcccaatgtgcaggcagtttgttcaggaatcttttgcactttgcagtcaaaaagagcaagataaagacaaaccgaagactctttgaagacatcgtaacactgaaaagtacactttctactaaagatgcagaaattgatgatcttggaattcatcataacatggaatctacagtactgaccatcaatgaaaattatattttaacttcatatttgtatggtacttggatgataaaaattaattattcctttctgcttagtgaatgaatactggaatccatctgtgttgatacataaaaattcattcaactcttgaaaagaatctaagagtttggccttttattagctagatttcctctcatgttaattagaaaaatcattctgaaaggcaatccattgaaaatttgaggaggttaaattcttaagatcactaaatgttttacctttgatgtaatcggagtgcaattaagaaaaaacttaattctacttaaagtaattgtgtgttccctagtttatacaaaggagttggaatgagcttctttagatcttttcctgaaataacagcttttataaatatccatctgtttggtttctaatgtcccttattatagttacgtaaatacaggtcatagttttaaatataggttcttaaatcataaatacaagatataattcttgactgttctccgtgtattataaaatgatactcatctataggaggcagatatataaaattcggataataagattttttggataattaaatttattaaattgatagtcaagtgtgattagattagcagaatgtgatctccagggaagatctgtgagacctttaatgccttaccttagatttctgcctgcacagcaaatccatccagaactgaggtgggaggtggaggttatagagctagaaaaatcactaaaagaaacaaataactatttttttctagtgtatttttattccaaataaaccctgtattcttctgaatagtaaattactttattcatc

SEQ ID NO: 18758 - DNA, 1313 bp, Homo sapiens
agctcatgagaaccccaggcaagtgcggacctacaaagtttgtccgctccggggcactgtagtggcttttaccctggccgggcgggcggggctcagccgggctgggctgggctccgcggctggagccgggctctacccagagcaagaccctgatggctgcggtgtttctggtaacgctttatgaatactcgccgcttttctacatcgcggtggtctttacctgcttcatcgtgaccaccggcctggtattgggatggtttggttgggatgttccagtaattctgagaaattcagaagagacccagttcagcacaagagttttcaaaaagcaaatgagacaagtcaagaatccttttggcttagagatcactaatccatcttcagcttcaattacaactggcataaccttgacaacagattgccttgaagatagcctccttacatgctactgggggtgcagtgttcaaaaattatatgaagctctgcagaagcatgtttattgcttcagaataagcactccccaagcattagaagatgctctgtatagtgaatatctctatcaggaacagtattttattaaaaaggatagcaaagaagaaatatattgccagttaccaagagatactaaaattgaagactttggtacagtacccagatctcgctatccattggtagcgctattgaccttagctgatgaggatgaccgggaaatttatgatattatttccatggtgtcagtgattcatattcctgataggacttataaactatcctgcagaatattgtatcaatatttactcttggctcaaggtcaatttcatgatcttaagcaacttttcatgtctgcaaataataatttcactccctccaacaattcctcttcagaagaaaaaaacacagacagaagtttgttggaaaaggtgggactctctgaaagtgaagttgagccatcggaagagaacagcaaggactgtgttgtttgccagaatgggactgtgaactgggtactcttaccatgcagacacacatgcctgtgtgatggctgtgtgaagtattttcagcagtgcccaatgtgcaggcagtttgttcaggaatcttttgcactttgcagtcaaaaagagcaagataaagacaaaccgaagactctttgaagacatcgtaacactgaaaagtacactttctactaaagatgcagaaattgatgatcttggaattcatcataacatggaatctacagtactgaccatcaatgaaaattatattttaacttcatatttgtatggtacttggatgataaaaattaattattcctt

SEQ ID NO: 18759 - DNA, 1378 bp, Homo sapiens
agctcatgagaaccccaggcaagtgcggacctacaaagtttgtccgctccggggcactgtagtggcttttaccctggccgggcgggcggggctcagccgggctgggctgggctccgcggctggagccgggctctacccagagcaagaccctgatggctgcggtgtttctggtaacgctttatgaatactcgccgcttttctacatcgcggtggtctttacctgcttcatcgtgaccaccggcctggtattgggatggtttggttgggatgttccagtaattctgagaaattcagaagagacccagttcagcacaagagttttcaaaaagcaaatgagacaagtcaagaatccttttggcttagagatcactaatccatcttcagcttcaattacaactggcataaccttgacaacagattgccttgaagatagcctccttacatgctactgggggtgcagtgttcaaaaattatatgaagctctgcagaagcatgtttattgcttcagaataagcactccccaagcattagaagatgctctgtatagtgaatatctctatcaggaacagtattttattaaaaaggatagcaaagaagaaatatattgccagttaccaagagatactaaaattgaagactttggtacagtacccagatctcgctatccattggtagcgctattgaccttagctgatgaggatgaccgggaaatttatgatattatttccatggtgtcagtgattcatattcctgataggacttataaactatcctgcagaatattgtatcaatatttactcttggctcaaggtcaatttcatgatcttaagcaacttttcatgtctgcaaataataatttcactccctccaacaattcctcttcagaagaaaaaaacacagacagaagtttgttggaaaaggtgggactctctgaaagtgaagttgagccatcggaagagaacagcaaggactgtgttgtttgccagaatgggactgtgaactgggtactcttaccatgcagacacacatgcctgtgtgatggctgtgtgaagtattttcagcagtgcccaatgtgcaggcagtttgttcaggaatcttttgcactttgcagtcaaaaagagcaagataaagacaaaccgaagactctttgaagacatcgtaacactgaaaagtacactttctactaaagatgcagaaattgatgatcttggaattcatcataacatggaatctacagtactgaccatcaatgaaaattatattttaacttcatatttgtatggtacttggatgataaaaattaattattcctttctgcttagtgaatgaatactggaatccatctgtgttgatacataaaaattcattcaactcttga

SEQ ID NO: 18760 - DNA, 1960 bp, Homo sapiens
agcagggggcaccggagccggagggccgcgggccggaggacgtcggggattcggtgtccccgggtgcctagaactccgactttctctgggaggaaaacaaggtggacgctgcacctgcgtcactgccctgcatcaccgtttggtttggttgggatgttccagtaattctgagaaattcagaagagacccagttcagcacaagagttttcaaaaagcaaatgagacaagtcaagaatccttttggcttagagatcactaatccatcttcagcttcaattacaactggcataaccttgacaacagattgccttgaagatagcctccttacatgctactgggggtgcagtgttcaaaaattatatgaagctctgcagaagcatgtttattgcttcagaataagcactccccaagcattagaagatgctctgtatagtgaatatctctatcaggaacagtattttattaaaaaggatagcaaagaagaaatatattgccagttaccaagagatactaaaattgaagactttggtacagtacccagatctcgctatccattggtagcgctattgaccttagctgatgaggatgaccgggaaatttatgatattatttccatggtgtcagtgattcatattcctgataggacttataaactatcctgcagaatattgtatcaatatttactcttggctcaaggtcaatttcatgatcttaagcaacttttcatgtctgcaaataataatttcactccctccaacaattcctcttcagaagaaaaaaacacagacagaagtttgttggaaaaggtgggactctctgaaagtgaagttgagccatcggaagagaacagcaaggactgtgttgtttgccagaatgggactgtgaactgggtactcttaccatgcagacacacatgcctgtgtgatggctgtgtgaagtattttcagcagtgcccaatgtgcaggcagtttgttcaggaatcttttgcactttgcagtcaaaaagagcaagataaagacaaaccgaagactctttgaagacatcgtaacactgaaaagtacactttctactaaagatgcagaaattgatgatcttggaattcatcataacatggaatctacagtactgaccatcaatgaaaattatattttaacttcatatttgtatggtacttggatgataaaaattaattattcctttctgcttagtgaatgaatactggaatccatctgtgttgatacataaaaattcattcaactcttgaaaagaatctaagagtttggccttttattagctagatttcctctcatgttaattagaaaaatcattctgaaaggcaatccattgaaaatttgaggaggttaaattcttaagatcactaaatgttttacctttgatgtaatcggagtgcaattaagaaaaaacttaattctacttaaagtaattgtgtgttccctagtttatacaaaggagttggaatgagcttctttagatcttttcctgaaataacagcttttataaatatccatctgtttggtttctaatgtcccttattatagttacgtaaatacaggtcatagttttaaatataggttcttaaatcataaatacaagatataattcttgactgttctccgtgtattataaaatgatactcatctataggaggcagatatataaaattcggataataagattttttggataattaaatttattaaattgatagtcaagtgtgattagattagcagaatgtgatctccagggaagatctgtgagacctttaatgccttaccttagatttctgcctgcacagcaaatccatccagaactgaggtgggaggtggaggttatagagctagaaaaatcactaaaagaaacaaataactatttttttctagtgtatttttattccaaataaaccctgtattcttctgaatagtaaattactttattcatc

SEQ ID NO: 18761 - DNA, 2174 bp, Homo sapiens
agctcatgagaaccccaggcaagtgcggacctacaaagtttgtccgctccggggcactgtagtggcttttaccctggccgggcgggcggggctcagccgggctgggctgggctccgcggctggagccgggctctacccagagcaagaccctgatggctgcggtgtttctggtaacgctttatgaatactcgccgcttttctacatcgcggtggtctttacctgcttcatcgtgaccaccggcctggtattgggatggtttggttgggatgttccagtaattctgagaaattcagaagagacccagttcagcacaagagttttcaaaaagcaaatgagacaagtcaagaatccttttggcttagagatcactaatccatcttcagcttcaattacaaggtctcactctgtcatccaggtggaaatgtagtggtgtgatcatggctgactgcagccgtgatcctcctacctcagccttccaagaagttaggaccacggctggcataaccttgacaacagattgccttgaagatagcctccttacatgctactgggggtgcagtgttcaaaaattatatgaagctctgcagaagcatgtttattgcttcagaataagcactccccaagcattagaagatgctctgtatagtgaatatctctatcaggaacagtattttattaaaaaggatagcaaagaagaaatatattgccagttaccaagagatactaaaattgaagactttggtacagtacccagatctcgctatccattggtagcgctattgaccttagctgatgaggatgaccgggaaatttatgatattatttccatggtgtcagtgattcatattcctgataggacttataaactatcctgcagaatattgtatcaatatttactcttggctcaaggtcaatttcatgatcttaagcaacttttcatgtctgcaaataataatttcactccctccaacaattcctcttcagaagaaaaaaacacagacagaagtttgttggaaaaggtgggactctctgaaagtgaagttgagccatcggaagagaacagcaaggactgtgttgtttgccagaatgggactgtgaactgggtactcttaccatgcagacacacatgcctgtgtgatggctgtgtgaagtattttcagcagtgcccaatgtgcaggcagtttgttcaggaatcttttgcactttgcagtcaaaaagagcaagataaagacaaaccgaagactctttgaagacatcgtaacactgaaaagtacactttctactaaagatgcagaaattgatgatcttggaattcatcataacatggaatctacagtactgaccatcaatgaaaattatattttaacttcatatttgtatggtacttggatgataaaaattaattattcctttctgcttagtgaatgaatactggaatccatctgtgttgatacataaaaattcattcaactcttgaaaagaatctaagagtttggccttttattagctagatttcctctcatgttaattagaaaaatcattctgaaaggcaatccattgaaaatttgaggaggttaaattcttaagatcactaaatgttttacctttgatgtaatcggagtgcaattaagaaaaaacttaattctacttaaagtaattgtgtgttccctagtttatacaaaggagttggaatgagcttctttagatcttttcctgaaataacagcttttataaatatccatctgtttggtttctaatgtcccttattatagttacgtaaatacaggtcatagttttaaatataggttcttaaatcataaatacaagatataattcttgactgttctccgtgtattataaaatgatactcatctataggaggcagatatataaaattcggataataagattttttggataattaaatttattaaattgatagtcaagtgtgattagattagcagaatgtgatctccagggaagatctgtgagacctttaatgccttaccttagatttctgcctgcacagcaaatccatccagaactgaggtgggaggtggaggttatagagctagaaaaatcactaaaagaaacaaataactatttttttctagtgtatttttattccaaataaaccctgtattcttctgaatagtaaattactttattcatc

SEQ ID NO: 18762 - DNA, 1748 bp, Homo sapiens
agctcatgagaaccccaggcaagtgcggacctacaaagtttgtccgctccggggcactgtagtggcttttaccctggccgggcgggcggggctcagccgggctgggctgggctccgcggctggagccgggctctacccagagcaagaccctgatggctgcggtgtttctggtaacgctttatgaatactcgccgcttttctacatcgcggtggtctttacctgcttcatcgtgaccaccggcctggtattgggatggtttggttgggatgttccagtaattctgagaaattcagaagagacccagttcagcacaagagttttcaaaaagcaaatgagacaagtcaagaatccttttggcttagagatcactaatccatcttcagcttcaattacaaatttccatggtgtcagtgattcatattcctgataggacttataaactatcctgcagaatattgtatcaatatttactcttggctcaaggtcaatttcatgatcttaagcaacttttcatgtctgcaaataataatttcactccctccaacaattcctcttcagaagaaaaaaacacagacagaagtttgttggaaaaggtgggactctctgaaagtgaagttgagccatcggaagagaacagcaaggactgtgttgtttgccagaatgggactgtgaactgggtactcttaccatgcagacacacatgcctgtgtgatggctgtgtgaagtattttcagcagtgcccaatgtgcaggcagtttgttcaggaatcttttgcactttgcagtcaaaaagagcaagataaagacaaaccgaagactctttgaagacatcgtaacactgaaaagtacactttctactaaagatgcagaaattgatgatcttggaattcatcataacatggaatctacagtactgaccatcaatgaaaattatattttaacttcatatttgtatggtacttggatgataaaaattaattattcctttctgcttagtgaatgaatactggaatccatctgtgttgatacataaaaattcattcaactcttgaaaagaatctaagagtttggccttttattagctagatttcctctcatgttaattagaaaaatcattctgaaaggcaatccattgaaaatttgaggaggttaaattcttaagatcactaaatgttttacctttgatgtaatcggagtgcaattaagaaaaaacttaattctacttaaagtaattgtgtgttccctagtttatacaaaggagttggaatgagcttctttagatcttttcctgaaataacagcttttataaatatccatctgtttggtttctaatgtcccttattatagttacgtaaatacaggtcatagttttaaatataggttcttaaatcataaatacaagatataattcttgactgttctccgtgtattataaaatgatactcatctataggaggcagatatataaaattcggataataagattttttggataattaaatttattaaattgatagtcaagtgtgattagattagcagaatgtgatctccagggaagatctgtgagacctttaatgccttaccttagatttctgcctgcacagcaaatccatccagaactgaggtgggaggtggaggttatagagctagaaaaatcactaaaagaaacaaataactatttttttctagtgtatttttattccaaataaaccctgtattcttctgaatagtaaattactttattcatc

SEQ ID NO: 18763 - DNA, 327 bp, Homo sapiens
cacgagtgcccatgtcaaccttgtttctatctcgcagaagctatgcttcaactcccaaagccttgcgcctggctgttgtttcctgcaggcctccatcaaaccttcctccctggccgtgaacaaatgtgactccatccgggaactccgaggactcgggaagagggatagagtcctgggctgagactcaggagacccatactccagtcccaacttcatcacggatttgctgtgtggctggacgttctgttctctctctgggcctcaatgtccttcttccaaaggaggcttttaataacaatagcagttccttgaacgcttactgtgtgc

SEQ ID NO: 18764 - DNA, 464 bp, Homo sapiens
cagctgccttcagagcgaagaccagtccagaagctctcagcctgctgctgttgatataaagtgaatcccctctcccgggttcagaagacaagagcgagacacacccctgcaaacctctttgaactcatgtctcatccaaaaatccatcagcatttatagctttttcaggagtttttagagcaacccccagcaggagccagtcaaaataactttggaagtgcatggttagattcttttcaggagacaaccttgatagcttattgttttttcttcaccttattgtgtgatgtttctcgccattcttttttttttttcattttacaacatgccattagattgccttaaagtctcctaaatatcccaatattagttacatatctgttccttgctactcctgcagatatttgaccctctgcctatcaattcaggtgaaagatctattacagattattataaaaagaaaa

SEQ ID NO: 18765 - DNA, 5445 bp, Homo sapiens
ctcccggatgttccgaggagcggaaagcaacacacgttgtgaggtggcgtccagaaggaagccccgcctaggccacgggcggaaatggctcctcgccttgctttgccgcccctccccactctcgcccaatccccgcggccgtcagagagccaaccaatgtttatctcggcattttcccgcgagaagtgttactaatatccgggaatggaaagggaagaacctccggggttaggcgtattctagattgacgccttttgctggaagagcgctgctggggttaggattctgcgcggcgaggcaagatgctcaagtccaagacgttcttaaaaaagacccgggcgggcggcgtgatgaagatcgtgcgcgagcactacctgcgagacgacatcggctgcggtgcgcccgggtgcgcagcgtgtggaggggcgcacgaggggccggccctggagccgcagccccaggacccggcgagcagcgtctgcccgcaaccgcactacttgctgcccgacactaatgtgttactgcaccagattgtaagtgcctggaggccggggacctgggcttctgtggcctccagcctgcgactcccaggcagcttagaaacctatgtagaacaagaacagggagaaaatgctaatgacaggaatgatagagcgattcgagtagcagcaaaatggtacaatgaacatttgaaaaaaatgtcagcagacaaccagctgcaagttatcttcataacaaatgacaggagaaacaaagagaaagccatagaagaaggaataccagctttcacttgtgaagaatatgtaaagagcctaactgctaaccccgaactcatagatcgtcttgcttgtttgtctgaagaagggaatgaaatagaaagtggaaaaataatattttcagagcatcttcccttaagtaagctacagcaaggcataaaatctggtacataccttcaaggaacatttagagctagcagggaaaattacttggaagctacagtatggattcatggcgacaatgaagaaaataaagagataatcttacagggacttaaacatttaaacagagctgttcacgaagatattgtggctgtggagcttctccccaagagtcagtgggtagcaccatcttctgtggttttacatgatgaaggtcaaaatgaagaagatgtggagaaagaagaagagagagaacgaatgcttaagactgctgtaagcgagaaaatgttgaagcctacaggtagagttgtaggaataataaaaaggaattggagaccatattgtggcatgctttccaagtctgacattaaggagtcaagaagacatctctttacacctgctgataagagaatccctcgaattcgcatagaaaccagacaggcttccacattagaaggacggagaattattgttgctattgatggttggcccagaaattccagatatccaaatggacactttgtgagaaatttaggtgatgttggagagaaagagactgaaacagaagttttgttacttgaacacgatgttccccatcagcctttttcacaggctgttcttagttttctgccaaagatgccctggagcattactgaaaaggacatgaaaaaccgagaagacctgaggcatctgtgtatttgtagtgtagacccaccaggatgtactgatatagacgatgctctacattgtcgagaactcgaaaatggaaatttggaggttggtgttcatattgctgatgtgagccattttattaggccaggaaatgccttggatcaagaatcagccagaagaggaacaactgtgtatctttgtgaaaagaggattgacatggttccagagttgcttagctctaacttgtgttccttaaaatgtgacgtggacaggctggcattttcatgtatttgggaaatgaatcacaatgctgaaatcttaaaaacgaagtttaccaaaagtgttattaattcaaaggcatctctgacatatgctgaagctcagttgagaattgattcagcaaacatgaatgatgatattaccactagtctccgtggactgaataaactagccaaaattctgaagaaaagaaggattgaaaaaggggctttgactctatcctctcctgaagttcgattccacatggacagtgaaactcacgatcctatagatctgcagaccaaggaacttagggaaacaaattccatggttgaagaatttatgttacttgccaatatttctgttgcaaaaaaaattcatgaggaattttctgaacatgctctgcttcgaaaacatcctgctccacctccatcaaattatgaaattcttgttaaggcagccaggtcaaggaatttggaaattaagactgatacagccaagtctttggctgagtctttggatcaggccgaatctcctacttttccatatctaaacactctgttgagaatattagccactcgctgtatgatgcaagctgtgtacttctgttctggaatggataatgattttcatcactatggcttagcgtctccaatatacacacattttacttcacccattagaagatacgcagatgtcattgttcatcggcttttggctgtggctattggggctgactgtacttatccagagttgacagacaaacacaagcttgcagatatatgtaaaaatctaaatttccggcacaaaatggctcaatatgcccaacgtgcatcagtggcttttcatacccagttattcttcaaaagcaaaggaatagtaagtgaagaagcctatattttatttgtaagaaagaatgccattgtggtattaattccaaagtatggtttagaagggacagtcttttttgaagaaaaggacaaaccaaacccacagcttatttatgatgatgagataccctcacttaaaatagaagatacagtgttccatgtatttgataaagttaaagtgaaaatcatgttagactcatctaatcttcaacatcagaagatccgaatgtccctggtagaaccacagataccaggaataagcattcctactgatacttcaaacatggaccttaatggaccaaagaaaaagaagatgaagcttggaaaatagctatattcaacaaaaatcttcaaagactggtttcttttttaaaagaaaaaacttgaaagaacacttctaagcctaagtgtgtgatacagtttgttacttttaagtacattttaataatttcagacatctgcatttttattgaacagttgactgtatctgacccatcatactactatacttctgggttgaacagaattatttatgcagaataattcaattgaatatccatcacttaaatacagtgacaggacagcaacttcagggatctgtaaagatcatttaaatggagtgctcatctcattgaggagcagattaattttgcgtaagtactttgattatttaatatttgtaagaaaaaactttcattttcctacagaggaaaatagaacaattttagaagcaaggaacaatctcttttctaagtcttggaagctgtcagtgttgaggatgtaatctcctttgccatctttaattcacctaacttacactaggtgttctcttactgtctttaaaagcttcctgtattttattagtggtccttgaaaaactgtgaatgtttgggaattggtagaaaggcaaaaagtaggatattttgacctgactggaaagatggttgtgtttttattgccaggtaataagtgtgatcattgttgaacttcagctccagtgtctctccagaataagacattggcattcaaatgtctatatcttgttacttacaaaataaaaaacagataattagtggcttttaaattgtagttatatcagtgtatatacacgaggggaactgtataaagacatactaaagggaacagattaaaataagtattattaataaaatttggtgtgccagactgactacttcccttgctaatcacagagattagtaatgattaaattaatatcttcaggaatattttgggatagggttgccttaaaacattttacttggcttattcaatttctaaagcacttacgttgtgccaggttccactcaagtaaactatctctgccttcaaggagcttgcagtatagtgagaaaagcctgccaagtaaatcagcaggtatactaaataggtagtcatttaggcactcaataaatgttgactaatttttccagtttcctattactgaggaaaacctccatacactgaggcagaaacttgtgtcagttggaggaaaatagacttgagtagtctttggtccaggtaaaatgggtcagtgacactgaaacagtagagtaggagtcaaaaaaccttttctgtgaagtgctagaacattttagactttgttggctatggtctgtattgcaactatagtacacaactctgccgttgatagtgtgtaaggagccatatacaatatgtaaacaaatcaacatgactgtgtttcaacaaggcctgatttgttaagtttcatatatagtcatatgtcacttaatgacagggatatgttctgagacatgtcacttggcaatttcatcattgtgtgaaaatcatgatgtagttacacaaacctagatggtataccctatggtatcctatatgggatagcctattgctcctaacctacaaacctgtatggcatattactgtactgattactgtaggcagttgtaacacagtgctaagtatttgtgtatctaaacatatctaaacatagaaaaggtacagtaaaaatatatatatagatatatataagatataaaatggtacacctatttaggacatttaccatgaacaagttggcaggactggaagctggctctgggtgagtcagtaagtggttagtgaatgtgaaggccatgatattactgtgcactactgtagacttttataaacactatatacttaggctacataaagtaatttcactatgatgttaccatggctgtgtccccaggcaataggaatttttcagctccattgtaatcttacgggatcatcatcgtatatttggccattgttgaccaaaagttatgcagcacgtcattataattttgatgtgtcacaaaacattactcatttgatttcccccacccccgccaaccatttaaaaaagtttgccggctaggtgcggtggctcatgcctgtaatcctagcattttgggaggacgaggcgggtggatcactcgatgtcaggagtttgagaccagcctggccaacatggtaaaacgccgtctctactaaaaatacaaaaacttagctgggtgtaacggcggatgcctgtaatcccagctacttgggaggctgaggcaggagaatcgcttgaacctgggaggcggaagttgcagtgagccgagattgcaccactgcagttcagcctggatgatgagagtgagactccatcgcaaaaa

SEQ ID NO: 18766 - DNA, 784 bp, Homo sapiens
atatgatatatagaagtctcagattctcttttttgtttgtttaatgctttttccattggcagggaaacaaattccatggttgaagaatttatgttacttgccaatatttctgttgcaaaaaaaattcatgaggaattttctgaacatgctctgcttcgaaaacatcctgctccacctccatcaaattatgaaattcttgttaaggcagccaggtcaaggaatttggaaattaagactgatacagccaagtctttggctgagtctttggatcaggccgaatctcctacttttccatatctaaacactctgttgagaatattagccactcgctgtatgatgcaagctgtgtacttctgttctggaatggataatgattttcatcactatggcttagcgtctccaatatacacacattttacttcacccattagaagatacgcagatgtcattgttcatcggcttttggctgtggctattggggctgactgtacttatccagagttgacagacaaacacaagcttgcagatatatgtaaaaatctaaatttccggcacaaaatggctcaatatgcccaacgtgcatcagtggcttttcatacccagttattcttcaaaagcaaaggaatagtaagtgaagaagcctatattttatttgtaagaaagaatgccattgtggtattaattccaaagtatggtttagaagggacagtctttttggggaaagggaaccaacccaggtttttgatggggaaacctataaaaaaaaaggtccgtttgtaagatg

SEQ ID NO: 18767 - DNA, 5535 bp, Homo sapiens
ctcccggatgttccgaggagcggaaagcaacacacgttgtgaggtggcgtccagaaggaagccccgcctaggccacgggcggaaatggctcctcgccttgctttgccgcccctccccactctcgcccaatccccgcggccgtcagagagccaaccaatgtttatctcggcattttcccgcgagaagtgttactaatatccgggaatggaaagggaagaacctccggggttaggcgtattctagattgacgccttttgctggaagagcgctgctggggttaggattctgcgcggcgaggcaagatgctcaagtccaagacgttcttaaaaaagacccgggcgggcggcgtgatgaagatcgtgcgcgagcactacctgcgagacgacatcggctgcggtgcgcccgggtgcgcagcgtgtggaggggcgcacgaggggccggccctggagccgcagccccaggacccggcgagcagcgtctgcccgcaaccgcactacttgctgcccgacactaatgtgttactgcaccagattgatgttcttgaggaccctgccatcaggaatgtaattgtgctacaaacagttcttcaagaagtgagaaatcgcagtgcccccgtatataaacgcatccgagatgtgactaataaccaagagaagcatttctatactttcactaatgagcaccatagagaaacctatgtagaacaagaacagggagaaaatgctaatgacaggaatgatagagcgattcgagtagcagcaaaatggtacaatgaacatttgaaaaaaatgtcagcagacaaccagctgcaagttatcttcataacaaatgacaggagaaacaaagagaaagccatagaagaaggaataccagctttcacttgtgaagaatatgtaaagagcctaactgctaaccccgaactcatagatcgtcttgcttgtttgtctgaagaagggaatgaaatagaaagtggaaaaataatattttcagagcatcttcccttaagtaagctacagcaaggcataaaatctggtacataccttcaaggaacatttagagctagcagggaaaattacttggaagctacagtatggattcatggcgacaatgaagaaaataaagagataatcttacagggacttaaacatttaaacagagctgttcacgaagatattgtggctgtggagcttctccccaagagtcagtgggtagcaccatcttctgtggttttacatgatgaaggtcaaaatgaagaagatgtggagaaagaagaagagagagaacgaatgcttaagactgctgtaagcgagaaaatgttgaagcctacaggtagagttgtaggaataataaaaaggaattggagaccatattgtggcatgctttccaagtctgacattaaggagtcaagaagacatctctttacacctgctgataagagaatccctcgaattcgcatagaaaccagacaggcttccacattagaaggacggagaattattgttgctattgatggttggcccagaaattccagatatccaaatggacactttgtgagaaatttaggtgatgttggagagaaagagactgaaacagaagttttgttacttgaacacgatgttccccatcagcctttttcacaggctgttcttagttttctgccaaagatgccctggagcattactgaaaaggacatgaaaaaccgagaagacctgaggcatctgtgtatttgtagtgtagacccaccaggatgtactgatatagacgatgctctacattgtcgagaactcgaaaatggaaatttggaggttggtgttcatattgctgatgtgagccattttattaggccaggaaatgccttggatcaagaatcagccagaagaggaacaactgtgtatctttgtgaaaagaggattgacatggttccagagttgcttagctctaacttgtgttccttaaaatgtgacgtggacaggctggcattttcatgtatttgggaaatgaatcacaatgctgaaatcttaaaaacgaagtttaccaaaagtgttattaattcaaaggcatctctgacatatgctgaagctcagttgagaattgattcagcaaacatgaatgatgatattaccactagtctccgtggactgaataaactagccaaaattctgaagaaaagaaggattgaaaaaggggctttgactctatcctctcctgaagttcgattccacatggacagtgaaactcacgatcctatagatctgcagaccaaggaacttagggaaacaaattccatggttgaagaatttatgttacttgccaatatttctgttgcaaaaaaaattcatgaggaattttctgaacatgctctgcttcgaaaacatcctgctccacctccatcaaattatgaaattcttgttaaggcagccaggtcaaggaatttggaaattaagactgatacagccaagtctttggctgagtctttggatcaggccgaatctcctacttttccatatctaaacactctgttgagaatattagccactcgctgtatgatgcaagctgtgtacttctgttctggaatggataatgattttcatcactatggcttagcgtctccaatatacacacattttacttcacccattagaagatacgcagatgtcattgttcatcggcttttggctgtggctattggggctgactgtacttatccagagttgacagacaaacacaagcttgcagatatatgtaaaaatctaaatttccggcacaaaatggctcaatatgcccaacgtgcatcagtggcttttcatacccagttattcttcaaaagcaaaggaatagtaagtgaagaagcctatattttatttgtaagaaagaatgccattgtggtattaattccaaagtatggtttagaagggacagtcttttttgaagaaaaggacaaaccaaacccacagcttatttatgatgatgagataccctcacttaaaatagaagatacagtgttccatgtatttgataaagttaaagtgaaaatcatgttagactcatctaatcttcaacatcagaagatccgaatgtccctggtagaaccacagataccaggaataagcattcctactgatacttcaaacatggaccttaatggaccaaagaaaaagaagatgaagcttggaaaatagctatattcaacaaaaatcttcaaagactggtttcttttttaaaagaaaaaacttgaaagaacacttctaagcctaagtgtgtgatacagtttgttacttttaagtacattttaataatttcagacatctgcatttttattgaacagttgactgtatctgacccatcatactactatacttctgggttgaacagaattatttatgcagaataattcaattgaatatccatcacttaaatacagtgacaggacagcaacttcagggatctgtaaagatcatttaaatggagtgctcatctcattgaggagcagattaattttgcgtaagtactttgattatttaatatttgtaagaaaaaactttcattttcctacagaggaaaatagaacaattttagaagcaaggaacaatctcttttctaagtcttggaagctgtcagtgttgaggatgtaatctcctttgccatctttaattcacctaacttacactaggtgttctcttactgtctttaaaagcttcctgtattttattagtggtccttgaaaaactgtgaatgtttgggaattggtagaaaggcaaaaagtaggatattttgacctgactggaaagatggttgtgtttttattgccaggtaataagtgtgatcattgttgaacttcagctccagtgtctctccagaataagacattggcattcaaatgtctatatcttgttacttacaaaataaaaaacagataattagtggcttttaaattgtagttatatcagtgtatatacacgaggggaactgtataaagacatactaaagggaacagattaaaataagtattattaataaaatttggtgtgccagactgactacttcccttgctaatcacagagattagtaatgattaaattaatatcttcaggaatattttgggatagggttgccttaaaacattttacttggcttattcaatttctaaagcacttacgttgtgccaggttccactcaagtaaactatctctgccttcaaggagcttgcagtatagtgagaaaagcctgccaagtaaatcagcaggtatactaaataggtagtcatttaggcactcaataaatgttgactaatttttccagtttcctattactgaggaaaacctccatacactgaggcagaaacttgtgtcagttggaggaaaatagacttgagtagtctttggtccaggtaaaatgggtcagtgacactgaaacagtagagtaggagtcaaaaaaccttttctgtgaagtgctagaacattttagactttgttggctatggtctgtattgcaactatagtacacaactctgccgttgatagtgtgtaaggagccatatacaatatgtaaacaaatcaacatgactgtgtttcaacaaggcctgatttgttaagtttcatatatagtcatatgtcacttaatgacagggatatgttctgagacatgtcacttggcaatttcatcattgtgtgaaaatcatgatgtagttacacaaacctagatggtataccctatggtatcctatatgggatagcctattgctcctaacctacaaacctgtatggcatattactgtactgattactgtaggcagttgtaacacagtgctaagtatttgtgtatctaaacatatctaaacatagaaaaggtacagtaaaaatatatatatagatatatataagatataaaatggtacacctatttaggacatttaccatgaacaagttggcaggactggaagctggctctgggtgagtcagtaagtggttagtgaatgtgaaggccatgatattactgtgcactactgtagacttttataaacactatatacttaggctacataaagtaatttcactatgatgttaccatggctgtgtccccaggcaataggaatttttcagctccattgtaatcttacgggatcatcatcgtatatttggccattgttgaccaaaagttatgcagcacgtcattataattttgatgtgtcacaaaacattactcatttgatttcccccacccccgccaaccatttaaaaaagtttgccggctaggtgcggtggctcatgcctgtaatcctagcattttgggaggacgaggcgggtggatcactcgatgtcaggagtttgagaccagcctggccaacatggtaaaacgccgtctctactaaaaatacaaaaacttagctgggtgtaacggcggatgcctgtaatcccagctacttgggaggctgaggcaggagaatcgcttgaacctgggaggcggaagttgcagtgagccgagattgcaccactgcagttcagcctggatgatgagagtgagactccatcgcaaaaa

SEQ ID NO: 18768 - DNA, 4294 bp, Homo sapiens
  misc_feature (4291)..(4291): n is a, c, g, or t
ctcccggatgttccgaggagcggaaagcaacacacgttgtgaggtggcgtccagaaggaagccccgcctaggccacgggcggaaatggctcctcgccttgctttgccgcccctccccactctcgcccaatccccgcggccgtcagagagccaaccaatgtttatctcggcattttcccgcgagaagtgttactaatatccgggaatggaaagggaagaacctccggggttaggcgtattctagattgacgccttttgctggaagagcgctgctggggttaggattctgcgcggcgaggcaagatgctcaagtccaagacgttcttaaaaaagacccgggcgggcggcgtgatgaagatcgtgcgcgagcactacctgcgagacgacatcggctgcggtgcgcccgggtgcgcagcgtgtggaggggcgcacgaggggccggccctggagccgcagccccaggacccggcgagcagcgtctgcccgcaaccgcactacttgctgcccgacactaatgtgttactgcaccagattgatgttcttgaggaccctgccatcaggaatgtaattgtgctacaaacagttcttcaagaagtgagaaatcgcagtgcccccgtatataaacgcatccgagatgtgactaataaccaagagaagcatttctatactttcactaatgagcaccatagagaaacctatgtagaacaagaacagggagaaaatgctaatgacaggaatgatagagcgattcgagtagcagcaaaatggtacaatgaacatttgaaaaaaatgtcagcagacaaccagctgcaagttatcttcataacaaatgacaggagaaacaaagagaaagccatagaagaaggaataccagctttcacttgtgaagaatatgtaaagagcctaactgctaaccccgaactcatagatcgtcttgcttgtttgtctgaagaagggaatgaaatagaaagtggaaaaataatattttcagagcatcttcccttaagtaagctacagcaaggcataaaatctggtacataccttcaaggaacatttagagctagcagggaaaattacttggaagctacagtatggattcatggcgacaatgaagaaaataaagagataatcttacagggacttaaacatttaaacagagctgttcacgaagatattgtggctgtggagcttctccccaagagtcagtgggtagcaccatcttctgtggttttacatgatgaaggtcaaaatgaagaagatgtggagaaagaagaagagagagaacgaatgcttaagactgctgtaagcgagaaaatgttgaagcctacaggtagagttgtaggaataataaaaaggaattggagaccatattgtggcatgctttccaagtctgacattaaggagtcaagaagacatctctttacacctgctgataagagaatccctcgaattcgcatagaaaccagacaggcttccacattagaaggacggagaattattgttgctattgatggttggcccagaaattccagatatccaaatggacactttgtgagaaatttaggtgatgttggagagaaagagactgaaacagaagttttgttacttgaacacgatgttccccatcagcctttttcacaggctgttcttagttttctgccaaagatgccctggagcattactgaaaaggacatgaaaaaccgagaagacctgaggcatctgtgtatttgtagtgtagacccaccaggatgtactgatatagacgatgctctacattgtcgagaactcgaaaatggaaatttggaggttggtgttcatattgctgatgtgagccattttattaggccaggaaatgccttggatcaagaatcagccagaagaggaacaactgtgtatctttgtgaaaagaggattgacatggttccagagttgcttagctctaacttgtgttccttaaaatgtgacgtggacaggctggcattttcatgtatttgggaaatgaatcacaatgctgaaatcttaaaaacgaagtttaccaaaagtgttattaattcaaaggcatctctgacatatgctgaagctcagttgagaattgattcagcaaacatgaatgatgatattaccactagtctccgtggactgaataaactagccaaaattctgaagaaaagaaggattgaaaaaggggctttgactctatcctctcctgaagttcgattccacatggacagtgaaactcacgatcctatagatctgcagaccaaggaacttagggaaacaaattccatggttgaagaatttatgttacttgccaatatttctgttgcaaaaaaaattcatgaggaattttctgaacatgctctgcttcgaaaacatcctgctccacctccatcaaattatgaaattcttgttaaggcagccaggtcaaggaatttggaaattaagactgatacagccaagtctttggctgagtctttggatcaggccgaatctcctacttttccatatctaaacactctgttgagaatattagccactcgctgtatgatgcaagctgtgtacttctgttctggaatggataatgattttcatcactatggcttagcgtctccaatatacacacattttacttcacccattagaagatacgcagatgtcattgttcatcggcttttggctgtggctattggggctgactgtacttatccagagttgacagacaaacacaagcttgcagatatatgtaaaaatctaaatttccggcacaaaatggctcaatatgcccaacgtgcatcagtggcttttcatacccagttattcttcaaaagcaaaggaatagtaagtgaagaagcctatattttatttgtaagaaagaatgccattgtggtattaattccaaagtatggtttagaagggacagtcttttttgaagaaaaggacaaaccaaacccacagcttatttatgatgatgagataccctcacttaaaatagaagatacagtgttccatgtatttgataaagttaaagtgaaaatcatgttagactcatctaatcttcaacatcagaagatccgaatgtccctggtagaaccacagataccaggaataagcattcctactgatacttcaaacatggaccttaatggaccaaagaaaaagaagatgaagcttggaaaatagctatattcaacaaaaatcttcaaagactggtttcttttttaaaagaaaaaacttgaaagaacacttctaagcctaagtgtgtgatacagtttgttacttttaagtacattttaataatttcagacatctgcatttttattgaacagttgactgtatctgacccatcatactactatacttctgggttgaacagaattatttatgcagaataattcaattgaatatccatcacttaaatacagtgacaggacagcaacttcagggatctgtaaagatcatttaaatggagtgctcatctcattgaggagcagattaattttgcgtaagtactttgattatttaatatttgtaagaaaaaactttcattttcctacagaggaaaatagaacaattttagaagcaaggaacaatctcttttctaagtcttggaagctgtcagtgttgaggatgtaatctcctttgccatctttaattcacctaacttacactaggtgttctcttactgtctttaaaagcttcctgtattttattagtggtccttgaaaaactgtgaatgtttgggaattggtagaaaggcaaaaagtaggatattttgacctgactggaaagatggttgtgtttttattgccaggtaataagtgtgatcattgttgaacttcagctccagtgtctctccagaataagacattggcattcaaatgtctatatcttgttacttacaaaataaaaaacagataattagtggcttttaaattgtagttatatcagtgtatatacacgaggggaactgtataaagacatactaaagggaacagattaaaataagtattattaataaaaaaaaaaaaaaaaaaaaaaaaaaaaaaaaaaaaaaaaaaaaaaaaaaaaaaaaaaaaaaaaaaaaaaaaaacaaaaaaaaaaaaaaaaaaaaaaaaaaaaataaaaaaaaaaaaaatgaaaaattattaaataaaacatataaaaactattaaaataaaaaaaaaaaaaaaaaaattttataccctcttcccaaatacttattaatttctagtcacatttttcatcctcctcctattcctttcatatttccaatccccccctttaaacctccnttc

SEQ ID NO: 18769 - DNA, 5603 bp, Homo sapiens
ctcccggatgttccgaggagcggaaagcaacacacgttgtgaggtggcgtccagaaggaagccccgcctaggccacgggcggaaatggctcctcgccttgctttgccgcccctccccactctcgcccaatccccgcggccgtcagagagccaaccaatgtttatctcggcattttcccgcgagaagtgttactaatatccgggaatggaaagggaagaacctccggggttaggcgtattctagattgacgccttttgctggaagagcgctgctggggttaggattctgcgcggcgaggcaagatgctcaagtccaagacgttcttaaaaaagacccgggcgggcggcgtgatgaagatcgtgcgcgagcactacctgcgagacgacatcggctgcggtgcgcccgggtgcgcagcgtgtggaggggcgcacgaggggccggccctggagccgcagccccaggacccggcgagcagcgtctgcccgcaaccgcactacttgctgcccgacactaatgtgttactgcaccagattgtaagtgcctggaggccggggacctgggcttctgtggcctccagcctgcgactcccaggcagcttattgatgttcttgaggaccctgccatcaggaatgtaattgtgctacaaacagttcttcaagaagtgagaaatcgcagtgcccccgtatataaacgcatccgagatgtgactaataaccaagagaagcatttctatactttcactaatgagcaccatagagaaacctatgtagaacaagaacagggagaaaatgctaatgacaggaatgatagagcgattcgagtagcagcaaaatggtacaatgaacatttgaaaaaaatgtcagcagacaaccagctgcaagttatcttcataacaaatgacaggagaaacaaagagaaagccatagaagaaggaataccagctttcacttgtgaagaatatgtaaagagcctaactgctaaccccgaactcatagatcgtcttgcttgtttgtctgaagaagggaatgaaatagaaagtggaaaaataatattttcagagcatcttcccttaagtaagctacagcaaggcataaaatctggtacataccttcaaggaacatttagagctagcagggaaaattacttggaagctacagtatggattcatggcgacaatgaagaaaataaagagataatcttacagggacttaaacatttaaacagagctgttcacgaagatattgtggctgtggagcttctccccaagagtcagtgggtagcaccatcttctgtggttttacatgatgaaggtcaaaatgaagaagatgtggagaaagaagaagagagagaacgaatgcttaagactgctgtaagcgagaaaatgttgaagcctacaggtagagttgtaggaataataaaaaggaattggagaccatattgtggcatgctttccaagtctgacattaaggagtcaagaagacatctctttacacctgctgataagagaatccctcgaattcgcatagaaaccagacaggcttccacattagaaggacggagaattattgttgctattgatggttggcccagaaattccagatatccaaatggacactttgtgagaaatttaggtgatgttggagagaaagagactgaaacagaagttttgttacttgaacacgatgttccccatcagcctttttcacaggctgttcttagttttctgccaaagatgccctggagcattactgaaaaggacatgaaaaaccgagaagacctgaggcatctgtgtatttgtagtgtagacccaccaggatgtactgatatagacgatgctctacattgtcgagaactcgaaaatggaaatttggaggttggtgttcatattgctgatgtgagccattttattaggccaggaaatgccttggatcaagaatcagccagaagaggaacaactgtgtatctttgtgaaaagaggattgacatggttccagagttgcttagctctaacttgtgttccttaaaatgtgacgtggacaggctggcattttcatgtatttgggaaatgaatcacaatgctgaaatcttaaaaacgaagtttaccaaaagtgttattaattcaaaggcatctctgacatatgctgaagctcagttgagaattgattcagcaaacatgaatgatgatattaccactagtctccgtggactgaataaactagccaaaattctgaagaaaagaaggattgaaaaaggggctttgactctatcctctcctgaagttcgattccacatggacagtgaaactcacgatcctatagatctgcagaccaaggaacttagggaaacaaattccatggttgaagaatttatgttacttgccaatatttctgttgcaaaaaaaattcatgaggaattttctgaacatgctctgcttcgaaaacatcctgctccacctccatcaaattatgaaattcttgttaaggcagccaggtcaaggaatttggaaattaagactgatacagccaagtctttggctgagtctttggatcaggccgaatctcctacttttccatatctaaacactctgttgagaatattagccactcgctgtatgatgcaagctgtgtacttctgttctggaatggataatgattttcatcactatggcttagcgtctccaatatacacacattttacttcacccattagaagatacgcagatgtcattgttcatcggcttttggctgtggctattggggctgactgtacttatccagagttgacagacaaacacaagcttgcagatatatgtaaaaatctaaatttccggcacaaaatggctcaatatgcccaacgtgcatcagtggcttttcatacccagttattcttcaaaagcaaaggaatagtaagtgaagaagcctatattttatttgtaagaaagaatgccattgtggtattaattccaaagtatggtttagaagggacagtcttttttgaagaaaaggacaaaccaaacccacagcttatttatgatgatgagataccctcacttaaaatagaagatacagtgttccatgtatttgataaagttaaagtgaaaatcatgttagactcatctaatcttcaacatcagaagatccgaatgtccctggtagaaccacagataccaggaataagcattcctactgatacttcaaacatggaccttaatggaccaaagaaaaagaagatgaagcttggaaaatagctatattcaacaaaaatcttcaaagactggtttcttttttaaaagaaaaaacttgaaagaacacttctaagcctaagtgtgtgatacagtttgttacttttaagtacattttaataatttcagacatctgcatttttattgaacagttgactgtatctgacccatcatactactatacttctgggttgaacagaattatttatgcagaataattcaattgaatatccatcacttaaatacagtgacaggacagcaacttcagggatctgtaaagatcatttaaatggagtgctcatctcattgaggagcagattaattttgcgtaagtactttgattatttaatatttgtaagaaaaaactttcattttcctacagaggaaaatagaacaattttagaagcaaggaacaatctcttttctaagtcttggaagctgtcagtgttgaggatgtaatctcctttgccatctttaattcacctaacttacactaggtgttctcttactgtctttaaaagcttcctgtattttattagtggtccttgaaaaactgtgaatgtttgggaattggtagaaaggcaaaaagtaggatattttgacctgactggaaagatggttgtgtttttattgccaggtaataagtgtgatcattgttgaacttcagctccagtgtctctccagaataagacattggcattcaaatgtctatatcttgttacttacaaaataaaaaacagataattagtggcttttaaattgtagttatatcagtgtatatacacgaggggaactgtataaagacatactaaagggaacagattaaaataagtattattaataaaatttggtgtgccagactgactacttcccttgctaatcacagagattagtaatgattaaattaatatcttcaggaatattttgggatagggttgccttaaaacattttacttggcttattcaatttctaaagcacttacgttgtgccaggttccactcaagtaaactatctctgccttcaaggagcttgcagtatagtgagaaaagcctgccaagtaaatcagcaggtatactaaataggtagtcatttaggcactcaataaatgttgactaatttttccagtttcctattactgaggaaaacctccatacactgaggcagaaacttgtgtcagttggaggaaaatagacttgagtagtctttggtccaggtaaaatgggtcagtgacactgaaacagtagagtaggagtcaaaaaaccttttctgtgaagtgctagaacattttagactttgttggctatggtctgtattgcaactatagtacacaactctgccgttgatagtgtgtaaggagccatatacaatatgtaaacaaatcaacatgactgtgtttcaacaaggcctgatttgttaagtttcatatatagtcatatgtcacttaatgacagggatatgttctgagacatgtcacttggcaatttcatcattgtgtgaaaatcatgatgtagttacacaaacctagatggtataccctatggtatcctatatgggatagcctattgctcctaacctacaaacctgtatggcatattactgtactgattactgtaggcagttgtaacacagtgctaagtatttgtgtatctaaacatatctaaacatagaaaaggtacagtaaaaatatatatatagatatatataagatataaaatggtacacctatttaggacatttaccatgaacaagttggcaggactggaagctggctctgggtgagtcagtaagtggttagtgaatgtgaaggccatgatattactgtgcactactgtagacttttataaacactatatacttaggctacataaagtaatttcactatgatgttaccatggctgtgtccccaggcaataggaatttttcagctccattgtaatcttacgggatcatcatcgtatatttggccattgttgaccaaaagttatgcagcacgtcattataattttgatgtgtcacaaaacattactcatttgatttcccccacccccgccaaccatttaaaaaagtttgccggctaggtgcggtggctcatgcctgtaatcctagcattttgggaggacgaggcgggtggatcactcgatgtcaggagtttgagaccagcctggccaacatggtaaaacgccgtctctactaaaaatacaaaaacttagctgggtgtaacggcggatgcctgtaatcccagctacttgggaggctgaggcaggagaatcgcttgaacctgggaggcggaagttgcagtgagccgagattgcaccactgcagttcagcctggatgatgagagtgagactccatcgcaaaaa

SEQ ID NO: 18770 - DNA, 5387 bp, Homo sapiens
aggaacctgagggaattgcataaaacagacagactaggcggcgcatgccgaatagatgagaaccgacctgtaaggagagctagaacagagaatatgggccagggacgagagaaaacgcggcaggatagagaggaggacagctcggcgaggcaagatgctcaagtccaagacgttcttaaaaaagacccgggcgggcggcgtgatgaagatcgtgcgcgagcactacctgcgagacgacatcggctgcggtgcgcccgggtgcgcagcgtgtggaggggcgcacgaggggccggccctggagccgcagccccaggacccggcgagcagcgtctgcccgcaaccgcactacttgctgcccgacactaatgtgttactgcaccagattgatgttcttgaggaccctgccatcaggaatgtaattgtgctacaaacagttcttcaagaagtgagaaatcgcagtgcccccgtatataaacgcatccgagatgtgactaataaccaagagaagcatttctatactttcactaatgagcaccatagagaaacctatgtagaacaagaacagggagaaaatgctaatgacaggaatgatagagcgattcgagtagcagcaaaatggtacaatgaacatttgaaaaaaatgtcagcagacaaccagctgcaagttatcttcataacaaatgacaggagaaacaaagagaaagccatagaagaaggaataccagctttcacttgtgaagaatatgtaaagagcctaactgctaaccccgaactcatagatcgtcttgcttgtttgtctgaagaagggaatgaaatagaaagtggaaaaataatattttcagagcatcttcccttaagtaagctacagcaaggcataaaatctggtacataccttcaaggaacatttagagctagcagggaaaattacttggaagctacagtatggattcatggcgacaatgaagaaaataaagagataatcttacagggacttaaacatttaaacagagctgttcacgaagatattgtggctgtggagcttctccccaagagtcagtgggtagcaccatcttctgtggttttacatgatgaaggtcaaaatgaagaagatgtggagaaagaagaagagagagaacgaatgcttaagactgctgtaagcgagaaaatgttgaagcctacaggtagagttgtaggaataataaaaaggaattggagaccatattgtggcatgctttccaagtctgacattaaggagtcaagaagacatctctttacacctgctgataagagaatccctcgaattcgcatagaaaccagacaggcttccacattagaaggacggagaattattgttgctattgatggttggcccagaaattccagatatccaaatggacactttgtgagaaatttaggtgatgttggagagaaagagactgaaacagaagttttgttacttgaacacgatgttccccatcagcctttttcacaggctgttcttagttttctgccaaagatgccctggagcattactgaaaaggacatgaaaaaccgagaagacctgaggcatctgtgtatttgtagtgtagacccaccaggatgtactgatatagacgatgctctacattgtcgagaactcgaaaatggaaatttggaggttggtgttcatattgctgatgtgagccattttattaggccaggaaatgccttggatcaagaatcagccagaagaggaacaactgtgtatctttgtgaaaagaggattgacatggttccagagttgcttagctctaacttgtgttccttaaaatgtgacgtggacaggctggcattttcatgtatttgggaaatgaatcacaatgctgaaatcttaaaaacgaagtttaccaaaagtgttattaattcaaaggcatctctgacatatgctgaagctcagttgagaattgattcagcaaacatgaatgatgatattaccactagtctccgtggactgaataaactagccaaaattctgaagaaaagaaggattgaaaaaggggctttgactctatcctctcctgaagttcgattccacatggacagtgaaactcacgatcctatagatctgcagaccaaggaacttagggaaacaaattccatggttgaagaatttatgttacttgccaatatttctgttgcaaaaaaaattcatgaggaattttctgaacatgctctgcttcgaaaacatcctgctccacctccatcaaattatgaaattcttgttaaggcagccaggtcaaggaatttggaaattaagactgatacagccaagtctttggctgagtctttggatcaggccgaatctcctacttttccatatctaaacactctgttgagaatattagccactcgctgtatgatgcaagctgtgtacttctgttctggaatggataatgattttcatcactatggcttagcgtctccaatatacacacattttacttcacccattagaagatacgcagatgtcattgttcatcggcttttggctgtggctattggggctgactgtacttatccagagttgacagacaaacacaagcttgcagatatatgtaaaaatctaaatttccggcacaaaatggctcaatatgcccaacgtgcatcagtggcttttcatacccagttattcttcaaaagcaaaggaatagtaagtgaagaagcctatattttatttgtaagaaagaatgccattgtggtattaattccaaagtatggtttagaagggacagtcttttttgaagaaaaggacaaaccaaacccacagcttatttatgatgatgagataccctcacttaaaatagaagatacagtgttccatgtatttgataaagttaaagtgaaaatcatgttagactcatctaatcttcaacatcagaagatccgaatgtccctggtagaaccacagataccaggaataagcattcctactgatacttcaaacatggaccttaatggaccaaagaaaaagaagatgaagcttggaaaatagctatattcaacaaaaatcttcaaagactggtttcttttttaaaagaaaaaacttgaaagaacacttctaagcctaagtgtgtgatacagtttgttacttttaagtacattttaataatttcagacatctgcatttttattgaacagttgactgtatctgacccatcatactactatacttctgggttgaacagaattatttatgcagaataattcaattgaatatccatcacttaaatacagtgacaggacagcaacttcagggatctgtaaagatcatttaaatggagtgctcatctcattgaggagcagattaattttgcgtaagtactttgattatttaatatttgtaagaaaaaactttcattttcctacagaggaaaatagaacaattttagaagcaaggaacaatctcttttctaagtcttggaagctgtcagtgttgaggatgtaatctcctttgccatctttaattcacctaacttacactaggtgttctcttactgtctttaaaagcttcctgtattttattagtggtccttgaaaaactgtgaatgtttgggaattggtagaaaggcaaaaagtaggatattttgacctgactggaaagatggttgtgtttttattgccaggtaataagtgtgatcattgttgaacttcagctccagtgtctctccagaataagacattggcattcaaatgtctatatcttgttacttacaaaataaaaaacagataattagtggcttttaaattgtagttatatcagtgtatatacacgaggggaactgtataaagacatactaaagggaacagattaaaataagtattattaataaaatttggtgtgccagactgactacttcccttgctaatcacagagattagtaatgattaaattaatatcttcaggaatattttgggatagggttgccttaaaacattttacttggcttattcaatttctaaagcacttacgttgtgccaggttccactcaagtaaactatctctgccttcaaggagcttgcagtatagtgagaaaagcctgccaagtaaatcagcaggtatactaaataggtagtcatttaggcactcaataaatgttgactaatttttccagtttcctattactgaggaaaacctccatacactgaggcagaaacttgtgtcagttggaggaaaatagacttgagtagtctttggtccaggtaaaatgggtcagtgacactgaaacagtagagtaggagtcaaaaaaccttttctgtgaagtgctagaacattttagactttgttggctatggtctgtattgcaactatagtacacaactctgccgttgatagtgtgtaaggagccatatacaatatgtaaacaaatcaacatgactgtgtttcaacaaggcctgatttgttaagtttcatatatagtcatatgtcacttaatgacagggatatgttctgagacatgtcacttggcaatttcatcattgtgtgaaaatcatgatgtagttacacaaacctagatggtataccctatggtatcctatatgggatagcctattgctcctaacctacaaacctgtatggcatattactgtactgattactgtaggcagttgtaacacagtgctaagtatttgtgtatctaaacatatctaaacatagaaaaggtacagtaaaaatatatatatagatatatataagatataaaatggtacacctatttaggacatttaccatgaacaagttggcaggactggaagctggctctgggtgagtcagtaagtggttagtgaatgtgaaggccatgatattactgtgcactactgtagacttttataaacactatatacttaggctacataaagtaatttcactatgatgttaccatggctgtgtccccaggcaataggaatttttcagctccattgtaatcttacgggatcatcatcgtatatttggccattgttgaccaaaagttatgcagcacgtcattataattttgatgtgtcacaaaacattactcatttgatttcccccacccccgccaaccatttaaaaaagtttgccggctaggtgcggtggctcatgcctgtaatcctagcattttgggaggacgaggcgggtggatcactcgatgtcaggagtttgagaccagcctggccaacatggtaaaacgccgtctctactaaaaatacaaaaacttagctgggtgtaacggcggatgcctgtaatcccagctacttgggaggctgaggcaggagaatcgcttgaacctgggaggcggaagttgcagtgagccgagattgcaccactgcagttcagcctggatgatgagagtgagactccatcgcaaaaa

SEQ ID NO: 18771 - DNA, 4086 bp, Homo sapiens
atcagtattaactcatttcatcttcacaacagctccataagatggtaatcagtatccctcttttaaggatgaggaaactgaggcacagataagtaaactaacttgcccaaggttatatagccagcgagaggcaaagctgagactgatgggacgaagatgcgccatcttgctcccatcagcctttttcacaggctgttcttagttttctgccaaagatgccctggagcattactgaaaaggacatgaaaaaccgagaagacctgaggcatctgtgtatttgtagtgtagacccaccaggatgtactgatatagacgatgctctacattgtcgagaactcgaaaatggaaatttggaggttggtgttcatattgctgatgtgagccattttattaggccaggaaatgccttggatcaagaatcagccagaagaggaacaactgtgtatctttgtgaaaagaggattgacatggttccagagttgcttagctctaacttgtgttccttaaaatgtgacgtggacaggctggcattttcatgtatttgggaaatgaatcacaatgctgaaatcttaaaaacgaagtttaccaaaagtgttattaattcaaaggcatctctgacatatgctgaagctcagttgagaattgattcagcaaacatgaatgatgatattaccactagtctccgtggactgaataaactagccaaaattctgaagaaaagaaggattgaaaaaggggctttgactctatcctctcctgaagttcgattccacatggacagtgaaactcacgatcctatagatctgcagaccaaggaacttagggaaacaaattccatggttgaagaatttatgttacttgccaatatttctgttgcaaaaaaaattcatgaggaattttctgaacatgctctgcttcgaaaacatcctgctccacctccatcaaattatgaaattcttgttaaggcagccaggtcaaggaatttggaaattaagactgatacagccaagtctttggctgagtctttggatcaggccgaatctcctacttttccatatctaaacactctgttgagaatattagccactcgctgtatgatgcaagctgtgtacttctgttctggaatggataatgattttcatcactatggcttagcgtctccaatatacacacattttacttcacccattagaagatacgcagatgtcattgttcatcggcttttggctgtggctattggggctgactgtacttatccagagttgacagacaaacacaagcttgcagatatatgtaaaaatctaaatttccggcacaaaatggctcaatatgcccaacgtgcatcagtggcttttcatacccagttattcttcaaaagcaaaggaatagtaagtgaagaagcctatattttatttgtaagaaagaatgccattgtggtattaattccaaagtatggtttagaagggacagtcttttttgaagaaaaggacaaaccaaacccacagcttatttatgatgatgagataccctcacttaaaatagaagatacagtgttccatgtatttgataaagttaaagtgaaaatcatgttagactcatctaatcttcaacatcagaagatccgaatgtccctggtagaaccacagataccaggaataagcattcctactgatacttcaaacatggaccttaatggaccaaagaaaaagaagatgaagcttggaaaatagctatattcaacaaaaatcttcaaagactggtttcttttttaaaagaaaaaacttgaaagaacacttctaagcctaagtgtgtgatacagtttgttacttttaagtacattttaataatttcagacatctgcatttttattgaacagttgactgtatctgacccatcatactactatacttctgggttgaacagaattatttatgcagaataattcaattgaatatccatcacttaaatacagtgacaggacagcaacttcagggatctgtaaagatcatttaaatggagtgctcatctcattgaggagcagattaattttgcgtaagtactttgattatttaatatttgtaagaaaaaactttcattttcctacagaggaaaatagaacaattttagaagcaaggaacaatctcttttctaagtcttggaagctgtcagtgttgaggatgtaatctcctttgccatctttaattcacctaacttacactaggtgttctcttactgtctttaaaagcttcctgtattttattagtggtccttgaaaaactgtgaatgtttgggaattggtagaaaggcaaaaagtaggatattttgacctgactggaaagatggttgtgtttttattgccaggtaataagtgtgatcattgttgaacttcagctccagtgtctctccagaataagacattggcattcaaatgtctatatcttgttacttacaaaataaaaaacagataattagtggcttttaaattgtagttatatcagtgtatatacacgaggggaactgtataaagacatactaaagggaacagattaaaataagtattattaataaaatttggtgtgccagactgactacttcccttgctaatcacagagattagtaatgattaaattaatatcttcaggaatattttgggatagggttgccttaaaacattttacttggcttattcaatttctaaagcacttacgttgtgccaggttccactcaagtaaactatctctgccttcaaggagcttgcagtatagtgagaaaagcctgccaagtaaatcagcaggtatactaaataggtagtcatttaggcactcaataaatgttgactaatttttccagtttcctattactgaggaaaacctccatacactgaggcagaaacttgtgtcagttggaggaaaatagacttgagtagtctttggtccaggtaaaatgggtcagtgacactgaaacagtagagtaggagtcaaaaaaccttttctgtgaagtgctagaacattttagactttgttggctatggtctgtattgcaactatagtacacaactctgccgttgatagtgtgtaaggagccatatacaatatgtaaacaaatcaacatgactgtgtttcaacaaggcctgatttgttaagtttcatatatagtcatatgtcacttaatgacagggatatgttctgagacatgtcacttggcaatttcatcattgtgtgaaaatcatgatgtagttacacaaacctagatggtataccctatggtatcctatatgggatagcctattgctcctaacctacaaacctgtatggcatattactgtactgattactgtaggcagttgtaacacagtgctaagtatttgtgtatctaaacatatctaaacatagaaaaggtacagtaaaaatatatatatagatatatataagatataaaatggtacacctatttaggacatttaccatgaacaagttggcaggactggaagctggctctgggtgagtcagtaagtggttagtgaatgtgaaggccatgatattactgtgcactactgtagacttttataaacactatatacttaggctacataaagtaatttcactatgatgttaccatggctgtgtccccaggcaataggaatttttcagctccattgtaatcttacgggatcatcatcgtatatttggccattgttgaccaaaagttatgcagcacgtcattataattttgatgtgtcacaaaacattactcatttgatttcccccacccccgccaaccatttaaaaaagtttgccggctaggtgcggtggctcatgcctgtaatcctagcattttgggaggacgaggcgggtggatcactcgatgtcaggagtttgagaccagcctggccaacatggtaaaacgccgtctctactaaaaatacaaaaacttagctgggtgtaacggcggatgcctgtaatcccagctacttgggaggctgaggcaggagaatcgcttgaacctgggaggcggaagttgcagtgagccgagattgcaccactgcagttcagcctggatgatgagagtgagactccatcgcaaaaa

SEQ ID NO: 18772 - DNA, 3433 bp, Homo sapiens
ctcccggatgttccgaggagcggaaagcaacacacgttgtgaggtggcgtccagaaggaagccccgcctaggccacgggcggaaatggctcctcgccttgctttgccgcccctccccactctcgcccaatccccgcggccgtcagagagccaaccaatgtttatctcggcattttcccgcgagaagtgttactaatatccgggaatggaaagggaagaacctccggggttaggcgtattctagattgacgccttttgctggaagagcgctgctggggttaggattctgcgcggcgaggcaagatgctcaagtccaagacgttcttaaaaaagacccgggcgggcggcgtgatgaagatcgtgcgcgagcactacctgcgagacgacatcggctgcggtgcgcccgggtgcgcagcgtgtggaggggcgcacgaggggccggccctggagccgcagccccaggacccggcgagcagcgtctgcccgcaaccgcactacttgctgcccgacactaatgtgttactgcaccagattgatgttcttgaggaccctgccatcaggaatgtaattgtgctacaaacagttcttcaagaagtgagaaatcgcagtgcccccgtatataaacgcatccgagatgtgactaataaccaagagaagcatttctatactttcactaatgagcaccatagagaaacctatgtagaacaagaacagggagaaaatgctaatgacaggaatgatagagcgattcgagtagcagcaaaatggtacaatgaacatttgaaaaaaatgtcagcagacaaccagctgcaagttatcttcataacaaatgacaggagaaacaaagagaaagccatagaagaaggaataccagctttcacttgtgaagaatatgtaaagagcctaactgctaaccccgaactcatagatcgtcttgcttgtttgtctgaagaagggaatgaaatagaaagtggaaaaataatattttcagagcatcttcccttaagtaagctacagcaaggcataaaatctggtacataccttcaaggaacatttagagctagcagggaaaattacttggaagctacagtatggattcatggcgacaatgaagaaaataaagagataatcttacagggacttaaacatttaaacagagctgttcacgaagatattgtggctgtggagcttctccccaagagtcagtgggtagcaccatcttctgtggttttacatgatgaaggtcaaaatgaagaagatgtggagaaagaagaagagagagaacgaatgcttaagactgctgtaagcgagaaaatgttgaagcctacaggtagagttgtaggaataataaaaaggaattggagaccatattgtggcatgctttccaagtctgacattaaggagtcaagaagacatctctttacacctgctgataagagaatccctcgaattcgcatagaaaccagacaggcttccacattagaaggacggagaattattgttgctattgatggttggcccagaaattccagatatccaaatggacactttgtgagaaatttaggtgatgttggagagaaagagactgaaacagaagttttgttacttgaacacgatgttccccatcagcctttttcacaggctgttcttagttttctgccaaagatgccctggagcattactgaaaaggacatgaaaaaccgagaagacctgaggcatctgtgtatttgtagtgtagacccaccaggatgtactgatatagacgatgctctacattgtcgagaactcgaaaatggaaatttggaggttggtgttcatattgctgatgtgagccattttattaggccaggaaatgccttggatcaagaatcagccagaagaggaacaactgtgtatctttgtgaaaagaggattgacatggttccagagttgcttagctctaacttgtgttccttaaaatgtgacgtggacaggctggcattttcatgtatttgggaaatgaatcacaatgctgaaatcttaaaaacgaagtttaccaaaagtgttattaattcaaaggcatctctgacatatgctgaagctcagttgagaattgattcagcaaacatgaatgatgatattaccactagtctccgtggactgaataaactagccaaaattctgaagaaaagaaggattgaaaaaggggctttgactctatcctctcctgaagttcgattccacatggacagtgaaactcacgatcctatagatctgcagaccaaggaacttagggaaacaaattccatggttgaagaatttatgttacttgccaatatttctgttgcaaaaaaaattcatgaggaattttctgaacatgctctgcttcgaaaacatcctgctccacctccatcaaattatgaaattcttgttaaggcagccaggtcaaggaatttggaaattaagactgatacagccaagtctttggctgagtctttggatcaggccgaatctcctacttttccatatctaaacactctgttgagaatattagccactcgctgtatgatgcaagctgtgtacttctgttctggaatggataatgattttcatcactatggcttagcgtctccaatatacacacattttacttcacccattagaagatacgcagatgtcattgttcatcggcttttggctgtggctattggggctgactgtacttatccagagttgacagacaaacacaagcttgcagatatatgtaaaaatctaaatttccggcacaaaatggctcaatatgcccaacgtgcatcagtggcttttcatacccagttattcttcaaaagcaaaggaatagtaagtgaagaagcctatattttatttgtaagaaagaatgccattgtggtattaattccaaagtatggtttagaagggacagtcttttttgaagaaaaggacaaaccaaacccacagcttatttatgatgatgagataccctcacttaaaatagaagatacagtgttccatgtatttgataaagttaaagtgaaaatcatgttagactcatctaatcttcaacatcagaagatccgaatgtccctggtagaaccacagataccaggaataagcattcctactgatacttcaaacatggaccttaatggaccaaagaaaaagaagatgaagcttggaaaatagctatattcaacaaaaatcttcaaagactggtttcttttttaaaagaaaaaacttgaaagaacacttctaagcctaagtgtgtgatacagtttgttacttttaagtacattttaataatttcagacatctgcatttttattgaacagttgactgtatctgacccatcatactactatacttctgggttgaacagaattatttatgcagaataattcaattgaatatccatcacttaaatacagtgacaggacagc

SEQ ID NO: 18773 - DNA, 3930 bp, Homo sapiens
ctcccggatgttccgaggagcggaaagcaacacacgttgtgaggtggcgtccagaaggaagccccgcctaggccacgggcggaaatggctcctcgccttgctttgccgcccctccccactctcgcccaatccccgcggccgtcagagagccaaccaatgtttatctcggcattttcccgcgagaagtgttactaatatccgggaatggaaagggaagaacctccggggttaggcgtattctagattgacgccttttgctggaagagcgctgctggggttaggattctgcgcggcgaggcaagatgctcaagtccaagacgttcttaaaaaagacccgggcgggcggcgtgatgaagatcgtgcgcgagcactacctgcgagacgacatcggctgcggtgcgcccgggtgcgcagcgtgtggaggggcgcacgaggggccggccctggagccgcagccccaggacccggcgagcagcgtctgcccgcaaccgcactacttgctgcccgacactaatgtgttactgcaccagattgatgttcttgaggaccctgccatcaggaatgtaattgtgctacaaacagttcttcaagaagtgagaaatcgcagtgcccccgtatataaacgcatccgagatgtgactaataaccaagagaagcatttctatactttcactaatgagcaccatagagaaacctatgtagaacaagaacagggagaaaatgctaatgacaggaatgatagagcgattcgagtagcagcaaaatggtacaatgaacatttgaaaaaaatgtcagcagacaaccagctgcaagttatcttcataacaaatgacaggagaaacaaagagaaagccatagaagaaggaataccagctttcacttgtgaagaatatgtaaagagcctaactgctaaccccgaactcatagatcgtcttgcttgtttgtctgaagaagggaatgaaatagaaagtggaaaaataatattttcagagcatcttcccttaagtaagctacagcaaggcataaaatctggtacataccttcaaggaacatttagagctagcagggaaaattacttggaagctacagtatggattcatggcgacaatgaagaaaataaagagataatcttacagggacttaaacatttaaacagagctgttcacgaagatattgtggctgtggagcttctccccaagagtcagtgggtagcaccatcttctgtggttttacatgatgaaggtcaaaatgaagaagatgtggagaaagaagaagagagagaacgaatgcttaagactgctgtaagcgagaaaatgttgaagcctacaggtagagttgtaggaataataaaaaggaattggagaccatattgtggcatgctttccaagtctgacattaaggagtcaagaagacatctctttacacctgctgataagagaatccctcgaattcgcatagaaaccagacaggcttccacattagaaggacggagaattattgttgctattgatggttggcccagaaattccagatatccaaatggacactttgtgagaaatttaggtgatgttggagagaaagagactgaaacagaagttttgttacttgaacacgatgttccccatcagcctttttcacaggctgttcttagttttctgccaaagatgccctggagcattactgaaaaggacatgaaaaaccgagaagacctgaggcatctgtgtatttgtagtgtagacccaccaggatgtactgatatagacgatgctctacattgtcgagaactcgaaaatggaaatttggaggttggtgttcatattgctgatgtgagccattttattaggccaggaaatgccttggatcaagaatcagccagaagaggaacaactgtgtatctttgtgaaaagaggattgacatggttccagagttgcttagctctaacttgtgttccttaaaatgtgacgtggacaggctggcattttcatgtatttgggaaatgaatcacaatgctgaaatcttaaaaacgaagtttaccaaaagtgttattaattcaaaggcatctctgacatatgctgaagctcagttgagaattgattcagcaaacatgaatgatgatattaccactagtctccgtggactgaataaactagccaaaattctgaagaaaagaaggattgaaaaaggggctttgactctatcctctcctgaagttcgattccacatggacagtgaaactcacgatcctatagatctgcagaccaaggaacttagggaaacaaattccatggttgaagaatttatgttacttgccaatatttctgttgcaaaaaaaattcatgaggaattttctgaacatgctctgcttcgaaaacatcctgctccacctccatcaaattatgaaattcttgttaaggcagccaggtcaaggaatttggaaattaagactgatacagccaagtctttggctgagtctttggatcaggccgaatctcctacttttccatatctaaacactctgttgagaatattagccactcgctgtatgatgcaagctgtgtacttctgttctggaatggataatgattttcatcactatggcttagcgtctccaatatacacacattttacttcacccattagaagatacgcagatgtcattgttcatcggcttttggctgtggctattggggctgactgtacttatccagagttgacagacaaacacaagcttgcagatatatgtaaaaatctaaatttccggcacaaaatggctcaatatgcccaacgtgcatcagtggcttttcatacccagttattcttcaaaagcaaaggaatagtaagtgaagaagcctatattttatttgtaagaaagaatgccattgtggtattaattccaaagtatggtttagaagggacagtcttttttgaagaaaaggacaaaccaaacccacagcttatttatgatgatgagataccctcacttaaaatagaagatacagtgttccatgtatttgataaagttaaagtgaaaatcatgttagactcatctaatcttcaacatcagaagatccgaatgtccctggtagaaccacagataccaggaataagcattcctactgatacttcaaacatggaccttaatggaccaaagaaaaagaagatgaagcttggaaaatagctatattcaacaaaaatcttcaaagactggtttcttttttaaaagaaaaaacttgaaagaacacttctaagcctaagtgtgtgatacagtttgttacttttaagtacattttaataatttcagacatctgcatttttattgaacagttgactgtatctgacccatcatactactatacttctgggttgaacagaattatttatgcagaataattcaattgaatatccatcacttaaatacagtgacaggacagcaacttcagggatctgtaaagatcatttaaatggagtgctcatctcattgaggagcagattaattttgcgtaagtactttgattatttaatatttgtaagaaaaaactttcattttcctacagaggaaaatagaacaattttagaagcaaggaacaatctcttttctaagtcttggaagctgtcagtgttgaggatgtaatctcctttgccatctttaattcacctaacttacactaggtgttctcttactgtctttaaaagcttcctgtattttattagtggtccttgaaaaactgtgaatgtttgggaattggtagaaaggcaaaaagtaggatattttgacctgactggaaagatggttgtgtttttattgccaggtaataagtgtgatcattgttgaacttcagctccagtgtctctccagaataagacattggcattcaaatgtctatatcttgttacttacaaaataaaaaacagataattagtggctttta

SEQ ID NO: 18774 - DNA, 3001 bp, Homo sapiens
ctcccggatgttccgaggagcggaaagcaacacacgttgtgaggtggcgtccagaaggaagccccgcctaggccacgggcggaaatggctcctcgccttgctttgccgcccctccccactctcgcccaatccccgcggccgtcagagagccaaccaatgtttatctcggcattttcccgcgagaagtgttactaatatccgggaatggaaagggaagaacctccggggttaggcgtattctagattgacgccttttgctggaagagcgctgctggggttaggattctgcgcggcgaggcaagatgctcaagtccaagacgttcttaaaaaagacccgggcgggcggcgtgatgaagatcgtgcgcgagcactacctgcgagacgacatcggctgcggtgcgcccgggtgcgcagcgtgtggaggggcgcacgaggggccggccctggagccgcagccccaggacccggcgagcagcgtctgcccgcaaccgcactacttgctgcccgacactaatgtgttactgcaccagattgatgttcttgaggaccctgccatcaggaatgtaattgtgctacaaacagttcttcaagaagtgagaaatcgcagtgcccccgtatataaacgcatccgagatgtgactaataaccaagagaagcatttctatactttcactaatgagcaccatagagaaacctatgtagaacaagaacagggagaaaatgctaatgacaggaatgatagagcgattcgagtagcagcaaaatggtacaatgaacatttgaaaaaaatgtcagcagacaaccagctgcaagttatcttcataacaaatgacaggagaaacaaagagaaagccatagaagaaggaataccagctttcacttgtgaagaatatgtaaagagcctaactgctaaccccgaactcatagatcgtcttgcttgtttgtctgaagaagggaatgaaatagaaagtggaaaaataatattttcagagcatcttcccttaagtaagctacagcaaggcataaaatctggtacataccttcaaggaacatttagagctagcagggaaaattacttggaagctacagtatggattcatggcgacaatgaagaaaataaagagataatcttacagggacttaaacatttaaacagagctgttcacgaagatattgtggctgtggagcttctccccaagagtcagtgggtagcaccatcttctgtggttttacatgatgaaggtcaaaatgaagaagatgtggagaaagaagaagagagagaacgaatgcttaagactgctgtaagcgagaaaatgttgaagcctacaggtagagttgtaggaataataaaaaggaattggagaccatattgtggcatgctttccaagtctgacattaaggagtcaagaagacatctctttacacctgctgataagagaatccctcgaattcgcatagaaaccagacaggcttccacattagaaggacggagaattattgttgctattgatggttggcccagaaattccagatatccaaatggacactttgtgagaaatttaggtgatgttggagagaaagagactgaaacagaagttttgttacttgaacacgatgttccccatcagcctttttcacaggctgttcttagttttctgccaaagatgccctggagcattactgaaaaggacatgaaaaaccgagaagacctgaggcatctgtgtatttgtagtgtagacccaccaggatgtactgatatagacgatgctctacattgtcgagaactcgaaaatggaaatttggaggttggtgttcatattgctgatgtgagccattttattaggccaggaaatgccttggatcaagaatcagccagaagaggaacaactgtgtatctttgtgaaaagaggattgacatggttccagagttgcttagctctaacttgtgttccttaaaatgtgacgtggacaggctggcattttcatgtatttgggaaatgaatcacaatgctgaaatcttaaaaacgaagtttaccaaaagtgttattaattcaaaggcatctctgacatatgctgaagctcagttgagaattgattcagcaaacatgaatgatgatattaccactagtctccgtggactgaataaactagccaaaattctgaagaaaagaaggattgaaaaaggggctttgactctatcctctcctgaagttcgattccacatggacagtgaaactcacgatcctatagatctgcagaccaaggaacttagggaaacaaattccatggttgaagaatttatgttacttgccaatatttctgttgcaaaaaaaattcatgaggaattttctgaacatgctctgcttcgaaaacatcctgctccacctccatcaaattatgaaattcttgttaaggcagccaggtcaaggaatttggaaattaagactgatacagccaagtctttggctgagtctttggatcaggccgaatctcctacttttccatatctaaacactctgttgagaatattagccactcgctgtatgatgcaagctgtgtacttctgttctggaatggataatgattttcatcactatggcttagcgtctccaatatacacacattttacttcacccattagaagatacgcagatgtcattgttcatcggcttttggctgtggctattggggctgactgtacttatccagagttgacagacaaacacaagcttgcagatatatgtaaaaatctaaatttccggcacaaaatggctcaatatgcccaacgtgcatcagtggcttttcatacccagttattcttcaaaagcaaaggaatagtaagtgaagaagcctatattttatttgtaagaaagaatgccattgtggtattaattccaaagtatggtttagaagggacagtcttttttgaagaaaaggacaaaccaaacccacagcttatttatgatgatgagataccctcacttaaaatagaagatacagt

SEQ ID NO: 18775 - DNA, 2910 bp, Homo sapiens
gagaaccacagccctgagagaatatttgaacaataaactggccaaaatacctttgtgttcctctactagactaaaaatttcctatttattagtggggtgattaattaatcaccaagaatttaatgaacatatatattagaaataccttaatgaaggagaaagtaagcacataagtaggtcatatttatatgagactactaggtttgtggcctttgttatgttgaacacgtagatgcttactaatttttatatttaaacttctactatgtaagataaattgtaaaggattagaacaaagcctcaaatgtaagaaagcaattaagaatgataaaatgtgtttggtttagataccctcacttaaaatagaagatacagtgttccatgtatttgataaagttaaagtgaaaatcatgttagactcatctaatcttcaacatcagaagatccgaatgtccctggtagaaccacagataccaggaataagcattcctactgatacttcaaacatggaccttaatggaccaaagaaaaagaagatgaagcttggaaaatagctatattcaacaaaaatcttcaaagactggtttcttttttaaaagaaaaaacttgaaagaacacttctaagcctaagtgtgtgatacagtttgttacttttaagtacattttaataatttcagacatctgcatttttattgaacagttgactgtatctgacccatcatactactatacttctgggttgaacagaattatttatgcagaataattcaattgaatatccatcacttaaatacagtgacaggacagcaacttcagggatctgtaaagatcatttaaatggagtgctcatctcattgaggagcagattaattttgcgtaagtactttgattatttaatatttgtaagaaaaaactttcattttcctacagaggaaaatagaacaattttagaagcaaggaacaatctcttttctaagtcttggaagctgtcagtgttgaggatgtaatctcctttgccatctttaattcacctaacttacactaggtgttctcttactgtctttaaaagcttcctgtattttattagtggtccttgaaaaactgtgaatgtttgggaattggtagaaaggcaaaaagtaggatattttgacctgactggaaagatggttgtgtttttattgccaggtaataagtgtgatcattgttgaacttcagctccagtgtctctccagaataagacattggcattcaaatgtctatatcttgttacttacaaaataaaaaacagataattagtggcttttaaattgtagttatatcagtgtatatacacgaggggaactgtataaagacatactaaagggaacagattaaaataagtattattaataaaatttggtgtgccagactgactacttcccttgctaatcacagagattagtaatgattaaattaatatcttcaggaatattttgggatagggttgccttaaaacattttacttggcttattcaatttctaaagcacttacgttgtgccaggttccactcaagtaaactatctctgccttcaaggagcttgcagtatagtgagaaaagcctgccaagtaaatcagcaggtatactaaataggtagtcatttaggcactcaataaatgttgactaatttttccagtttcctattactgaggaaaacctccatacactgaggcagaaacttgtgtcagttggaggaaaatagacttgagtagtctttggtccaggtaaaatgggtcagtgacactgaaacagtagagtaggagtcaaaaaaccttttctgtgaagtgctagaacattttagactttgttggctatggtctgtattgcaactatagtacacaactctgccgttgatagtgtgtaaggagccatatacaatatgtaaacaaatcaacatgactgtgtttcaacaaggcctgatttgttaagtttcatatatagtcatatgtcacttaatgacagggatatgttctgagacatgtcacttggcaatttcatcattgtgtgaaaatcatgatgtagttacacaaacctagatggtataccctatggtatcctatatgggatagcctattgctcctaacctacaaacctgtatggcatattactgtactgattactgtaggcagttgtaacacagtgctaagtatttgtgtatctaaacatatctaaacatagaaaaggtacagtaaaaatatatatatagatatatataagatataaaatggtacacctatttaggacatttaccatgaacaagttggcaggactggaagctggctctgggtgagtcagtaagtggttagtgaatgtgaaggccatgatattactgtgcactactgtagacttttataaacactatatacttaggctacataaagtaatttcactatgatgttaccatggctgtgtccccaggcaataggaatttttcagctccattgtaatcttacgggatcatcatcgtatatttggccattgttgaccaaaagttatgcagcacgtcattataattttgatgtgtcacaaaacattactcatttgatttcccccacccccgccaaccatttaaaaaagtttgccggctaggtgcggtggctcatgcctgtaatcctagcattttgggaggacgaggcgggtggatcactcgatgtcaggagtttgagaccagcctggccaacatggtaaaacgccgtctctactaaaaatacaaaaacttagctgggtgtaacggcggatgcctgtaatcccagctacttgggaggctgaggcaggagaatcgcttgaacctgggaggcggaagttgcagtgagccgagattgcaccactgcagttcagcctggatgatgagagtgagactccatcgcaaaaa

SEQ ID NO: 18776 - DNA, 2994 bp, Homo sapiens
ctcccggatgttccgaggagcggaaagcaacacacgttgtgaggtggcgtccagaaggaagccccgcctaggccacgggcggaaatggctcctcgccttgctttgccgcccctccccactctcgcccaatccccgcggccgtcagagagccaaccaatgtttatctcggcattttcccgcgagaagtgttactaatatccgggaatggaaagggaagaacctccggggttaggcgtattctagattgacgccttttgctggaagagcgctgctggggttaggattctgcgcggcgaggcaagatgctcaagtccaagacgttcttaaaaaagacccgggcgggcggcgtgatgaagatcgtgcgcgagcactacctgcgagacgacatcggctgcggtgcgcccgggtgcgcagcgtgtggaggggcgcacgaggggccggccctggagccgcagccccaggacccggcgagcagcgtctgcccgcaaccgcactacttgctgcccgacactaatgtgttactgcaccagattgatgttcttgaggaccctgccatcaggaatgtaattgtgctacaaacagttcttcaagaagtgagaaatcgcagtgcccccgtatataaacgcatccgagatgtgactaataaccaagagaagcatttctatactttcactaatgagcaccatagagaaacctatgtagaacaagaacagggagaaaatgctaatgacaggaatgatagagcgattcgagtagcagcaaaatggtacaatgaacatttgaaaaaaatgtcagcagacaaccagctgcaagttatcttcataacaaatgacaggagaaacaaagagaaagccatagaagaaggaataccagctttcacttgtgaagaatatgtaaagagcctaactgctaaccccgaactcatagatcgtcttgcttgtttgtctgaagaagggaatgaaatagaaagtggaaaaataatattttcagagcatcttcccttaagtaagctacagcaaggcataaaatctggtacataccttcaaggaacatttagagctagcagggaaaattacttggaagctacagtatggattcatggcgacaatgaagaaaataaagagataatcttacagggacttaaacatttaaacagagctgttcacgaagatattgtggctgtggagcttctccccaagagtcagtgggtagcaccatcttctgtggttttacatgatgaaggtcaaaatgaagaagatgtggagaaagaagaagagagagaacgaatgcttaagactgctgtaagcgagaaaatgttgaagcctacaggtagagttgtaggaataataaaaaggaattggagaccatattgtggcatgctttccaagtctgacattaaggagtcaagaagacatctctttacacctgctgataagagaatccctcgaattcgcatagaaaccagacaggcttccacattagaaggacggagaattattgttgctattgatggttggcccagaaattccagatatccaaatggacactttgtgagaaatttaggtgatgttggagagaaagagactgaaacagaagttttgttacttgaacacgatgttccccatcagcctttttcacaggctgttcttagttttctgccaaagatgccctggagcattactgaaaaggacatgaaaaaccgagaagacctgaggcatctgtgtatttgtagtgtagacccaccaggatgtactgatatagacgatgctctacattgtcgagaactcgaaaatggaaatttggaggttggtgttcatattgctgatgtgagccattttattaggccaggaaatgccttggatcaagaatcagccagaagaggaacaactgtgtatctttgtgaaaagaggattgacatggttccagagttgcttagctctaacttgtgttccttaaaatgtgacgtggacaggctggcattttcatgtatttgggaaatgaatcacaatgctgaaatcttaaaaacgaagtttaccaaaagtgttattaattcaaaggcatctctgacatatgctgaagctcagttgagaattgattcagcaaacatgaatgatgatattaccactagtctccgtggactgaataaactagccaaaattctgaagaaaagaaggattgaaaaaggggctttgactctatcctctcctgaagttcgattccacatggacagtgaaactcacgatcctatagatctgcagaccaaggaacttagggaaacaaattccatggttgaagaatttatgttacttgccaatatttctgttgcaaaaaaaattcatgaggaattttctgaacatgctctgcttcgaaaacatcctgctccacctccatcaaattatgaaattcttgttaaggcagccaggtcaaggaatttggaaattaagactgatacagccaagtctttggctgagtctttggatcaggccgaatctcctacttttccatatctaaacactctgttgagaatattagccactcgctgtatgatgcaagctgtgtacttctgttctggaatggataatgattttcatcactatggcttagcgtctccaatatacacacattttacttcacccattagaagatacgcagatgtcattgttcatcggcttttggctgtggctattggggctgactgtacttatccagagttgacagacaaacacaagcttgcagatatatgtaaaaatctaaatttccggcacaaaatggctcaatatgcccaacgtgcatcagtggcttttcatacccagttattcttcaaaagcaaaggaatagtaagtgaagaagcctatattttatttgtaagaaagaatgccattgtggtattaattccaaagtatggtttagaagggacagtctttttggggaaagggaaccaacccaggtttttgatggggaaacctataaaaaaaaaggtccgtttgtaagatg

SEQ ID NO: 18777 - DNA, 281 bp, Homo sapiens
attgtttcttaaaaacttaattataagaatcttgatttcttctctgaggtgtacatctgaatacattcaagagaaaagatataccattgactttttctagtttagtggttaagcatttatgtgctaagagttttcacatatccttgtttctactgatttccttttatttcgttttttctttccatttagagaaacctatgtagaacaagaacagggagaaaatgctaatgacaggaatgatagagcgattcgagtagcagcaaaatggtacaatgaacatt

SEQ ID NO: 18778 - DNA, 1932 bp, Homo sapiens
ctcccggatgttccgaggagcggaaagcaacacacgttgtgaggtggcgtccagaaggaagccccgcctaggccacgggcggaaatggctcctcgccttgctttgccgcccctccccactctcgcccaatccccgcggccgtcagagagccaaccaatgtttatctcggcattttcccgcgagaagtgttactaatatccgggaatggaaagggaagaacctccggggttaggcgtattctagattgacgccttttgctggaagagcgctgctggggttaggattctgcgcggcgaggcaagatgctcaagtccaagacgttcttaaaaaagacccgggcgggcggcgtgatgaagatcgtgcgcgagcactacctgcgagacgacatcggctgcggtgcgcccgggtgcgcagcgtgtggaggggcgcacgaggggccggccctggagccgcagccccaggacccggcgagcagcgtctgcccgcaaccgcactacttgctgcccgacactaatgtgttactgcaccagattgatgttcttgaggaccctgccatcaggaatgtaattgtgctacaaacagttcttcaagaagtgagaaatcgcagtgcccccgtatataaacgcatccgagatgtgactaataaccaagagaagcatttctatactttcactaatgagcaccatagagaaacctatgtagaacaagaacagggagaaaatgctaatgacaggaatgatagagcgattcgagtagcagcaaaatggtacaatgaacatttgaaaaaaatgtcagcagacaaccagctgcaagttatcttcataacaaatgacaggagaaacaaagagaaagccatagaagaaggaataccagctttcacttgtgaagaatatgtaaagagcctaactgctaaccccgaactcatagatcgtcttgcttgtttgtctgaagaagggaatgaaatagaaagtggaaaaataatattttcagagcatcttcccttaagtaagctacagcaaggcataaaatctggtacataccttcaaggaacatttagagctagcagggaaaattacttggaagctacagtatggattcatggcgacaatgaagaaaataaagagataatcttacagggacttaaacatttaaacagagctgttcacgaagatattgtggctgtggagcttctccccaagagtcagtgggtagcaccatcttctgtggttttacatgatgaaggtcaaaatgaagaagatgtggagaaagaagaagagagagaacgaatgcttaagactgctgtaagcgagaaaatgttgaagcctacaggtagagttgtaggaataataaaaaggaattggagaccatattgtggcatgctttccaagtctgacattaaggagtcaagaagacatctctttacacctgctgataagagaatccctcgaattcgcatagaaaccagacaggcttccacattagaaggacggagaattattgttgctattgatggttggcccagaaattccagatatccaaatggacactttgtgagaaatttaggtgatgttggagagaaagagactgaaacagaagttttgttacttgaacacgatgttccccatcagcctttttcacaggctgttcttagttttctgccaaagatgccctggagcattactgaaaaggacatgaaaaaccgagaagacctgaggcatctgtgtatttgtagtgtagacccaccaggatgtactgatatagacgatgctctacattgtcgagaactcgaaaatggaaatttggaggttggtgttcatattgctgatgtgagccattttattaggccagtgtctctccagaataagacattggcattcaaatgtctatatcttgttacttacaaaataaaaaacagataattagtggctttta

SEQ ID NO: 18779 - DNA, 1430 bp, Homo sapiens
gcaccgataggctctgcctcccgaagaaaagggagccgcgcagcgcctacgggagtccggcggcagcagccggtaccggcaaccacgggcagctctcagggaatctccgtcgtgaggccagaggctccagtccccgcgagtccagatgcctgtccagcctccaagcaaagacacagaagagatggaagcagagggtgattctgctgctgagatgaatggggaggaggaagagagtgaggaggagcggagcggcagccagacagagtcagaagaggagagctccgagatggatgatgaggactatgagcgacgccgcagcgagtgtgtcagtgagatgctggacctagagaagcagttctcggagctaaaggagaagttgttcagggaacgactgagtcagctgcggttgcggctggaggaagtgggggctgagagagcccctgaatacacggagccccttggggggctgcagcggagcctcaagattcgcattcaggtggcagggatctacaagggcttctgtctggatgtgatcaggaataagtacgaatgtgagctgcagggagccaaacagcacctggagagtgagaagctgctgctctatgacacgctgcagggggagctgcaggagcggatccagaggctggaggaggaccgccagagcctggacctcagctctgaatggtgggacgacaaactgcacgccagaggcagctccaggtcttgggactccctgccgcccagcaagaggaagaaggcacctctggtttctggcccatacatcgtgtacatgcttcaagagatcgacatcctggaggactggacagccatcaaaaaggctagggcagctgtgtcccctcagaagagaaaatcggatggaccttgaccctgctgttcacagccagggggaccctcagagcagctggcactgcacccaggattctcgtcttcctcctgcagacaggcggacccacaggcccctcagggtctgcccagccaggctcctgtggtgctgctgggccctcccactccatctggcactggcctggactcctcctctgccctcctcgaggcctgcacagctgtggccgtggagctgacctgaccaggcaaggctgctgtctccatccctgagccgcctgccacctcccactcctgaagatccatctcttggggctcccctgacagagaagacagccgaagtcaaagccacatcctcttgctgatgttggatgcaggctgtccggcctcagggccagggagccagtttccactgtgcgggaactctgagtcagacgtgattatctgggggtctgtccaccctggctggatctggaggcaagatgccaggccccccaggtgttctcagggcagttcttggtgtctgcttctcagattccaaggactggaattaaaacctttcctgggac

SEQ ID NO: 18780 - DNA, 372 bp, Homo sapiens
atagaaaagcagttttcggagttaaaggagaagttgttcagggaacgactgagtcagctgctgtctccatccctgagccgcctgccacctcccactcctgaagatccatctcttggggctcccctgacagagaagacagccgaagtcaaagccacatcctcttgctgatgttggatgcaggctgtccggcctcagggccagggagccagtttccactgtgcgggaactctgagtcagacgtgattatctgggggtctgtccaccctggctggatctggaggcaagatgccaggccccccaggtgttctcagggcagttcttggtgtctgcttctcagattccaaggactggaattaaaacctttcctgggac

SEQ ID NO: 18781 - DNA, 781 bp, Homo sapiens
aacggctaggtacgaggctgggtttggcaaacagcacctggagagtgagaagctgctgctctatgacacgctgcagggggagctgcaggagcggatccagaggctggaggaggaccgccagagcctggacctcagctctgaatggtgggacgacaaactgcacgccagaggcagctccaggtcttgggactccctgccgcccagcaagaggaagaaggcacctctggtttctggcccatacatcgtgtacatgcttcaagagatcgacatcctggaggactggacagccatcaaaaaggtgggggccgctgctgcccacgtgacctgccccacctcagggccccccaccctggcagcagctctgccatctgcaggcctgggagttctctgctcaccaaggcttccccatcttcagcccagagtccctggatcgcagttggctcacaagtcctcttgctcaaggcggccctgggaaaagggatttctagtctgtgtcagccccttcccgttctggggcaggttttgatggggtgggagggtggcggggaggcgggagagccgctgagctggccagcagtcaggagcatgggagctctgcctgggtggggcctatgctcccggtcctgggggcacagcactgaggcaacagccacaagccacagaggtggggggtggggcagggattgcaagctggaggtgggctctcaggggagcttttcttctcaccaccttataccaaccagtaggaatgttctcaaaaaattgtgcttactgtggacac

SEQ ID NO: 18782 - DNA, 1432 bp, Homo sapiens
ataggctagtggactggttatcggccgagggagggagccgcgcagcgcctacgggagtccggcggcagcagccggtaccggcaaccacgggcagctctcagggaatctccgtcgtgaggccagaggctccagtccccgcgagtccagatgcctgtccagcctccaagcaaagacacagaagagatggaagcagagggtgattctgctgctgagatgaatggggaggaggaagagagtgaggaggagcggagcggcagccagacagagtcagaagaggagagctccgagatggatgatgaggactatgagcgacgccgcagcgagtgtgtcagtgagatgctggacctagagaagcagttctcggagctaaaggagaagttgttcagggaacgactgagtcagctgcggttgcggctggaggaagtgggggctgagagagcccctgaatacacggagccccttggggggctgcagcggagcctcaagattcgcattcaggtggcagggatctacaagggcttctgtctggatgtgatcaggaataagtacgaatgtgagctgcagggagccaaacagcacctggagagtgagaagctgctgctctatgacacgctgcagggggagctgcaggagcggatccagaggctggaggaggaccgccagagcctggacctcagctctgaatggtgggacgacaaactgcacgccagaggcagctccaggtcttgggactccctgccgcccagcaagaggaagaaggcacctctggtttctggcccatacatcgtgtacatgcttcaagagatcgacatcctggaggactggacagccatcaaaaaggctagggcagctgtgtcccctcagaagagaaaatcggatggaccttgaccctgctgttcacagccagggggaccctcagagcagctggcactgcacccaggattctcgtcttcctcctgcagacaggcggacccacaggcccctcagggtctgcccagccaggctcctgtggtgctgctgggccctcccactccatctggcactggcctggactcctcctctgccctcctcgaggcctgcacagctgtggccgtggagctgacctgaccaggcaaggctgctgtctccatccctgagccgcctgccacctcccactcctgaagatccatctcttggggctcccctgacagagaagacagccgaagtcaaagccacatcctcttgctgatgttggatgcaggctgtccggcctcagggccagggagccagtttccactgtgcgggaactctgagtcagacgtgattatctgggggtctgtccaccctggctggatctggaggcaagatgccaggccccccaggtgttctcagggcagttcttggtgtctgcttctcagattccaaggactggaattaaaacctttcctgggac

SEQ ID NO: 18783 - DNA, 1420 bp, Homo sapiens
ccggtttaatcggacgaggggggagccgcgcagcgcctacgggagtccggcggcagcagccggtaccggcaaccacgggcagctctcagggaatctccgtcgtgaggccagaggctccagtccccgcgagtccagatgcctgtccagcctccaagcaaagacacagaagagatggaagcagagggtgattctgctgctgagatgaatggggaggaggaagagagtgaggaggagcggagcggcagccagacagagtcagaagaggagagctccgagatggatgatgaggactatgagcgacgccgcagcgagtgtgtcagtgagatgctggacctagagaagcagttctcggagctaaaggagaagttgttcagggaacgactgagtcagctgcggttgcggctggaggaagtgggggctgagagagcccctgaatacacggagccccttggggggctgcagcggagcctcaagattcgcattcaggtggcagggatctacaagggcttctgtctggatgtgatcaggaataagtacgaatgtgagctgcagggagccaaacagcacctggagagtgagaagctgctgctctatgacacgctgcagggggagctgcaggagcggatccagaggctggaggaggaccgccagagcctggacctcagctctgaatggtgggacgacaaactgcacgccagaggcagctccaggtcttgggactccctgccgcccagcaagaggaagaaggcacctctggtttctggcccatacatcgtgtacatgcttcaagagatcgacatcctggaggactggacagccatcaaaaaggctagggcagctgtgtcccctcagaagagaaaatcggatggaccttgaccctgctgttcacagccagggggaccctcagagcagctggcactgcacccaggattctcgtcttcctcctgcagacaggcggacccacaggcccctcagggtctgcccagccaggctcctgtggtgctgctgggccctcccactccatctggcactggcctggactcctcctctgccctcctcgaggcctgcacagctgtggccgtggagctgacctgaccaggcaaggctgctgtctccatccctgagccgcctgccacctcccactcctgaagatccatctcttggggctcccctgacagagaagacagccgaagtcaaagccacatcctcttgctgatgttggatgcaggctgtccggcctcagggccagggagccagtttccactgtgcgggaactctgagtcagacgtgattatctgggggtctgtccaccctggctggatctggaggcaagatgccaggccccccaggtgttctcagggcagttcttggtgtctgcttctcagattccaaggactggaattaaaacctttcctgggac

SEQ ID NO: 18784 - DNA, 1487 bp, Homo sapiens
gcaccgataggctctgcctcccgaagaaaagggagccgcgcagcgcctacgggagtccggcggcagcagccggtaccggcaaccacgggcagctctcagggaatctccgtcgtgaggccagaggctccagtccccgcgagtccagatgcctgtccagcctccaagcaaagacacagaagagatggaagcagagggtgattctgctgctgagatgaatggggaggaggaagagagtgaggaggagcggagcggcagccagacagagtcagaagaggagagctccgagatggatgatgaggactatgagcgacgccgcagcgagtgtgtcagtgagatgctggacctagagaagcagttctcggagctaaaggagaagttgttcagggaacgactgagtcagctgcggttgcggctggaggaagtgggggctgagagagcccctgaatacacggagccccttggggggctgcagcggagcctcaagattcgcattcaggtggcagggatctacaagggcttctgtctggatgtgatcaggaataagtacgaatgtgagctgcagggagccaaacagcacctggagagtgagaagctgctgctctatgacacgctgcagggggagctgcaggagcggatccagaggctggaggaggaccgccagagcctggacctcagctctgaatggtgggacgacaaactgcacgccagaggcagctccaggtcttgggactccctgccgcccagcaagaggaagaaggcacctctggtttctggcccatacatcgtgtacatgcttcaagagatcgacatcctggaggactggacagccatcaaaaaggctagggcagctgtgtcccctcagaagagaaaatcggatggaccttgaccctgctgttcacagccagggggaccctcagagcagctggcactgcacccaggattctcgtcttcctcctgcagacaggcggacccacaggcccctcagggtctgcccagccaggctcctgtggtgctgctgggccctcccactccatctggcactggcctggactcctcctctgccctcctcgaggcctgcacagctgtggccgtggagctgacctgaccaggcaaggctgctgtctccatccctgagccgcctgccacctcccactcctgaagatccatctcttggggctcccctgacagagaagacagccgaagtcaaagccacatcctcttgctgatgttggatgcaggctgtccggcctcagggccagggagccagtttccactgtgcgggaactctgagtcagacgtgattatctgggggtctgtccaccctggctggatctggaggcaagatgccaggccccccaggtgttctcagggcagttcttggtgtctgcttctcagattccaaggactggaattaaaacctttcctgggacaaaaaaacaaaagaaaaaaagcagacacagacaaaaaaaaaaggggcgcaaaaacag

SEQ ID NO: 18785 - DNA, 1397 bp, Homo sapiens
caatagctagtagcaggctggtgttaatcggccgagccggtaccggcaaccacgggcagctctcagggaatctccgtcgtgaggccagaggctccagtccccgcgagtccagatgcctgtccagcctccaagcaaagacacagaagagatggaagcagagggtgattctgctgctgagatgaatggggaggaggaagagagtgaggaggagcggagcggcagccagacagagtcagaagaggagagctccgagatggatgatgaggactatgagcgacgccgcagcgagtgtgtcagtgagatgctggacctagagaagcagttctcggagctaaaggagaagttgttcagggaacgactgagtcagctgcggttgcggctggaggaagtgggggctgagagagcccctgaatacacggagccccttggggggctgcagcggagcctcaagattcgcattcaggtggcagggatctacaagggcttctgtctggatgtgatcaggaataagtacgaatgtgagctgcagggagccaaacagcacctggagagtgagaagctgctgctctatgacacgctgcagggggagctgcaggagcggatccagaggctggaggaggaccgccagagcctggacctcagctctgaatggtgggacgacaaactgcacgccagaggcagctccaggtcttgggactccctgccgcccagcaagaggaagaaggcacctctggtttctggcccatacatcgtgtacatgcttcaagagatcgacatcctggaggactggacagccatcaaaaaggctagggcagctgtgtcccctcagaagagaaaatcggatggaccttgaccctgctgttcacagccagggggaccctcagagcagctggcactgcacccaggattctcgtcttcctcctgcagacaggcggacccacaggcccctcagggtctgcccagccaggctcctgtggtgctgctgggccctcccactccatctggcactggcctggactcctcctctgccctcctcgaggcctgcacagctgtggccgtggagctgacctgaccaggcaaggctgctgtctccatccctgagccgcctgccacctcccactcctgaagatccatctcttggggctcccctgacagagaagacagccgaagtcaaagccacatcctcttgctgatgttggatgcaggctgtccggcctcagggccagggagccagtttccactgtgcgggaactctgagtcagacgtgattatctgggggtctgtccaccctggctggatctggaggcaagatgccaggccccccaggtgttctcagggcagttcttggtgtctgcttctcagattccaaggactggaattaaaacctttcctgggac

SEQ ID NO: 18786 - DNA, 1348 bp, Homo sapiens
gcaccgataggctctgcctcccgaagaaaagggagccgcgcagcgcctacgggagtccggcggcagcagccggtaccggcaaccacgggcagctctcagggaatctccgtcgtgaggccagaggctccagtccccgcgagtccagatgcctgtccagcctccaagcaaagacacagaagagatggaagcagagggtgattctgctgctgagatgaatggggaggaggaagagagtgaggaggagcggagcggcagccagacagagtcagaagaggagagctccgagatggatgatgaggactatgagcgacgccgcagcgagtgtgtcagtgagatgctggacctagagaagcagttctcggagctaaaggagaagttgttcagggaacgactgagtcagctgcggttgcggctggaggaagtgggggctgagagagcccctgaatacacggagccccttggggggctgcagcggagcctcaagattcgcattcaggtggcagggatctacaagggcttctgtctggatgtgatcaggaataagtacgaatgtgagctgcagggagccaaacagcacctggagagtgagaagctgctgctctatgacacgctgcagggggagctgcaggagcggatccagaggctggaggaggaccgccagagcctggacctcagctctgaatggtgggacgacaaactgcacgccagaggcagctccaggtcttgggactccctgccgcccagcaagaggaagaaggcacctctggtttctggcccatacatcgtgtacatgcttcaagagatcgacatcctggaggactggacagccatcaaaaaggctagggcagctgtgtcccctcagaagagaaaatcggatgacaggcggacccacaggcccctcagggtctgcccagccaggctcctgtggtgctgctgggccctcccactccatctggcactggcctggactcctcctctgccctcctcgaggcctgcacagctgtggccgtggagctgacctgaccaggcaaggctgctgtctccatccctgagccgcctgccacctcccactcctgaagatccatctcttggggctcccctgacagagaagacagccgaagtcaaagccacatcctcttgctgatgttggatgcaggctgtccggcctcagggccagggagccagtttccactgtgcgggaactctgagtcagacgtgattatctgggggtctgtccaccctggctggatctggaggcaagatgccaggccccccaggtgttctcagggcagttcttggtgtctgcttctcagattccaaggactggaattaaaacctttcctgggac

SEQ ID NO: 18787 - DNA, 1261 bp, Homo sapiens
tggtgatctacaggatccttatggaatcctcctgctgctgagatgaatggggaggaggaagagagtgaggaggagcggagcggcagccagacagagtcagaagaggagagctccgagatggatgatgaggactatgagcgacgccgcagcgagtgtgtcagtgagatgctggacctagagaagcagttctcggagctaaaggagaagttgttcagggaacgactgagtcagctgcggttgcggctggaggaagtgggggctgagagagcccctgaatacacggagccccttggggggctgcagcggagcctcaagattcgcattcaggtggcagggatctacaagggcttctgtctggatgtgatcaggaataagtacgaatgtgagctgcagggagccaaacagcacctggagagtgagaagctgctgctctatgacacgctgcagggggagctgcaggagcggatccagaggctggaggaggaccgccagagcctggacctcagctctgaatggtgggacgacaaactgcacgccagaggcagctccaggtcttgggactccctgccgcccagcaagaggaagaaggcacctctggtttctggcccatacatcgtgtacatgcttcaagagatcgacatcctggaggactggacagccatcaaaaaggctagggcagctgtgtcccctcagaagagaaaatcggatggaccttgaccctgctgttcacagccagggggaccctcagagcagctggcactgcacccaggattctcgtcttcctcctgcagacaggcggacccacaggcccctcagggtctgcccagccaggctcctgtggtgctgctgggccctcccactccatctggcactggcctggactcctcctctgccctcctcgaggcctgcacagctgtggccgtggagctgacctgaccaggcaaggctgctgtctccatccctgagccgcctgccacctcccactcctgaagatccatctcttggggctcccctgacagagaagacagccgaagtcaaagccacatcctcttgctgatgttggatgcaggctgtccggcctcagggccagggagccagtttccactgtgcgggaactctgagtcagacgtgattatctgggggtctgtccaccctggctggatctggaggcaagatgccaggccccccaggtgttctcagggcagttcttggtgtctgcttctcagattccaaggactggaattaaaacctttcctgggac

SEQ ID NO: 18788 - DNA, 1390 bp, Homo sapiens
gcaccgataggctctgcctcccgaagaaaagggagccgcgcagcgcctacgggagtccggcggcagcagccggtaccggcaaccacgggcagctctcagggaatctccgtcgtgaggccagaggctccagtccccgcgagtccagatgcctgtccagcctccaagcaaagacacagaagagatggaagcagagggtgattctgctgctgagatgaatggggaggaggaagagagtgaggaggagcggagcggcagccagacagagtcagaagaggagagctccgagatggatgatgaggactatgagcgacgccgcagcgagtgtgtcagtgagatgctggacctagagaagcagttctcggagctaaaggagaagttgttcagggaacgactgagtcagctgcggttgcggctggaggaagtgggggctgagagagcccctgaatacacggagccccttggggggctgcagcggagcctcaagattcgcattcaggtggcagggatctacaagggcttctgtctggatgtgatcaggaataagtacgaatgtgagctgcagggagccaaacagcacctggagagtgagaagctgctgctctatgacacgctgcagggggagctgcaggagcggatccagaggctggaggaggaccgccagagcctggacctcagctctgaatggtgggacgacaaactgcacgccagaggcagctccaggtcttgggactccctgccgcccagcaagaggaagaaggcacctctggtttctggcccatacatcgtgtacatgcttcaagagatcgacatcctggaggactggacagccatcaaaaaggaccttgaccctgctgttcacagccagggggaccctcagagcagctggcactgcacccaggattctcgtcttcctcctgcagacaggcggacccacaggcccctcagggtctgcccagccaggctcctgtggtgctgctgggccctcccactccatctggcactggcctggactcctcctctgccctcctcgaggcctgcacagctgtggccgtggagctgacctgaccaggcaaggctgctgtctccatccctgagccgcctgccacctcccactcctgaagatccatctcttggggctcccctgacagagaagacagccgaagtcaaagccacatcctcttgctgatgttggatgcaggctgtccggcctcagggccagggagccagtttccactgtgcgggaactctgagtcagacgtgattatctgggggtctgtccaccctggctggatctggaggcaagatgccaggccccccaggtgttctcagggcagttcttggtgtctgcttctcagattccaaggactggaattaaaacctttcctgggac

SEQ ID NO: 18789 - DNA, 1861 bp, Homo sapiens
gcaccgataggctctgcctcccgaagaaaagggagccgcgcagcgcctacgggagtccggcggcagcagccggtaccggcaaccacgggcagctctcagggaatctccgtcgtgaggccagaggctccagtccccgcgagtccagatgcctgtccagcctccaagcaaagacacagaagagatggaagcagagggtgattctgctgctgagatgaatggggaggaggaagagagtgaggaggagcggagcggcagccagacagagtcagaagaggagagctccgagatggatgatgaggactatgagcgacgccgcagcgagtgtgtcagtgagatgctggacctagagaagcagttctcggagctaaaggagaagttgttcagggaacgactgagtcagctgcggttgcggctggaggaagtgggggctgagagagcccctgaatacacggagccccttggggggctgcagcggagcctcaagattcgcattcaggtggcagggatctacaagggcttctgtctggatgtgatcaggaataagtacgaatgtgagctgcagggagccaaacagcacctggagagtgagaagctgctgctctatgacacgctgcagggggagctgcaggagcggatccagaggctggaggaggaccgccagagcctggacctcagctctgaatggtgggacgacaaactgcacgccagaggcagctccaggtcttgggactccctgccgcccagcaagaggaagaaggcacctctggtttctggcccatacatcgtgtacatgcttcaagagatcgacatcctggaggactggacagccatcaaaaaggtgggggccgctgctgcccacgtgacctgccccacctcagggccccccaccctggcagcagctctgccatctgcaggcctgggagttctctgctcaccaaggcttccccatcttcagcccagagtccctggatcgcagttggctcacaagtcctcttgctcaaggcggccctgggaaaagggatttctagtctgtgtcagccccttcccgttctggggcaggttttgatggggtgggagggtggcggggaggcgggagagccgctgagctggccagcagtcaggagcatgggagctctgcctgggtggggcctatgctcccggtcctgggggcacagcactgaggcaacagccacaagccacagaggtggggggtggggcagggattgcaagctggaggtgggctctcaggggagcttttcttctcaccacgctagggcagctgtgtcccctcagaagagaaaatcggatggaccttgaccctgctgttcacagccagggggaccctcagagcagctggcactgcacccaggattctcgtcttcctcctgcagacaggcggacccacaggcccctcagggtctgcccagccaggctcctgtggtgctgctgggccctcccactccatctggcactggcctggactcctcctctgccctcctcgaggcctgcacagctgtggccgtggagctgacctgaccaggcaaggctgctgtctccatccctgagccgcctgccacctcccactcctgaagatccatctcttggggctcccctgacagagaagacagccgaagtcaaagccacatcctcttgctgatgttggatgcaggctgtccggcctcagggccagggagccagtttccactgtgcgggaactctgagtcagacgtgattatctgggggtctgtccaccctggctggatctggaggcaagatgccaggccccccaggtgttctcagggcagttcttggtgtctgcttctcagattccaaggactggaattaaaacctttcctgggac

SEQ ID NO: 18790 - DNA, 1070 bp, Homo sapiens
tgggtttaagtgattctcatgcctcaacctgccaagtagctaagattacaagcctgtgtcacttacgcccagctattttttttttatttttgcctcgggatggtactcctccgccagcctcaagattcgcattcaggtggcagggatctacaagggcttctgtctggatgtgatcaggaataagtacgaatgtgagctgcagggagccaaacagcacctggagagtgagaagctgctgctctatgacacgctgcagggggagctgcaggagcggatccagaggctggaggaggaccgccagagcctggacctcagctctgaatggtgggacgacaaactgcacgccagaggcagctccaggtcttgggactccctgccgcccagcaagaggaagaaggcacctctggtttctggcccatacatcgtgtacatgcttcaagagatcgacatcctggaggactggacagccatcaaaaaggctagggcagctgtgtcccctcagaagagaaaatcggatggaccttgaccctgctgttcacagccagggggaccctcagagcagctggcactgcacccaggattctcgtcttcctcctgcagacaggcggacccacaggcccctcagggtctgcccagccaggctcctgtggtgctgctgggccctcccactccatctggcactggcctggactcctcctctgccctcctcgaggcctgcacagctgtggccgtggagctgacctgaccaggcaaggctgctgtctccatccctgagccgcctgccacctcccactcctgaagatccatctcttggggctcccctgacagagaagacagccgaagtcaaagccacatcctcttgctgatgttggatgcaggctgtccggcctcagggccagggagccagtttccactgtgcgggaactctgagtcagacgtgattatctgggggtctgtccaccctggctggatctggaggcaagatgccaggccccccaggtgttctcagggcagttcttggtgtctgcttctcagattccaaggactggaattaaaacctttcctgggac

SEQ ID NO: 18791 - DNA, 914 bp, Homo sapiens
gcaccgataggctctgcctcccgaagaaaagggagccgcgcagcgcctacgggagtccggcggcagcagccggtaccggcaaccacgggcagctctcagggaatctccgtcgtgaggccagaggctccagtccccgcgagtccagatgcctgtccagcctccaagcaaagacacagaagagatggaagcagagggtgattctgctgctgagatgaatggggaggaggaagagagtgaggaggagcggagcggcagccagacagagtcagaagaggagagctccgagatggatgatgaggactatgagcgacgccgcagcgagtgtgtcagtgagatgctggacctagagaagcagttctcggagctaaaggagaagttgttcagggaacgactgagtcagctgcggttgcggctggaggaagtgggggctgagagagcccctgaatacacggagccccttggggggctgcagcggagcctcaagattcgcattcaggtggcagggatctacaagggcttctgtctggatgtgatcaggaataagtacgaatgtgagctgcagggagccaaacagcacctggagagtgagaagctgctgctctatgacacgctgcagggggagctgcaggagcggatccagaggctggaggaggaccgccagagcctggacctcagctctgaatggtgggacgacaaactgcacgccagaggcagctccaggtcttgggactccctgccgcccagcaagaggaagaaggcacctctggtttctggcccatacatcgtgtacatgcttcaagagatcgacatctggatctggaggcaagatgccaggccccccaggtgttctcagggcagttcttggtgtctgcttctcagattccaaggactggaattaaaacctttcctgggac

SEQ ID NO: 18792 - DNA, 1232 bp, Homo sapiens
gcaccgataggctctgcctcccgaagaaaagggagccgcgcagcgcctacgggagtccggcggcagcagccggtaccggcaaccacgggcagctctcagggaatctccgtcgtgaggccagaggctccagtccccgcgagtccagatgcctgtccagcctccaagcaaagacacagaagagatggaagcagagggtgattctgctgctgagatgaatggggaggaggaagagagtgaggaggagcggagcggcagccagacagagtcagaagaggagagctccgagatggatgatgaggactatgagcgacgccgcagcgagtgtgtcagtgagatgctggacctagagaagcagttctcggagctaaaggagaagttgttcagggaacgactgagtcagctgcggttgcggctggaggaagtgggggctgagagagcccctgaatacacggagccccttggggggctgcagcggagcctcaagattcgcattcaggtggcagggatctacaagggcttctgtctggatgtgatcaggaataagtacgaatgtgagctgcagggagccaaacagcacctggagagtgagaagctgctgctctatgacacgctgcagggggagctgcaggagcggatccagaggctggaggaggaccgccagagcctggacctcagctctggaccttgaccctgctgttcacagccagggggaccctcagagcagctggcactgcacccaggattctcgtcttcctcctgcagacaggcggacccacaggcccctcagggtctgcccagccaggctcctgtggtgctgctgggccctcccactccatctggcactggcctggactcctcctctgccctcctcgaggcctgcacagctgtggccgtggagctgacctgaccaggcaaggctgctgtctccatccctgagccgcctgccacctcccactcctgaagatccatctcttggggctcccctgacagagaagacagccgaagtcaaagccacatcctcttgctgatgttggatgcaggctgtccggcctcagggccagggagccagtttccactgtgcgggaactctgagtcagacgtgattatctgggggtctgtccaccctggctggatctggaggcaagatgccaggccccccaggtgttctcagggcagttcttggtgtctgcttctcagattccaaggactggaattaaaacctttcctgggac

SEQ ID NO: 18793 - DNA, 1160 bp, Homo sapiens
gcaccgataggctctgcctcccgaagaaaagggagccgcgcagcgcctacgggagtccggcggcagcagccggtaccggcaaccacgggcagctctcagggaatctccgtcgtgaggccagaggctccagtccccgcgagtccagatgcctgtccagcctccaagcaaagacacagaagagatggaagcagagggtgattctgctgctgagatgaatggggaggaggaagagagtgaggaggagcggagcggcagccagacagagtcagaagaggagagctccgagatggatgatgaggactatgagcgacgccgcagcgagtgtgtcagtgagatgctggacctagagaagcagttctcggagctaaaggagaagttgttcagggaacgactgagtcagctgcggttgcggctggaggaagtgggggctgagagagcccctgaatacacggagccccttggggggctgcagcggagcctcaagattcgcattcaggtggcaggcccatacatcgtgtacatgcttcaagagatcgacatcctggaggactggacagccatcaaaaaggctagggcagctgtgtcccctcagaagagaaaatcggatggaccttgaccctgctgttcacagccagggggaccctcagagcagctggcactgcacccaggattctcgtcttcctcctgcagacaggcggacccacaggcccctcagggtctgcccagccaggctcctgtggtgctgctgggccctcccactccatctggcactggcctggactcctcctctgccctcctcgaggcctgcacagctgtggccgtggagctgacctgaccaggcaaggctgctgtctccatccctgagccgcctgccacctcccactcctgaagatccatctcttggggctcccctgacagagaagacagccgaagtcaaagccacatcctcttgctgatgttggatgcaggctgtccggcctcagggccagggagccagtttccactgtgcgggaactctgagtcagacgtgattatctgggggtctgtccaccctggctggatctggaggcaagatgccaggccccccaggtgttctcagggcagttcttggtgtctgcttctcagattccaaggactggaattaaaacctttcctgggac

SEQ ID NO: 18794 - DNA, 739 bp, Homo sapiens
gcaccgataggctctgcctcccgaagaaaagggagccgcgcagcgcctacgggagtccggcggcagcagccggtaccggcaaccacgggcagctctcagggaatctccgtcgtgaggccagaggctccagtccccgcgagtccagatgcctgtccagcctccaagcaaagacacagaagagatggaagcagagggtgattctgctgctgagatgaatggggaggaggaagagagtgaggaggagcggagcggcagccagacagagtcagaagaggagagctccgagatggatgatgaggactatgagcgacgccgcagcgagtgtgtcagtgagatgctggacctagagaagcagttctcggagctaaaggagaagttgttcagggaacgactgagtcagctgcggttgcggctggaggaagtgggggctgagagagcccctgaatacacggagccccttggggggctgcagcggagcctcaagattcgcattcaggtggcagggatctacaagggcttctgtctggatgtgatcaggaataagtacgaatgtgagctgcagggagccaaacagcacctggagtgtgcgggaactctgagtcagacgtgattatctgggggtctgtccaccctggctggatctggaggcaagatgccaggccccccaggtgttctcagggcagttcttggtgtctgcttctcagattccaaggactggaattaaaacctttcctgggac

SEQ ID NO: 18795 - DNA, 531 bp, Homo sapiens
gcaccgataggctctgcctcccgaagaaaagggagccgcgcagcgcctacgggagtccggcggcagcagccggtaccggcaaccacgggcagctctcagggaatctccgtcgtgaggccagaggctccagtccccgcgagtccagatgcctgtccagcctccaagcaaagacacagaagagatggaagcagagggtgattctgctgctgagatgaatggggaggaggaagagagtgaggaggagcggagcggcagccagacagagtcagaagaggagagctccgagatggatgatgaggactatgagcgacgccgcagcgagtgtgtcagtgagatgctggacctagagaagcagttctcggagctaaaggagaagttgttcagggaacgactgagtcagctgcggttgcggctggaggaagtgggggctgagagagcccctgaatacacggagccccaggtgttctcagggcagttcttggtgtctgcttctcagattccaaggactggaattaaaacctttcctgggac

SEQ ID NO: 18796 - DNA, 737 bp, Homo sapiens
agcccctacacacaagcacgtatgcacacacacagccccttcacacaagtacacgtgcacacagccccttcacacaagcacgcacgcatatgcacacacagcccctacacacaagcacacacgcacacacacagccccttcacacaagcatgtacgcgcacacacacacaggccctacacacaggcatgcatgcacacacacacatgcaggacgcacatgcacacatgcgggtacccaccactcctccccagagctagcccttactggcctcttgtcccagagatggatgatgaggactatgagcgacgccgcagcgagtgtgtcagtgagatgctggacctagagaagcagttctcggagctaaaggagaagtgagcgtggggacaccttgggctgggtctgctaggatctgggatgaggaggtggtgggcctggtactgggcaggcgtggttggtgcccaggaagtgcgcgcctaacaccgggcttgctgtggaatgggtgctgggtatgtgtttgcccaagagcgatgggtgagcaaatgggtgcacggctgcctttttaccacgcaggttgttcagggaacgactgagtcagctgcggttgcggctggaggaagtgggggctgagagagcccctgaatacacggagccccttggggggctgcagcggagcctcaagattcgcattcaggtggcagtctgtgggtggttctataccctcttcccatcccacgct

SEQ ID NO: 18797 - DNA, 457 bp, Homo sapiens
gaccagtagtgtttctgatttcagattttttcagattctggaatatttttgttacacttactggttgagcatcccagatccgaaaatctgaaatgctccaggagcatttcctttaagcatcatgttggtgctcaacaagttttagattatggagcattttggattttggattttcagatttgggatgttcatccttcattagtgatgttaagtttgatgataagagcactttggtcaacatattttaaaaatcaattccaaatcctatgacttgatccttgtacttaagtattcatagtgttcagaaaatgctatattttacacaaagaaaggataaatgcttgaggtgatgaataccccacttaccctagtacatattatatgcctataaaatacctcatatgccccataaatatctactgtgtacccacaaaaattaaaaatacaaattttttaa

SEQ ID NO: 18798 - DNA, 579 bp, Homo sapiens
gatctcggctcactggaagctccgcctcccaggttcacaccattctcccgcctcagcctcccccagtagctggggactacaggtgcatgccatcacacctggctaatttttttctgtatttttagtagaggcggggtttcaccgtgttaaccaggatcatctgggtctcccgacctcgtgatccacccgccttggcctccaaaagtgctgggattaaaggcttaaaccaccgtgcctggccttaggataatcaaatttttaattttataaggtaatactaattactttctaaattagttgtaccaatttatgtacttacaagcagaatgtaagattttccactggcccacaccttttccaatattatagaaatttagacttcctaagtttagaaacatgtacaaaactttttatattattgtgttaataatagcaaaaatctaaacataacctaaatgtctatcaacaataaaatgaataagttgcagttatgatcatacaataggctcttatgcagctccacctatcaatttagataaacctcagaaaacataataatgtgtgaaagaagcaagtcac

SEQ ID NO: 18799 - DNA, 488 bp, Homo sapiens
aatggggctactttcctcacaaggatgttatgagtgttgatgagttcatgtgtcttgttataaagcacttagaaagttcctggccataaataagcagtataacaatgcttatttacatgctactacttaaaaaaaattaagaagtaaatacttaaacacatacttattcaataaatataatcattaaacggcaatgtccatacagtgggataaatgttacccccgcctccatagggcactaagggaacaaggtttaattcaatctgtgctggaaaggaaagggttcagggagacttaaagaaggagaaaaaagttgtgttgaaggactctgataataaaaaagagcacaaccctatattgctcttaaagaaaaactaatgcacaaaagttggacttgttaatctctttttaaatgggtagcttcacttaaatggaaacacattttagaaaataactttatctgatggaaaagtctcattatagaaata

SEQ ID NO: 18800 - DNA, 999 bp, Homo sapiens
ggtgcttgatgaaaagggaactctaaaataaaatgctacaagtcagacaatcccagtcataggaaccaatacctctcaaagacagaattcctaatatgtaataagcagttgataaatatttctggaatgaacacagtgttagttatgactccctgcttttcagatatcccctgtcacagttttttagtgctttctagaagcagtttatcatcttaattcaagtatattcaaacattcaaactactaagcatctgccatgtacaagatgctcttttaagccaggcatagtggctcatgtctataatcccagcactcagaaggctgagatggaaagatcacttgaggccgggagttggagaccagcctgggcaacatagcaagactcttgtctctaaaaaaaataataaaaataataatctgggtgcagcagcatgcacctttagtcccagctattcaggaggctgaggcagaaggatcactgaaacccaggagtttgagggttcagtgaactatcactgcaccactgcacaccagcctgggtgacagagcaagatcccatctcttaaaaaaaaaaaaaaaaaaagatactcttcctgattcagagaggaacacccaagcagagatctcatgccctaatccccactaggggatgccagaattgaaaatataggacatgtagttaaatttgaattggacgtaacaatgaatactcttgtaggatacatacatcccaaatgttgtagggacgtatgtataccacatactagggacatacatataccccttataagggatagacatatataaatgtgggattaagctgggcttggtggcatgcacctgtagtctcagctacttgggaggttcagatgggaggatctcttgaggccataagtttgaggtcagcctagacaacagcaagaccccatctaaaaaaaaagtagggggtgttaaatactataaaatactaaaataataataccaagttctaaaaaaaaa

SEQ ID NO: 18801 - DNA, 150 bp, Homo sapiens
ttttttggtgtgtggtggggggcgggttgtctgaatcacctgttatttgtactatttattgatagtaaactgtattttcttaaatgtaaaagaaactgtattaatttgatgacactagtactgaagcaataatcaaatacttgcttatct

SEQ ID NO: 18802 - DNA, 321 bp, Homo sapiens
gtttggtcagagaaaatgactggtctgttgctatcagcctcagttactatgttttattttttatttttcttactagtgcattacagttaaatagaattttattgaagaagttattgggctgaaggcagatcactgtaaagcagcccccatcactggcatctggtctcagtgtgataaatgctcaagaggagaagaaccttcacagggccaggaagtgatgatgtaggttccctacctgccggaaggcgccacatctctgcccgcaaaagcagatgtggaagttgcccctctgttctccagtctctctcttagaagcagtta

SEQ ID NO: 18803 - DNA, 346 bp, Homo sapiens
cagctttgatttttatgaagccatagttaccatgaggtgcatctgaacactcccagagcctgcttgccatggggaaagggcctgtaatttcatagcccatttctgtcccaaccttagttgatgactttgggaataggttgagcttttcagttgaagatcctgaaatcacaaatgacttgaacccaaatgctccctgtttgcatgggctcaccaccataatcctaaaaggaactcctattttctggaagccttttctggatcccccaacctaccttgacccagaacacccccctttggtgctgccatagcctcccacatatacgtccagctgtgccacgttctgatt

SEQ ID NO: 18804 - DNA, 896 bp, Homo sapiens
aagctacactgcagtcatatttggcatatgtgacatataggcccactgcatttccttccaaaggcaagatgccaagggaaggtgccagtaattttatgaccaatatgacaccattttgtggtgtttgtaagttgaaacaatatatttccctgcattacacaagtttataaaaaacaaacaaaaaaagaggccccagctgtggttgatcgatgatgaattgaatagagcctaaccttccaggcttctcacttgcacaggcccttccaaggtcctgggagggcccctggaaatttttgtagtcataatttttttaatgtttttactagataaggctcaggccccacaaaatcctgaaatcatccctgggttccaatagttacaacccagtaaatctcttgaatgaagcctctatgttattgacaaatactgactggccaagttagcagggtgatagggtcagtctattttgaatctgaaatccatctcaaagacaggccaagagcttattagtggacttaactggattctgctggcccaagcgcagtaaagtcaaacaaccatatcgaggttttgcactggggaaaggaggacatttatttgcagggcatccaagcaagaaggaccaggcggctaactatcaaagtccctcactgaatgggggcaataatcatatctcttacagatgaaatcatgaatgaaatggtttatggaaaagcagcaatggttgataatcctaaatgttaagtatgtttatattttttccctgactttaaagtgcttctccttcattcctatacacaggtccagactgatggcttattttttaaaattctcttagtcacttcattggttctaacaataattttagaaactggatgactttgcaatgtagaaag

SEQ ID NO: 18805 - DNA, 436 bp, Homo sapiens
tgtttcaatttactcatctgtaaaatggccataataatagtatctactttgtattctttatgagttgaaatttacaaagcatatagaataatgcctggggtatagcaattgtttaataagtgtctgtgaaacaaaaattttgaaaaacaaatgaatgggtcagaaattctaaagtgttttctgtagggtttatgccattttgtcttaatgatcagcctctataaccttaataccttttttaaaatgtttgttgtaacaatcagatattgtatatgaaagcgcttggcatagaatttgatgtgtgcatctctaggatggttgtaaccagatttgtttctagataattataaatgcttgctgtacttgggcttgaaatttgttatatcagatccatgtcaaccctatttgaagatcatataaaaaaatctcagccatt

SEQ ID NO: 18806 - DNA, 362 bp, Homo sapiens
gatacagcactgcacacaccagaacgcagaagcccagggcagatgactctccaggcaccagcagatacagcattgcacacaccaggacgcagaagcccagcgcagatgactctccaggcaccagcagatacagcactgcacacaccaggacgcagaagcccagggaagatgactccagacaccagcagatacagcattgcacacaccaggacgcggaagcccagggcagatgactctccaggcaccagcagatacagcactgcacacaccagaacgcagaagcccagggcagatgactctccaggcaccagcaggtacagcactgcacacacgaggatgcggaagcccagggcagatgactc

SEQ ID NO: 18807 - DNA, 251 bp, Homo sapiens
cagccttcctcaggaaaggccgagcgagatagcacgagcacagcagggctgccatgagcacggttccaaggccgcgaccccctggcctgctccccaccctcagaggctgggaggggccgcggcctcttccaaagttgtctccagcaggaagcagggcactgaagacaaggatgggcctaggtgaccctgagttcgcatcctatgactgctttggaacagaccctgcctggatgggaagaggggggcccatg

SEQ ID NO: 18808 - DNA, 406 bp, Homo sapiens
ttatttcacttagcctaatgcccctcaagattccatcccatgtggtaaccgtaagtcagaatcaccctccctttttgaaggctgaatcatgcctcccattgtgtaccgtacgcccattttgccttatccattccctcccatcggtgggtgccttggccttgccttcccacattttagcctattgtgaatgatgctgcctctgaacatcagtgtacacataccttgttttgagaccctgctttcaaatttgttggggtatatagccagaagtgaaattagtgcatcttaagggtgattctgtttaaattgtttgaggaaccgcaatactgttttccacagcagctatggaaggatggaaaaattgtatgatctatgaattatatctaagtaaaactgtaaaaaaaaa

SEQ ID NO: 18809 - DNA, 183 bp, Homo sapiens
cccgctcgcaggtatgggcagaataggaagcggactgtgcatcagcaaggaggagccaggacttggtgatacctgatgatcattaaacctacggatttacgccgatgataaagaccattgaacattatggcgaggcgcggtggctcacgcctgtaatcccagcactctgggaggctgaggggg

SEQ ID NO: 18810 - DNA, 442 bp, Homo sapiens
cacttctgacagcagcagcaggagactctaacctctgtcttgctcagatgctctccatggctcttttctcttgcccacactgatgagccccaggctgctggtgtgactgtcctaaagagaggcccatgtggcaaggaactgagggatgcttctagccaacagcaagtgagaaacaaaggccattaatccaacagcctgaaaggcatgaatcctgtgaacaaccgggccagagactttagaaacagaacctgagatggccacagccccgaccaacaccttgactgcagcttccggaggagccctgagacacagctagtcatgattgggtttttgaaccatagaaactgggagataataaatattataatccactcaattttggagaaggtggttatgtagcaacagataattaaatactggctaattgtccactgattgcata

SEQ ID NO: 18811 - DNA, 377 bp, Homo sapiens
gccttccattcctgagtacatatataaaaataaatgcaaccacagcacatcagtagacttttaaaaatacatgtcccttcttttttaaagcaagagatatttttatctcaacccagcatggataatcggaataaaattagagcatgtatggaattgaattaacctgtggattaaactcatccatttgggagatcatggttattactgatttaatctaaacatcagtgctagccgtgtgcatatgtggaactcagtgctgtatgaatgcgaagaatacaggatgccttttcagtcttcaatttggaaacttcatcatgataacactgattatcaggtaaactcaaacagtacaagacatgctttctctcatcttgcaa

SEQ ID NO: 18812 - DNA, 444 bp, Homo sapiens
gcaatgtgtaagggttccagtttctccatatcctccatgtccttatttttctgtctctgattatggccatccttgtgggtctgaagtggtttctcagcatgtatttgatttcgatttccctaatgactaacagtgttgagcatctttttatgtgtttgttagtcatttttatatcttctttaaagagatatctattcaaatcctttgcctacttttaacccaggttatttgtcgttttattgttgaattgccagaattccttattctgaatacaattttttttttttttttgagatggtgtctcgctctgttgcccaggctggagtgcagtgacacaattgtggctcactgcaacctccgcctctggggttcaagctattctcctgcctcagcctcctgagtagctgggattacaggtgcacgccaccatgcctggctaatttt

SEQ ID NO: 18813 - DNA, 463 bp, Homo sapiens
tccctgctagcaaccctagtctggtacctgaataagcagcatcaagaggcatcacacacactgatgagtgtggtagctcaaaatacagagccctgattccacatacatgagctcccatgtgtggctggggctctgctgggtcctgggggcaggaggaggatggagaggcaggccctaccatggaggaggttgtgatctaggggcaggctcctaaccagttaacatgtgcacagtttggcaagtctctcacagaagtctatagcatgtgggggaacccagtggaagaagtgatcgagctctaggatgaggaggagactggggagaacttcagagagcccttagaacttgaactgggactgggcacagcagctcacacctgtaatcccaacactttgggaggccgaggcaggaggatcgcttgagcccagaaattgaagaccagcctggccaacatagtgggacc

SEQ ID NO: 18814 - DNA, 354 bp, Homo sapiens
acctgccaaagcgtagtacccaaggacccagatgcttggttattggtgatcctgctttaactcttagatgaatgatttgatgtctgtaaaattgtaccttccttttaaacttaatttttatcttacagcagcagccagtaaggaggagaaggggagagagctcatttgatattaacaacattgtcatcccaatgtctgttgctgcaacaactcgcgtagagaaactgcaatacaaggaaatccttacgcccaggtagaagctcagaatagttggctcctctgccccattcttcctgctattgccctgttttccctcttctcttctgaccaagagttgggccctagtctttggtt

SEQ ID NO: 18815 - DNA, 3700 bp, Homo sapiens
gttcccacaagcctgcatttccagagcatgctgaaatctcagtggcagaacaagccttttgacaaaatcaaacctcccaaaaagttatcgcttaagcacagagcacccatgccgggcagtctgccagattcagctcgtaaggacaggcacaaattggtcagctccttcctaacaacagccagtaagtgtcagggagccgggaagtcccccagagtatcagtgacttttcattccttttatattctcaaatttgtagtttgcatgcatgttggggttgggagaggcagttgaccgataaaaaattcagctcacagtgactgcttctgcttgtcttggatgctctcagatggacttcgggagctattctagacaccatggatcttggagcaagacccaaaatgctcagtgaacagccagcaatggcatggcattgagttcatctacgggcaggtgtcttctgtatcctggtgacatgtttctctggttctgggctccctgtgcctatcctagccattgtgcaaattactagaaacttcagtcctgaaggactgtcctgctgccctgggtatacggcgttggcctagagagaactcgagagcttggaactcgaataagaaaatatttgagaggacatatttcacagctctttttctgttcccctcttcagagctgtcccatcaccaaacccggcctgacaggacccacaggcagcacttagacgatgtgggggccgtgcccatggtggagcgagtgacagcgccaaaagcagagcgcttgctcaacccaccaccacccgtgcatgacccaaaccacagcaaaatgagattgcgagaccattcatctgagagaagtgaagtgttgaagcatcacacagacatgagcagttcgagctacttggcagccacccaccatcctccacacagtcccttggtgcgacagctctccacctcctcagattcccctgcacccgccagctctagctcacaggttacagccagcacatcgcagcagccagtaaggaggagaaggggagagagctcatttgatattaacaacattgtcatcccaatgtctgttgctgcaacaactcgcgtagagaaactgcaatacaaggaaatccttacgcccagctggcgggaggttgatcttcagtctctgaaggggagtcctgatgaggagaatgaagagattgaggacctatccgatgcagcctttgccgccctgcatgccaaatgtgaggagatggagagggcacggtggctgtggaccacgagtgtgccaccccagcggcggggcagcaggtcctacaggtcatcagacggccggacaaccccccagctgggcagtgccaacccctccaccccccagcctgcctcccctgatgtcagcagtagccactctttgtcagaatactcccatggtcagtcccctaggagccccattagcccggaactgcactcagcacccctcacccctgtggctcgggacactccgcgacacttagccagtgaggatacccgttgttccacaccagagctggggctggatgaacagtctgtccagccctgggagcggcggaccttccccctggcgcacagtccccaggcggagtgtgaggaccagctggatgcacaggagcgagcagcccgctgcactcgacgcacctcaggcagcaagactggccgggagacagaggcagcgcccacctcgcctcccattgtccccctcaagagtcggcatctggtggcagcagccacagctcagcgcccgactcacagatgagcgggagacagccatctaaacagactcactaactattggcattaaagcttcagaaatctctgcgtttgatattcaaacatcatatgccggaaattttcacagtttttagtgaacttaaggaatttagatcctactttggtatttttttttcttgttttaatttttgttttgtttttgtttccatgttttcttgtcacacacctgagcacttcctcccgttggcaaacagaagttcaggatgagaccctgctggcctggtcctggcacatcctctgcactgttgaatcactggacttactgatcttagatgaccaccccctccctcacacctgtgggcagggcagaacagcctggcgggctacagtttagcatggccttcttgagctagggtggaatggggcagggtgctctggactcttaccccctcccctcccatctgtggcttggctctgctgtggccctcctggctgggtccccttggtttttcgtgctggaacatccccaccagagcctctctgccataactgccagctgctctccccgagtgctcagctggcagaacacctttcctttctcacccagaacttaagagactgattttttgtttcatctgcatttggtcttctctgttttgactctttcactgcagtaacctggctgtggctgctcaggttcccctcctcatgccccttggtacccttccctgtctgctctcccatgccatgtacacacccacaacccgtccttccacttggaatatttttaccacctatcctgatctttgaaggtagggttaggactacttaacctctattcccactcccctgcaaactgggggttgtgggaagtgagcagccatctccctgtgtgattttttttttttttccctctgattcactttgccatgtttccttcacatccagatccctgtcggtgttagttccactcttggtctttcacgctccccttgcctgtggaacattgtctggtcctagctgtggttcccattgttcccccttcacccttctctgttaaccttgtgcctgtctcctgtatgatcacatcaccaaaaagggggaggggggagaagactctttttttttggccattttgtaatcgtataaaaatagtagacaactgcttaatggttggggttttttcacaattttcaacattagtgatttttttttctgtttgcaagttaaagggtttgtcattgtttctttaaaaaaaaatacaataatgcaccatatccctatgcataaagtgcttcttctatttataaggttgaaaattctgaataacccttttagcattgaaaaaaaaaacaaaaacaaaaaatggaaaaaaaaaaccttgtattttgtaaatattttcttttcctgctttggagctgtgtaatggcagcgaaacatgtagctgtctttgttctatagaaatgcttttcttcagagaagctgatctttgttaatgtcttgattctgttcgcaaagcacagactagtgcttaaaaaaaaaaaagaaggaaaaattgaaaaaaataaaaaaaaaagttacagaatgctgtgtaccaggcctttcttgacttactgaactgtgtatgcatggtagtgttggcagtttcggagctggctctctgccgccgttctttggggtactctgacttgctctataccttggaaaatctccattctgtcttgtgggaacgccgcaggttgatctgatggccaccagagagagaatggtggtggcttttcactgagggtaagggctgccaggaggagaggggatctgcattgatcatctcttttttctttttgttgagtgaaagcagttgatgcactttctctctagtgaagtcagctgtatgatattttctatctgttctaagttgctctttaaaggagattttgcttctc

SEQ ID NO: 18816 - DNA, 2823 bp, Homo sapiens
acctgccaaagcgtagtacccaaggacccagatgcttggttattggtgatcctgctttaactcttagatgaatgatttgatgtctgtaaaattgtaccttccttttaaacttaatttttatcttacagcagcagccagtaaggaggagaaggggagagagctcatttgatattaacaacattgtcatcccaatgtctgttgctgcaacaactcgcgtagagaaactgcaatacaaggaaatccttacgcccagctggcgggaggttgatcttcagtctctgaaggggagtcctgatgaggagaatgaagagattgaggacctatccgatgcagcctttgccgccctgcatgccaaatgtgaggagatggagagggcacggtggctgtggaccacgagtgtgccaccccagcggcggggcagcaggtcctacaggtcatcagacggccggacaaccccccagctgggcagtgccaacccctccaccccccagcctgcctcccctgatgtcagcagtagccactctttgtcagaatactcccatggtcagtcccctaggagccccattagcccggaactgcactcagcacccctcacccctgtggctcgggacactccgcgacacttagccagtgaggatacccgttgttccacaccagagctggggctggatgaacagtctgtccagccctgggagcggcggaccttccccctggcgcacagtccccaggcggagtgtgaggaccagctggatgcacaggagcgagcagcccgctgcactcgacgcacctcaggcagcaagactggccgggagacagaggcagcgcccacctcgcctcccattgtccccctcaagagtcggcatctggtggcagcagccacagctcagcgcccgactcacagatgagcgggagacagccatctaaacagactcactaactattggcattaaagcttcagaaatctctgcgtttgatattcaaacatcatatgccggaaattttcacagtttttagtgaacttaaggaatttagatcctactttggtatttttttttcttgttttaatttttgttttgtttttgtttccatgttttcttgtcacacacctgagcacttcctcccgttggcaaacagaagttcaggatgagaccctgctggcctggtcctggcacatcctctgcactgttgaatcactggacttactgatcttagatgaccaccccctccctcacacctgtgggcagggcagaacagcctggcgggctacagtttagcatggccttcttgagctagggtggaatggggcagggtgctctggactcttaccccctcccctcccatctgtggcttggctctgctgtggccctcctggctgggtccccttggtttttcgtgctggaacatccccaccagagcctctctgccataactgccagctgctctccccgagtgctcagctggcagaacacctttcctttctcacccagaacttaagagactgattttttgtttcatctgcatttggtcttctctgttttgactctttcactgcagtaacctggctgtggctgctcaggttcccctcctcatgccccttggtacccttccctgtctgctctcccatgccatgtacacacccacaacccgtccttccacttggaatatttttaccacctatcctgatctttgaaggtagggttaggactacttaacctctattcccactcccctgcaaactgggggttgtgggaagtgagcagccatctccctgtgtgattttttttttttttccctctgattcactttgccatgtttccttcacatccagatccctgtcggtgttagttccactcttggtctttcacgctccccttgcctgtggaacattgtctggtcctagctgtggttcccattgttcccccttcacccttctctgttaaccttgtgcctgtctcctgtatgatcacatcaccaaaaagggggaggggggagaagactctttttttttggccattttgtaatcgtataaaaatagtagacaactgcttaatggttggggttttttcacaattttcaacattagtgatttttttttctgtttgcaagttaaagggtttgtcattgtttctttaaaaaaaaatacaataatgcaccatatccctatgcataaagtgcttcttctatttataaggttgaaaattctgaataacccttttagcattgaaaaaaaaaacaaaaacaaaaaatggaaaaaaaaaaccttgtattttgtaaatattttcttttcctgctttggagctgtgtaatggcagcgaaacatgtagctgtctttgttctatagaaatgcttttcttcagagaagctgatctttgttaatgtcttgattctgttcgcaaagcacagactagtgcttaaaaaaaaaaaagaaggaaaaattgaaaaaaataaaaaaaaaagttacagaatgctgtgtaccaggcctttcttgacttactgaactgtgtatgcatggtagtgttggcagtttcggagctggctctctgccgccgttctttggggtactctgacttgctctataccttggaaaatctccattctgtcttgtgggaacgccgcaggttgatctgatggccaccagagagagaatggtggtggcttttcactgagggtaagggctgccaggaggagaggggatctgcattgatcatctcttttttctttttgttgagtgaaagcagttgatgcactttctctctagtgaagtcagctgtatgatattttctatctgttctaagttgctctttaaaggagattttgcttctc

SEQ ID NO: 18817 - DNA, 3355 bp, Homo sapiens
  misc_feature (2472)..(2472): n is a, c, g, or t
  misc_feature (2492)..(2492): n is a, c, g, or t
  misc_feature (2496)..(2496): n is a, c, g, or t
  misc_feature (2499)..(2499): n is a, c, g, or t
  misc_feature (2502)..(2502): n is a, c, g, or t
  misc_feature (2508)..(2508): n is a, c, g, or t
  misc_feature (2514)..(2514): n is a, c, g, or t
  misc_feature (2522)..(2522): n is a, c, g, or t
  misc_feature (2536)..(2536): n is a, c, g, or t
  misc_feature (2539)..(2539): n is a, c, g, or t
gttcccacaagcctgcatttccagagcatgctgaaatctcagtggcagaacaagccttttgacaaaatcaaacctcccaaaaagttatcgcttaagcacagagcacccatgccgggcagtctgccagattcagctcgtaaggacaggcacaaattggtcagctccttcctaacaacagccaagctgtcccatcaccaaacccggcctgacaggacccacaggcagcacttagacgatgtgggggccgtgcccatggtggagcgagtgacagcgccaaaagcagagcgcttgctcaacccaccaccacccgtgcatgacccaaaccacagcaaaatgagattgcgagaccattcatctgagagaagtgaagtgttgaagcatcacacagacatgagcagttcgagctacttggcagccacccaccatcctccacacagtcccttggtgcgacagctctccacctcctcagattcccctgcacccgccagctctagctcacaggttacagccagcacatcgcagcagccagtaaggaggagaaggggagagagctcatttgatattaacaacattgtcatcccaatgtctgttgctgcaacaactcgcgtagagaaactgcaatacaaggaaatccttacgcccagctggcgggaggttgatcttcagtctctgaaggggagtcctgatgaggagaatgaagagattgaggacctatccgatgcagcctttgccgccctgcatgccaaatgtgaggagatggagagggcacggtggctgtggaccacgagtgtgccaccccagcggcggggcagcaggtcctacaggtcatcagacggccggacaaccccccagctgggcagtgccaacccctccaccccccagcctgcctcccctgatgtcagcagtagccactctttgtcagaatactcccatggtcagtcccctaggagccccattagcccggaactgcactcagcacccctcacccctgtggctcgggacactccgcgacacttagccagtgaggatacccgttgttccacaccagagctggggctggatgaacagtctgtccagccctgggagcggcggaccttccccctggcgcacagtccccaggcggagtgtgaggaccagctggatgcacaggagcgagcagcccgctgcactcgacgcacctcaggcagcaagactggccgggagacagaggcagcgcccacctcgcctcccattgtccccctcaagagtcggcatctggtggcagcagccacagctcagcgcccgactcacagatgagcgggagacagccatctaaacagactcactaactattggcattaaagcttcagaaatctctgcgtttgatattcaaacatcatatgccggaaattttcacagtttttagtgaacttaaggaatttagatcctactttggtatttttttttcttgttttaatttttgttttgtttttgtttccatgttttcttgtcacacacctgagcacttcctcccgttggcaaacagaagttcaggatgagaccctgctggcctggtcctggcacatcctctgcactgttgaatcactggacttactgatcttagatgaccaccccctccctcacacctgtgggcagggcagaacagcctggcgggctacagtttagcatggccttcttgagctagggtggaatggggcagggtgctctggactcttaccccctcccctcccatctgtggcttggctctgctgtggccctcctggctgggtccccttggtttttcgtgctggaacatccccaccagagcctctctgccataactgccagctgctctccccgagtgctcagctggcagaacacctttcctttctcacccagaacttaagagactgattttttgtttcatctgcatttggtcttctctgttttgactctttcactgcagtaacctggctgtggctgctcaggttcccctcctcatgccccttggtacccttccctgtctgctctcccatgccatgtacacacccacaacccgtccttccacttggaatatttttaccacctatcctgatctttgaaggtagggttaggactacttaacctctattcccactcccctgcaaactgggggttgtgggaagtgagcagccatctccctgtgtgattttttttttttttccctctgattcactttgccatgtttccttcacatccagatccctgtcggtgttagttccactcttggtctttcacgctccccttgcctgtggaacattgtctggtcctagctgtggttcccattgttcccccttcacccttctctgttaaccttgtgcctgtctcctgtatgatcacatcaccaaaaagggggaggggggagaagactctttttttttggccattttgtaatcgtataaaaatagtagacaactgcttaatggttggggttttttcacaattttcaacatnagtgatttttttttctgttngcangtnaangggttngtcatngtttcttnaaaaaaaaatacantantgccccatatccctatgcataaagtgcttcttctatttataaggttgaaaattctgaataacccttttagcattagtgatttttttttctgtttgcaagttaaagggtttgtcattgtttctttaaaaaaaaatacaataatgcaccatatccctatgcataaagtgcttcttctatttataaggttgaaaattctgaataacccttttagcattgaaaaaaaaaacaaaaacaaaaaatggaaaaaaaaaaccttgtattttgtaaatattttcttttcctgctttggagctgtgtaatggcagcgaaacatgtagctgtctttgttctatagaaatgcttttcttcagagaagctgatctttgttaatgtcttgattctgttcgcaaagcacagactagtgcttaaaaaaaaaaaagaaggaaaaattgaaaaaaataaaaaaaaaagttacagaatgctgtgtaccaggcctttcttgacttactgaactgtgtatgcatggtagtgttggcagtttcggagctggctctctgccgccgttctttggggtactctgacttgctctataccttggaaaatctccattctgtcttgtgggaacgccgcaggttgatctgatggccaccagagagagaatggtggtggcttttcactgagggtaagggctgccaggaggagaggggatctgcattgatcatctcttttttctttttgttgagtgaaagcagttgatgcactttctctctagtgaagtcagctgtatgatattttctatctgttctaagttgctctttaaaggagattttgcttctc

SEQ ID NO: 18818 - DNA, 451 bp, Homo sapiens
ggtcatcagacggccggacaaccccccagctgggcagtgccaacccctccaccccccagcctgcctcccctgatgtcagcagtagccactctttgtcagaatactcccatggtcagtcccctaggagccccattagcccggaactgcactcagcacccctcacccctgtggctcgggacactccgcgacacttagccagtgaggatacccgttgttccacaccagagctggggctggatgaacaggtaagggacgcagcctttgggtggggttggcatggttgggggatggaaccaggaaggggcagcatctgctgaagagggacctagccatcccctcccccttttgaagggacaaagggctgcacttaaattgatctcctcaacgttcagtggaactgtattgatcactgctaaatgatcaatacagttgtctgggtataccctaggag

SEQ ID NO: 18819 - DNA, 398 bp, Homo sapiens
tgtcggtgttagttccactcttggtctttcacgctccccttgcctgtggaacattgtctggtcctagctgtggttcccattgttcccccttcacccttctctgttaaccttgtgcctgtctcctgtatgatcacatcaccaaaaagggggaggggggagaagactctttttttttggccattttgtaatcgtataaaaatagtagacaactgcttaatggttggggttttttcacaattttcaacattagtgatttttttttctgtttgcaagttaaagggtttgtcattgtttctttaaaaaaaaatacaataatgcaccatatccctatgcataaagtgcttcttctatttataaggttgaaaattctgaataacccttttagcattgaaaaaaaa

SEQ ID NO: 18820 - DNA, 3214 bp, Homo sapiens
gttcccacaagcctgcatttccagagcatgctgaaatctcagtggcagaacaagccttttgacaaaatcaaacctcccaaaaagttatcgcttaagcacagagcacccatgccgggcagtctgccagattcagctcgtaaggacaggcacaaattggtcagctccttcctaacaacagccaagctgtcccatcaccaaacccggcctgacaggacccacaggcagcacttagacgatgtgggggccgtgcccatggtggagcgagtgacagcgccaaaagcagagcgcttgctcaacccaccaccacccgtgcatgacccaaaccacagcaaaatgagattgcgagaccattcatctgagagaagtgaagtgttgaagcatcacacagacatgagcagttcgagctacttggcagccacccaccatcctccacacagtcccttggtgcgacagctctccacctcctcagattcccctgcacccgccagctctagctcacaggttacagccagcacatcgcagcagccagtaaggaggagaaggggagagagctcatttgatattaacaacattgtcatcccaatgtctgttgctgcaacaactcgcgtagagaaactgcaatacaaggaaatccttacgcccagctggcgggaggttgatcttcagtctctgaaggggagtcctgatgaggagaatgaagagattgaggacctatccgatgcagcctttgccgccctgcatgccaaatgtgaggagatggagagggcacggtggctgtggaccacgagtgtgccaccccagcggcggggcagcaggtcctacaggtcatcagacggccggacaaccccccagctgggcagtgccaacccctccaccccccagcctgcctcccctgatgtcagcagtagccactctttgtcagaatactcccatggtcagtcccctaggagccccattagcccggaactgcactcagcacccctcacccctgtggctcgggacactccgcgacacttagccagtgaggatacccgttgttccacaccagagctggggctggatgaacagtctgtccagccctgggagcggcggaccttccccctggcgcacagtccccaggcggagtgtgaggaccagctggatgcacaggagcgagcagcccgctgcactcgacgcacctcaggcagcaagactggccgggagacagaggcagcgcccacctcgcctcccattgtccccctcaagagtcggcatctggtggcagcagccacagctcagcgcccgactcacagatgagcgggagacagccatctaaacagactcactaactattggcattaaagcttcagaaatctctgcgtttgatattcaaacatcatatgccggaaattttcacagtttttagtgaacttaaggaatttagatcctactttggtatttttttttcttgttttaatttttgttttgtttttgtttccatgttttcttgtcacacacctgagcacttcctcccgttggcaaacagaagttcaggatgagaccctgctggcctggtcctggcacatcctctgcactgttgaatcactggacttactgatcttagatgaccaccccctccctcacacctgtgggcagggcagaacagcctggcgggctacagtttagcatggccttcttgagctagggtggaatggggcagggtgctctggactcttaccccctcccctcccatctgtggcttggctctgctgtggccctcctggctgggtccccttggtttttcgtgctggaacatccccaccagagcctctctgccataactgccagctgctctccccgagtgctcagctggcagaacacctttcctttctcacccagaacttaagagactgattttttgtttcatctgcatttggtcttctctgttttgactctttcactgcagtaacctggctgtggctgctcaggttcccctcctcatgccccttggtacccttccctgtctgctctcccatgccatgtacacacccacaacccgtccttccacttggaatatttttaccacctatcctgatctttgaaggtagggttaggactacttaacctctattcccactcccctgcaaactgggggttgtgggaagtgagcagccatctccctgtgtgattttttttttttttccctctgattcactttgccatgtttccttcacatccagatccctgtcggtgttagttccactcttggtctttcacgctccccttgcctgtggaacattgtctggtcctagctgtggttcccattgttcccccttcacccttctctgttaaccttgtgcctgtctcctgtatgatcacatcaccaaaaagggggaggggggagaagactctttttttttggccattttgtaatcgtataaaaatagtagacaactgcttaatggttggggttttttcacaattttcaacattagtgatttttttttctgtttgcaagttaaagggtttgtcattgtttctttaaaaaaaaatacaataatgcaccatatccctatgcataaagtgcttcttctatttataaggttgaaaattctgaataacccttttagcattgaaaaaaaaaacaaaaacaaaaaatggaaaaaaaaaaccttgtattttgtaaatattttcttttcctgctttggagctgtgtaatggcagcgaaacatgtagctgtctttgttctatagaaatgcttttcttcagagaagctgatctttgttaatgtcttgattctgttcgcaaagcacagactagtgcttaaaaaaaaaaaagaaggaaaaattgaaaaaaataaaaaaaaaagttacagaatgctgtgtaccaggcctttcttgacttactgaactgtgtatgcatggtagtgttggcagtttcggagctggctctctgccgccgttctttggggtactctgacttgctctataccttggaaaatctccattctgtcttgtgggaacgccgcaggttgatctgatggccaccagagagagaatggtggtggcttttcactgagggtaagggctgccaggaggagaggggatctgcattgatcatctcttttttctttttgttgagtgaaagcagttgatgcactttctctctagtgaagtcagctgtatgatattttctatctgttctaagttgctctttaaaggagattttgcttctc

SEQ ID NO: 18821 - DNA, 3161 bp, Homo sapiens
gttcccacaagcctgcatttccagagcatgctgaaatctcagtggcagaacaagccttttgacaaaatcaaacctcccaaaaagttatcgcttaagcacagagcacccatgccgggcagtctgccagattcagctcgtaaggacaggcacaaattggtcagctccttcctaacaacagccaagctgtcccatcaccaaacccggcctgacaggacccacaggcagcacttagacgatgtgggggccgtgcccatggtggagcgagtgacagcgccaaaagcagagcgcttgctcaacccaccaccacccgtgcatgacccaaaccacagcaaaatgagattgcgagaccattcatctgagagaagtgaagtgttgaagcatcacacagacatgagcagttcgagctacttggcagccacccaccatcctccacacagtcccttggtgcgacagctctccacctcctcagattcccctgcacccgccagctctagctcacaggttacagccagcacatcgcagcagccagtaaggaggagaaggggagagagctcatttgatattaacaacattgtcatcccaatgtctgttgctgcaacaactcgcgtagagaaactgcaatacaaggaaatccttacgcccagctggcgggaggttgatcttcagtctctgaaggggagtcctgatgaggagaatgaagagattgaggacctatccgatgcagcctttgccgccctgcatgccaaatgtgaggagatggagagggcacggtggctgtggaccacgagtgtgccaccccagcggcggggcagcaggtcctacaggtcatcagacggccggacaaccccccagctgggcagtgccaacccctccaccccccagcctgcctcccctgatgtcagcagtagccactctttgtcagaatactcccatggtcagtcccctaggagccccattagcccggaactgcactcagcacccctcacccctgtggctcgggacactccgcgacacttagccagtgaggatacccgttgttccacaccagagctggggctggatgaacagtctgtccagccctgggagcggcggaccttccccctggcgcacagtccccaggcggagtgtgaggaccagctggatgcacaggagcgagcagcccgctgcactcgacgcacctcaggcagcaagactggccgggagacagaggcagcgcccacctcgcctcccattgtccccctcaagagtcggcatctggtggcagcagccacagctcagcgcccgactcacagatgagcgggagacagccatctaaacagactcactaactattggcattaaagcttcagaaatctctgcgtttgatattcaaacatcatatgccggaaattttcacagtttttagtgaacttaaggaatttagatcctactttggtatacacacctgagcacttcctcccgttggcaaacagaagttcaggatgagaccctgctggcctggtcctggcacatcctctgcactgttgaatcactggacttactgatcttagatgaccaccccctccctcacacctgtgggcagggcagaacagcctggcgggctacagtttagcatggccttcttgagctagggtggaatggggcagggtgctctggactcttaccccctcccctcccatctgtggcttggctctgctgtggccctcctggctgggtccccttggtttttcgtgctggaacatccccaccagagcctctctgccataactgccagctgctctccccgagtgctcagctggcagaacacctttcctttctcacccagaacttaagagactgattttttgtttcatctgcatttggtcttctctgttttgactctttcactgcagtaacctggctgtggctgctcaggttcccctcctcatgccccttggtacccttccctgtctgctctcccatgccatgtacacacccacaacccgtccttccacttggaatatttttaccacctatcctgatctttgaaggtagggttaggactacttaacctctattcccactcccctgcaaactgggggttgtgggaagtgagcagccatctccctgtgtgattttttttttttttccctctgattcactttgccatgtttccttcacatccagatccctgtcggtgttagttccactcttggtctttcacgctccccttgcctgtggaacattgtctggtcctagctgtggttcccattgttcccccttcacccttctctgttaaccttgtgcctgtctcctgtatgatcacatcaccaaaaagggggaggggggagaagactctttttttttggccattttgtaatcgtataaaaatagtagacaactgcttaatggttggggttttttcacaattttcaacattagtgatttttttttctgtttgcaagttaaagggtttgtcattgtttctttaaaaaaaaatacaataatgcaccatatccctatgcataaagtgcttcttctatttataaggttgaaaattctgaataacccttttagcattgaaaaaaaaaacaaaaacaaaaaatggaaaaaaaaaaccttgtattttgtaaatattttcttttcctgctttggagctgtgtaatggcagcgaaacatgtagctgtctttgttctatagaaatgcttttcttcagagaagctgatctttgttaatgtcttgattctgttcgcaaagcacagactagtgcttaaaaaaaaaaaagaaggaaaaattgaaaaaaataaaaaaaaaagttacagaatgctgtgtaccaggcctttcttgacttactgaactgtgtatgcatggtagtgttggcagtttcggagctggctctctgccgccgttctttggggtactctgacttgctctataccttggaaaatctccattctgtcttgtgggaacgccgcaggttgatctgatggccaccagagagagaatggtggtggcttttcactgagggtaagggctgccaggaggagaggggatctgcattgatcatctcttttttctttttgttgagtgaaagcagttgatgcactttctctctagtgaagtcagctgtatgatattttctatctgttctaagttgctctttaaaggagattttgcttctc

SEQ ID NO: 18822 - DNA, 1481 bp, Homo sapiens
gttcccacaagcctgcatttccagagcatgctgaaatctcagtggcagaacaagccttttgacaaaatcaaacctcccaaaaagttatcgcttaagcacagagcacccatgccgggcagtctgccagattcagctcgtaaggacaggcacaaattggtcagctccttcctaacaacagccaagctgtcccatcaccaaacccggcctgacaggacccacaggcagcacttagacgatgtgggggccgtgcccatggtggagcgagtgacagcgccaaaagcagagcgcttgctcaacccaccaccacccgtgcatgacccaaaccacagcaaaatgagattgcgagaccattcatctgagagaagtgaagtgttgaagcatcacacagacatgagcagttcgagctacttggcagccacccaccatcctccacacagtcccttggtgcgacagctctccacctcctcagattcccctgcacccgccagctctagctcacaggttacagccagcacatcgcagcagccagtaaggaggagaaggggagagagctcatttgatattaacaacattgtcatcccaatgtctgttgctgcaacaactcgcgtagagaaactgcaatacaaggaaatccttacgcccagctggcgggaggttgatcttcagtctctgaaggggagtcctgatgaggagaatgaagagattgaggacctatccgatgcagcctttgccgccctgcatgccaaatgtgaggagatggagagggcacggtggctgtggaccacgagtgtgccaccccagcggcggggcagcaggtgatggggcaggcttgggtccccagggcctgtggagagagggtggacagggagtttgggccctacttgagtccatggaattgctactgcctcttggttgctcatcatactcatctactggcagtggcaaatagctcagaatttccttggtgtttgttggaactagtggagatatatggaactagtggagatataaggagccaagtgctagatccttgctgagaagtcactatgtaattctgaattcccatgatctgtggcatttggaagacagttggggggtcatggtgattcaacccggggagcttggaaggcctcgctacaagttaaccttcctttggacagtggctttgtgatgccacttgaagaaactgcccccccttaacgtccatcactaccctgtctccatttattgttaacagtggcagaaaccctcgggattctcaagtagaaagttttgggagctcttacttttacttttttttctttgactacagttttcaaagtctacacgaatctccctaacctcctgaattcactaggcactttgctatggactcacctggcattgttcagccatgcttttttcttgggatggtaaatgttgtatacctacccctccagagaatagtgggaagaaatgggagttgctggatcctaaggaaa

SEQ ID NO: 18823 - DNA, 549 bp, Homo sapiens
gctaatagatgactattagattttataaaatatgtttgttttggctattaaatgactattagattttataaaatatatgtttacttactaccttgttcccaaagggatttaaggcatttagttagcatctttctttaggaattcatcagtagtaacaaatgagcagtgctagttgaaattctaaaataaaaactcatattcctctaggtaattgctttttaacctttttaggggtctttcctgagaccagactgcattcatctgaaaacaaacctgtagttaggacaatccatgagtaaagaaggcctcatatttagaatgtcatagcttctcagaatctgctttgaaattgaaagtcaacatagctccttctgctgtggtgcaaatgtctagagcctaaacatctctaaaatggaaactgggctgggtgtggtggctcatgcctgaaatcccagcactttgggaagctgaggcagacagaaggattgcttgagcccaggagttggagaccagcctgggcaacatgagacaccatctctacaaaaaaaa

SEQ ID NO: 18824 - DNA, 327 bp, Homo sapiens
cctggcaaaaccctggcaggtaagttagtagcaggtcaatatcccacagcaaagaaacaaggaccaaaaaatgactgacttttgacttttcacttcttttttttttgtatgtacccatcagagtttatataaccttttgctcccttctgtcactttgaaaacaagcaaactaagccttcaaacttcagacttcaaactcaacctacagtcattcccatgttccttctggttaacaatttacaaatgacatatttaaatgttagcattttgtagagagaatcaggagaatcagggttttttttttttaaaatctggtacaattaggtg

SEQ ID NO: 18825 - DNA, 515 bp, Homo sapiens
gatttttaagtaactgtgagtgaagtttattcttcaacaatgtctactccatccccaacccaactcacagccctatgactactatctttgcattagttaaaaagttagtatataggcatcaaacaaccttggctgtaacctatagaatctctatccacgtatcaggttatagactggtttttcaaaagtgaacaatcctgtgataagttggagtaccatttagtaatacagcaacattgtgtcatttattagcatcataattctttgttatgtaagttaaatatatcaagaaagaagagactgtttggaaaaatgtggttcaagttttatgctatataggtttggtatgcgatacagacagctaacttttcttatgaaaaatacatatttgcatgtaaacaatgatttcaaaatacttgaaaaataaaattttaacccaaatgaataactaagaaatataaaacaagcacaaaatcttagggaagtcataaaatagtagtgaaagtattagacag

SEQ ID NO: 18826 - DNA, 825 bp, Homo sapiens
gtgacaggggaaacaggcagaacaagtcagggcaaaggaccccagcatgaagagttgtggaggtggaggtggggaagcagcctcacatctcacacttccttccttctcttaaatgtgagcagctgactccaagccttgtggaaactctagaaggtagaaccagccatctggggaagctggccttacagatgccccgtctggcatagtggaggttcctgtgctctgagaacgcagtgtgaatctagacatccactgcagcctgggaagagctgtgttttcttcaaaagtctttaactttcacagtcacccctctaaagaaatgttctctgattgaaggcatgcttctattcctactttattgtgtttcatgcattctgccagagtaattacttttcataccaattcttggatgcagagaaatctctggtagtctaaggggatttcgatccaagtaaagctactatctcctattccatccagacttttccgtctgcctccattctctcagtcacatacctagaagcaagccagaaagcctgtccaaccaaaatcactctccaaagcccaagcactttattgttctccctgtctgttatcgagccaaggtgtatttggcctcattttatgccattagttgtctggctttcatggctctgcaccacattacagtcagagcaggaaggccagcagtggagatagaattatggcagaaacccagagtagaggcctctgctggtgagggagcctgcagcactctccacgctggtgggtcctagcatgcccaacagacccccatcccttcccatcagccttgggccttgagtc

SEQ ID NO: 18827 - DNA, 356 bp, Homo sapiens
aataatttctgtgagctcagaaggggacagcatctgcctttaggcatgacagttcagccaactctgggtgcccttgagggtttctctttcaatcccagaaatgctgataactcagctgggctggggcaggatttggcatgataggctggctctgaaccccctcctaagagaccaagagaggaagtgatggaattggttggtcccatttcaactctatgctgattctcagggttctcatggcttccctaagagagccacctaaactgctcgggggtgaaaaatcctcttgtattgaagtgccaagctgcctgcagcagtgcatgatggacattttttttttctttttaaaacacacc

SEQ ID NO: 18828 - DNA, 548 bp, Homo sapiens
tgccacccctaagacagcaagaccaaccctcctcttcctcctcttcctcagtctattcagtgtgaagacaaagatgaagactcttatgatgatccaccttcacataatgactagcattgagataatgaagagcatcccagaggaaacaccatgggagggaatacccagccacaacccatcttcgaacctgttgcgatgctgcagaaatcagaggagctggccagttaatgctgagaatttcatcaggggctaacagcatgaaagctttcaaattattaatattttgattcatggcacatttatgggtctagtccatcctaagaacattataaagagacatttccttggatctgtctgtgtttctgaaactgattcaataccagatagaagttcgcagaggtaagctgaatgatggactgggatttttagggtcttcaatgtgtataacttcacaaaaaatatgcacagagtatggaaaaagtaggtttgattggaaaaaatctatacgacgaggaaacagcctgtcaaaaactcatatgctcataata

SEQ ID NO: 18829 - DNA, 343 bp, Homo sapiens
attggtagttttatccatatgcacattatgggacagttaggttggtacctggaagtgtaattttaaagaagcacttaggccaggcacggtggctcacgcctgtcatcccagcacttgggaggccaaggtaagaggattgcttgagcccagcctaagcaacatagcaagactctgtcttaatgaaaaaaacaattgttttaaattagccaggctcacacctgtagtcccagctattcgggagactgaggtgagaggatggcttgagccaaggaggttgaggctgcagtgagtcgtgatcacaccactgcactccagcctgtgtgacagagcaagaccatgtctc

SEQ ID NO: 18830 - DNA, 438 bp, Homo sapiens
ccgcgtgggtggtgcatgtgcacctgagcaagttggaagaggaggtttggcatctggatgtttggcggctcacttctggtcaagggagttgggcgcgggtgccctaagcccacccctgtacattcacacgtggggtttctagatgccagatcctgaactgctggtaggtcggagctttttgcctctgacacgctggctttggcctgacagaggttgtctggagtcaacagcagggctgggtctctccagggacttcaccaggctccttcccagggcgggtctgggaattctgggagcagtgggagctccaggcagttctggcccatgggtgcctgcagaggtaggaagagtgcttggaggccccacctctgcctgaagaagaaccgaggacactgttcctcatccctgctttcttttctctcgtcttcactggggact

SEQ ID NO: 18831 - DNA, 493 bp, Homo sapiens
gaatactaaacattactggccaagtaaattgctttctgtataagcgttctcttttttttttttgaagtttgccccagtgtgaaagtctctctcagaagattggtaactaatgggtaatacacaacattccaagatagattctggtatcttgagccaacatatcaggagaatggtacagaaaaactgaacattaccagcccctctaccttagctaactgcaaaatgaacagcttccaaggacttgctgctactctcccacaaaatgaaaagtctatgtatcaagatgtagaatagtacagctaagcacaaggctcctccccagtcaaagaggagcagagagtgaagatcactatcagtaaaagcgctggcctagagttccatcactaaactgatatgtaacccaaggcaggtcttctttctttgagtttcagtctcatcatctttgaagtgagaataacagagcataaaagtcaaacttgaaccaaaaaaaaaa

SEQ ID NO: 18832 - DNA, 813 bp, Homo sapiens
gaatactaaacattactggccaagtaaattgctttctgtataagcgttctcttttttttttttgaagtttgccccagtgtgaaagtctctctgtaagtcaaaaccttagcattattttaatgtactgtgctgtatttaataatcttatgcttcagacattagtctgttaccatgggaatgacagcagcataaatacaggattatggctatcaagcaggagaaaagaaattatgaataagcctcgttatgttcaataattagcagctacatggaaaaaaacaaaaccatgaatttaggttgatgcatttatctcagtgtttgaatacaactctgagtgtgttattgctttaaaatgagattctaacaaactgccaaaaacttcttgactagcagttgttactcagtgctataatttaaaaattcatcctgtccatctcttttttctcctatttatattcttccccagcagaagattggtaactaatgggtaatacacaacattccaagatagattctggtatcttgagccaacatatcaggagaatggtacagaaaaactgaacattaccagcccctctaccttagctaactgcaaaatgaacagcttccaaggacttgctgctactctcccacaaaatgaaaagtctatgtatcaagatgtagaatagtacagctaagcacaaggctcctccccagtcaaagaggagcagagagtgaagatcactatcagtcttctttctttgagtttcagtctcatcatctttgaagtgagaataacagagcataaaagtcaaacttgaaccaaaaaaaaaa

SEQ ID NO: 18833 - DNA, 445 bp, Homo sapiens
gggctggaatcaaacactgggaactctgaatgtgtttgctctagaaaaagacttgaagttagtgaaagtgcatcttagagaacatgttgtaggggccaagtgaatgtcaattaaagttcactacagaatttctgacttcaaaaatgattttcaaatttgcagatgtgctcttgtatttcaaaactttttcttagtcactgaaccctgtttctgttcctctgaatgaaggatcacacaaagagcatagtgacatgtcatggtagatcagctcacacaggatagggactgtgtttcacttgtgtgatttctcatccagcacacaggtgcactagttgggcacagagttagtgctctttgaaaagatgtgaggacaacaaaacctgcttatcacctacgcagcctctgggactttggcaggtgatagtaataaatagcaatacaagag

SEQ ID NO: 18834 - DNA, 478 bp, Homo sapiens
aaaagcagatccactgatatggatacagcagtaccatttaaaagtcaccacaaattacctaaaatacactggggtttcataaaacaccatctatccatcacaaataatgtttttaggaagcatgttcaccatttattttctaaagaaaaagttcttacacaaaatctctggttgacaagctgttattttcaaggctgcagggatttctagagaagcatgccttatgtagattagctcattttttatgactccaagcacttaagtatttaaataatgcaaaagagcaacagctaattaattgtgaaagttgtggcaaagcactatctatatattgataaatgtctaatgctctatttaggtgcctttaaaaaaggatattgttgccattaaatattttcactctcatatttccccactataacaggacattgttgagagtcttccttatgaatacacccaagaattagaaatgcataca

SEQ ID NO: 18835 - DNA, 355 bp, Homo sapiens
gccgagggtcccgccagtctcaacccgaccccgcagccggcactcctgcggcgcgcgcgttccgagctcttggggccagtgacgccggcgcccttcctgcaactccgggccgcttcttgaacctgacaacctctagggaggcgaaagggagagtggatttggagaggagcaaattccgtatatttaaaataacgtttttctcctagccttacaaaaataacattgcggccaacctatacccagcatccagccacctagagataatcactcttcagtctccgccatccagattatgtctacgtgttttctcttttcaccagaaactgttctgtaaacagctttccccccatttagt

SEQ ID NO: 18836 - DNA, 409 bp, Homo sapiens
caacttacaccatgaacatctttccatatcaggtcatatggaactttttcattctttttaacaattgcagaatattgtgggaagtagtttaatttactcagctagtcttctaatgatggacatttggcttgtttacaatttccattctttcacaaagcctgctgcaacaaataacattattcatatggcattttgtttaagtgtgagtatatatgtaggataaatttctagaaagtagacttgctggattaaaagttatgtacattttaaattttgatagatattgccaaatttccatgcaaaggataaatttctttgtgtagaattgcttggttgcatggtgtatgcatttcatctttcagaaatgttgtatcagtttatattcctgggcaatatgggcaaacaagat

SEQ ID NO: 18837 - DNA, 298 bp, Homo sapiens
ggggagccacttctactttcagcccctccctggaatagtggagttgggaggatggggagacagctaaccaacttcattacccaaactgtattgcacttttagttccctagttttctaggcgagcttcatttggagaaggatgatgatatctaggcataacctagcccatgaggaacctagttaggaaagacaactgacatttattgaattccatgtactagtcctttccacctgtcatattttaattatagaaatcagtcgccaaaagaatcttggggattttctatctgactggcct

SEQ ID NO: 18838 - DNA, 396 bp, Homo sapiens
tccaaaatgagcataacttagaactcagagctgaaattgcatgttcatgctcagcctgaaagtggatggaggtgctgaggtaaggactgggcttccttggaaagaccttagggaggaccacaggctcatgggagccaggattggccttggttataggaacagtgttcaaaacatgcccacgcagcatcctcacttctcagaaacagaagagccttcctaggaatcaaacagcctggccacattttatcttgcgaaactatttggcctaggttctccatctccctcacctcctacatctaattgattctctcctcattgtagaaattccaggagcccctttctgctttcccttctttttacttcatatcttaaactttgcagtaacgttgccaatct

SEQ ID NO: 18839 - DNA, 433 bp, Homo sapiens
gtgtgtaggcctgggttcctcacctgtggatggacgctccttacctcattggcttgttgtgaagatcgaatgagtctgtgaggtcagtgaagcacttacacttagtaaattctcaataaatattcactgtgatgttttttattagaaacactgacacattactgagtgcatgtgctctgcacgtgtgcatgacaatgaggaaatttccctttaattcctgaagtgctgggtgatgatctatacccaggataatttttctagtaaatcagcttattggggatgcctatggataaagcccttcacttttaaggtattccctttaatttaacaataagacataaaacattgaagtatacaaaatgaacggctatggttaatggattacctgcaaataaatgacacctgtccaaatctggcttcaataataagggaa

SEQ ID NO: 18840 - DNA, 334 bp, Homo sapiens
gaatatgtgaatctggaaggtcgtgccatagtgccagactttctggatctttatttaattcttaatgttgaagggcttgatatctatatttatatcttcaattatggttatagtcatatagatatacttgtctctactgatctcttacacctttatgtgattgtaaaagagaacgagagtgattacgcattcatttattcagcaagtttttatttcacacttactaatttcaagacctcgagccacagtctatggagctcctacccttaagaagcttatgaatttttgaaatacattatataagtatataaataaataaaaatataggaaatta

SEQ ID NO: 18841 - DNA, 455 bp, Homo sapiens
gccttgaacagaacaaatgccctcttaacccggttcctttggcggtatgtacgtcctgatacctaaacaacgtttcctttaatttattttttgggtgtgtgccaaggcctgtagaaaaaggctgagcagaggttctcttggagttgttttatctgctgagacttgccaaattagaatttgatggctttgatttctgggacttcctgatcatttttgaggaggaggagttcctaactaagctggagggcacatactttctccacatgagtggggcacccatgatgtcagcgaggacagtgtcagatagatgcacagcccatcacccagaaactaaggtcttgtaagaataccttagtgaattgtgccagatggaataaattctgaatcctttataaagcatctctttgggagagttctttcttgtagtgtttaggtctcaatcctctcatgcacga

SEQ ID NO: 18842 - DNA, 401 bp, Homo sapiens
gccttgaacagaacaaatgccctcttaacccggttcctttggcggtatgtacgtcctgatacctaaacaacgtttcctttaatttattttttgggtgtgtgccaaggcctgtagaaaaagaatttgatggctttgatttctgggacttcctgatcatttttgaggaggaggagttcctaactaagctggagggcacatactttctccacatgagtggggcacccatgatgtcagcgaggacagtgtcagatagatgcacagcccatcacccagaaactaaggtcttgtaagaataccttagtgaattgtgccagatggaataaattctgaatcctttataaagcatctctttgggagagttctttcttgtagtgtttaggtctcaatcctctcatgcacga

SEQ ID NO: 18843 - DNA, 1826 bp, Homo sapiens
taataatcaataatttcttattttaaaaagtagtactatttaatataatcaagataggagatttaaaatgagcaagtgattcatttgctcttttaaagaagcccgttgacttacgcttttaaaaaagaagttggtgggttacctcaattattgttcatgcttaaacatatccatttgtacaggcttatttctacgtgggacccaatcatatatactatatttctcaaataatttttctaaaactctggcctatattctaaacacttgaccaacaccttagttattgaataggtaaccatttttaaagtacatgtggttcattttttaaaattcaatctctcaagaccgttagatatttaataatttaagctgataagggtatcaaaatgcacattaactttgatcatcatgatttaagttgtaactttgtgttattatataaatattaggttgtttataaatatattgcaggaaagtattcttgttaagctctttttaaatgaggggactgtggtttagagttatatatttttgcttatttttaaacttcaattattccattcttctgccttataataaaacttttaaggcagagaactgaactaattatagaatttctcctttggagagttataatgttacatagtgaacattcttataaaagaaagaataagtttaagttgatgaatatttagctgcaaagattttttacttaaaaaaatccatgaatatctttgattttattataaagcatttgtaaattatttgcatttgagctgtaagattcataaacatttacatttcccaatgatttctattttgatttttaaaaaatatacagggcaagctacatttttaaagcattaatcaacaactttattatattacacattccagtgcacaaacacacaatatcatttaatactcacagtagtacctgtgaaatatatcagatggatattcctatctctattttacagcagaggaaaccgaaattcagagaacttacatttctaaggttgtacagctgcaaaatgaccaaattgtgaagtccctaacatccaggttttcataatgccagtactctttctatgacatgtttatgaccctccaaatgtaccaaaactacctaactaattcactgagaggaagccaactgcaaaaataggatttttaaaagtacaatagagtattactacattttatggatttcagacaaagaaacctccgtttattatatcctgatggtgagtattgccagctctaaattattcatatttctaagaccaaggaaaatataggtaaatgaaaattttgaaataaagaacaatgccttaatttgtaaaatctatcattgctaccaccctgcccaggtctggccatttgccataaatgctggtaaataaatacaatgactgatagagttctgtctcctttctcttttgctacccaaccttggttagagcaaccaaatgtctaaaaggcatgtaacaggagaaaaaaataaaaacattagtcaccaattcgccgattataaaagggatgtagattcctttaaattattactgaccttttgaaagccttcacgtaagtatgcaacagataaaatgactcatttacccacaacaataatctattatcagtcttaagtaatgtgaattcactgtatttctttttatacaacataaaaacttctgctttccaaacttcttccttttcactaatttatcagccactttatttatacacagataacacttttagaaacatttttctttcttgtccattttcttctttcaaaaataaagtttcttagaacctgataa

SEQ ID NO: 18844 - DNA, 273 bp, Homo sapiens
  misc_feature (26)..(26): n is a, c, g, or t
cgcgactctgaggatccccctggctngctcagctctaaattattcatatttctaagaccaaggaaaatataggtaaatgaaaattttgaaataaagaacaatgccttaatttgtaaaatctatcattgctaccaccctgcccaggtctggccatttgccagacctgagcaagccaggcctggcttgctcaggtcttggtgacaaatatgttgtgtagagttcaggggagagtgcgtcatatgttgttcctaggaagattgtagcgatgggttt

SEQ ID NO: 18845 - DNA, 918 bp, Homo sapiens
atgaaaagcacctaaattcttgaaaattacaagaatattgagagatatttaaagggttgcaaaagcagtcccatgggactttgaaattactagttcttaaaaaaactagaggctggaacatgatcatctttgaccagatcatcagattgtccaactttgcatttagatgaattgttcccagcctaattataagctcttctcttgaccagcctccccaggagtgtggtgtcttgccatcaatgcatgcttctgtttggtaggaaccactggactggctctaaccctgaggtccacaccagggtgacttatctaggatttctccatgagttgagcatttatttctcaggatcgtgagaacctgagcagtgctactcaaagtgtgggccacaggcagggactgggctgtaatcccatgattatagcaagtgagagagagtaagtgttggaaacttgtagaaccatttgatattgccacacattcaagtgtgtgatcatatttctagtttattttcattgtatctggaaataacaggccataatggattaaatgtttaaaaagaaaaaacctgtcattagccacagatagtttgaggagcaatgagctagcagaagccagctagttagttatatcctcactctgagagccggtaaggccgtcctgctgtcaagaaatagaagataacccttgatgcccagggcaacattcaccttcacattggcctttggggttggcttcaaaggctctcccctcatcccaggagacaagttctccatcaccttatttccctgtggcctctcaaagaagtgctggtctacctcttggtgattctggaatgcatttcatcaggttgggaagggcaggtaggagacccagtactgatttccttaagggtgcttccatttcactttaaaaaaaaa

SEQ ID NO: 18846 - DNA, 358 bp, Homo sapiens
gatttaatgttaataagaactccattaaaatggaatatatttataccttagtgtataaataaatatccactatgtcattatctcctatatatactttaatttacttgcataaatgatcatttagagaaaaatatttgagataaaatgttacattaatgataaaataggtttagtttatgtaaagttttcttggaactaagatgatttacttttgggatatttacttggaagaattttaaaatgtcacacactctggagtatgtgaaaacttatcacaattttttcctcttaaggtttttcattgggcacgagaatctcctccagactttcacaaacctatggatacctactatgactc

SEQ ID NO: 18847 - DNA, 361 bp, Homo sapiens
aactatttcaggagtaagtcagtatctatagtaggattcttaagggcttccctcaccccatatcctaaggcttgtgtttaccttaaaatgtcctctcatctgtatgaggtttcagaggttttgagagaacagtgtcagagtcgtagtgttctagggtccagcacgttctatgtgaatgaatttaattttatctttattttttggtcaataaatagttttgcccttcatatggagaaatgggataatatttcaacatttaatattacataatactttttgtcttatgacggtactggggattatcccaaaagacacatgaggaaatatagtatagctaagaaagctgtggacttagccaaaa

SEQ ID NO: 18848 - DNA, 1059 bp, Homo sapiens
cacatgatgcaaatcagcgtgttcctgcctgctgcttggctgcagttaattttagccggggttagttctatgagttgtaaaagtagaagttagcaagctgaaatgtgacttctcggcctaatgtggtaggatatctattttagacttcagattgtgtttgtgatcaggagagcagtcttctgaagaattgtggctcagttttcttggaaactacttgtaagtactgggtggaattttaagacttctctttgttcttttctccttaaatcttcctaatgttaccgtcatagtaatgtttatctcttgggaaaactggaagctttcaggttggtacgttagagaaagctaagagaggtggcaaaaggtttttctttaaatgtctcctactgcaataaatctgccttattcaatttgcccaagaaaaagttttcgattcttacttatttttgcaaaagcaatctgtagattattattttatgttaaaatatttgattaatggatatggtttctgtaaatacagaaacattgtattgtgtcattgagctttgttttctactatggtaacctaattcttgagaaaaaaatgttgaaagttaattcctgttatactctgtgctacaagtttattttgtagaaataatggagtgtcaaatgtaattttcttgaatgtatagatggacagttttttatccttttaagggggattttgtgcttaaaaaataaacccatatatgcctaaagagaagcactttaaaaaattaatttaggaagaaggttttagagaataatttaaagcatcctcttttagactgagttagttatcaaaagtaaccaaaggccatgggattctgtaaccttaactgcagttcatctaacacattattaccaacttaaatttgtactgaagaaaacaaaagattttgatattgaatattttaaattaaatttgaatcatcttgcttatttagaagtgtgttttcaatgtggactgacctcaagccaaacagtttgcttacagcagagaaccaggcaggaatttctttatcaattagcaagtaa

SEQ ID NO: 18849 - DNA, 372 bp, Homo sapiens
gcatttattctggtatacttgtatcagaattgctctagatacatacctagtgaagatattcctatcttacatagaagcgatccttcaggactgtgtgtaggatgttctttctctttggtttttgtcacctctgaagatggatggaaaatgtgtaggcattggaacagggaccccatttttttctgaaggaaaaaacatgttgtttgaatgtgatctcacgtgattgagaaaataatttatgatgtccacacacctagttacaatgacttgtaccaggaggggagcccaaatattttttttttttgctcattttctccagtttgaatggggagtaattatgaaaaataaacagtacctgcttaaagtatataa

SEQ ID NO: 18850 - DNA, 504 bp, Homo sapiens
tttgcgtttggagtgtatgctgttggtggtaatactaagttgctatccatgagggtgcagaaaataccagtggcccagatactgtacttctataaaggctgccctttacttggctgcagctgctgtttgcaaaagtcactgctcttttaaagtatagcttacattattcagccaaataccagcaacagttgggcttttgctcccctgtcaatcattgggcaattatgtattcttcagttatgtacccatccctaggtccaatagtttttaattttaacttctagatcagagctttcatttattgacaaaatttctaatatccctttactaagaagtacaagactgtaaaataaatagactaaacttttgtgcaaaattatgaagtctacaggggaaaaaaagaaatcccagattcacgtgtgccagaaggtttataaaggtaccactcttttttagaaaagatggaaaggtattcggggggaaaaaaaaacacgattttatatg

SEQ ID NO: 18851 - DNA, 300 bp, Homo sapiens
attctttggctcagcaggacaatatggtgggaaatgacaaagtaactcctgtggccctaggtcaggttctcttgaggaaaacaaaaaggctggaatgatacagctcttcgtaaaccaggtgcctccagtgcctgcggttattcccaagtccacattttgcagacagggccctaaaatgtctagctaggaagttcctgagcctgtttttttaaaattctacacacacacatgcacacacacacgcacgtgtgcacacatgcggatatatacatcctcaccttttcttgagattactgctca

SEQ ID NO: 18852 - DNA, 2041 bp, Homo sapiens
  misc_feature (906)..(906): n is a, c, g, or t
atagcaaaagcttttaggctaagaagtcagttattgctgagttctctctccattcccccaggtgggtgaggtcaactgagcctgggcccccactgcccagctgacctgtgcagagctgccaagtgaccacacggcaatccttaccctttgtctgtccctgtctcccttgtctctgtacctctctgcttacccctagctgtttctgtgtccagccatctgtctctacctggatcccaatgatcctgaaacacatcagtaaagccttcttcatcactgccacgcacaacagacttgtgcctgggagttctatctgtgtgaatgcaactgcagaggaggaaagagtgaagcaaaaattgggagagtttaggggtaagggaagtctacctcacagaacagaggtacttcccttggggttggaaccactcgtgtttgcagtttcagtttctgggaaagaaagggaatgaacagatttatcacactggaatcttgaaaaggcaaatcgccaacacctgagacgcggtcaactctggtatgtgccagtgaggggagaacggaaggacccagggctcgcagcctcagccggtcattagggcaccttgctatggacccttccttcaagacccaccataaagcccatccagagcccttccaagaggccccgggagtagttttctccagagagggcagtggtacggggaccaagattcctctgacttatatcaaaccagaggcaactcccacacagaggctgtggaagggtaagcctgtgtgcctcaagaaaaatgcttcaaagcaaaagcaagtaagagattctagatgattcttacctgctatgaaagatgccttgatgtctgaagaggcttcggcctgatctccctgaagatgctgaaatgggggagaagcctnatcacctctgtgcaagcaaaggagtgaagattatttcttgaacacctggacaacatatctgttcaactagcttgcaccctggtggagctgggggcagcatttctggaatcctcctaaccattgttcactgcttgtagcagagtaggtgggcctcagggttagtgacaagtcctttcctgcccttcccaacacccagccaccttgctgcagtctctgtagcctgggctctgaaatacatgagctcctcgggagctgcctatccatcctacagcttagtggttagctgtttaattgtaggccaagaatttctctccccaccacagccatctaaatgagttttactagccaggaacctaaaaacacccttcgtgggcttccctatgaccccagctcgattgaccctgtaggttcaaaaggtttcgaggtggcacctaaccagaatgtgggcagaaggcagaggagagggagccttctttctgtctttatctctttatgcttatcctcattgaccatgggctgagttctttctctgggtcccctaatgtgggaatggagtggttcttgccctctgagcttacagactaagaaggcagaaaagctttacaactacagagtacatgtgtatacacacaaccaacctaaacacatcagagaatacatacttaaatcaattcacttcatatacacatctcattagaagaccaagctaaacttcacttagagggcgggcaaaggactagaaaagaatttttctcttaaaaaaaatgagtactagagcaaaattatgagtgtctaagtatcttagttatgcttcataagatctgactggggtaagagataaagaggtaaatagggctgggcgcggtggctcacatctgtaatcccagcactttgggaagccgaggtgaacagatcacctgaagtcaggagttgaagaccaacttggccaacatggtgaaaccccatctctactaaaaatacaaaaattagccaggcatggtggtggacccctgtaatcccagctacttggaaggctgagggggaggattgcttaaacccaggaggcagaggttgcagtgagccgtgattgcaccactgcactccagcccaggtgacacagcaagactccgtctca

SEQ ID NO: 18853 - DNA, 1508 bp, Homo sapiens
acacagctgtgtgggccaagggggctggtgtatctccacatgcaagcacgtagataccgaggaacctggccagccctgcagcctgactcgggatggctgcctctatgccctctgcgtctgactttctcctttgagataaaggtgttttggcccaagctgagtgcattgctgggcagcggccatgccgaaggtggtagctgaagggacccttgatcgaaagacgctctgccatgctttctgagtcctgtctcctccaagcttgtctcctagactgtttcccctgtctgttttcctgcgcccttgtgtttggccatttttgcattaggctgtgtctctgtacccaaggccacgtgacaaggtagttggaacccccactcaagtggtgagtgaagagcgtcgtggtaataataatagtagtaacacaacttccaaatttctcagtggagagtgtcacgtccggggggtatcaagatctgtgaggcctttccaagccctcaccattccctctttggtcccacgttgggtgggcagctgggaaggtcctagttgattttaatctccggtgctttccccagaactgctgctctgaataaaccaaagctgtgaaagagtgttctgcgcaggctgcgggcccagcctctgggtgcaggccctgggcacttgagctgagcagctcagctggctctgctgtgagggaaagccgtgaacttaactgtgctgagagctgggtgagggcaaaatggggaagactgaagaagaaggagcaggtggggagagaccagccgctaacatggtgtctacttctccgtggatcagagaagggatgagtagcaaatgcagaggcagggtggtctcccagcaacaaggatgtccagagttctcctgaccctgtctgcacccacttccatgcaaggcagaggcatcacagttttccatcccaggccacccttcactcttccaagtgtcaggcctctttaaatctgcatcccttggggttagaagcaagagaggtggcaaagtctccctggcactgagagcctgtcccaccatgccactcggcatgagatggtggaggaagaagccaagagcagggatgccttccctgtccccgtggcctctcaggactcccacaagatgctgtggacccaagatgagagatttcaggatggggccactggccttcctaggttgggctctgggtcctttcaataaactgttcctttcctgattcttactcccttctggtccttccactcccttccctctgcccaggtatggaaaaggtggctgggctcggtgtgcgctccaaccccggtagcattagctgagtcacgcggcgagcacacaacagatttgtagcagctcatctgccatataaaccgcttggctgatggagtcctcattgagttttttcattatcgtgtaaagtggaatcatgtcattcacctttactataaacaaggctgtgagaacataataaacagaacctgaacaagctgctctctgct

SEQ ID NO: 18854 - DNA, 1768 bp, Homo sapiens
gaattttgcagctaagcaagggtatgtgggcatgtgtccatgtgtagaggaacgtgatagctaaatttatggtactcctgtggagtgtctctgtgtgtttgtgtgtgtgtgacaactgtgagcattagactagtacacggcagacatgatcttcccgtggggtggagctttcctcataccttgtatgccctgcttcccacaagaggcacagagctctccactctgatgcctactttcaggcactctggtcgtgccaacccagattttggtctgtgatgaaacaaagagaaatgtttacaacatctagagcaatatccaagcatacctcatccctgagcttccatgtttcccagtcctgccctctatgccctctgcgtctgactttctcctttgagataaaggtgttttggcccaagctgagtgcattgctgggcagcggccatgccgaaggtggtagctgaagggacccttgatcgaaagacgctctgccatgctttctgagtcctgtctcctccaagcttgtctcctagactgtttcccctgtctgttttcctgcgcccttgtgtttggccatttttgcattaggctgtgtctctgtacccaaggccacgtgacaaggtagttggaacccccactcaagtggtgagtgaagagcgtcgtggtaataataatagtagtaacacaacttccaaatttctcagtggagagtgtcacgtccggggggtatcaagatctgtgaggcctttccaagccctcaccattccctctttggtcccacgttgggtgggcagctgggaaggtcctagttgattttaatctccggtgctttccccagaactgctgctctgaataaaccaaagctgtgaaagagtgttctgcgcaggctgcgggcccagcctctgggtgcaggccctgggcacttgagctgagcagctcagctggctctgctgtgagggaaagccgtgaacttaactgtgctgagagctgggtgagggcaaaatggggaagactgaagaagaaggagcaggtggggagagaccagccgctaacatggtgtctacttctccgtggatcagagaagggatgagtagcaaatgcagaggcagggtggtctcccagcaacaaggatgtccagagttctcctgaccctgtctgcacccacttccatgcaaggcagaggcatcacagttttccatcccaggccacccttcactcttccaagtgtcaggcctctttaaatctgcatcccttggggttagaagcaagagaggtggcaaagtctccctggcactgagagcctgtcccaccatgccactcggcatgagatggtggaggaagaagccaagagcagggatgccttccctgtccccgtggcctctcaggactcccacaagatgctgtggacccaagatgagagatttcaggatggggccactggccttcctaggttgggctctgggtcctttcaataaactgttcctttcctgattcttactcccttctggtccttccactcccttccctctgcccaggtatggaaaaggtggctgggctcggtgtgcgctccaaccccggtagcattagctgagtcacgcggcgagcacacaacagatttgtagcagctcatctgccatataaaccgcttggctgatggagtcctcattgagttttttcattatcgtgtaaagtggaatcatgtcattcacctttactataaacaaggctgtgagaacataataaacagaacctgaacaagctgctctctgct

SEQ ID NO: 18855 - DNA, 2428 bp, Homo sapiens
ttcaattagaaatattctggatttatacatctttgaagtttaatctgaaggtttcttcaggaagtaaatatctattcatcaccttttcccaagctccataaagttttttagtttatcccagtcgctaggagacagaagacggaagcggaaatgcctttcacgacaacttccggaagaggtcgccatggcttcccgggaggaggtactcgccttacaagctgaagttgcccaacgtgaggaggaattgaattcgctgaagcagaagctggcgtcggctcttttggctgagcaggaaccgcagccagaacggctggttccggtgtcgccgctgccgccgaaggccgctctgtcccgagatgagattctgcgctatagccggcagctagtgctgcccgagctgggcgtgcacggacagctgcgcctggggaccgcgtgcgtgctaatcgtgggctgcggtgggctcggctgtccactagcgcagtacttggcagcggccggcgtgggccgccttggccttgtggactatgacgtggtagagatgagcaacctggcccgccaagtgctgcatggcgaggcactggctggccaggccaaggccttttcggccgccgcctcgctgcgccgcctcaattcggcagtggaatgcgtgccgtacactcaggcccttacgccagccactgccctagacctggtccgccgatatgatgtggtggctgactgctcggacaacgtgcccactcgctacctggttaatgacgcatgtgtgctggcgggtcggcccctcgtgtctgccagtgccttgcgcttcgagggccaaatcacagtctaccattatgacggtggcccttgctatcgctgcatattcccccaaccacccccagcggagacagtgaccaactgcgcggacggcggggtgctcggtgtcgttaccggggtcctgggctgcctgcaggccttggaagtgctgaaaatcgctgcgggtctgggcccctcttacagtggcagcttgttgctctttgatgccctgagagggcatttccgctctattcggctgcggagccgcaggctcgactgtgcagcttgcggggaacggcccactgtgactgatctgctggactatgaagccttctgtggctcctcagccactgataaatgccgctccctgcaactactgagcccagaggagcgtgtttctgtcaccgactataagcgactgctggattctggggcattccacctgttgctggacgtcaggcctcaggtggaggtggacatttgtcgtttgcctcatgccctacacatccctctgaaacatttggaacgcagggatgcggagagcctgaaactcttaaaagaagcaatctgggaagagaagcagggcacacaagaaggggctgctgtccccatttatgtgatttgcaaactgggaaatgactcacagaaagccgtgaagatcctccagtccttatcagcagctcaagagttagaccctttaacagttcgggatgttgtggggggcctcatggcctgggctgccaaaatcgatggaacatttccacagtactgaggtgactggtatagtctgatgagaaagatgtggattgccataatacctcaaagatacacttgtttgcatttttcggtaatatacataggagctggggattctacagtatctgtgaatacgtggactcctttttataaggagttttaaaaattgttatgtattggatgaatgacttattaatggattataccgtttctgagaaccatcattttttttttcagcacacggaggatgtcttggacatgtgagatgtaacgtgacaggattttgcattttaaactgcagatcatttacatgtccttattttccacctcccccagtcaaaatgctttctaaatcattttcacagattatatacttcggatctgtttactgttcagttaagaaattcttggatcttattaatatttcagatgatagaatacatcctacagaaatacatgtttaaaatgtaaattgttttaattattcagaaagagggtcattctatttggccttttgaattagtatcaaaatgagatttttttttttttgagatggaatctctctctgttgcccaggctggagtgtagtggtgcgatctcagctcactgcaacctccgcctcccaggttcaagcgattctcctgcctcagcctcctgagtagctgggattacaggcgcacgccaccacgcctggctaatttttgtatttttagtacagagggggtttcaccatgtttgtcaggctggtctcgaactcctgacctcgtgatccgcctgcctcgacttcccagagtgctgggattacaggcgtgagccaccacaccctcccgagatctttaaagtttaccaaaataaaggaaaccacctttgtagtctg

SEQ ID NO: 18856 - DNA, 3208 bp, Homo sapiens
ttcaattagaaatattctggatttatacatctttgaagtttaatctgaaggtttcttcaggaagtaaatatctattcatcaccttttcccaagctccataaagttttttagtttatcccagtcgctaggagacagaagacggaagcggaaatgcctttcacgacaacttccggaagaggtcgccatggcttcccgggaggaggtactcgccttacaagctgaagttgcccaacgtgaggaggaattgaattcgctgaagcagaagctggcgtcggctcttttggctgagcaggaaccgcagccagaacggctggttccggtgtcgccgctgccgccgaaggccgctctgtcccgagatgagattctgcgctatagccggcagctagtgctgcccgagctgggcgtgcacggacagctgcgcctggggaccgcgtgcgtgctaatcgtgggctgcggtgggctcggctgtccactagcgcagtacttggcagcggccggcgtgggccgccttggccttgtggactatgacgtggtagagatgagcaacctggcccgccaagtgctgcatggcgaggcactggctggccaggccaaggccttttcggccgccgcctcgctgcgccgcctcaattcggcagtggaatgcgtgccgtacactcaggcccttacgccagccactgccctagacctggtccgccgatatgatgtggtggctgactgctcggacaacgtgcccactcgctacctggttaatgacgcatgtgtgctggcgggtcggcccctcgtgtctgccagtgccttgcgcttcgagggccaaatcacagtctaccattatgacggtggcccttgctatcgctgcatattcccccaaccacccccagcggagacagtgaccaactgcgcggacggcggggtgctcggtgtcgttaccggggtcctgggctgcctgcaggccttggaagtgctgaaaatcgctgcgggtctgggcccctcttacagtggcagcttgttgctctttgatgccctgagagggcatttccgctctattcggctgcggagccgcaggctcgactgtgcagcttgcggggaacggcccactgtgactgatctgctggactatgaagccttctgtggctcctcagccactgataaatgccgctccctgcaactactgagcccagaggagcgtgtttctgtcaccgactataagcgactgctggattctggggcattccacctgttgctggacgtcaggcctcaggtggaggtggacatttgtcgtttgcctcatgccctacacatccctctgaaacatttggaacgcagggatgcggagagcctgaaactcttaaaagaagcaatctgggaagagaagcagggcacacaagaaggggctgctgtccccatttatgtgatttgcaaactgggaaatgactcacagaaagccgtgaagatcctccagtccttatcagcagctcaagagttagaccctttaacagttcgggatgttgtggggggcctcatggcctgggctgccaaaatcgatggaacatttccacagtactgaggtgactggtatagtctgatgagaaagatgtggattgccataatacctcaaagatacacttgtttgcatttttcggtaatatacataggagctggggattctacagtatctgtgaatacgtggactcctttttataaggagttttaaaaattgttatgtattggatgaatgacttattaatggattataccgtttctgagaaccatcattttttttttcagcacacggaggatgtcttggacatgtgagatgtaacgtgacaggattttgcattttaaactgcagatcatttacatgtccttattttccacctcccccagtcaaaatgctttctaaatcattttcacagattatatacttcggatctgtttactgttcagttaagaaattcttggatcttattaatatttcagatgatagaatacatcctacagaaatacatgtttaaaatgtaaattgttttaattattcagaaagagggtcattctatttggccttttgaattagtatcaaaatgagatttttttttttttgagatggaatctctctctgttgcccaggctggagtgtagtggtgcgatctcagctcactgcaacctccgcctcccaggttcaagcgattctcctgcctcagcctcctgagtagctgggattacaggcgcacgccaccacgcctggctaatttttgtatttttagtacagagggggtttcaccatgtttgtcaggctggtctcgaactcctgacctcgtgatccgcctgcctcgacttcccagagtgctgggattacaggcgtgagccaccacaccctcccgagatctttaaagtttaccaaaataaaggaaaccacctttgtagtctgtcagtgtctcttataaattgctactgttttcttaaagttaacttcagggtccaccttatgttgcacacatatcacatcgtttaaattgcatactatggtttgacttgctttggaattttcaagtcaaagtcccaaccctttgcctctccccctttaatttgccttttctcttttgatttaatgtttttttattccagcattttatactaatgtaaaatgtttttatgtttgtttacttaacattttcataaaatagtaggtagtctcaccaacttccaatatatacaacaacattataagtaaaatttgatttgtgagtgcctatcagtggccagatgaactaatggcttgtcagaagggggcctgtgacctcctgcttgctgcatgcaggcttataatcatcaattgctgctgttgtttttttaagaatggcagaaatcacagatacaactataaaatctttgtatttctgttaaccattttttttaaagcttaaatgtatcataagccagcaaaaaccctttgtagaccagatttacttaccagtttgcaatttgtgatatagaatcttgttttattataagagggtggtatttaacaaattcaaaattagtcatcactttttaactgtgaaacattgtaactaattctttgaacaggtatacttaaagtatggtatacccttctgttataaagatgaagcaggtctcttatgactgttcctgccaacgagttatggaggtaaatgactgtgacctggagtggagaacaaaaagatgg

SEQ ID NO: 18857 - DNA, 222 bp, Homo sapiens
taatataattgtatagacatttttagcaatatcttttggcagcactcttcagttgttacattttatatgactcatgcaaattaacccttctgggccagtcgaggtggctcacgcctgtaatcccagcactttgggaagctgaggtgggaggatcacctgaggtcaggagtttgagaccagtctgcccaacatggtgaaatcctgtctctactaaaaataaaa

SEQ ID NO: 18858 - DNA, 235 bp, Homo sapiens
tgtaggcagtgtctgagccatttcccaagggcctccagtctcactaggaaagtcagggaaagggagagctggagacgaggaagctgtagcactggagctgggcataacaaacaggagccaatatggcagaaagtgggtaccggcaggcaggaatggagggagcggagccagctggcaaggtgcagatgagcagaccaaggaagagtggctgaaagctcatggtaccccacactgg

SEQ ID NO: 18859 - DNA, 657 bp, Homo sapiens
gaactctcatacactgctgttgggaatgcgaaatggtacaaccattctgaaaaacagttgttagttgcttataaaggtaaacatacacttactatattacccagcaatcctactcttagggatcagctttgagaaatatgaaggtagggtcacacaaaaacctgtacatgaatgtttgcagaagtactattcataatcaccagaaactggacatattccaaatgttcttcaacagacgaacaggttgacaaactgttatatacaatgtatatgcattggaacagttacatacaatactactcagcaataaaaaagaacaattgaaaaatacaacaacatggttaaatctccaaagtattatgctcagcaaaagaagtcagtctcaaagggttatatagtgtagtatgattctacttttatgacattctggaaaaggtaacaccacaggaatggagaaccaatcaggtttccaggggctggggattagggaaagtttgactgcaaaggaacagcaggagggagtattttggggtaatggaactgttctgtatcctgattgtggcacggttacatgaacctatacatgtgtaaaaattcagagctgtacaccaagatttgtttcaattttactgtttgtaaaattttaaaaataagaaa

SEQ ID NO: 18860 - DNA, 777 bp, Homo sapiens
tggaaacaccaaggtgctgggcacctctccagctttacagactgcacatgctttggtcatgttcatatttaaataagaatcaactggtatttctgaattagaagaaatctaagggaacatttttgctcactccctcattttagagatgttgctaaaggagaaatgaagtgacttgctcaaggtcaaatagctgaagtcaccaggccagggttaagagccagacccgtgggctcctacaccagtgctctttttctctgtcctctctagtagggtccatgaagaatctgcatgcccggctctctcctctccaccgctggcaactcgtaaaatctgggtgtcacacagctcgctcccaagcattgtcagaaataagaagacaccatcagaaaggggaaagctggatgggcaagaagacaggaaaggaaaaagtgaccaaatgaagctgagcttctggcctgctacagttcatcatttctactgacagcttgaaaattaggaaagacacagaagttgaccaggaaacaataagaattatcagaatctccattagctattttttcaaaaaacgaaattgcacaagccaggctgggcaacatggtgaaaccccatctctacgaaaaatataaaaaattagctggcatggtggtatacacctgtagtcccagctacttggggggctgaggctggaggcttgcttgagcctggaagattgaggctgcagtgggctgagatcacaccagggcactcaagcctgaatgacaaagtgagaccctgtct

SEQ ID NO: 18861 - DNA, 893 bp, Homo sapiens
ttgactaggggctaagagacttgaggggaactagcccacttctgatgctgcatgactgagaagaagtagtatcatagaatcatggtactttaaagctggagagaaacatctcaaaaataagcaacctggaccagagattaaactccaggtctgagagccagataacagccctcctcaagataaccagtcaagtttggcactgcaggccctgagccattttggtccaccctgctttgaccccaccccttgtccacatcagctcctgtgaagccaccccagaagaaaaccactattcgttcacattggctgattgatgctccatacgtccaaaccttccagtcctcaagaaacaagtatggctgagttctgggtaaaagtggagaacatgaccctctcctcactctgtgccatgttttatataagaaataaattaaaagtatataaaaacacatgtgcatatgtttacatatatgtatatatacatatattaatgttatataaatacaatatatatctcatttttacgaaaagaaactaacaaaaataagggtaagtttggaagagatagaaatgagaatatttctgactatatttttatacggtttttacttttggaacatgtaaatgttttacatattcaaaaaaataaaattaaaaaggaaaaatgcactcccttaaacaaaatacaagtagaaacaaatgatccaaattatatttcagtttggtaaaatatccacccagaggaaatagttactttgaataacatataaatggcaatcagaggtttattttgctagtagaaatactggaattgtaattttaaaactgttttaaatacattttaggtaaagaaaataagtgtgtattaatgttattagaaaccgagattttca

SEQ ID NO: 18862 - DNA, 794 bp, Homo sapiens
atcaatcagggatacccatgctggacttcgaataaagattaaactccaggtctgagagccagataacagccctcctcaagataaccagtcaagtttggcactgcaggccctgagccattttggtccaccctgctttgaccccaccccttgtccacatcagctcctgtgaagccaccccagaagaaaaccactattcgttcacattggctgattgatgctccatacgtccaaaccttccagtcctcaagaaacaagtatggctgagttctgggtaaaagtggagaacatgaccctctcctcactctgtgccatgttttatataagaaataaattaaaagtatataaaaacacatgtgcatatgtttacatatatgtatatatacatatattaatgttatataaatacaatatatatctcatttttacgaaaagaaactaacaaaaataagggtaagtttggaagagatagaaatgagaatatttctgactatatttttatacggtttttacttttggaacatgtaaatgttttacatattcaaaaaaataaaattaaaaaggaaaaatgcactcccttaaacaaaatacaagtagaaacaaatgatccaaattatatttcagtttggtaaaatatccacccagaggaaatagttactttgaataacatataaatggcaatcagaggtttattttgctagtagaaatactggaattgtaattttaaaactgttttaaatacattttaggtaaagaaaataagtgtgtattaatgttattagaaaccgagattttca

SEQ ID NO: 18863 - DNA, 408 bp, Homo sapiens
agttttactttctgagttgattccatgaaatgggaacaaattggtacataaatggattttgcccagaatcctaggaaatcgccactgttcagtcgtaatcactgcctcctaaatcactgagtctgttctctgtatttttattagacttttgtcatctcccaaattcagatatccaatagtcagccaaaaagggaaacttttatctctggaaagaaaaaaaatcatttagaaaaatgtattcagtgtatctaatactgaaatggagaaaagacttaatgttaaagaaaaaaaaaacactatagacattgacatggaaaagagatttaatgttaataaaaactttatattaactgagtaacacctcctgatgagaagtgctatattaaatataaacccattatgttgttt

SEQ ID NO: 18864 - DNA, 2654 bp, Homo sapiens
gagaggcaggtgagcgcgatgcagccggcgccgggtctggggctcggggactcctccctgcaccgctacctggacggcgacttctggagcctcaagaacgagctgcgcggactcctcggcggcgcccgctcttccggcaaaggtatgatttaagcttggatgaaatgagagctttgacagttcagagagtgaagtttgccatggacctgcctctgttaaaacgtgcaggtcaggatctggcagagaaaacaaagaattttgtcagccgaagccttgtcataggagaagtcctctccatggcggacatggccacaggagtgaagtgcggaataatttattggctatttggtggtgctatcaggaatctcggaagccctgaacatgttactaagtggtttcagccactccaggagcagaaatacactgggatgtttgcaatgaccgagaggggccatgggagcaacgcgagagggatccagaccgaagccacctttgacctctctgcccaggagtttgtaattgacacgccgtgtgaaaatgcggagaagatgtatattggaaatgccatgtacgggaattatgcagctgtctttgcccagctcatcatagatggaagatctcaagggccccactgtttcatcgttcctgtccgggatgaaaacgggagcttgtacccaggagtcacagctattgatatgatgtacaaggagggtctgcatggtgtggacaatgggatattaatatttgacaaggttcggatacccagggagaacctgctggataagtttggttccgtggctccagatggacagtaccattcgcctattaggaacaagagtgcaagattcaatgccatgctggcagcactgaccccttcgagattagctgtggctttccaagctatgggtgccatgaagcttgggttgacgatagccattcgctatagccacagccggaggcagtttgggcccaaaaccaaggaagaggtgaagatcattgagcaccaaacacagaccctgcggctgatgccccacctggccacagccttggccctgaccttcgtcagcaggtatgctggggccctcctggatgaggatgtcttccagggaaaggagctggtcaacagtcgctcgctgcaggctctggtggcagggctgaaggcctacagcacctgggagaacatccgctgcctgcaggactgccgcgagtgcactggaggcatgggttacatgatggaaaatcgaatctccggcttaaagtgtgacacagatgtgtttgccacttttgaaggtgacgatgttgttatgcttcaggttgtggggcgggaactgctggcccaatacaccaaacagtatgaagaaaaaccactctttggcctgctccaaaactgggctgaatctgtgggggacaagctgagaaccagtttcctggcatttaacatggacacagttgatgatctcgcctttctgttgaaagcagtgaaatttcgtgaaagggttcttcagcggggtttggtggccagaatttattataaggtaaagaccaagaaggaggattttttccatgcctggaactcgtgtctgcaccacgtggcttctctgtccctggcacacactcaccgagttaccttagagcagttctccctagcagtgaagagctgtcctgaccaagaggaccagactttgttaatgaagttttgtctgttgtatggaaccaagctggtgtttcaggagcgggcctggtatttagaacataaatacttgactcccatggccagcacgaggatcaggaatcaggagagatgctgaaacacaaacaggtataagactcagtctccacatgaagggagctcatatccaaggacacaaaaccactttaaaaacataaatactggccaggtgcagtggctcatgcctgtaatcccagcactatgggaggctgaggtgggcagatctcctgagctcaggagttcgacaccatcttgggcaacatggtgaaaccctgtctactaaaatacaaaaaaattagctgggcgtggtggcatgtggctgtagtcccagctactcgggaggctgaggcacgagaatcgcttgagccctggagttggaggttgcagtgagcagagattgcgccactgtactccagtttggactacagagtgagactccatctcaaaacaaaacaaaacaacaacagcaaaaaacaacaaaacaaaacacaaatactctcacggggcatggaggttttcgaacgaacttggccataagaataaattcagagttgacagaacagacgtcttaggaataaatgccattcttatgctagaccttgaagagtagaaaattaagagatggtggcccaattgagaggggaaaatgcagttgaaacttcagacagggttgataaagtgaggacgatcatagacatggagtacttagacatattaataaacaataaagactttacctgtctaatggaaaacctggagaagtcgtcaggaaccagactacagtggaccctggagaaccttgaagaacatttttccttttcaggaaaacggaggttacagagaaaagtatatgtaatgatgctacagtaatgtatttctgtataacaaatgactccaaacttacgacttaaaacaaccaccactt

SEQ ID NO: 18865 - DNA, 1480 bp, Homo sapiens
  misc_feature (1350)..(1350): n is a, c, g, or t
  misc_feature (1366)..(1366): n is a, c, g, or t
  misc_feature (1372)..(1372): n is a, c, g, or t
  misc_feature (1455)..(1455): n is a, c, g, or t
gagaggcaggtgagcgcgatgcagccggcgccgggtctggggctcggggactcctccctgcaccgctacctggacggcgacttctggagcctcaagaacgagctgcgcggactcctcggcggcgcccgctcttccggcaaaggtatgatttaagcttggatgaaatgagagctttgacagttcagagagtgaagtttgccatggacctgcctctgttaaaacgtgcaggtcaggatctggcagagaaaacaaagaattttgtcagccgaagccttgtcataggagaagtcctctccatggcggacatggccacaggagtgaagtgcggaataatttattggctatttggtggtgctatcaggaatctcggaagccctgaacatgttactaagtggtttcagccactccaggagcagaaatacactgggatgtttgcaatgaccgagaggggccatgggagcaacgcgagagggatccagaccgaagccacctttgacctctctgcccaggagtttgtaattgacacgccgtgtgaaaatgcggagaagatgtatattggaaatgccatgtacgggaattatgcagctgtctttgcccagctcatcatagatggaagatctcaagggccccactgtttcatcgttcctgtccgggatgaaaacgggagcttgtacccaggagtcacagctattgatatgatgtacaaggagggtctgcatggtgtggacaatgggatattaatatttgacaaggttcggatacccagggagaacctgctggataagtttggttccgtggctccagatggacagtaccattcgcctattaggaacaagagtgcaagattcaatgccatgctggcagcactgaccccttcgagattagctgtggctttccaagctatgggtgccatgaagcttgggttgacgatagccattcgctatagccacagccggaggcagtttgggcccaaaaccaaggaagaggtgaagatcattgagcaccaaacacagaccctgcggctgatgccccacctggccacagccttggccctgaccttcgtcagcaggtatgctggggccctcctggatgaggatgtcttccagggaaaggagctggtcaacagtcgctcgctgcaggctctggtggcagggctgaaggcctacagcacctgggagaacatccgctgcctgcaggactgccgcgagtgcactggaggcatgggttacatgatggaaaatcgaatctccggcttaaagtgtgacacagatgtgtttgccacttttgaaggtgacgatgttgttatgcttcagggttgtggggggcggggaaactggctgggcccaaatncacccaaaaccagttntgaaangaaaaaaccactcctttgggcctggctccaaaaaactggggcctgaatctgttgggggggaacaaagcctggagaaaccaagnttttccctgggcaatttaaccattg

SEQ ID NO: 18866 - DNA, 1891 bp, Homo sapiens
gagaggcaggtgagcgcgatgcagccggcgccgggtctggggctcggggactcctccctgcaccgctacctggacggcgacttctggagcctcaagaacgagctgcgcggactcctcggcggcgcccgctcttccggcaaaggtatgatttaagcttggatgaaatgagagctttgacagttcagagagtgaagtttgccatggacctgcctctgttaaaacgtgcaggtcaggatctggcagagaaaacaaagaattttgtcagccgaagccttgtcataggagaagtcctctccatggcggacatggccacaggagtgaagtgcggaataatttattggctatttggtggtgctatcaggaatctcggaagccctgaacatgttactaagtggtttcagccactccaggagcagaaatacactgggatgtttgcaatgaccgagaggggccatgggagcaacgcgagagggatccagaccgaagccacctttgacctctctgcccaggagtttgtaattgacacgccgtgtgaaaatgcggagaagatgtatattggaaatgccatgtacgggaattatgcagctgtctttgcccagctcatcatagatggaagatctcaagggccccactgtttcatcgttcctgtccgggatgaaaacgggagcttgtacccaggagtcacagctattgatatgatgtacaaggagggtctgcatggtgtggacaatgggatattaatatttgacaaggttcggatacccagggagaacctgctggataagtttggttccgtggctccagatggacagtaccattcgcctattaggaacaagagtgcaagattcaatgccatgctggcagcactgaccccttcgagattagctgtggctttccaagctatgggtgccatgaagcttgggttgacgatagccattcgctatagccacagccggaggcagtttgggcccaaaaccaaggaagaggtgaagatcattgagcaccaaacacagaccctgcggctgatgccccacctggccacagccttggccctgaccttcgtcagcaggtatgctggggccctcctggatgaggatgtcttccagggaaaggagctggtcaacagtcgctcgctgcaggctctggtggcagggctgaaggcctacagcacctgggagaacatccgctgcctgcaggactgccgcgagtgcactggaggcatgggttacatgatggaaaatcgaatctccggcttaaagtgtgacacagatgtgtttgccacttttgaaggtgacgatgttgttatgcttcaggttgtggggcgggaactgctggcccaatacaccaaacagtatgaagaaaaaccactctttggcctgctccaaaactgggctgaatctgtgggggacaagctgagaaccagtttcctggcatttaacatggacacagttgatgatctcgcctttctgttgaaagcagtgaaatttcgtgaaagggttcttcagcggggtttggtggccagaatttattataagttaccttagagcagttctccctagcagtgaagagctgtcctgaccaagaggaccagactttgttaatgaagttttgtctgttgtatggaaccaagctggtgtttcaggagcgggcctggtatttagaacataaatacttgactcccatggccagcacgaggatcaggaatcaggagatgtggcttggaggaagaatgcgcagaagtgtggtagacaccaggcccccaagccaggatgctgcttggctcctttgaacgtagaagatggattacactcgtttactattttaatctaagcataaagtataaatgcagtcactgcttagtgtcacaaaggcttgtgattaaagaacacac

SEQ ID NO: 18867 - DNA, 1802 bp, Homo sapiens
gagaggcaggtgagcgcgatgcagccggcgccgggtctggggctcggggactcctccctgcaccgctacctggacggcgacttctggagcctcaagaacgagctgcgcggactcctcggcggcgcccgctcttccggcaaaggtatgatttaagcttggatgaaatgagagctttgacagttcagagagtgaagtttgccatggacctgcctctgttaaaacgtgcaggtcaggatctggcagagaaaacaaagaattttgtcagccgaagccttgtcataggagaagtcctctccatggcggacatggccacaggagtgaagtgcggaataatttattggctatttggtggtgctatcaggaatctcggaagccctgaacatgttactaagtggtttcagccactccaggagcagaaatacactgggatgtttgcaatgaccgagaggggccatgggagcaacgcgagagggatccagaccgaagccacctttgacctctctgcccaggagtttgtaattgacacgccgtgtgaaaatgcggagaagatgtatattggaaatgccatgtacgggaattatgcagctgtctttgcccagctcatcatagatggaagatctcaagggccccactgtttcatcgttcctgtccgggatgaaaacgggagcttgtacccaggagtcacagctattgatatgatgtacaaggagggtctgcatggtgtggacaatgggatattaatatttgacaaggttcggatacccagggagaacctgctggataagtttggttccgtggctccagatggacagtaccattcgcctattaggaacaagagtgcaagattcaatgccatgctggcagcactgaccccttcgagattagctgtggctttccaagctatgggtgccatgaagcttgggttgacgatagccattcgctatagccacagccggaggcagtttgggcccaaaaccaaggaagaggtgaagatcattgagcaccaaacacagaccctgcggctgatgccccacctggccacagccttggccctgaccttcgtcagcaggtatgctggggccctcctggatgaggatgtcttccagggaaaggagctggtcaacagtcgctcgctgcaggctctggtggcagggctgaaggcctacagcacctgggagaacatccgctgcctgcaggactgccgcgagtgcactggaggcatgggttacatgatggaaaatcgaatctccggcttaaagtgtgacacagatgtgtttgccacttttgaaggtgacgatgttgttatgcttcaggttgtggggcgggaactgctggcccaatacaccaaacagtatgaagaaaaaccactctttggcctgctccaaaactgggctgaatctgtgggggacaagctgagaaccagtttcctggcatttaacatggacacagttgatgatctcgcctttctgttgaaagcagtgaaatttcgtgaaagggttcttcagcggggtttggtggccagaatttattataaggtaaagaccaagaaggaggattttttccatgcctggaactcgtgtctgcaccacgtggcttctctgtccctggcacacactcaccgagttttgtctgttgtatggaaccaagctggtgtttcaggagcgggcctggtatttagaacataaatacttgactcccatggccagcacgaggatcaggaatcagttgctggatttgtgcgactcggtgaaggatgatgcccggagggtgatctcgacctttaacattccacacacctacct

SEQ ID NO: 18868 - DNA, 851 bp, Homo sapiens
gagaggcaggtgagcgcgatgcagccggcgccgggtctggggctcggggactcctccctgcaccgctacctggacggcgacttctggagcctcaagaacgagctgcgcggactcctcggcggcgcccgctcttccggcaaaggtatgatttaagcttggatgaaatgagagctttgacagttcagagagtgaagtttgccatggacctgcctctgttaaaacgtgcaggtcaggatctggcagagaaaacaaagaattttgtcagccgaagccttgtcataggagaagtcctctccatggcggacatggccacaggagtgaagtgcggaataatttattggctatttggtggtgctatcaggaatctcggaagccctgaacatgttactaagtggtttcagccactccaggagcagaaatacactgggatgtttgcaatgaccgagaggggccatgggagcaacgcgagagggatccagaccgaagccacctttgacctctctgcccagatggggaaacagaggctcacggaggttaagcagctgactctggctatgcagttaatgacataaatgacttagctacctggcgtgcctcggcagctaccactgtctgataggggacctgcaaagttgcaatcataatgacgaggggcctctggtgaacactgtctcccgtggggctgggagagagaacaatcccatcataaactcataccaccgagaactgacatagcaggaatgtatttctcccttcactgggttctgtgttttccccttcatttccctttcaaaatgctagagcttattaaataagtgttctctccccaaggaccatttaaatctcttaca

SEQ ID NO: 18869 - DNA, 502 bp, Homo sapiens
cattttacattaggaaagtattaacttttacgattttatgaaatgtaatattatgttatttctctttcgcctccttagattttgtgttttctaatatattgctatttgtccatttcttttgttttcccccaccccttagttttgtctgttgtatggaaccaagctggtgtttcaggagcgggcctggtatttagaacataaatacttgactcccatggccagcacgaggatcaggaatcaggtaaggtccctggggtacagaaaaacactttgtacatcagccctggtctccttgctttcttagaaaacagtcctgccaatcttctatcagtttccactcatggatttttatgcctctgggacttcacatgtatattttcattacctatcatgatcgtattacacttaagagtttaggtgacaagggagtgactcactgtacatgagttttctaacatgaaaaggagaggaaggtatcaaaatgttttccttgtcttggcca

SEQ ID NO: 18870 - DNA, 3370 bp, Homo sapiens
gggtagaagattatgtaaacacattttgaaatttttaaaaattcagggtttcatcctttattagtttgctaaggataccataacaaagtaccacaaactgagtgacttacacaatagaaacttattttcctgcagttctggaggctgaaagtccaggacaaggtgtcgacagctttagattcttctgaggcctctctgcttggcttgcagatggctgcccttccttactgtgtccttgtatggtccctctgtctgggtgtctgtgtcctaatcttctcttttaataaggataccactcaggttggattagggcccatcctaacaatcccattttaacttagttacctcttcagggcctatcttcaaatatactcacattttgaggtacaggtagatggttagggcttcagcatgaatttttgtggggacataattcaaccctccacacataattaccaatttctgaatgtctttctggttaagttgcataaaaacgtttatctacttgaactctaggatgatagttaaaaaaaaaaatgttggccaggcgcagtgatggatgcatatgatcccagcactttgggaggccgaggtgggcagattgcttgagttcaggagttcaagaccagcctggcaacatggtgaaatcctgtgtctacaaaaaatgcaaaaattagctggacatgatggcatgtgcctttggttccagctacttaggaggctgaggtaggaggatggcttgagcccaggaggcggaggttgcagtgagccaaaatcgtgccaccgcactctagcctgggcaacagagccagaccatatctcaaaaaaaaaaaaaaaaaagtttatctacaaaaatgcttttgtgcctcttacatacaacccttccagaggaagggcctagctgagagtaagagatggttgaaaaaatgcaatgttatgattgctgaacagggcacgactgtttttgtaatattggagaaaataattaaagcctggcacctggggaggcttgatccctggaagcctcctcttgctgaaggaaaattcccagtgctgcctttccatgtgctgtgagtgctttgagttcagactgacaacagagtgggtctagcttctatgctttccatgaagatctcccacaaatgtcatccatgctcatgagatggatcaacttgtatcctgaacaagcaaaactgtttgggactcactgccttcaggcagtcccttggaagccaaggactctgggaacttttcagatgggactggaaacacttgggcaggagttcccctggtaggaggtctgttcacctgtacagcctaatggatgtcctgcttgaggtgccctaatattgcaaattctttgtttacaggggtaccacctgtgcccctgggactgtgcttctgtacatgaccacaactctcatgatgtcccctcagccctggaaagcatttgggttagcttccgcttactggtcagagttatactgtgcctgaattgatgcctcaggtcaggttgaaaaaaaaaaaaaaggttcagacagcaattaagggctgggcacggtggctcatgcctgtaatcccggcactttgggaggctgaggtgggcagatcacctgaggtcaggagtttgagaccagcctgaccgacatggtgaaaagtaaaaatacaaaaataaaaaaattagctgggtgtggtggtgtgcacctgtagtccctacaaaaataaaaaaattagctgggtgtggtggtgtgcacctgtagtcccagctactcgggaggctgaggcaggagaatcgcttgaacccaggaggtggaggctgcagtgagccaagatcacgccactgcactccagcctgggtgacagagcaagactccatctcaacaacaacaacaaaaaggaattaaggaggaagccacctggcttcctaagatagactttatggttaatgggatttattttagctggttaagtccaggacccctaccaggaagaactgaggtccatatttgaggttggtctcacccttttgcatgtggtcctactaataataattttgctgtaaagaagcctcaataaggagatggactgtgtgaaaagagatgagaaagcaggcctgtttgcaaggctggcccttggctggcatctgaaagcttggatttcaggagggttctcattactccctaaatgataagagtggctcactgtgcctaaactgttcgtacaaacaatgtgggttatgcccaacatctgctttccttctgggagtcagattttcatatgtgttaggcagaggatgaggtgagcagctcccaatgagaaccctgaacactgagtctgtaatgagcttcccttgtatacaacattgcacatgggttgtcacaactgattgctggaggaattgtgtcctatgtgactctgctgggagaggactgtgggaggcttacacctggtttccctggactttgtccatgcgcttttttcctttgctgattttgcttcctagcctttcgctgtagtaaaacatagccatgagtatgactacaggctgagtctgtgaatctcctagtacatcatcagactaggaggtggtggtgttggcaccccccagcacagggcacaagggagacttgcagggtgtttgtcatgttccctttctcaatctgggtgtggtttacagatttgttcagtttgtgaaaattcactgagctctatgaacaattataatatgtacatttttttctgtaagtgtattaaatttcaataaaaagaattcacactataggggtacaaaataacttaatttttcaaagtcttccttttattcagccaacattttagtaagtacccttttttttttaccaagcactgctctgggagcttgggacatggggtagaaaggacggcatcattgtcctcattgtccttcagcttagctgcaaggcaggtgaaggatgcttatagtatggttgatttttgctgggctctatgaaggatcagagggtgctaaggaggcacagagaaagagcttttaacgtgggtattttactgttccagggttgccactcaagtacctacagaacaaacgggtgtagctgtaaactgtggcaaactgaaagcatgtaggcacagagtaagtagctagagctgatttttttcaggaaaggccacaaatcccaacttttatgagctcctcttttaaatgctgtaaatgttttacaatggcggggcgcggtggctcacgcctgtaatcccagcatttgggaggccgaggggcagatcacttgaggtcaggagttcaagaccagcctggccaacatggtgaaacctcttctctactaaaattacaaaaattagccgggcatggtggtgc

SEQ ID NO: 18871 - DNA, 2773 bp, Homo sapiens
gggtagaagattatgtaaacacattttgaaatttttaaaaattcagggtttcatcctttattagtttgctaaggataccataacaaagtaccacaaactgagtgacttacacaatagaaacttattttcctgcagttctggaggctgaaagtccaggacaaggtgtcgacagctttagattcttctgaggcctctctgcttggcttgcagatggctgcccttccttactgtgtccttgtatggtccctctgtctgggtgtctgtgtcctaatcttctcttttaataaggataccactcaggttggattagggcccatcctaacaatcccattttaacttagttacctcttcagggcctatcttcaaatatactcacattttgaggtacaggtagatggttagggcttcagcatgaatttttgtggggacataattcaaccctccacacataattaccaatttctgaatgtctttctggttaagttgcataaaaacgtttatctacttgaactctaggatgatagttaaaaaaaaaaatgttggccaggcgcagtgatggatgcatatgatcccagcactttgggaggccgaggtgggcagattgcttgagttcaggagttcaagaccagcctggcaacatggtgaaatcctgtgtctacaaaaaatgcaaaaattagctggacatgatggcatgtgcctttggttccagctacttaggaggctgaggtaggaggatggcttgagcccaggaggcggaggttgcagtgagccaaaatcgtgccaccgcactctagcctgggcaacagagccagaccatatctcaaaaaaaaaaaaaaaaaagtttatctacaaaaatgcttttgtgcctcttacatacaacccttccagaggaagggcctagctgagagtaagagatggttgaaaaaatgcaatgttatgattgctgaacagggcacgactgtttttgtaatattggagaaaataattaaagcctggcacctggggaggcttgatccctggaagcctcctcttgctgaaggaaaattcccagtgctgcctttccatgtgctgtgagtgctttgagttcagactgacaacagagtgggtctagcttctatgctttccatgaagatctcccacaaatgtcatccatgctcatgagatggatcaacttgtatcctgaacaagcaaaactgtttgggactcactgccttcaggcagtcccttggaagccaaggactctgggaacttttcagatgggactggaaacacttgggcaggagttcccctggtaggaggtctgttcacctgtacagcctaatggatgtcctgcttgaggtgccctaatattgcaaattctttgtttacaggggtaccacctgtgcccctgggactgtgcttctgtacatgaccacaactctcatgatgtcccctcagccctggaaagcatttgggttagcttccgcttactggtcagagttatactgtgcctgaattgatgcctcaggtcaggttgaaaaaaaaaaaaaaggttcagacagcaattaagggctgggcacggtggctcatgcctgtaatcccggcactttgggaggctgaggtgggcagatcacctgaggtcaggagtttgagaccagcctgaccgacatggtgaaaagtaaaaatacaaaaataaaaaaattagctgggtgtggtggtgtgcacctgtagtccctacaaaaataaaaaaattagctgggtgtggtggtgtgcacctgtagtcccagctactcgggaggctgaggcaggagaatcgcttgaacccaggaggtggaggctgcagtgagccaagatcacgccactgcactccagcctgggtgacagagcaagactccatctcaacaacaacaacaaaaaggaattaaggaggaagccacctggcttcctaagatagactttatggttaatgggatttattttagctggttaagtccaggacccctaccaggaagaactgaggtccatatttgaggttggtctcacccttttgcatgtggtcctactaataataattttgctgtaaagaagcctcaataaggagatggactgtgtgaaaagagatgagaaagcaggcctgtttgcaaggctggcccttggctggcatctgaaagcttggatttcaggagggttctcattactccctaaatgataagagtggctcactgtgcctaaactgttcgtacaaacaatgtgggttatgcccaacatctgctttccttctgggagtcagattttcatatgtgttaggcagaggatgaggtgagcagctcccaatgagaaccctgaacactgagtctgtaatgagcttcccttgtatacaacattgcacatgggttgtcacaactgattgctggaggaattgtgtcctatgtgactctgctgggagaggactgtgggaggcttacacctggtttccctggactttgtccatgcgcttttttcctttgctgattttgcttcctagcctttcgctgtagtaaaacatagccatgagtatgactacaggctgagtctgtgaatctcctagtacatcatcagactaggaggtggtggtgttggcaccccccagcacagggcacaagggagacttgcagggtgtttgtcatgttccctttctcaatctgggtgtggtttacagatttgttcagtttgtgaaaattcactgagctctatgaacaattataatatgtacatttttttctgtaagtgtattaaatttcaataaaaagaattc

SEQ ID NO: 18872 - DNA, 3142 bp, Homo sapiens
agccctgaaagcatttgggttagcttccgcttactggtcagagttatactgtgcctgaattgatgcctcaggtcaggttgaaaaaaaaaaaggttcagacagcaattaagtgctgggattacagtcatgagccactgtgccccgccattttttaataaacctttctaatggaacaagtaaaacacatgcagtggatgctcagcaggccttgagtgtgtgaatgaaaaatatttgaacttgtttttactggttgatttcattgcttaaaaaacataccttagctggacgcagtggcgtgcgcctgtagtcccagctactcatctcttaaaaaaaaagttttatgcttgttaatttcataaatgctagagggatcaccctaatcaaataaagctactcaaaaataaaatatgaaaggtgttagtgggatacagctttctagttttttgccactagtggataggttggaatttaaattcttcggatattggaaccagaacaggctgtaactgattatttttgctgtgattcgtgcttactggagcctcgggaaagagggagacaacatgtaaagagaagcaatctgtttggaaaatgaaaatacagttaaattgctaatgaacccttgtcaaaatcaaatgtctccccttagaggctgatgattgtctagtctaatatgcattttttttgagtgggtcaattggactctaagaccaacaagataaaaaggcagccttgcatgtcacttggaccacagctgtctggccatgcagcatgccttcactgctgctgaagaaaagcagctgcttgttgagaatctcaaattctcagatcctaattgcctggccctgactctaagctgaaacctgctactgtctgccttgagctgttttagcctcaacacgagctatgctgaactgaaagcaggcacaggctcaatgaccaggactcagacgttggggccgttggagattaaggaccccctccgtggagcgctaaactatgaaaacgtcctggaacctggctgaaaagggcttattctctaatgggaccatctaagatcaagctgctgataggctctttgtctctaatacagaggctaattgcattcctaacttctaatattgcaaattctttgtttacaggggtaccacctgtgcccctgggactgtgcttctgtacatgaccacaactctcatgatgtcccctcagccctggaaagcatttgggttagcttccgcttactggtcagagttatactgtgcctgaattgatgcctcaggtcaggttgaaaaaaaaaaaaaaggttcagacagcaattaagggctgggcacggtggctcatgcctgtaatcccggcactttgggaggctgaggtgggcagatcacctgaggtcaggagtttgagaccagcctgaccgacatggtgaaaagtaaaaatacaaaaataaaaaaattagctgggtgtggtggtgtgcacctgtagtccctacaaaaataaaaaaattagctgggtgtggtggtgtgcacctgtagtcccagctactcgggaggctgaggcaggagaatcgcttgaacccaggaggtggaggctgcagtgagccaagatcacgccactgcactccagcctgggtgacagagcaagactccatctcaacaacaacaacaaaaaggaattaaggaggaagccacctggcttcctaagatagactttatggttaatgggatttattttagctggttaagtccaggacccctaccaggaagaactgaggtccatatttgaggttggtctcacccttttgcatgtggtcctactaataataattttgctgtaaagaagcctcaataaggagatggactgtgtgaaaagagatgagaaagcaggcctgtttgcaaggctggcccttggctggcatctgaaagcttggatttcaggagggttctcattactccctaaatgataagagtggctcactgtgcctaaactgttcgtacaaacaatgtgggttatgcccaacatctgctttccttctgggagtcagattttcatatgtgttaggcagaggatgaggtgagcagctcccaatgagaaccctgaacactgagtctgtaatgagcttcccttgtatacaacattgcacatgggttgtcacaactgattgctggaggaattgtgtcctatgtgactctgctgggagaggactgtgggaggcttacacctggtttccctggactttgtccatgcgcttttttcctttgctgattttgcttcctagcctttcgctgtagtaaaacatagccatgagtatgactacaggctgagtctgtgaatctcctagtacatcatcagactaggaggtggtggtgttggcaccccccagcacagggcacaagggagacttgcagggtgtttgtcatgttccctttctcaatctgggtgtggtttacagatttgttcagtttgtgaaaattcactgagctctatgaacaattataatatgtacatttttttctgtaagtgtattaaatttcaataaaaagaattcacactataggggtacaaaataacttaatttttcaaagtcttccttttattcagccaacattttagtaagtacccttttttttttaccaagcactgctctgggagcttgggacatggggtagaaaggacggcatcattgtcctcattgtccttcagcttagctgcaaggcaggtgaaggatgcttatagtatggttgatttttgctgggctctatgaaggatcagagggtgctaaggaggcacagagaaagagcttttaacgtgggtattttactgttccagggttgccactcaagtacctacagaacaaacgggtgtagctgtaaactgtggcaaactgaaagcatgtaggcacagagtaagtagctagagctgatttttttcaggaaaggccacaaatcccaacttttatgagctcctcttttaaatgctgtaaatgttttacaatggcggggcgcggtggctcacgcctgtaatcccagcatttgggaggccgaggggcagatcacttgaggtcaggagttcaagaccagcctggccaacatggtgaaacctcttctctactaaaattacaaaaattagccgggcatggtggtgc

SEQ ID NO: 18873 - DNA, 1297 bp, Homo sapiens
agccctgaaagcatttgggttagcttccgcttactggtcagagttatactgtgcctgaattgatgcctcaggtcaggttgaaaaaaaaaaaggttcagacagcaattaagtgctgggattacagtcatgagccactgtgccccgccattttttaataaacctttctaatggaacaagtaaaacacatgcagtggatgctcagcaggccttgagtgtgtgaatgaaaaatatttgaacttgtttttactggttgatttcattgcttaaaaaacataccttagctggacgcagtggcgtgcgcctgtagtcccagctactcatctcttaaaaaaaaagttttatgcttgttaatttcataaatgctagagggatcaccctaatcaaataaagctactcaaaaataaaatatgaaaggtgttagtgggatacagctttctagttttttgccactagtggataggttggaatttaaattcttcggatattggaaccagaacaggctgtaactgattatttttgctgtgattcgtgcttactggagcctcgggaaagagggagacaacatgtaaagagaagcaatctgtttggaaaatgaaaatacagttaaattgctaatgaacccttgtcaaaatcaaatgtctccccttagaggctgatgattgtctagtctaatatgcattttttttgagtgggtcaattggactctaagaccaacaagataaaaaggcagccttgcatgtcacttggaccacagctgtctggccatgcagcatgccttcactgctgctgaagaaaagcagctgcttgttgagaatctcaaattctcagatcctaattgcctggccctgactctaagctgaaacctgctactgtctgccttgagctgttttagcctcaacacgagctatgctgaactgaaagcaggcacaggctcaatgaccaggactcagacgttggggccgttggagattaaggaccccctccgtggagcgctaaactatgaaaacgtcctggaacctggctgaaaagggcttattctctaatgggaccatctaagatcaagctgctgataggctctttgtctctaatacagaggctaattgcattcctaacttctaatatttgccaaacgctccaagctggggaagggcacatcgcaaggactatgacctctcctcctgcttttgacagaccagactcaaaccttctctggggcttctctcactgctgttgacttgttgcattcagcttttgggattagttgcagcttgcaacagtggactgacagcctgactct

SEQ ID NO: 18874 - DNA, 450 bp, Homo sapiens
gagaattaggaggattttctttaatatatcattttttaaaaaaaaacttgcttgtatttgtttattttttaaatagagacagggttttaccatgttgcccagactagtcttgaactcctgggctcaagcgatcttggcctccctaagtgctgggattacagtcatgagccactgtgccccgccattttttaataaacctttctaatggaacaagtaaaacacatgcagtggatgctcagcaggccttgagtgtgtgaatgaaaaatatttgaacttgtttttactggttgatttcattgcttaaaaaacataccttagctggacgcagtggcgtgcgcctgtagtcccagctactcatctcttaaaaaaaaagttttatgcttgttaatttcataaatgctagagggatcaccctaatcaaataaagctactcaaaaataaaatatgaaa

SEQ ID NO: 18875 - DNA, 812 bp, Homo sapiens
cttgcattatctccagctcctgttagtccagggccagcttctgagaatattccacaagtctagactaactcatcacaccaatctggagctaagcagtatctacagaaggcaatattgcttaaccttagcaatacaaccaggtatctaagtcatcaagaacaaagagacagtagcttcgaataccaaatattcatttccctgtattatccactcactggtttccttttaagaaccttcatgatccagaatggcctgtgattacttaaactgttaacaagtcaacagaaagtgatatgaaagcttgtggctgattgaaaaaaaaaaaaagtacattttacttgaatactaatacatgggttttgcatgaactgtcaagtctgttctttttgcagttggtacaatataacaaaatctaattcctgaagtgctcatttggggttacatagtttggctcaagggacagatgtcttagggcggaatcctggctccactatttaccagccctatcacgctgggtatattacttaacctctctaagcctcagtttcatgatctctagattagggttttatgagaatctgaaaatcttaaaatcaaaaagttataaaagtgatggtttagataagtgtatacaactccttttagttacaaggaaaagcaacatgtggggaagaaaaaactggtgttactcaatgtcctactatagcagacttcctcatgacatctgcaccagaactgaattttacctgtacttctgactctcaggttctcaggtataaaaagtcctatgcacttttttcatatgctttgta

SEQ ID NO: 18876 - DNA, 375 bp, Homo sapiens
aaccaaactcaacaggaagagcaacaggctcagcctcatcccaggctccgcagttgagcaggttccatggcacaggctgggagctcagcgagcgggatgagcgatgcactcacggtgccgcagggcatggggagaaggacggtttttcggagagggagtaacccgctgcccactgctcccctgcgtgtgccagaaaggcagcagcggaacctcggcctgtccgtcctggtttactcagggtgtggggtgtgcctgggaacccagatgtttgtctctcacacgtgctggttttgatggaagttacttgtgcgatgtgatttccacggatgcaggggaatggagcacgagaaacatgctctaggtaaaaaaaaaaaa

SEQ ID NO: 18877 - DNA, 444 bp, Homo sapiens
tgcaggcacgcaagtggaaattcgagatgagctacacgagttcttactgcagaggggtccaatgtgcttgcttctccaaggatgacaagtatgtgtacgtgggcttaaaggatcgctctatacttgtttggagtgtgctggatggcaccctgctgacagtccagtttgtccatgctgtggtaaacagaatcatcccaaccaccagtggcttcattgcccccaccaggcatggttatctgatccgagagaatttccagtgcctttcagcaaaagcctcaccgcaggaccctcttaagaacttcaagaaggcaatgtggatggtcaaatccaggcagagagaggagctagttgcagctgcaggagctccccaggtcttggagtcagaaagtgcccagggaaatgaaaccaaatcaaacaaatgctcacaagtgtgcctgatagtgt

SEQ ID NO: 18878 - DNA, 137 bp, Homo sapiens
aaaccaaacaatggtctataaatggatcagcaggaagcaaagactagcaggaagcaagaaaatattcagaggaagcaaattccaaatgaggaaaaataaattgacatgggctcctttgtttaatttcactattatgt

SEQ ID NO: 18879 - DNA, 307 bp, Homo sapiens
ttttcctgcccagactctgaccaaaataatctccagcccaactgctaacccttcttcaggttttctgcttcagaagctctcttagaatgaagacacaacgccacacatctgaacaggaatctgcaagctggccttcacccacacctgctcctgctgcccctgggtttccccatctcagtgaaggtaccccagttctgcaaggtggaaagctgatgctgtctttgattcctcctcctcctcacccccacctcatcaaaacctgcccacgctatgtctaaaatatatctcacgtctgtcctcttcctct

SEQ ID NO: 18880 - DNA, 573 bp, Homo sapiens
  misc_feature (9)..(9): n is a, c, g, or t
  misc_feature (135)..(135): n is a, c, g, or t
  misc_feature (147)..(147): n is a, c, g, or t
  misc_feature (178)..(178): n is a, c, g, or t
  misc_feature (204)..(204): n is a, c, g, or t
  misc_feature (221)..(221): n is a, c, g, or t
  misc_feature (230)..(230): n is a, c, g, or t
tttttggtngagacggggtctccttatgttgcccaggctggtctcttaagtgatcctcctgccttggtctcccaaagtgccacagcacctggccctgaacattattttagtttagttgtttgagatggagtctcnctttgtcacctnggctggaatgcagtggcttgatctcaattcnctgcaacctccacttcccgggtttanacaattctcatgcctcngcctcccangtggctgggattgcgggcatgcaccaccacatctggctactttttgtctttttggtggagatggggtttcgccatgttggccaggcgggtctggaagtcctgacctcaagtgatctacctgcctcggcctcccaaagtgctgggattataggcgtgagccaccgtgcccggccttaaaacaaattcttaaaccggtattaccaagtcaaagaatgagcattttcacatctcgattaaattttaaccgagatttaaacatgtgttttcagaggtatgagtaatatgagtattccgggaaatataaaaataagtattaaaatgctgtggtttttgtttatattaa

SEQ ID NO: 18881 - DNA, 497 bp, Homo sapiens
cacatcactctgtgtcatgcttctgttacatctccttcttctgcctgactctgtcctctcctttgcccctgttgtaaggacccctgtgattgcatcaggccccctggataatccacgatcatctcctctatccaaagatccttcacttgatcgcatctgcaaagtttcctttgctgtagaaggtaacatatttgtaggttacggatattaggatgtgggcgtcttcgggggttgttattcagctactgcacggtcctgtggaggaattggtgcagttggcaaagaaagagacccccacgtgcctctagaggtaggtggctcaggagggcaaagctaaaccaaatattacagccttacctgttccaacaatgcctatttccttggaaatgagggaagaggcttcgagatgaaatttggtggcctctcccctcccccaaataatgtgacattattttgtgaaattgtattttggtgaggcccaaagagtcatacttgag

SEQ ID NO: 18882 - DNA, 390 bp, Homo sapiens
caaaaacacagtattacctcctaatcaaataaccaacacccaaagatacctgggtgtgactacatgtcaattcaagttcaccggagttaaaaggaaaaggtttcaccgattgtttgttggtgtttgttggaggctggtgtgtttaagatacagaagtagctgctagctttgcactaaaacaaacaaacaaaagcacatttcaattattttttatttattttttaaatttagtgcagcaaaaagagaacaaaggtggccaggcgtggtggctcacacctgtaatcccagcactttgggaggtcaaggcgtgcggatcacctgagatcaggagtttgagattagcctggccaacatggtgaaatcccgtctctactaaaaatactaaaaaaa

SEQ ID NO: 18883 - DNA, 628 bp, Homo sapiens
tcttgcttttctatgactttctcctccctggctgcatgccgaacttatttttttttaaacaaatcttagtatggaaggagaaccgtgactctctgaagctttaaaagagcactgaattatctgattcagaataaacaatgtattaaaatctaaaagatatgagaatttcttacaagcctgaaataggccattaagccatggatttaaacactgtggagcacacactgtgctaaccaagttgataaaggagagcacaaaattcaaggaaatagactataattttatatggcagaactgaagttttcatggaaagaaatctgtattttttaagagaaaactgtgattgaaagcaataaggatgacaaaaaggaggtacagggagtgtctgaaccgggttgaggtacagggagtgtctgaactgggttagaagcaggggttcggtcagtgcctctgggcagaaggcagcagcagcccacggccatctggctgtcactccaccgccccagcaccacgagggaccactcaagtgtcacccaggggactggggagatgtgtttatctacccagtagtgcagccccattttcaattttgctatgacaatttgaaatttttgaaatgtgttccaaa

SEQ ID NO: 18884 - DNA, 869 bp, Homo sapiens
ttttttcttgtaacaggcatgttggactttacacggtcataggtgacctaacaaagaatgtaagacgtaggtattttattaaaaagtctattgctcaggaataatgcatcctataaagttttaacttctttgttggagagaggttaagcaaaataatgtaagatgggtaaggtcagatgctatcttggcttggctggggtgtatagggcacattagaaaaacttaattgccttaactttttggttacattgctgtaagtattaggatgttgctggtgcagtggctcacgcctgtaatcccagcatttgtaagaccaaagccaggtgatcacttgagctcaggagttcaagaccagcctgagtgacatggcgaaaccccatctctacaaaaacattcaaaagtgagccaggcatggtggagagtgtatatagtcccagctgggaagctgggagtgtggaaggtggaaggatcgcttgagccagggaggtcaaggctgcagtgagctgaaattcgtgccactgcactctagcctgggtgacagcaagaccctgtatcaaaaaacaaaagtactttttaaatgattttcttgttaaattaccttttcccatgataggcaaatgtagtttatattggtttccttgtagtcattggtatctcgcctaccatttgctaatagctgagttgaaggtgctaaaaactctcagctgtattaatctactcttgctttcagaaagtaatatctaaatgaaaagcactactgcttgaataaagagtatccttagctaaattcccggagtagtttgttgagctgggggcatgccagagctgtgttaaactacaaaaatgtctgaataaactgatactcaaga

SEQ ID NO: 18885 - DNA, 322 bp, Homo sapiens
  misc_feature (10)..(10): n is a, c, g, or t
  misc_feature (31)..(31): n is a, c, g, or t
  misc_feature (66)..(66): n is a, c, g, or t
gacattaagncctgaggaggagtagctgttntcaggggataggaagtggggtggcctctgtgtgtnttgctgggattacaggcttgagccaccacgcctggccttatgtaagagtttttgtgtggacgtgtattttccattctcttgtgtaggtgtctaggagtggcactgctgggtcatgcgggtacagaggcaggttcttaactgcttttctatacctcctcctgtagtgagggaatttgtcatccatttggttcacatatcagtacttatttatttatttatttatttatttattttacttatttactgagaggcagtc

SEQ ID NO: 18886 - DNA, 256 bp, Homo sapiens
aagtggggaggagggcctgcctttcagagtgaagggatggtgcgtcacaaggagggggaggggcttcctgggtgaagaggtggggcttctcaagcaggggggaggagcttccaaggttaagaggtggggcttctcaagcagggaggaggagcttcctgggtgaagaggtggggcttctcaagcaggggaggagcttcctgggtgaagaggtggggcttctcaaggagaagaaaggggttcctgggtgaaggggtgg

SEQ ID NO: 18887 - DNA, 1124 bp, Homo sapiens
gaatagcaaaattatacagaaaaccctatatataatgaaaccttcgctcttaaaggatttcactaattcttccaattgcaaaataatccccattccaatacctttgcataggcttccaataataagtactacctcaattagaccttccaatctctaatccctaaatctttataagtttgcaagtgtaaatccagaaacccttttagcttgcctgtccacatgccccctttaaaacacgctgcatatctgtgattacattatattagtttctttttcaattaagcctttggaagagttctccctgtcgtggttgtagtggtcgcggtggtggtggtggtggtggtggtgatgatggtgatgttttaacggaaaataaaggggatcaaaggtggtgagatgcccctatgagaaaaccagctctcaattattcatcgacaggcgtcaagtgctacagtctagcagagaaaatacaggcagccctcagctttgtaccaagcacaatggcccccagaagtgactgtgaaagccacagagagatgcctttttacattgtgtatgagctctacaatagccccatgccctctcccacagcccaggaaggggagcctaaaaaaagaggcagtcttttgatttaaagaggacacagggcggcatctttcaggggtacaatgcactcagaccccacacacagtgaacttgggtctcgcttccaggaggaagcagcagactttgttctccatccttcactgctcatctctagggcagcccaacagctgcagcctgacccggatacacccatgagctcccactgaagcaagaaactctcttccctgcgactatttacacactttccctttctcctgccactgcttccagagccctctgagggtgaagctagggcaccattagcaactgagagactgaaatttaacctccatggcctataattttggcccgagcaatgcaaaacagaggagtttcaaatcccactacagagtgcctttaagctctttcttactttgcactttagtcgttcatgaataatcttacctcccattaaatgatgataatagaaacgatttccaaatggccccgagttcattttgagaaagtgagtttgaaac

SEQ ID NO: 18888 - DNA, 487 bp, Homo sapiens
gaatagcaaaattatacagaaaaccctatatataatgaaaccttcgctcttaaaggatttcactaattcttccaattgcaaaataatccccattccaatacctttgcataggcttccaataataagtactacctcaattagaccttccaatctctaatccctaaatctttataagtttgcaagtgtaaatccagaaacccttttagcttgcctgtccacatgccccctttaaaacacgctgcatatctgtgattacattatattagtttctttttcaattaagcctttggaagagttctccctgtcgtggttgtagtggtcgcggtggtggtggtggtggaaggaaaccttccagggaaagttgaggtttgcaccgggctctgaaggatgagtagaaatttgctggcggaatctgggaagggagaggaaagacattccaggtgaggacgcctgccagagcaaggagtggggcagtgaggagagtgat

SEQ ID NO: 18889 - DNA, 312 bp, Homo sapiens
gagagaattttaagatggagtggactacttttaaagctaactttaatagcaactcagaaaagatttcacctgaagtgattgaattgctaagtcacacgtgaaactgttctgtctttagattttatcgggaaaacttgttaaagctttccacacaaaagtacttaaacatacgtgtatcacattgtttcccattgcccaggtactgcctttttcctaggaaacactgaaaacagcttttcaagttcacttaaacatccattgtcatttaagaaaatattttctcataggagtgcagaagccttattggaagaa

SEQ ID NO: 18890 - DNA, 988 bp, Homo sapiens
  misc_feature (67)..(67): n is a, c, g, or t
  misc_feature (122)..(122): n is a, c, g, or t
agctttctctttccagaacaggattatgaaccgacaccatacagaggtatttgtaagaaagaaggtngatgccggaatcctttcttcaaacagaagcttaccagtaagtgcagactaatacnacaggcggtaaagagaagaacagagaaagcatcctgccccagccctgccccagagctaaacgtcattctagagaatgaaaaattccatctccacccagtgggttctcagaattccagagagattggaactacagcaaaggtatgaacaggtgtcacggggacacagaagaaagagcagttactcttccggaaggttggagaagattttgtgaaggtggggatgtttgatttgaaccttgaagaacaagcagagacccaagaagtacagaagaggggaggtggaaatagcatgaacgaggtggggcatgcaaattcactttcaattgatacaatctttcacgtcagagctgcttcttgtaacacagaagttttcagattctatgaaaaggtattgaatgaattgaaggctctgttaagggggcaactatctcccctccccattctcctatcagcccataaaacaggaactgacaacctcttggaagaattgggaaggaacttttcgattttctctgtacaatcttcactggttcctctctgtgagaggaggagggacctcttggattggtgtcgttgggaaaagggtatcaagtgtgcatggctcagcctgttcctggctctctctctgggactgacctgactgcaagcagcatgttctctgtctgctcctgcctcctccaggcaatgagcaccagggcgggtccagcccttgcttgggaggacttcaatagtccagctgctctgccgcgagtgggtgagtgagttcaagtcagaggagaagacacagaaagctcatttgggccttgggtcttagccacatcctccagtccatctggactagcaataaagctgacattttaatccct

SEQ ID NO: 18891 - DNA, 338 bp, Homo sapiens
cctttgtgcacagaatgtacaggagtcacttggaacctgctcatatcagtcttgttgttggatatcaatgtttgaagttaacttaagactcaatttgtccagttttacaaccatatgcctctctggttgcctccccgaccccactaccacagagctagacttgcacattttaccttttttaattctgtttgttttttcaaatactcattacacttgagtgctaaatactgtataccttcttgtggcgattactcaaggatctagaaccagaaatgccatttgacccagcaatcccattactgggtgtatacccaaaggattataaatcattctgctat

SEQ ID NO: 18892 - DNA, 639 bp, Homo sapiens
ttgttaaaatttaggctctgttttctcttaaaaccagaccaacagtgtagtggagtagagagagcactggttttggagtcagacaggtgtgggcttggggtggcagctctgtgtcacctgctggctctgtgaccatgggcaagtggacccaccaagccttcattttccctatctgtaaaatggggtgaatggcctctactcctgggatcagatgagataaactgaaaaggccttggaaagcaggtggttgctggtagcttttatttcgtccatcagcattatcatgttgacatccctggtgccagggggagcccactgatgtcgctgtgaccagcaagaagagggcaaagaaaagctgtcctgtcttatggctgttagtgggagtatttcacggatcggtcctacagtgacatgtgaacttgctgtcctcccagttgagtccattcattcactcattcactcaacaggtctttattgaggtcctccaatgggccagatgctgttctaggtgctgggaacacagcagtaaactaaagaaaggccttgcttgaataccagttgagaagggaatcttggatttattcaaagtccttatgttgaagcttctctaaaaaaaataaaataaaaatgataaagggt

SEQ ID NO: 18893 - DNA, 504 bp, Homo sapiens
taggcttctagaacatcaaggttattgtttatcaaaaatattgtaaaattctaagtgattatcttttcaaatattttgttcaccctgccccctttgcccaataccaatataaaaacaggcaagtttcctgttctttttttcattcttaactcagggccaatacctagcttatatactcacctcccatactgatatgatttgcatttgtgtccccgcccaaatctcatattgaattttaatccctaatgttggaggaggggcttggtgagaggtgactgaataatgggggcatatgtcccccttactgttcttgtgatagtgacagagttctcgtgtgatatgattatttaaatatgtgtggcatgtctcccttcactctcttcctccttctctggcaatgtaagacgcacctgcttcccctttgctctttgccataattataagtttcctgaagcctccccagctacactttttgtacagcctgtggaagtatgagtcaattaa

SEQ ID NO: 18894 - DNA, 283 bp, Homo sapiens
tataatccccaatgtgttggtataagaggagtggcctttgtgaggtgagtaggtcatgaaggtggagcccttgtggatgggattagttcccttacaaaagagcccaaggaagtttttgtcccttttgccatgtgagaacacatcaaaagctccatctttgtagaagaaagcaagccctcactagactctgaatctgctcgtatcttagtcttgaacttcctagcctacagaacggttagcaataaatttttgttgtttataaattacccagtctaaggtattt

SEQ ID NO: 18895 - DNA, 585 bp, Homo sapiens
ctttttcatgtctttaattgaatgggatattggcccattttttcttccagtttattacactgaatattgacatgttattttccaatattgagacaatcaatgacaagactttaagagtaacaatgtaaaaatacagaagttgtctgagtttatcaacaatcccctggattagaaccccctaccagttctaggtcatctaatatatagacattgtgttcagtagaaataaatatatatattttttattatgctttaagttctaggatacatgtgcacaacatgcagttttgttacattggtatacacgtgccatgttggtttgctgcacccattaactcatcatttacattaggtatttctcctaatgctatccctccccctgcccccaccccccgacaggccctggggtgtgatgttccccaccctgtgtccaagtgttctcattgctcaattcccacctatgggaatacatttttaaatcatttttaaaggtgttattacattctgattgaacattttcagaaagaataaataatttaatacaagaagtgggccacttcatgtaaaaaaacaaaccaccactac

SEQ ID NO: 18896 - DNA, 1645 bp, Homo sapiens
gcctttctatcagccaagatggcaaattgaattgggctctttatgttttaagaaaaatttgcaggctttccccaatactgcaggatctgtgagtcatgggaggaacggatcaaagaaggagaaggaatgtatctaatcaggaaaccatacatcgtttttacttctaaatatttggggctgatcccttacactgtagaaaaatttacttttttaaaagcccttttggctgggtgtggtggctcatgcctataatcccagcactttgagaggctgaggcaggtggatcacctgaggtcaggagtttgagaccagcttggccaacatggtgaaaccccgtctctactaaaattacagaaattagatgggcctggtggcgcatgcctataatcccagctactcaggaggctgaggcaggagaatcacttgaatccgggaggcagaggttgcattgagccgagatcatgccatcgcactctagcctgggcaacagagtgagactccatctcaaaataaacaaacaaataaaaataaaagcactctttacatctttcatataatagagtcactagcttctgtaccaatttcttgtctttagtgtactttggtaaagttttataattaaagcacatttctatcttgaagttaccatccaaggtggtttctggatgctagtttaatgatttaaacactagtggctcactaattcactagatagtttttgttctgttttctttttgctgcctgtttttatttttataattacattggcatgaatttccacttttcaatcttctaaggaatatttgagatttttgcttttaaaacttaatatttcctttaaaattctggaacttcttaagttgacattttaatttttttaaattaaattctgtagtgctcttacagaaccgaatattcttaatgtaagtataagcattacaaatccttgtagaataaatatttttagcattgttacgaaggttaaaaactgggttttgttcacttacatgtcttaaaattgccttaaaatgaatacagaaatttatatggcagcttctagtacagttgactgctttaacatggcctgacatctagtgatatttttctctctttcaaatttctgttttctagctcttaaatatctgtttctcattcttataaatcaagatgcttgtagtatataattctgagactaattatctgcttttgaattttttccactgcaattcatataatgtgaagatctgtgaaaatgctatgggaaaactagcttgggttcaaaatatcttaaccaaatataccctgtaggcttcccaagagtgactgtctgacagttggtgactgtagaagaagctggttgggtgttttctgggccaaggaaatttaaaatgtctgcaatgttatccatcattactttttgctgtcagaagggatggcagattgaagcttttctccctatcgcattttcagagttgccgtgtcagagcttcaccttgggtgaaggaagatgggcaggaattctggaaacagaactcctgagacctacctctgcctgcctaaaaatgtggactgactcagtatgagaaataacaagaaaacatttaagtgtttggggcaaatgttaatcactttctttccatagggc

SEQ ID NO: 18897 - DNA, 412 bp, Homo sapiens
tcccaagtatctggaattacaagtgtgcatcaccatgcctagatgatttttgtatttttagtagagatggggtttcaccacattggctaggctggggattctggtacttttctaatactctaacaacttcaattcttaatggtacaattattaaacccattttacatataaggaaactgaaggacagatagattcattaactttgcacaagattacagagatagaagacatcagaggtacccgaggtgagatagtttatttccagatcctgagatttttgagagagaatctccatgtttctctcatgttgctgcaaatcttataaacagatgtactggctgtttttgtgacagactatcttttctagaatgtttgtatagcaaacttccttgaaaaacagagattgtaaatc

SEQ ID NO: 18898 - DNA, 787 bp, Homo sapiens
gtcctaacccctatcaagatacagcacattctcgtcactgccagaaagttgccctttgccccttcctggtcagtacctgctcccagaagcagtcactggcttgccttgtcattgtgggtcagccttgcctcttctagaatttcacagagggggagtcctgccccgtggagtccgttgggttgagcatcttcggctcagcatgatccttttgagatgcagggatgttggtgtgtgtgtatcgggagtgtcttcctttaagaaattctttcccgtgagtatttcttcaagcctggatttctcatgaggctccaaactgcagaagatgagaagggagggctgtgtttcctgtgttctcagctcctggtgtgcagtaggtgctctgtagatgcttgttgaatgaatggatgggtggatgacaggcatgtcccagggatggagaaaggggagcagagaccctgtctttggagttcctgtgtgtttctcaaaaagtgtcccactggccagggcgcagtggctcacacctctaatcccagcactttgggaggtcagggcaggtggatcacctgaggtcgggagtttgagaccagcttgggcaacatggtgaaaccccgtctctacaaaaaaatacaaaaagtagccgagcatggtggtgcatgcttgtagtcccagcaacttgggaagctgagaggtgggaggatcacttgagcccagaaggtcgaggctccagttagctgtgatcataccactgcactttagcttgggcgacagagtgagactgtctcaaaaa

SEQ ID NO: 18899 - DNA, 661 bp, Homo sapiens
gtcctaacccctatcaagatacagcacattctcgtcactgccagaaagttgccctttgccccttcctggtcagtacctgctcccagaagcagtcactggcttgccttgtcattgtgggtcagccttgcctcttctagaatttcacagagggggagtcctgccccgtggagtccgttgggttgagcatcttcggctcagcatgatccttttgagatgcagggatgttggtgtgtgtgtatcgggagtgtcttcctttaagaaattctttcccgtgagtatttcttcaagcctggatttctcatgaggctccaaactgcagaagatgagaagggagggctgtgtttcctgtgttctcagctcctggtgtgcagtaggtgctctgtagatgcttgttgaatgaatggatgggtggatgactccctagtgccctcaggtaaaacctcttcagctccgtacaaagtctttctgatctggcctggcttatctcctacccttttcatcttgcctttcactcaccaagctggttcccgcctccccacctcggcctgcactgtactctgcccagagtcatcttcccctgctacaagcataccccagagagcaggcaggttaggttctagacagtgcagtaaagtgagtatcacaatagagcgagccacac

SEQ ID NO: 18900 - DNA, 444 bp, Homo sapiens
ccagatgagaagttggagttgggggtcaaagaaagccggtgtcaagcttgagctgcatcaaacagtccaggatcatttaggcagcaaggaggtcaactggctactaagagcaaactctggaaaaaatagtcaggaatcacgctgggatttcagatcaaaaccaactatagcgatctgggggtaccctcagacaccatggccggaccaaccagtctccaaataacttggggtataatcagatcagatgctcaacgctatgtctgacatccctcctccagtgaaacagagacagtggctgtgaatttttcccaattcctatcagtttcagattacacactcaggacagggaaaatgtgtcacacgctgtggaatgaatcgtaaaaggggaaagaggactctagtgggctaaactgtggccctcaaaagatatgtccatgtcaaatc

SEQ ID NO: 18901 - DNA, 361 bp, Homo sapiens
gtatgatatatatatacacatacacacacacacacactttaaacacacttttttttttaaacaaaagggaagagtattagccgggcccagtggctcaggcctgtaatcccagcactttgggaggccgaggtgggtggatcacaaggtcaggagatcgagaccatcctggctaacacagtgaaactctgtctctactaaaaatattaaaaaattagccaggcgtggtggcaggtgcctgtagtcccagctacttgggaggctgaggcaggagaagggcatgaacccaggaggcagagcttgcagtgagccgagattgcaccgctgcactccagcctgggcgacagagtgaaactctgtctca

SEQ ID NO: 18902 - DNA, 394 bp, Homo sapiens
gcagatgccagtcttcttggcctacccttatcacaactccaggcgttttggggcaagcctttgtctgtacgctttaatactgtctgtgctctgaataagttcagagcaccgtcaaataggtcttgatgtccatgggaccaacgctaaatactggtgtttttccagtttcttagcccaggactgattgaaaagttaatgtttatttttcttttctttaaggaaaaaactgagaatgggaagatactgacaagtaaacagttctttcttaaaatgcagcattatctggttctctgtcctacatctggattaaaaacaagtcagaagaacctgggagtaacttgcataagtagacataggggaaaagcaggaatgccgtttgatagagaaagaaaaa

SEQ ID NO: 18903 - DNA, 234 bp, Homo sapiens
tctaattatacttgacagaatgctgtggtggagattagtgctaagtggttgcctgaagatcagtgcagtgaaaatgttacagctgtgattggaaacgtaaccctaactgtgataacagcttcaccttcttcgcaggttttaaagtgctgtttgcctagtcctattttgaatgctgattaaataagtttgaattggttaaattgcttgttttctcctcctttaattgtttaagaa

SEQ ID NO: 18904 - DNA, 435 bp, Homo sapiens
aaacgtgaactcagagatgttaagtaacttaacttgcccaacacatacttagtaattagcagaattgcttttagcgcagagcccttctacacagccctgaggaacactgtccttaaaccacaggactcgctggtagcacctgtcctcagtagcgtgtgggtttccctagcatctcccagaaaacagctcactggattggctcaggtgtgtaagggtacctggatatgtgagcagggcaggggtggcagaagatggaagattcaggaacctaggggtgcctgtccatctttgttcttgaattatattatttcctctggaattcctgcttctgctctctccctctttccttctgtgagcaccctctctgggtgctcaaactcctccttgtccccagctacccccagtcttttactcaggcttaataaaacttgtcct

SEQ ID NO: 18905 - DNA, 500 bp, Homo sapiens
caggtcacctaggtgactgaaagctgagccacagactgtggtaatgctcttctgttcatccttatttctagggttcaaccattcagggtttcaaagcatggtttggagttaccaggcccttacctcttcactgaccctggactctttttgaatctttagccccttagctctatctactcaacttcccagtggccttttgcaatctataaatactcctaacacagtggtcccaaatgaatggttcatttttctgaatttctatcttttctcagatattattggcatggtaattattcaccaacttatcagctccctgctgccttcctacatctttgaaaagtatattttatccagcttttctaaatgttttcaagtgagaatgttaatccaaattacttagcccacattatttcctgttgattatgtgtaaaatacagttggtttatttgtattgtttttgtacctggaaacaataaactctgtagtgattctctaaacta

SEQ ID NO: 18906 - DNA, 215 bp, Homo sapiens
ggaaagagaatggggaaaattgatgttagtgggaccctatagaggctgttctgtgaagtatattgatttggaaggtaggtgttgcccatagaattggaaggggcacattcaccaggagtaggagtgaaaaagaagcctgaattggcagactaacaggctgctaactgcatgttggaaagtggtttctaaaccgtgggtagaggaaagcccccatt

SEQ ID NO: 18907 - DNA, 383 bp, Homo sapiens
atcaccaaatactgagaaatgtttcagcatgcttggcgaccttagattttgctggacctacaatggaaaataaagttgtaggatatttttgcatgctggtgatttttttccttttggttttttttgtttgttttcaattttatgggggagaacatgtaaaaataccttaaccaatgactttaggttctatattattgtaaaacaatttacaataatttgctcttcacctctctcatgccttctgtgtaatagacagaacaataacttttggaaaaagagctaggttcagtttccacttctgtcaccagctttatgacctgagaccaatttgttatctgagcttcaatgttgttaatcaattaaacaggcataatgctaggttc

SEQ ID NO: 18908 - DNA, 124 bp, Homo sapiens
gatataccacttgtaggatttttttatgttattataatgtcttcatttcttcctacagtctagtaatatcttactcctttttcaaagtccagtttaagacctgtttcccctgtgaagtcttttc

SEQ ID NO: 18909 - DNA, 234 bp, Homo sapiens
tgagccaccacacccggtcggatcattttttaaaaactaagtcgaggtctcactatgttgcccaaggtggtcacaaactcctgggctcagtccatcctcctgcctcagcttcccagcgtgctgggattaaaggcatgcccagccagcatcttttttttttttttttttttgagactgagtcttgctctgtcaggctggagtgcaatggcgcaatctcgtctcactgcaacctcc

SEQ ID NO: 18910 - DNA, 418 bp, Homo sapiens
tctagtaagatcttcctcctatccttgaggctgctcaaaggtcaactcctatgtgaaatttcccaactcctccaggcaaagttaagaatcctgtgctttgtaataccataccatagcactgcatgcttgccacatctcatcaccctataactattttgatatcttcctactattcatcaataaagatggaccagctaagttttttagaaggtaatatacattttagtttttaatacatttcttaagtgcagaaatttgccttctgtcaaatgtcatggttaaccaaagacaagtgaatgtaatttaatctgtcactggtaattataacttgaactaataatgaatacatttcaatagtatataagaaatattcaagaaattgccttcccaatgttgataatactagcagtatcatgca

SEQ ID NO: 18911 - DNA, 297 bp, Homo sapiens
ctagataatatcaaatatgtccaaagttgacattccaatgagatctccagggtttgtgagctgttattgttccgcgaccacactgatattcatatttccagttgtttactaaagggctaataagttataaatacattcatttgcttttcagtctagtgggcacgtgttgccatgactttattttgccttcccctgattagtttgttagtcatttttatcctctctttctaagtatctgttcctatatttttgtctaccttttggggttgcttgtctttttattgatttgtgtgagtt

SEQ ID NO: 18912 - DNA, 792 bp, Homo sapiens
ttgagaaccacttctctaagagttgtaaaatagctctaaacacttggggaaattgattacttttaggaagataagctgtgtctttgaacaatttttagtggctcaaccatgtgcttgccccttggggcaagtgtggaatcaatctgatgcgctgtcaccggtaaagctgttccagtacacacctctccctcaaagtgccctacacagccccttgctgaatcctttgcagcagtgaaaatcgggggttggggggaggcaagagtaggctgtgcttggggccatggaattatgcaggtctctaagggtgtggaccgaggagaacataaaggaacagtgatttaaacctgtaataaacagatgcccttgaggggaagcagcccccacagtaccctgctgggatgacctcccgcagcgcaccccactcacatggtacccggggagctcacactgccacacttgcggcatgaggtggatttcttcatggggataagaacctgtgcattgtggtcctcaccagggcccaagtggtaatcttttattaagagcaacaggaatcctggtatgtagaattgggaccgtatcttaagtgtttgaaaccatactttcttttttactgagacaagaggagtccatcaaaggtagtggtttaggagactttatgtccagccattaaatagagaacaataaacctcacttctccttcacctcgataaatgattttatgtgactgtttctggttcctggcattcatttggagagttgaaatttcccacctgagttgcccaccaaggt

SEQ ID NO: 18913 - DNA, 445 bp, Homo sapiens
ccaactcaaatatattaaacacaatggattcttgatttaaaagaaatactattgattaaaaaaaataagaattattttacccagaggaaaaatatcttatagaatcctttgattttctgttttttacctgtcctggaacatttttatagactttagaagactattttattgaaaaagtagaagacaaactaaattaaataaatctgcttaagattctgggctcataagcaagaaatctgaaatttacgaagaaatgtatttatccagaaactctgggcaatctgaatgcctgggcaaaaagagatgagaattagaggagtgcctgaattacttgcacaagtgagctgtctgtagtccccaagtaagctatggcagcatgttattacagatattagaagccttacctaattcatttataaagagtagatacatggcaggaccagca

SEQ ID NO: 18914 - DNA, 549 bp, Homo sapiens
ctggagggatactttggaaggtattctccacttcagcatgtctggtcagggagtctagaacattgaacaaaatgcctgcactcagtcagaaataaactcacaatcctttaccgcttgcccgatactctcctccatggtgctcgaaaccttgcgtgcaccttcccctggtattgttgtgtttacttgggacttggtttgctgtattggagatgtgtgttttgatggactcagtcttaagtagagatgagtatcttgctggtggaacttaaggacaggaagaagattgttttcggtttagaactctagcctttgtgtaaagtatagcaaagcaaagtcaacaagcaaaaagttgttagtttcaatgaactaattgagaatttgagaatcagaccatagctgagcagaaaatgaatagaagtaacattgacaggatgaggttgcctagctttttaagataaagctttggccgggcgcagtggctcacgcctgtaatcccagcactttgggaggccgaggctggcggatcacttaaggtcaggagttcgagac

SEQ ID NO: 18915 - DNA, 283 bp, Homo sapiens
aaactgagagagaaactattgattatctagcccaaccttttatagctaaatgaccttgaataggtagccttttcttttatctgtacaagcttactgcagaatctcaatttgtgtgagtgacagcaggtgtagcagctccatctgtatttgtcagattatagtttactaactgaatgaactaaaaattgggatatttggggcttgaatttttattctgaatgtacagtctgactttatccccaccggtaaattagaaattataatctcagccctaattctactg

SEQ ID NO: 18916 - DNA, 405 bp, Homo sapiens
gttataaaggtgttcactgtaaaaaagctttcaacttactggcttttttctggagtatgtgaaaagaaatgctttcaactttcctatatgtctgaaatttttaataataaaatattgggggaaatgagttgaaatatctggaaaaataaaatttagataatggctagagaaaattttcatggatttgggattcaacataccacccccagcctcattattatccccattgtgttcaagctctctcttcctcgtggcttattcattcggtcttgatcatctctggccatcatgttctaagtgatgtggatacgatggtgggacaaggtggctctctgactgtggaacatgcatcctttcacttttctgggggagtggagacagacaagcaatagtgagatgttctat

SEQ ID NO: 18917 - DNA, 397 bp, Homo sapiens
ggactaactggactagatccagatcaaccgcgggttactgtccatctcctgtgctggatcccattggcacaggttggaagaataaattgcggaagtgccactcccctcctgcgtatcaacaacgctttgtgggcaataatgaagaacacgtgtgttaatcccagcctccaagttaaaaaggaacaaatatcaatcacttcgcggatatcaaaactattaataaacgtttaaaaggccgggcgccatagctcacgcctgtaatcctaacactttgggaggctgaggtgggaggatggcttgaacccaggagtttgcagaccagcctgagcaacatagcaagacccccaactctaaaatacataattaaataaatgaataaatataccttacatctttc

SEQ ID NO: 18918 - DNA, 374 bp, Homo sapiens
ggcgcaatctcggatcactgcaacctctgcctcctgggttcatgcgattctcctgcctcagcctcccgagtagctgaggtaagaggattatttgaggccaggaagctgaggctgcagtgaaccgtgatcacaccactgtactccagcctgggcaacagagtgagaccttaccttaaaaaaaaaaaaaaaaaaaaagtaaaagaatcatgttttcctatctctatgtttccagatggatccatttctacatgcatttactatcaacattaaatctctgccaatgatgcgtttaaatcccaacaaacctgaaaaaccaaatacttcaagcccaatgccaaagaagagcctatgagcatgccagctgtttgcctttt

SEQ ID NO: 18919 - DNA, 329 bp, Homo sapiens
aagtacaaaaatgccattaaacaataatgggatttgtatgtgaaacattatactctttgaacattttttagaaagtcactcttctctttccccttcgactaataacaattcaacattatttaacataatcctactgacaggtaatttctgacacgaaatttattactggcttgccctttgagggcatgtttcactattaatgtttccttttaaaagctatagcatacattagattctcatacagagtttcccccatgttttccttggaaacccctactttctgtggtattttacattacccaagtctgctttaactgtatccttacaca

SEQ ID NO: 18920 - DNA, 403 bp, Homo sapiens
agtaagatgctagtttaacccaagtagatcagtaattaaatgtaaatggactaaatctcaaagatttctatgtgttctccaggattccatgttgcctaggcagagagccaaatcaagaatgcaaatgatagtctctagaataacccctgtgagactcgtagaatagcagataacctccacacttgtggagggggcaggtggggaaggaattttttaaaatatggcaaagaaggaaagaaacagcaacactgaacatggagaacacatagaaatctttagtaagatgctagttttaacccaagtagatcagtaattaaatgtaaatggactaaatctcaaagattctcaaaagtgaaaaaaaaaaaacagaacaaagacataagattataaaaagattaagagt

SEQ ID NO: 18921 - DNA, 538 bp, Homo sapiens
cttagaatgcagaacttaatcctcaactcttgagacctggttaccaattctgggacagtaggaaaaattcctcttattctctcatagtaataagtgactccactgctgttactaagccaatggctctcatcacactcaaaatccacacccctcatcacaacctccaaagccttgttccatcaagtcccagtctacctgccctacctctgctctgctcactctcttatccctcactctgctaaggtacattaggcatctatctgttcctaagcacaccaagcttgttcccatctgacagcttttgcaccttcagtttcttcagcctggaattcttttccccttatgcacctgcagttgttttgttgttgttgggcttttttttttttgagacagagtctccatctctcacccaggttggagtgcagtggtgcaatcttggctcactgcaacccccacctcccaggttcaagcgattcccctgctacagcctcccaagtagctgtgagtacaggcgcacgccaccacaccctgctaattt

SEQ ID NO: 18922 - DNA, 424 bp, Homo sapiens
ttccttccatgatatagatatattgatcatgaggagagggctcacccctcacccggagaagtagttggggaagcaatatgcggaaacaaagccatgaatctgacaagaaatgtacttaagattgtatatatggagatgaatacccattgtcctttgcactttctggatgataaattagaaaagaaaaatccaaagaatgaagttgtgctatttgtcctcacttctgatttgggaaactagaggaaattaagatgggaaaagaccatgtgaggacacagtgagaaggagaccatatgcaaagcaggaaggaagatctcactggaaccaaaaaccagccctgctggcaccctgatcttggacttctagcctttctcagaactgtgagaaaataaatttctgatgtttcagccaaacagcctgtggt

SEQ ID NO: 18923 - DNA, 432 bp, Homo sapiens
gaattacttcaggagattcaaactttcattcagttatgaaacaatgcagtgttttactttataaattataaccaaatattttataataaagatagctgacatgaattgaaggagaaactgttttatcctcattttatatatgaggaaagtaaaagcccaataagttaaataattactcaagaaatggataagccagtactcaaacttaggaagttggccccaaagcccatacttatactatactgacactactgacagatatcactagttacctaaacaagaatccatgccacccacttcctttgtgagatcccatctgtgtgacattcacgttcttagtctctctaaaggcaagaatggatatataacctagttctggccaatggaattagaagaaatgccttctaggtctttcattttgtaccctggtga

SEQ ID NO: 18924 - DNA, 3230 bp, Homo sapiens
ggagtctcgcgaggatcttgtgacttatcgcggcatcgcccagcggttgccgggaaacggcgtggcttccgggggcgggcgccctggtcccggagtcgccgctgggcctgtccgctggcgtcatggcaccgaaaaagaaagggaagaaaggcaaagccaaaggcaccccgattgtcgatgggctcgctccagaggacatgagcaaggagcaggccaggtggaggagcatgtcagccgcatccgggaggagctggaccgcgagcgggaggaacgaaactacttccagctggagcgggacaagatccacaccttctgggagatcacacggaggcagctggaggagaagaaggctgagctgcggaacaaagaccgggagatggaagaagccgaggagaggcaccaggtggagatcaaggtgtacaagcagaaagtgaagcacctgctatatgagcaccagaacaacctgacagagatgaaggctgagggcactgtagtcatgaagctggcacagaaagagcaccgcatacaggagagtgtgctgcgcaaggacatgcgggcactgaaggtggagctcaaggagcaggagctggccagtgaggtggtggtgaagaacctgcggctgaaacacaccgaggagatcaccaggatgcggaatgattttgagaggcaagttcgagaaattgaggccaagtatgataagaagatgaagatgctgagggacgaactcgacttgcggagaaagactgagctccacgaagtggaggagaggaagaatggccagatccacacgctgatgcagcgccacgaggaggccttcaccgacattaagaactactacaacgacatcaccctcaacaacctggccctcatcaactccctcaaggagcagatggaggacatgcggaagaaggaggaccacctggagagggagatggcagaggtgtctgggcagaacaagcgcctggcagaccctctccagaaggctcgggaggagatgagcgagatgcagaaacagctcgcaaactacgagagggacaagcagatcctgctttgcacaaaagcccgtttgaaagtcagggagaaagagctgaaagacctgcagtgggagcatgaagtgttagagcagcgattcaccaaggtgcagcaggagcgggacgagctctatcggaagttcaccgcagccatccaggaggtgcagcagaagacagggttcaagaacctcgtgctagaacgcaagctgcaggctctgagcgccgctgtggagaagaaggaggtgcagttcaacgaggtcctggctgcctctaacctggaccctgcagccctgacgctggtgtcccgcaagctggaggatgttcttgagtcgaagaacagcaccatcaaggacctgcagtatgagctggcccaggtctgtaaggcccataacgacctgctgcgcacgtatgaggcaaagctgctggccttcgggatccctctggacaacgtgggcttcaagcccttggaaacagctgtgatcggacagacgctgggccagggccccgcgggactggtgggcaccccgacgtagctgcccccctggggggccacagcccagagaaccagcctaggaacactcgggatgacaccccttatcacaccaaggacagcaagttttttagattttatcatcagcaaatgaaagcttttcacatgttcttgccatcctctttcctggctctgtggaggagaaccacctgcaggaccctcacccatggtgtccctgtcgctcccttccctgggtgccgcacgtccagcctgtgtccaggcctactccctggtctcacctccgaccacagtcggcggcaccttctcagagtgccccgcactcacctgggggttggggcagtgccgcgctgtgctgcctgtcttcgcgccactgttgtcccaccgaatggacagctttgcaggtgctggcactaacttcattgacacctgagtcacagctgcccagtgggattctccagggggccgggacttccctaggaagtggtgagccaatgctccctgatgagcacaaagcccgctctgttgagggctgggtgggtgcagccagcgtgcgggaacgggcaggcagcctcccgctgccagtcttcgctctaactccctcggtaggtgatgtaggaccaggggcacgtggaacttctgggccttgctggtgatggttaaaacaacctgagatggagaggccaggagagagtataaggggatagcagcaaaccacctatctggccccaacacacctgagagaattcagcagcccagactgagggtctgggatggggtgaaccttccgcaccagagggacactccacagaagccacagcccagtaagtcaggcgcttctgcggcggctccagtgtggggtgaggcagtgaggttaggcccagagagctggagttggctcagatgaaaacctctgtcaacaaagaggggatgaatcacccttggcccagcctccccacaaagcctgaccctgggcaggtgagtgacgggtgtgtcctcgtagagtctattgctgcctggacacctttcttttgggagctcaaagcaagtgagctcacctacctgccaccgcccaggaccagtctgcccactgcctaaatgatgcccggccagcaggacctggcctgcagatcccagtgagtcatgagcctcagccccctccagcccactggggctctcacctccacatgtgggtagaagctttcctgccccctcttcctccagtagccctcagtgtcgaaggtgagcttgtaggtgcctgccttcatctggtccaggacagtgaccatctgggtctgtgtagctggggagaggatgaggctgcagagatggggaccagaagccccccaccccagctttcctgggtctgcatcccagtgggcctcagacactgccctgccacctgtcagacttgggtgagcagacacagtgaggctgttaggtcctgcagttccagagcagtctagggacaccactgccctgtctttaggaaatcacaacacagagaagcaaaaagggaaaaagtctcccacaatttatcccatgagcaagaaccactttatagctggcatatatttttccagattttctctatgcataagtatatttgtttaaaaacttataaagtggattatactatttgtattgttttataacctgtggttttcacttaaaatattgtgtatggctgg

SEQ ID NO: 18925 - DNA, 491 bp, Homo sapiens
ggaagcagctatggcatgatcgaggatttaatgcgactcgctatagggaatttggcccgcaaggccaagaattcgtcacaagtgaccatctgggtctgtgtagctggggagaggatgaggctgcagagatggggaccagaagccccccaccccagctttcctgggtctgcatcccagtgggcctcagacactgccctgccacctgtcagacttgggtgagcagacacagtgaggctgttaggtcctgcagttccagagcagtctagggacaccactgccctgtctttaggaaatcacaacacagagaagcaaaaagggaaaaagtctcccacaatttatcccatgagcaagaaccactttatagctggcatatatttttccagattttctctatgcataagtatatttgtttaaaaacttataaagtggattatactatttgtattgttttataacctgtggttttcacttaaaatattgtgtatggctgg

SEQ ID NO: 18926 - DNA, 636 bp, Homo sapiens
tcactctgtcgtcctggctggagtgcagtggtgtgatctcggctcactgcaaactccatgccccaggttcaagccattctcctgcctcagcctcccgagtagctgggactacaggcgcccaccggcacgcccggctaatttttttttgtatttttagtagagatggggtttcactgtgttggccgggatggtcttgatctcctgacctcgtgatccgtccacctcggcctcccaaagtgctgggattacaggcgtgagccaccacgcccggctcctctcttttctagaaggaatgttctccttctcaaaaggaaggtttctcctttgtgcttctccaaatgcaacaacaggatgtgtgtgtggtaaagggtgggaacactcagggcaatgatgtgctccaggtgagcagaagggagagaggttccagaaccttctctgccaaatgttcctgggagcaaatcagagccagccaagaaggggaagctgttagagtctctcttaccccattatttccaccaaaggcaccgaaaaagaaagggaagaaaggcaaagccaaaggcaccccgattgtcgatgggctcgctccagaggacatgagcaaggagcaggtgagcagagcgggctgtggcccagtcc

SEQ ID NO: 18927 - DNA, 523 bp, Homo sapiens
cctgaactctatggaacgtgtagaatggctgcgtcaaaaactggattaaaacagccaaggcatgcaagagaaagaacatggaagtttccaaggccagtggacccactcagaatcccagaacaacctatttccataaattgaggccaagtatgataagaagatgaagatgctgagggacgaactcgacttgcggagaaagactgagctccacgaagtggaggagaggaagaatggccagatccacacgctgatgcagcgccacgaggaggccttcaccgacattaagaactactacaacgacatcaccctcaacaacctggccctcatcaactccctcaaggtgctgtgcgtgggctgggctggggaggcacactctgcctgtcctagaatgtgggctgcagagtcctggggatccagaccccagctctccaccccaacacacccagtactttttataagattgtttgacaatgcccctctcatatccttaactgaaattcctaaataacgtaacctatctcta

SEQ ID NO: 18928 - DNA, 484 bp, Homo sapiens
gagtggggaggaggcctcttcaggaagagcagtttatttttgtgaaaggaatacttactgatttcaaacatttggaactaaactggaacgtatttttctttccgatttctgcgtttttgaggtgtgtgtaaacccaccagcgcagcagctgggagggcccttcaaaggtgggcgggtggggtgagtgaggcccaggggatagagtgtttgcccagatttgaatctcatttggggaaagtttcagaggcttgggtggctgattgatcattccttcaatggtccttcatcagcacgtctttactgagcacgtgctgtgtgctgttctaggcgctgaaggatagaagtgaagggttcccccctcgtggagcttaggttccagcaataagcaaaacatgccctgcagcgaaaggcttctgggctgccggcgacattttcccaacgttcacaaccgggttccttccggacgcccgtctctagggacgca

SEQ ID NO: 18929 - DNA, 437 bp, Homo sapiens
atgattattggccaaattgaagagaattctgccacctgctgaatgcattctgtctccggagcttcctagccttatattttaactttttacatttagctgtttatttttaggtgaagttgagtcctccctctttcttccttgcctttcgccggccacacgccccgttgccgtgcatgggcccctgctcagtgcctcacctgacccactgcacctggccaggtggaggagcatgtcagccgcatccgggaggagctggaccgcgagcgggaggaacgaaactacttccagctggagcgggacaagatccacaccttctgggagatcacacggaggcagctgaggcaggagaatggcttgaacccgggaggcggaggttgcagtgagctgagatcgcaccattgcactccagcctgggcaacagagcaagactctgtctc

SEQ ID NO: 18930 - DNA, 3226 bp, Homo sapiens
gagtggggaggaggcctcttcaggaagagcagtttatttttgtgaaaggaatacttactgatttcaaacatttggaactaaactggaacgtatttttctttccgatttctgcgtttttgaggcaccgaaaaagaaagggaagaaaggcaaagccaaaggcaccccgattgtcgatgggctcgctccagaggacatgagcaaggagcaggccaggtggaggagcatgtcagccgcatccgggaggagctggaccgcgagcgggaggaacgaaactacttccagctggagcgggacaagatccacaccttctgggagatcacacggaggcagctggaggagaagaaggctgagctgcggaacaaagaccgggagatggaagaagccgaggagaggcaccaggtggagatcaaggtgtacaagcagaaagtgaagcacctgctatatgagcaccagaacaacctgacagagatgaaggctgagggcactgtagtcatgaagctggcacagaaagagcaccgcatacaggagagtgtgctgcgcaaggacatgcgggcactgaaggtggagctcaaggagcaggagctggccagtgaggtggtggtgaagaacctgcggctgaaacacaccgaggagatcaccaggatgcggaatgattttgagaggcaagttcgagaaattgaggccaagtatgataagaagatgaagatgctgagggacgaactcgacttgcggagaaagactgagctccacgaagtggaggagaggaagaatggccagatccacacgctgatgcagcgccacgaggaggccttcaccgacattaagaactactacaacgacatcaccctcaacaacctggccctcatcaactccctcaaggagcagatggaggacatgcggaagaaggaggaccacctggagagggagatggcagaggtgtctgggcagaacaagcgcctggcagaccctctccagaaggctcgggaggagatgagcgagatgcagaaacagctcgcaaactacgagagggacaagcagatcctgctttgcacaaaagcccgtttgaaagtcagggagaaagagctgaaagacctgcagtgggagcatgaagtgttagagcagcgattcaccaaggtgcagcaggagcgggacgagctctatcggaagttcaccgcagccatccaggaggtgcagcagaagacagggttcaagaacctcgtgctagaacgcaagctgcaggctctgagcgccgctgtggagaagaaggaggtgcagttcaacgaggtcctggctgcctctaacctggaccctgcagccctgacgctggtgtcccgcaagctggaggatgttcttgagtcgaagaacagcaccatcaaggacctgcagtatgagctggcccaggtctgtaaggcccataacgacctgctgcgcacgtatgaggcaaagctgctggccttcgggatccctctggacaacgtgggcttcaagcccttggaaacagctgtgatcggacagacgctgggccagggccccgcgggactggtgggcaccccgacgtagctgcccccctggggggccacagcccagagaaccagcctaggaacactcgggatgacaccccttatcacaccaaggacagcaagttttttagattttatcatcagcaaatgaaagcttttcacatgttcttgccatcctctttcctggctctgtggaggagaaccacctgcaggaccctcacccatggtgtccctgtcgctcccttccctgggtgccgcacgtccagcctgtgtccaggcctactccctggtctcacctccgaccacagtcggcggcaccttctcagagtgccccgcactcacctgggggttggggcagtgccgcgctgtgctgcctgtcttcgcgccactgttgtcccaccgaatggacagctttgcaggtgctggcactaacttcattgacacctgagtcacagctgcccagtgggattctccagggggccgggacttccctaggaagtggtgagccaatgctccctgatgagcacaaagcccgctctgttgagggctgggtgggtgcagccagcgtgcgggaacgggcaggcagcctcccgctgccagtcttcgctctaactccctcggtaggtgatgtaggaccaggggcacgtggaacttctgggccttgctggtgatggttaaaacaacctgagatggagaggccaggagagagtataaggggatagcagcaaaccacctatctggccccaacacacctgagagaattcagcagcccagactgagggtctgggatggggtgaaccttccgcaccagagggacactccacagaagccacagcccagtaagtcaggcgcttctgcggcggctccagtgtggggtgaggcagtgaggttaggcccagagagctggagttggctcagatgaaaacctctgtcaacaaagaggggatgaatcacccttggcccagcctccccacaaagcctgaccctgggcaggtgagtgacgggtgtgtcctcgtagagtctattgctgcctggacacctttcttttgggagctcaaagcaagtgagctcacctacctgccaccgcccaggaccagtctgcccactgcctaaatgatgcccggccagcaggacctggcctgcagatcccagtgagtcatgagcctcagccccctccagcccactggggctctcacctccacatgtgggtagaagctttcctgccccctcttcctccagtagccctcagtgtcgaaggtgagcttgtaggtgcctgccttcatctggtccaggacagtgaccatctgggtctgtgtagctggggagaggatgaggctgcagagatggggaccagaagccccccaccccagctttcctgggtctgcatcccagtgggcctcagacactgccctgccacctgtcagacttgggtgagcagacacagtgaggctgttaggtcctgcagttccagagcagtctagggacaccactgccctgtctttaggaaatcacaacacagagaagcaaaaagggaaaaagtctcccacaatttatcccatgagcaagaaccactttatagctggcatatatttttccagattttctctatgcataagtatatttgtttaaaaacttataaagtggattatactatttgtattgttttataacctgtggttttcacttaaaatattgtgtatggctgg

SEQ ID NO: 18931 - DNA, 3161 bp, Homo sapiens
agcggccgcgcccgctggcgtcctcttgttctcttccaggtgaagttgagtcctccctctttcttccttgcctttcgccggccacacgccccgttgccgtgcatgggcccctgctcagtgcctcacctgacccactgcacctggccaggtggaggagcatgtcagccgcatccgggaggagctggaccgcgagcgggaggaacgaaactacttccagctggagcgggacaagatccacaccttctgggagatcacacggaggcagctggaggagaagaaggctgagctgcggaacaaagaccgggagatggaagaagccgaggagaggcaccaggtggagatcaaggtgtacaagcagaaagtgaagcacctgctatatgagcaccagaacaacctgacagagatgaaggctgagggcactgtagtcatgaagctggcacagaaagagcaccgcatacaggagagtgtgctgcgcaaggacatgcgggcactgaaggtggagctcaaggagcaggagctggccagtgaggtggtggtgaagaacctgcggctgaaacacaccgaggagatcaccaggatgcggaatgattttgagaggcaagttcgagaaattgaggccaagtatgataagaagatgaagatgctgagggacgaactcgacttgcggagaaagactgagctccacgaagtggaggagaggaagaatggccagatccacacgctgatgcagcgccacgaggaggccttcaccgacattaagaactactacaacgacatcaccctcaacaacctggccctcatcaactccctcaaggagcagatggaggacatgcggaagaaggaggaccacctggagagggagatggcagaggtgtctgggcagaacaagcgcctggcagaccctctccagaaggctcgggaggagatgagcgagatgcagaaacagctcgcaaactacgagagggacaagcagatcctgctttgcacaaaagcccgtttgaaagtcagggagaaagagctgaaagacctgcagtgggagcatgaagtgttagagcagcgattcaccaaggtgcagcaggagcgggacgagctctatcggaagttcaccgcagccatccaggaggtgcagcagaagacagggttcaagaacctcgtgctagaacgcaagctgcaggctctgagcgccgctgtggagaagaaggaggtgcagttcaacgaggtcctggctgcctctaacctggaccctgcagccctgacgctggtgtcccgcaagctggaggatgttcttgagtcgaagaacagcaccatcaaggacctgcagtatgagctggcccaggtctgtaaggcccataacgacctgctgcgcacgtatgaggcaaagctgctggccttcgggatccctctggacaacgtgggcttcaagcccttggaaacagctgtgatcggacagacgctgggccagggccccgcgggactggtgggcaccccgacgtagctgcccccctggggggccacagcccagagaaccagcctaggaacactcgggatgacaccccttatcacaccaaggacagcaagttttttagattttatcatcagcaaatgaaagcttttcacatgttcttgccatcctctttcctggctctgtggaggagaaccacctgcaggaccctcacccatggtgtccctgtcgctcccttccctgggtgccgcacgtccagcctgtgtccaggcctactccctggtctcacctccgaccacagtcggcggcaccttctcagagtgccccgcactcacctgggggttggggcagtgccgcgctgtgctgcctgtcttcgcgccactgttgtcccaccgaatggacagctttgcaggtgctggcactaacttcattgacacctgagtcacagctgcccagtgggattctccagggggccgggacttccctaggaagtggtgagccaatgctccctgatgagcacaaagcccgctctgttgagggctgggtgggtgcagccagcgtgcgggaacgggcaggcagcctcccgctgccagtcttcgctctaactccctcggtaggtgatgtaggaccaggggcacgtggaacttctgggccttgctggtgatggttaaaacaacctgagatggagaggccaggagagagtataaggggatagcagcaaaccacctatctggccccaacacacctgagagaattcagcagcccagactgagggtctgggatggggtgaaccttccgcaccagagggacactccacagaagccacagcccagtaagtcaggcgcttctgcggcggctccagtgtggggtgaggcagtgaggttaggcccagagagctggagttggctcagatgaaaacctctgtcaacaaagaggggatgaatcacccttggcccagcctccccacaaagcctgaccctgggcaggtgagtgacgggtgtgtcctcgtagagtctattgctgcctggacacctttcttttgggagctcaaagcaagtgagctcacctacctgccaccgcccaggaccagtctgcccactgcctaaatgatgcccggccagcaggacctggcctgcagatcccagtgagtcatgagcctcagccccctccagcccactggggctctcacctccacatgtgggtagaagctttcctgccccctcttcctccagtagccctcagtgtcgaaggtgagcttgtaggtgcctgccttcatctggtccaggacagtgaccatctgggtctgtgtagctggggagaggatgaggctgcagagatggggaccagaagccccccaccccagctttcctgggtctgcatcccagtgggcctcagacactgccctgccacctgtcagacttgggtgagcagacacagtgaggctgttaggtcctgcagttccagagcagtctagggacaccactgccctgtctttaggaaatcacaacacagagaagcaaaaagggaaaaagtctcccacaatttatcccatgagcaagaaccactttatagctggcatatatttttccagattttctctatgcataagtatatttgtttaaaaacttataaagtggattatactatttgtattgttttataacctgtggttttcacttaaaatattgtgtatggctgg

SEQ ID NO: 18932 - DNA, 2784 bp, Homo sapiens
ttgccctcaccgtagtgcagagggggaagtaatgaagtgtgttctggtttgtaaaagctcagatggaaccgcagtgagggccgtgatgtggctggagtggataggtgtcatagtcactgcctgcgacaggtggataggtgtcatcgtcactgcatgctggcagtgacaggattttctacagtagacaacggcccttggtggaatcttgaacaaagtatagtccttcagtctgcatggaagctgcattcccagaaaactcagaataagttgaagctgcagaaatactgtttatacatagaagacgtctaggtgccagcatgcctgaggctggcagcagctggtgatgggcaggagagcacccagctctcaccatgcaggccacagcccctttggttctgcctgctgagcccctgccgggcctgtgcttgtgcctgcaggagcagatggaggacatgcggaagaaggaggaccacctggagagggagatggcagaggtgtctgggcagaacaagcgcctggcagaccctctccagaaggctcgggaggagatgagcgagatgcagaaacagctcgcaaactacgagagggacaagcagatcctgctttgcacaaaagcccgtttgaaagtcagggagaaagagctgaaagacctgcagtgggagcatgaagtgttagagcagcgattcaccaaggtgcagcaggagcgggacgagctctatcggaagttcaccgcagccatccaggaggtgcagcagaagacagggttcaagaacctcgtgctagaacgcaagctgcaggctctgagcgccgctgtggagaagaaggaggtgcagttcaacgaggtcctggctgcctctaacctggaccctgcagccctgacgctggtgtcccgcaagctggaggatgttcttgagtcgaagaacagcaccatcaaggacctgcagtatgagctggcccaggtctgtaaggcccataacgacctgctgcgcacgtatgaggcaaagctgctggccttcgggatccctctggacaacgtgggcttcaagcccttggaaacagctgtgatcggacagacgctgggccagggccccgcgggactggtgggcaccccgacgtagctgcccccctggggggccacagcccagagaaccagcctaggaacactcgggatgacaccccttatcacaccaaggacagcaagttttttagattttatcatcagcaaatgaaagcttttcacatgttcttgccatcctctttcctggctctgtggaggagaaccacctgcaggaccctcacccatggtgtccctgtcgctcccttccctgggtgccgcacgtccagcctgtgtccaggcctactccctggtctcacctccgaccacagtcggcggcaccttctcagagtgccccgcactcacctgggggttggggcagtgccgcgctgtgctgcctgtcttcgcgccactgttgtcccaccgaatggacagctttgcaggtgctggcactaacttcattgacacctgagtcacagctgcccagtgggattctccagggggccgggacttccctaggaagtggtgagccaatgctccctgatgagcacaaagcccgctctgttgagggctgggtgggtgcagccagcgtgcgggaacgggcaggcagcctcccgctgccagtcttcgctctaactccctcggtaggtgatgtaggaccaggggcacgtggaacttctgggccttgctggtgatggttaaaacaacctgagatggagaggccaggagagagtataaggggatagcagcaaaccacctatctggccccaacacacctgagagaattcagcagcccagactgagggtctgggatggggtgaaccttccgcaccagagggacactccacagaagccacagcccagtaagtcaggcgcttctgcggcggctccagtgtggggtgaggcagtgaggttaggcccagagagctggagttggctcagatgaaaacctctgtcaacaaagaggggatgaatcacccttggcccagcctccccacaaagcctgaccctgggcaggtgagtgacgggtgtgtcctcgtagagtctattgctgcctggacacctttcttttgggagctcaaagcaagtgagctcacctacctgccaccgcccaggaccagtctgcccactgcctaaatgatgcccggccagcaggacctggcctgcagatcccagtgagtcatgagcctcagccccctccagcccactggggctctcacctccacatgtgggtagaagctttcctgccccctcttcctccagtagccctcagtgtcgaaggtgagcttgtaggtgcctgccttcatctggtccaggacagtgaccatctgggtctgtgtagctggggagaggatgaggctgcagagatggggaccagaagccccccaccccagctttcctgggtctgcatcccagtgggcctcagacactgccctgccacctgtcagacttgggtgagcagacacagtgaggctgttaggtcctgcagttccagagcagtctagggacaccactgccctgtctttaggaaatcacaacacagagaagcaaaaagggaaaaagtctcccacaatttatcccatgagcaagaaccactttatagctggcatatatttttccagattttctctatgcataagtatatttgtttaaaaacttataaagtggattatactatttgtattgttttataacctgtggttttcacttaaaatattgtgtatggctgg

SEQ ID NO: 18933 - DNA, 2255 bp, Homo sapiens
gcgcaggcagtgtggacaacacactgaccccggtgctgtgggagtgggcactgttgggaggcagcgtgttccaggcaggtgcagaggtgggaggcagcatcttcccagcgagatgtccccaggtgaggggcctcatcgcccacccccagcgctgtccctacaggtgcagcaggagcgggacgagctctatcggaagttcaccgcagccatccaggaggtgcagcagaagacagggttcaagaacctcgtgctagaacgcaagctgcaggctctgagcgccgctgtggagaagaaggaggtgcagttcaacgaggtcctggctgcctctaacctggaccctgcagccctgacgctggtgtcccgcaagctggaggatgttcttgagtcgaagaacagcaccatcaaggacctgcagtatgagctggcccaggtctgtaaggcccataacgacctgctgcgcacgtatgaggcaaagctgctggccttcgggatccctctggacaacgtgggcttcaagcccttggaaacagctgtgatcggacagacgctgggccagggccccgcgggactggtgggcaccccgacgtagctgcccccctggggggccacagcccagagaaccagcctaggaacactcgggatgacaccccttatcacaccaaggacagcaagttttttagattttatcatcagcaaatgaaagcttttcacatgttcttgccatcctctttcctggctctgtggaggagaaccacctgcaggaccctcacccatggtgtccctgtcgctcccttccctgggtgccgcacgtccagcctgtgtccaggcctactccctggtctcacctccgaccacagtcggcggcaccttctcagagtgccccgcactcacctgggggttggggcagtgccgcgctgtgctgcctgtcttcgcgccactgttgtcccaccgaatggacagctttgcaggtgctggcactaacttcattgacacctgagtcacagctgcccagtgggattctccagggggccgggacttccctaggaagtggtgagccaatgctccctgatgagcacaaagcccgctctgttgagggctgggtgggtgcagccagcgtgcgggaacgggcaggcagcctcccgctgccagtcttcgctctaactccctcggtaggtgatgtaggaccaggggcacgtggaacttctgggccttgctggtgatggttaaaacaacctgagatggagaggccaggagagagtataaggggatagcagcaaaccacctatctggccccaacacacctgagagaattcagcagcccagactgagggtctgggatggggtgaaccttccgcaccagagggacactccacagaagccacagcccagtaagtcaggcgcttctgcggcggctccagtgtggggtgaggcagtgaggttaggcccagagagctggagttggctcagatgaaaacctctgtcaacaaagaggggatgaatcacccttggcccagcctccccacaaagcctgaccctgggcaggtgagtgacgggtgtgtcctcgtagagtctattgctgcctggacacctttcttttgggagctcaaagcaagtgagctcacctacctgccaccgcccaggaccagtctgcccactgcctaaatgatgcccggccagcaggacctggcctgcagatcccagtgagtcatgagcctcagccccctccagcccactggggctctcacctccacatgtgggtagaagctttcctgccccctcttcctccagtagccctcagtgtcgaaggtgagcttgtaggtgcctgccttcatctggtccaggacagtgaccatctgggtctgtgtagctggggagaggatgaggctgcagagatggggaccagaagccccccaccccagctttcctgggtctgcatcccagtgggcctcagacactgccctgccacctgtcagacttgggtgagcagacacagtgaggctgttaggtcctgcagttccagagcagtctagggacaccactgccctgtctttaggaaatcacaacacagagaagcaaaaagggaaaaagtctcccacaatttatcccatgagcaagaaccactttatagctggcatatatttttccagattttctctatgcataagtatatttgtttaaaaacttataaagtggattatactatttgtattgttttataacctgtggttttcacttaaaatattgtgtatggctgg

SEQ ID NO: 18934 - DNA, 2700 bp, Homo sapiens
ggagtctcgcgaggatcttgtgacttatcgcggcatcgcccagcggttgccgggaaacggcgtggcttccgggggcgggcgccctggtcccggagtcgccgctgggcctgtccgctggcgtcatggcaccgaaaaagaaagggaagaaaggcaaagccaaaggcaccccgattgtcgatgggctcgctccagaggacatgagcaaggagcaggccaggtggaggagcatgtcagccgcatccgggaggagctggaccgcgagcgggaggaacgaaactacttccagctggagcgggacaagatccacaccttctgggagatcacacggaggcagctggaggagaagaaggctgagctgcggaacaaagaccgggagatggaagaagccgaggagaggcaccaggtggagatcaaggtgtacaagcagaaagtgaagcacctgctatatgagcaccagaacaacctgacagagatgaaggctgagggcactgtagtcatgaagctggcacagaaagagcaccgcatacaggagagtgtgctgcgcaaggacatgcgggcactgaaggtggagctcaaggagcaggagctggccagtgaggtggtggtgaagaacctgcggctgaaacacaccgaggagatcaccaggatgcggaatgattttgagaggcaagttcgagaaattgaggccaagtatgataagaagatgaagatgctgagggacgaactcgacttgcggagaaagactgagctccacgaagtggaggagaggaagaatggccagatccacacgctgatgcagcgccacgaggaggccttcaccgacattaagaactactacaacgacatcaccctcaacaacctggccctcatcaactccctcaaggagcagatggaggacatgcggaagaaggaggaccacctggagagggagatggcagaggtgtctgggcagaacaagcgcctggcagaccctctccagaaggctcgggaggagatgagcgagatgcagaaacagctcgcaaactacgagagggacaagcagatcctgctttgcacaaaagcccgtttgaaagtcagggagaaagagctgaaagacctgcagtgggagcatgaagtgttagagcagcgattcaccaaggtgcagcaggagcgggacgagctctatcggaagttcaccgcagccatccaggaggtgcagcagaagacagggttcaagaacctcgtgctagaacgcaagctgcaggctctgagcgccgctgtggagaagaaggaggtgcagttcaacgaggtcctggctgcctctaacctggaccctgcagccctgacgctggtgtcccgcaagctggaggatgttcttgagtcgaagaacagcaccatcaaggacctgcagtatgagctggcccaggtctgtaaggcccataacgacctgctgcgcacgtatgaggcaaagctgctggccttcgggatccctctggacaacgtgggcttcaagcccttggaaacagctgtgatcggacagacactgggccagggccccgcgggactggtgggcaccccgacgtagctgcccccctggggggccacagcccagagaaccagcctaggaacactcgggatgacaccccttatcacaccaaggacagcaagttttttagattttatcatcagcaaatgaaagcttttcacatgttcttgccatcctctttcctggctctgtggaggagaaccacctgcaggaccctcacccatggtgtccctgtcgctcccttccctgggtgccgcacgtccagcctgtgtccaggcctactccctggtctcacctccgaccacagtcggcggcaccttctcagagtgccccgcactcacctgggggttggggcagtgccgcgctgtgctgcctgtcttcgcgccactgttgtcccaccgaatggacagctttgcaggtgctggcactaacttcattgacacctgagtcacagctgcccagtgggattctccagggggccgggacttccctaggaagtggtgagccaatgctccctgatgagcacaaagcccgctctgttgagggctgggtgggtgcagccagcgtgcgggaacgggcaggcagcctcccgctgccagtcttcgctctaactccctcggtaggtgatgtaggaccaggggcacgtggaacttctgggccttgctggtgatggttaaaacaacctgagatggagaggccaggagagagtataaggggatagcagcaaaccacctatctggccccaacacacctgagagaattcagcagcccagactgagggtctgggatggggtgaaccttccgcaccagagggacactccacagaagccacagcccagtaagtcaggcgcttctgcggcggctccagtgtggggtgaggcagtgaggttaggcccagagagctggagttggctcagatgaaaacctctgtcaacaaagaggggatgaatcacccttggcccagcctccccacaaagcctgaccctgggcaggtgagtgacgggtgtgtcctcgtagagtctattgctgcctggacacctttcttttgggagctcaaagcaagtgagctcacctacctgccaccgcccaggaccagtctgcccactgcctaaatgatgcccggccagcaggacctggcctgcagatcccagtgagtcatgagcctcagccccctc

SEQ ID NO: 18935 - DNA, 810 bp, Homo sapiens
agcggccgcgcccgctggcgtcctcttgttctcttccaggcaccgaaaaagaaagggaagaaaggcaaagccaaaggcaccccgattgtcgatgggctcgctccagaggacatgagcaaggagcaggtgaagttgagtcctccctctttcttccttgcctttcgccggccacacgccccgttgccgtgcatgggcccctgctcagtgcctcacctgacccactgcacctggccaggtggaggagcatgtcagccgcatccgggaggagctggaccgcgagcgggaggaacgaaactacttccagctggagcgggacaagatccacaccttctgggagatcacacggaggcagctggaggagaagaaggctgagctgcggaacaaagaccgggagatggaagaagccgaggagaggcaccaggtggagatcaaggtgtacaagcagaaagtgaagcacctgctatatgagcaccagaacaacctgacagagatgaaggctgagggcactgtagtcatgaagctggcacagaaagagcaccgcatacaggagagtgtgctgcgcaaggacatgcgggcactgaaggtggagctcaaggagcaggagctggccagtgaggtggtggtgaagaacctgcggctgaaacacaccgaggagatcaccaggatgcggaatgattttgagaggcaagttcgagaaattgaggccaagtatgataaaagaagacagttatctcatatttggctgccagctttttatctctctctcgaccacttaaacttcagacttctgtcctgctggtatcatggaga

SEQ ID NO: 18936 - DNA, 1445 bp, Homo sapiens
gatctctcagaacgcccactggagtccccaggccgctcccgttgcctcggccaaaagatgagtctcaaactcccatcacctctctctcctcaggatgttcttgagtcgaagaacagcaccatcaaggacctgcagtatgagctggcccaggtctgtaaggcccataacgacctgctgcgcacgtatgaggcaaagctgctggccttcgggatccctctggacaacgtgggcttcaagcccttggaaacagctgtgatcggacagacactgggccagggccccgcgggactggtgggcaccccgacgtagctgcccccctggggggccacagcccagagaaccagcctaggaacactcgggatgacaccccttatcacaccaaggacagcaagttttttagattttatcatcagcaaatgaaagcttttcacatgttcttgccatcctctttcctggctctgtggaggagaaccacctgcaggaccctcacccatggtgtccctgtcgctcccttccctgggtgccgcacgtccagcctgtgtccaggcctactccctggtctcacctccgaccacagtcggcggcaccttctcagagtgccccgcactcacctgggggttggggcagtgccgcgctgtgctgcctgtcttcgcgccactgttgtcccaccgaatggacagctttgcaggtgctggcactaacttcattgacacctgagtcacagctgcccagtgggattctccagggggccgggacttccctaggaagtggtgagccaatgctccctgatgagcacaaagcccgctctgttgagggctgggtgggtgcagccagcgtgcgggaacgggcaggcagcctcccgctgccagtcttcgctctaactccctcggtaggtgatgtaggaccaggggcacgtggaacttctgggccttgctggtgatggttaaaacaacctgagatggagaggccaggagagagtataaggggatagcagcaaaccacctatctggccccaacacacctgagagaattcagcagcccagactgagggtctgggatggggtgaaccttccgcaccagagggacactccacagaagccacagcccagtaagtcaggcgcttctgcggcggctccagtgtggggtgaggcagtgaggttaggcccagagagctggagttggctcagatgaaaacctctgtcaacaaagaggggatgaatcacccttggcccagcctccccacaaagcctgaccctgggcaggtgagtgacgggtgtgtcctcgtagagtctattgctgcctggacacctttcttttgggagctcaaagcaagtgagctcacctacctgccaccgcccaggaccagtctgcccactgcctaaatgatgcccggccagcaggacctggcctgcagatcccagtgagtcatgagcctcagccccctc

SEQ ID NO: 18937 - DNA, 987 bp, Homo sapiens
gctctctctctctctctctctctctctctctctctcctgagtgtgagcatcagcagaaaaactcagtctaaacccctttgttcttctcttgcagagcttttgcctgcaaggctgttctgaccacagtgggcgttttgggcccgtttacaggctccatgttctgtagccgtaggggcaccacgtcttcctctgctaagctgctgtttgctgctgcctttcagaaattgaggccaagtatgataagaagatgaagatgctgagggacgaactcgacttgcggagaaagactgagctccacgaagtggaggagaggaagaatggccagatccacacgctgatgcagcgccacgaggaggccttcaccgacattaagaactactacaacgacatcaccctcaacaacctggccctcatcaactccctcaaggagcagatggaggacatgcggaagaaggaggaccacctggagagggagatggcagaggtgtctgggcagaacaagcgcctggcagaccctctccagaaggctcgggaggagatgagcgagatgcagaaacagctcgcaaactacgagagggacaagcagatcctgctttgcacaaaagcccgtttgaaagtcagggagaaagagctgaaagacctgcagtgggagcatgaagtgttagagcagcgattcaccaaggtgagtggcaccacgctggccctgcagttggcggtgggtgttagagcaacggttcaccaagttcaccaaggtgagcgggcactaggctggccctgcagtggggatggcacccctgctagccagggacggggctctccttgtggcccctggaccagcttcagatgccttggccaggtttctgggttctgaagctggaggccctgttccctgtaactcattccgcagcttctaagaggcaaaaacctgtggcctgttctgcatgcatattctgcagaaggcctggggtcttgatggggaacggatca

SEQ ID NO: 18938 - DNA, 3144 bp, Homo sapiens
agcggccgcgcccgctggcgtcctcttgttctcttccaggcaccgaaaaagaaagggaagaaaggcaaagccaaaggcaccccgattgtcgatgggctcgctccagaggacatgagcaaggagcaggccaggtggaggagcatgtcagccgcatccgggaggagctggaccgcgagcgggaggaacgaaactacttccagctggagcgggacaagatccacaccttctgggagatcacacggaggcagctggaggagaagaaggctgagctgcggaacaaagaccgggagatggaagaagccgaggagaggcaccaggtggagatcaaggtgtacaagcagaaagtgaagcacctgctatatgagcaccagaacaacctgacagagatgaaggctgagggcactgtagtcatgaagctggcacagaaagagcaccgcatacaggagagtgtgctgcgcaaggacatgcgggcactgaaggtggagctcaaggagcaggagctggccagtgaggtggtggtgaagaacctgcggctgaaacacaccgaggagatcaccaggatgcggaatgattttgagaggcaagttcgagaaattgaggccaagtatgataagaagatgaagatgctgagggacgaactcgacttgcggagaaagactgagctccacgaagtggaggagaggaagaatggccagatccacacgctgatgcagcgccacgaggaggccttcaccgacattaagaactactacaacgacatcaccctcaacaacctggccctcatcaactccctcaaggagcagatggaggacatgcggaagaaggaggaccacctggagagggagatggcagaggtgtctgggcagaacaagcgcctggcagaccctctccagaaggctcgggaggagatgagcgagatgcagaaacagctcgcaaactacgagagggacaagcagatcctgctttgcacaaaagcccgtttgaaagtcagggagaaagagctgaaagacctgcagtgggagcatgaagtgttagagcagcgattcaccaaggtgcagcaggagcgggacgagctctatcggaagttcaccgcagccatccaggaggtgcagcagaagacagggttcaagaacctcgtgctagaacgcaagctgcaggctctgagcgccgctgtggagaagaaggaggtgcagttcaacgaggtcctggctgcctctaacctggaccctgcagccctgacgctggtgtcccgcaagctggaggatgttcttgagtcgaagaacagcaccatcaaggacctgcagtatgagctggcccaggtctgtaaggcccataacgacctgctgcgcacgtatgaggcaaagctgctggccttcgggatccctctggacaacgtgggcttcaagcccttggaaacagctgtgatcggacagacgctgggccagggccccgcgggactggtgggcaccccgacgtagctgcccccctggggggccacagcccagagaaccagcctaggaacactcgggatgacaccccttatcacaccaaggacagcaagttttttagattttatcatcagcaaatgaaagcttttcacatgttcttgccatcctctttcctggctctgtggaggagaaccacctgcaggaccctcacccatggtgtccctgtcgctcccttccctgggtgccgcacgtccagcctgtgtccaggcctactccctggtctcacctccgaccacagtcggcggcaccttctcagagtgccccgcactcacctgggggttggggcagtgccgcgctgtgctgcctgtcttcgcgccactgttgtcccaccgaatggacagctttgcaggtgctggcactaacttcattgacacctgagtcacagctgcccagtgggattctccagggggccgggacttccctaggaagtggtgagccaatgctccctgatgagcacaaagcccgctctgttgagggctgggtgggtgcagccagcgtgcgggaacgggcaggcagcctcccgctgccagtcttcgctctaactccctcggtaggtgatgtaggaccaggggcacgtggaacttctgggccttgctggtgatggttaaaacaacctgagatggagaggccaggagagagtataaggggatagcagcaaaccacctatctggccccaacacacctgagagaattcagcagcccagactgagggtctgggatggggtgaaccttccgcaccagagggacactccacagaagccacagcccagtaagtcaggcgcttctgcggcggctccagtgtggggtgaggcagtgaggttaggcccagagagctggagttggctcagatgaaaacctctgtcaacaaagaggggatgaatcacccttggcccagcctccccacaaagcctgaccctgggcaggtgagtgacgggtgtgtcctcgtagagtctattgctgcctggacacctttcttttgggagctcaaagcaagtgagctcacctacctgccaccgcccaggaccagtctgcccactgcctaaatgatgcccggccagcaggacctggcctgcagatcccagtgagtcatgagcctcagccccctccagcccactggggctctcacctccacatgtgggtagaagctttcctgccccctcttcctccagtagccctcagtgtcgaaggtgagcttgtaggtgcctgccttcatctggtccaggacagtgaccatctgggtctgtgtagctggggagaggatgaggctgcagagatggggaccagaagccccccaccccagctttcctgggtctgcatcccagtgggcctcagacactgccctgccacctgtcagacttgggtgagcagacacagtgaggctgttaggtcctgcagttccagagcagtctagggacaccactgccctgtctttaggaaatcacaacacagagaagcaaaaagggaaaaagtctcccacaatttatcccatgagcaagaaccactttatagctggcatatatttttccagattttctctatgcataagtatatttgtttaaaaacttataaagtggattatactatttgtattgttttataacctgtggttttcacttaaaatattgtgtatggctgg

SEQ ID NO: 18939 - DNA, 3248 bp, Homo sapiens
agcggccgcgcccgctggcgtcctcttgttctcttccaggcaccgaaaaagaaagggaagaaaggcaaagccaaaggcaccccgattgtcgatgggctcgctccagaggacatgagcaaggagcaggtgaagttgagtcctccctctttcttccttgcctttcgccggccacacgccccgttgccgtgcatgggcccctgctcagtgcctcacctgacccactgcacctggccaggtggaggagcatgtcagccgcatccgggaggagctggaccgcgagcgggaggaacgaaactacttccagctggagcgggacaagatccacaccttctgggagatcacacggaggcagctggaggagaagaaggctgagctgcggaacaaagaccgggagatggaagaagccgaggagaggcaccaggtggagatcaaggtgtacaagcagaaagtgaagcacctgctatatgagcaccagaacaacctgacagagatgaaggctgagggcactgtagtcatgaagctggcacagaaagagcaccgcatacaggagagtgtgctgcgcaaggacatgcgggcactgaaggtggagctcaaggagcaggagctggccagtgaggtggtggtgaagaacctgcggctgaaacacaccgaggagatcaccaggatgcggaatgattttgagaggcaagttcgagaaattgaggccaagtatgataagaagatgaagatgctgagggacgaactcgacttgcggagaaagactgagctccacgaagtggaggagaggaagaatggccagatccacacgctgatgcagcgccacgaggaggccttcaccgacattaagaactactacaacgacatcaccctcaacaacctggccctcatcaactccctcaaggagcagatggaggacatgcggaagaaggaggaccacctggagagggagatggcagaggtgtctgggcagaacaagcgcctggcagaccctctccagaaggctcgggaggagatgagcgagatgcagaaacagctcgcaaactacgagagggacaagcagatcctgctttgcacaaaagcccgtttgaaagtcagggagaaagagctgaaagacctgcagtgggagcatgaagtgttagagcagcgattcaccaaggtgcagcaggagcgggacgagctctatcggaagttcaccgcagccatccaggaggtgcagcagaagacagggttcaagaacctcgtgctagaacgcaagctgcaggctctgagcgccgctgtggagaagaaggaggtgcagttcaacgaggtcctggctgcctctaacctggaccctgcagccctgacgctggtgtcccgcaagctggaggatgttcttgagtcgaagaacagcaccatcaaggacctgcagtatgagctggcccaggtctgtaaggcccataacgacctgctgcgcacgtatgaggcaaagctgctggccttcgggatccctctggacaacgtgggcttcaagcccttggaaacagctgtgatcggacagacgctgggccagggccccgcgggactggtgggcaccccgacgtagctgcccccctggggggccacagcccagagaaccagcctaggaacactcgggatgacaccccttatcacaccaaggacagcaagttttttagattttatcatcagcaaatgaaagcttttcacatgttcttgccatcctctttcctggctctgtggaggagaaccacctgcaggaccctcacccatggtgtccctgtcgctcccttccctgggtgccgcacgtccagcctgtgtccaggcctactccctggtctcacctccgaccacagtcggcggcaccttctcagagtgccccgcactcacctgggggttggggcagtgccgcgctgtgctgcctgtcttcgcgccactgttgtcccaccgaatggacagctttgcaggtgctggcactaacttcattgacacctgagtcacagctgcccagtgggattctccagggggccgggacttccctaggaagtggtgagccaatgctccctgatgagcacaaagcccgctctgttgagggctgggtgggtgcagccagcgtgcgggaacgggcaggcagcctcccgctgccagtcttcgctctaactccctcggtaggtgatgtaggaccaggggcacgtggaacttctgggccttgctggtgatggttaaaacaacctgagatggagaggccaggagagagtataaggggatagcagcaaaccacctatctggccccaacacacctgagagaattcagcagcccagactgagggtctgggatggggtgaaccttccgcaccagagggacactccacagaagccacagcccagtaagtcaggcgcttctgcggcggctccagtgtggggtgaggcagtgaggttaggcccagagagctggagttggctcagatgaaaacctctgtcaacaaagaggggatgaatcacccttggcccagcctccccacaaagcctgaccctgggcaggtgagtgacgggtgtgtcctcgtagagtctattgctgcctggacacctttcttttgggagctcaaagcaagtgagctcacctacctgccaccgcccaggaccagtctgcccactgcctaaatgatgcccggccagcaggacctggcctgcagatcccagtgagtcatgagcctcagccccctccagcccactggggctctcacctccacatgtgggtagaagctttcctgccccctcttcctccagtagccctcagtgtcgaaggtgagcttgtaggtgcctgccttcatctggtccaggacagtgaccatctgggtctgtgtagctggggagaggatgaggctgcagagatggggaccagaagccccccaccccagctttcctgggtctgcatcccagtgggcctcagacactgccctgccacctgtcagacttgggtgagcagacacagtgaggctgttaggtcctgcagttccagagcagtctagggacaccactgccctgtctttaggaaatcacaacacagagaagcaaaaagggaaaaagtctcccacaatttatcccatgagcaagaaccactttatagctggcatatatttttccagattttctctatgcataagtatatttgtttaaaaacttataaagtggattatactatttgtattgttttataacctgtggttttcacttaaaatattgtgtatggctgg

SEQ ID NO: 18940 - DNA, 2705 bp, Homo sapiens
cccccgccccatcagagaggaatttacctccagagcttgttaactcagggagcaaaaactggattaaaacagccaaggcatgcaagagaaagaacatggaagtttccaaggccagtggacccactcagaatcccagaacaacctatttccataaattgaggccaagtatgataagaagatgaagatgctgagggacgaactcgacttgcggagaaagactgagctccacgaagtggaggagaggaagaatggccagatccacacgctgatgcagcgccacgaggaggccttcaccgacattaagaactactacaacgacatcaccctcaacaacctggccctcatcaactccctcaaggagcagatggaggacatgcggaagaaggaggaccacctggagagggagatggcagaggtgtctgggcagaacaagcgcctggcagaccctctccagaaggctcgggaggagatgagcgagatgcagaaacagctcgcaaactacgagagggacaagcagatcctgctttgcacaaaagcccgtttgaaagtcagggagaaagagctgaaagacctgcagtgggagcatgaagtgttagagcagcgattcaccaaggtgcagcaggagcgggacgagctctatcggaagttcaccgcagccatccaggaggtgcagcagaagacagggttcaagaacctcgtgctagaacgcaagctgcaggctctgagcgccgctgtggagaagaaggaggtgcagttcaacgaggtcctggctgcctctaacctggaccctgcagccctgacgctggtgtcccgcaagctggaggatgttcttgagtcgaagaacagcaccatcaaggacctgcagtatgagctggcccaggtctgtaaggcccataacgacctgctgcgcacgtatgaggcaaagctgctggccttcgggatccctctggacaacgtgggcttcaagcccttggaaacagctgtgatcggacagacgctgggccagggccccgcgggactggtgggcaccccgacgtagctgcccccctggggggccacagcccagagaaccagcctaggaacactcgggatgacaccccttatcacaccaaggacagcaagttttttagattttatcatcagcaaatgaaagcttttcacatgttcttgccatcctctttcctggctctgtggaggagaaccacctgcaggaccctcacccatggtgtccctgtcgctcccttccctgggtgccgcacgtccagcctgtgtccaggcctactccctggtctcacctccgaccacagtcggcggcaccttctcagagtgccccgcactcacctgggggttggggcagtgccgcgctgtgctgcctgtcttcgcgccactgttgtcccaccgaatggacagctttgcaggtgctggcactaacttcattgacacctgagtcacagctgcccagtgggattctccagggggccgggacttccctaggaagtggtgagccaatgctccctgatgagcacaaagcccgctctgttgagggctgggtgggtgcagccagcgtgcgggaacgggcaggcagcctcccgctgccagtcttcgctctaactccctcggtaggtgatgtaggaccaggggcacgtggaacttctgggccttgctggtgatggttaaaacaacctgagatggagaggccaggagagagtataaggggatagcagcaaaccacctatctggccccaacacacctgagagaattcagcagcccagactgagggtctgggatggggtgaaccttccgcaccagagggacactccacagaagccacagcccagtaagtcaggcgcttctgcggcggctccagtgtggggtgaggcagtgaggttaggcccagagagctggagttggctcagatgaaaacctctgtcaacaaagaggggatgaatcacccttggcccagcctccccacaaagcctgaccctgggcaggtgagtgacgggtgtgtcctcgtagagtctattgctgcctggacacctttcttttgggagctcaaagcaagtgagctcacctacctgccaccgcccaggaccagtctgcccactgcctaaatgatgcccggccagcaggacctggcctgcagatcccagtgagtcatgagcctcagccccctccagcccactggggctctcacctccacatgtgggtagaagctttcctgccccctcttcctccagtagccctcagtgtcgaaggtgagcttgtaggtgcctgccttcatctggtccaggacagtgaccatctgggtctgtgtagctggggagaggatgaggctgcagagatggggaccagaagccccccaccccagctttcctgggtctgcatcccagtgggcctcagacactgccctgccacctgtcagacttgggtgagcagacacagtgaggctgttaggtcctgcagttccagagcagtctagggacaccactgccctgtctttaggaaatcacaacacagagaagcaaaaagggaaaaagtctcccacaatttatcccatgagcaagaaccactttatagctggcatatatttttccagattttctctatgcataagtatatttgtttaaaaacttataaagtggattatactatttgtattgttttataacctgtggttttcacttaaaatattgtgtatggctgg

SEQ ID NO: 18941 - DNA, 1886 bp, Homo sapiens
agctgcactcagctctggtggtcctgagcgtggggaccctcagctccctgacactgccctgtctccacaggcccataacgacctgctgcgcacgtatgaggcaaagctgctggccttcgggatccctctggacaacgtgggcttcaagcccttggaaacagctgtgatcggacagacgctgggccagggccccgcgggactggtgggcaccccgacgtagctgcccccctggggggccacagcccagagaaccagcctaggaacactcgggatgacaccccttatcacaccaaggacagcaagttttttagattttatcatcagcaaatgaaagcttttcacatgttcttgccatcctctttcctggctctgtggaggagaaccacctgcaggaccctcacccatggtgtccctgtcgctcccttccctgggtgccgcacgtccagcctgtgtccaggcctactccctggtctcacctccgaccacagtcggcggcaccttctcagagtgccccgcactcacctgggggttggggcagtgccgcgctgtgctgcctgtcttcgcgccactgttgtcccaccgaatggacagctttgcaggtgctggcactaacttcattgacacctgagtcacagctgcccagtgggattctccagggggccgggacttccctaggaagtggtgagccaatgctccctgatgagcacaaagcccgctctgttgagggctgggtgggtgcagccagcgtgcgggaacgggcaggcagcctcccgctgccagtcttcgctctaactccctcggtaggtgatgtaggaccaggggcacgtggaacttctgggccttgctggtgatggttaaaacaacctgagatggagaggccaggagagagtataaggggatagcagcaaaccacctatctggccccaacacacctgagagaattcagcagcccagactgagggtctgggatggggtgaaccttccgcaccagagggacactccacagaagccacagcccagtaagtcaggcgcttctgcggcggctccagtgtggggtgaggcagtgaggttaggcccagagagctggagttggctcagatgaaaacctctgtcaacaaagaggggatgaatcacccttggcccagcctccccacaaagcctgaccctgggcaggtgagtgacgggtgtgtcctcgtagagtctattgctgcctggacacctttcttttgggagctcaaagcaagtgagctcacctacctgccaccgcccaggaccagtctgcccactgcctaaatgatgcccggccagcaggacctggcctgcagatcccagtgagtcatgagcctcagccccctccagcccactggggctctcacctccacatgtgggtagaagctttcctgccccctcttcctccagtagccctcagtgtcgaaggtgagcttgtaggtgcctgccttcatctggtccaggacagtgaccatctgggtctgtgtagctggggagaggatgaggctgcagagatggggaccagaagccccccaccccagctttcctgggtctgcatcccagtgggcctcagacactgccctgccacctgtcagacttgggtgagcagacacagtgaggctgttaggtcctgcagttccagagcagtctagggacaccactgccctgtctttaggaaatcacaacacagagaagcaaaaagggaaaaagtctcccacaatttatcccatgagcaagaaccactttatagctggcatatatttttccagattttctctatgcataagtatatttgtttaaaaacttataaagtggattatactatttgtattgttttataacctgtggttttcacttaaaatattgtgtatggctgg

SEQ ID NO: 18942 - DNA, 1443 bp, Homo sapiens
ggagtctcgcgaggatcttgtgacttatcgcggcatcgcccagcggttgccgggaaacggcgtggcttccgggggcgggcgccctggtcccggagtcgccgctgggcctgtccgctggcgtcatggcaccgaaaaagaaagggaagaaaggcaaagccaaaggcaccccgattgtcgatgggctcgctccagaggacatgagcaaggagcaggccaggtggaggagcatgtcagccgcatccgggaggagctggaccgcgagcgggaggaacgaaactacttccagctggagcgggacaagatccacaccttctgggagatcacacggaggcagctggaggagaagaaggctgagctgcggaacaaagaccgggagatggaagaagccgaggagaggcaccaggtggagatcaaggtgtacaagcagaaagtgaagcacctgctatatgagcaccagaacaacctgacagagatgaaggctgagggcactgtagtcatgaagctggcacagaaagagcaccgcatacaggagagtgtgctgcgcaaggacatgcgggcactgaaggtggagctcaaggagcaggagctggccagtgaggtggtggtgaagaacctgcggctgaaacacaccgaggagatcaccaggatgcggaatgattttgagaggcaagttcgagaaattgaggccaagtatgataagaagatgaagatgctgagggacgaactcgacttgcggagaaagactgagctccacgaagtggaggagaggaagaatggccagatccacacgctgatgcagcgccacgaggaggccttcaccgacattaagaactactacaacgacatcaccctcaacaacctggccctcatcaactccctcaaggagcagatggaggacatgcggaagaaggaggaccacctggagagggagatggcagaggtgtctgggcagaacaagcgcctggcagaccctctccagaaggctcgggaggagatgagcgagatgcagaaacagctcgcaaactacgagagggacaagcagatcctgctttgcacaaaagcccgtttgaaagtcagggagaaagagctgaaagacctgcagtgggagcatgaagtgttagagcagcgattcaccaaggtgagtggcaccacgctggccctgcagttggcggtgggtgttagagcaacggttcaccaagttcaccaaggtgagcgggcactaggctggccctgcagtggggatggcacccctgctagccagggacggggctctccttgtggcccctggaccagcttcagatgccttggccaggtttctgggttctgaagctggaggccctgttccctgtaactcattccgcagcttctaagaggcaaaaacctgtggcctgttctgcatgcatattctgcagaaggcctggggtcttgatggggaacggatca

SEQ ID NO: 18943 - DNA, 1944 bp, Homo sapiens
ggccagcatctgcctccactgctctgtgctgggatcatggaacttgcactgctgtgtgggctggtggtgatggctggtgtgattccaatccagggcgggatcctgaacctgaacaagatggtcaagcaagtgactgggaaaatgcccatcctctcctactggccctacggctgtcactgcggactaggtggcagaggccaacccaaagatgccacggactggtgctgccagacccatgactgctgctatgaccacctgaagacccaggggtgcagcatctacaaggactattacagatacaacttttcccaggggaacatccactgctctgacaagggaagctggtgtgagcagcagctgtgtgcctgtgacaaggaggtggccttctgcctgaagcgcaacctggacacctaccagaagcgactgcgtttctactggcggccccactgccgggggcagacccctgggtgctagaagcccacaccctctaccctgttcctcagcatggagctctggcatccccacctcagtatctaacctgaaccagcctggcttttcaaacactccggggggaggtagtcccagcctcccccggaaccctctaccaatgccttctgaccttctgaagctttccgaatcctcccagttgaggcagtagctgtgtcctctgagggtggatgggaatcttgggagaagcccaagcaagggagccctcagaggtggtgtttggaccaaagcatcggggtgggggaggggtctgccgctgtcccccacctgctggcccccttgtccttcctcaccccctccaatatagtctcggagctacaaccgcagcagccactataaagggcaatattgatctttctgtccatgtggctctatcttttaaaacctcaaggccctccactgtcctaagataaagcctctcataggcactggggaccctgcacagtctggccatgtgaccctctccccaggcaagctctgaagtccctgcaggtggaggccatgcctgtcttaaactcagttgcatccctggtgcccaaagcaacaccagaaccaagaaggagctccataaatccttcttgggtgaagcctagacaaagccgccaggtcttgtggctccaggcaccagagccttgagtactttctcctgcctccaggcattggctcagggtgaattacaaggggctactgaatggctattactttcatcacgactgatccccacctcctcagggtcaaagggctactttctggaagtctccccaggctgactccttctccctgactgcaagggctcactccctcctccaagctcccacaatgcttcatggctctgccgcttacctagcttggcctagagtggcaaatggaacttctctgatctcccccaactagactggagcccccgaaggatggagaccatgtctgtgccatctctgtttcccctgttttcccacatactaggtgctcaattcatgcctgtgaatggcgtgagcccataatggatacacagaggttgcagcagatggtgtgggtacctcacccagatatcatccaggcccaaggcccctctccctgagtgaggccaggtgttggcagccaactgctccaatctgcctccttcccctaaatactgccctggtctagtgggagctgccttccccctgccccacctctcccaccaagaggccacctgtcactcatggccaggagagtgacaccatggagggtacaattgccagctcccccgtgtctgtgcaggattgtctgggttgaatgacactctcaaattgttcctgggatcgggctgaggccaggcctctcctggaaccacctctctgcttggtctgaccccttggcctatccagttttcctggttccctcacaggtttctccagaaagtactccctcagtaaagcatttgcacaagaaaacttg

SEQ ID NO: 18944 - DNA, 857 bp, Homo sapiens
ggccagcatctgcctccactgctctgtgctgggatcatggaacttgcactgctgtgtgggctggtggtgatggctggtgtgattccaatccagggcgggatcctgaacctgaacaagatggtcaagcaagtgactgggaaaatgcccatcctctcctactggccctacggctgtcactgcggactaggtggcagaggccaacccaaagatgccacggactggtgctgccagacccatgactgctgctatgaccacctgaagacccaggggtgcagcatctacaaggactattacagatacaacttttcccaggggaacatccactgctctgacaagggaagctggtgtgagcagcagctgtgtgcctgtgacaaggaggtggccttctgcctgaagcgcaacctggacacctaccagaagcgactgcgtttctactggcggccccactgccgggggcagacccctgggtgctagaagcccacaccctctaccctgttcctcagcatggagctctggcatccccacctcagtatctaacctgaaccagcctggcttttcaaacactccggggggaggtagtcccagcctcccccggaaccctctaccaatgccttctgaccttctgaagctttccgaatcctcccagttgaggcagtagctgtgtcctctgagggtggatgggaatcttgggagaagcccaagcaagggagccctcagaggtggtgtttggaccaaagcatcggggtgggggaggggtctgccgctgtcccccacctgctggcccccttgtccttcctcaccccctccaatatagtctcggagctacaaccgcagcagccactataaagggcaatatt

SEQ ID NO: 18945 - DNA, 593 bp, Homo sapiens
ggccagcatctgcctccactgctctgtgctgggatcatggaacttgcactgctgtgtgggctggtggtgatggctggtgtgattccaatccagggcgggatcctgaacctgaacaagatggtcaagcaagtgactgggaaaatgcccatcctctcctactggccctacggctgtcactgcggactaggtggcagaggccaacccaaagatgccacggactggtgctgccagacccatgactgctgctatgaccacctgaagacccaggggtgcagcatctacaaggactattacagatacaacttttcccaggggaacatccactgctctctcccaccaagaggccacctgtcactcatggccaggagagtgacaccatggagggtacaattgccagctcccccgtgtctgtgcaggattgtctgggttgaatgacactctcaaattgttcctgggatcgggctgaggccaggcctctcctggaaccacctctctgcttggtctgaccccttggcctatccagttttcctggttccctcacaggtttctccagaaagtactccctcagtaaagcatttgcacaagaaaacttg

SEQ ID NO: 18946 - DNA, 482 bp, Homo sapiens
gatgtccaggcatccaaatggcaggagttctctggatctgacctcaaaagctaggcctgaaatgaatacattgtgggtctctctggggttggaaccaaaacctcatttttttttttgttttattctttttattttcttacaaagaagagtttgtaaaacaaaaggcaatctgaaatctggctgttggtccaagaattaacaagcaatctgttgtgctaatgacatcgactgttgaatagatttccaaagaaaatgacccatggggagtaggatgaggttaattcacagaaagccggcttccttgggattgtctgcatttcttctgaaggaaaatgtctgaaagatgctggtcttccctcaaagtctttcattcccacagacagccctgccagttcctgggctcccacaggagccaaactgctgtggaggaagaggtgaattgagatacggagaaagggaagaagaaaatctcggaaaagtgt

SEQ ID NO: 18947 - DNA, 271 bp, Homo sapiens
gtcttccatatgaaattcttctctgagcattaaaatgttaatactgatttgctctttaaggaaagatttctgaaggaagcattaatttggtcaattcctgtccctaccaatgacttgcattcctttctaccctaagagggtctctgtagtcgttcagcacttttcagttatcggcagtaacaacaatgagagctaccgtttatttattgtctgctaggcactttgcacgcagtatctcatttattaatagagaactctaggaaacaagtgc

SEQ ID NO: 18948 - DNA, 432 bp, Homo sapiens
cttagactacaaagaattatttggcttttaagagtcatggtttttagtccagggaagtgacttgatgtggtttatatggcaaaaggagcatagtccgtgagactgtagactattgttatgaagatcacatgttcacagagtgctggcttttgttgtgttatcattaatgctatttcatagaatgaatttattttcctcattgccaacagaaatgagataccttgctatctggcagaaaaataaccgtgcgactattgaagttacatgctctgtgaataaaatctaacaacataaaaaccataccaaacattattttggtattaatagctctgtgatatcatactagaaattggggctaggcatggtggctcgcacctgtactcccagcacttttgtgaggttaaggtgggaagattgcttgaggccagaagg

SEQ ID NO: 18949 - DNA, 445 bp, Homo sapiens
tccatcttcaccgatgccagcggtatgctcgggcaaaccaccaaagcgctggttaatttatgggaatttaacccatcattggctctcaacaataaccaaaggagatcatagcatttcattgaagccagaaagctgaaacagcaagtctgtgtggttaacgaaccttgtttaacagtggaggctcacgtgtttgaacatttactgccaactagagttttgccccttttgcaagtctgctgccagcttcctaccactcacaggcgcgctgcttcaagactcttggggtttttgtaagaaacttgaaatggcaaatcacaagataggtttcaataaccaggattattctttacgttaagttatatgtatgtgatctgtaagttggatctttcatgatgaatttgaactaaggcaaaaataaaattcctctcctctaaggactcatgca

SEQ ID NO: 18950 - DNA, 447 bp, Homo sapiens
cccttagtccctgcacccaggcgtttaaggatacagtgagctatgatggtgctacctcactccagcctgggtgacagcgagtcagacgttgtctcaaaacttaaaaaaaaaaaaaaagttaaaacagaaaaagggcttcttgtcagagactgccgtatatctagaggtccaggaactaaaaagtctgatgtccaatcctgaaaagctcgatggtgcactagaggaggcttttacatgtaagagcatctaagttctggaaatgccagtgtcagggaagggaagtggagagcaatttggcatccaaacataacttgctgatacttttttttttttaacacaagtactacattctagtctttctgtggtgtcattgtaactattgtttcttaatatgctatccactgacttcaagggatcaataaataggaatcaaggtgtcccagaaaa

SEQ ID NO: 18951 - DNA, 445 bp, Homo sapiens
aacatcaaataaaatcaaatcgggctacaattcaacaagcttcagagtattaggccttccactgagtggccagggggcttctagaaccagaggcattcaaacagccctaaattatcaaggaacataactatagacacaacagagactcaaaactatggcaataccatgaactccatgctcataaatattcatttattaagtaaatacatatttatcaaacatatctaagtatataaaataaatatgtccttgtattttttgttaattacatgaaacaagttcttagcaaaatatatcatcaaattgactaaaaaagaaagaaaacacctaaataatgcagtcactactaaaattgaatcagtagctaaaacttctcagaaagaaaacctcatgtccaatagttttatcaacttcaaccagactttcaattaacaaataatagaaa

SEQ ID NO: 18952 - DNA, 375 bp, Homo sapiens
tgagaatgaaaaagacaaataatgtcttagtttataatacaaacagttttgacttcagaccaaactcctcatgagacccactgggttaacacaatgcctggcagatagtaagtaatcaatatttgatagcataaaaaataacagtatacgtaattgataatacgtgtaaatctaggtgaaaaacaatagagaaaattaaataaataacacaatttatctttttttttcttttaattatgctcagaaagactagaaaacatccaaaatgataatggtacttacatataggtagtttgactaaagtgatttttccttcttactatctttctgtattttgaaaatttgctataataaacagatagtattttcaaaagg

SEQ ID NO: 18953 - DNA, 618 bp, Homo sapiens
tgagaatgaaaaagacaaataatgtcttagtttataatacaaacagttttgacttcagaccaaactcctcatgagacccactgggttaacacaatgcctggcagatagtaagtaatcaatatttgatagcataaaaaataacagtatacgtaattgataatacgtgtaaatctaggtgaaaaacaatagagaaaattaaataaataacacaatttatctttttttttcttttaattatgctcagaaagactagaaaacatccaaaatgataatggtacttacatataggtagtttgactaaagtgatttttccttcttactatctttctgtattttgaaaatttgctataataaacagatagtattttcaaaaggataaaaagcctaaattccagttttctggcctacgtcatacgaccacacatcccataatctgccccttctgctccaacacctgctctgctgaatatgcctaaaggaaaattacacaacacacatttggttcctccacacattctccatctcccaggcctcatgtaccctggaaatctcgtttccttactaaactttctcttccattagccctaagtggctacatcaaagcttctcctaactctt

SEQ ID NO: 18954 - DNA, 305 bp, Homo sapiens
acatgattagtagtgaattcagcttgctttctaagtgagtaactagcaaagtctttctatttagctagctgctaaatggaaaatgggtgagttttgttaaagtaataatgcaggaagctggggaaagtcctataccggttgttaagagcagatataggctgagtgcaatggctcatgcttgtaatcccaatattttgggaggctcatgcgggaggattgcttgaccccaggagtttgaggctgtagtgagctgtgatggagtcactgcactctagcctgggcaacagagtgagaccctgtctccc

SEQ ID NO: 18955 - DNA, 382 bp, Homo sapiens
aaatactatgaatatgttgaataaatcaatagaatttcaaaatcacatttaagcaagctgaattttatacattaatatgtgcatcctcatagtaaagtacataaagaatcatatttattttcttttttgttacaatgaaacctctcaattgaggcattaattacctgattcagttaatacaggttaaatatattttttacttacacctcttatcttttctactgctttgtttttgtggttggcaactggaagttagcaacttctttgtcaagaaattcaccctcagggggccatcttgggtgatagtcattgataaatatattttattgtatatttatattaggtcaaatttatatatggaaatatgaaattttataaaata

SEQ ID NO: 18956 - DNA, 336 bp, Homo sapiens
ccgggtcacaccgtccagcccagccgcctcggcccacctcaggatcacaccgtccagcccagccgcctcggcccacctgcgggtcacaccgcgaaacacgtctcctaacgggactgttgtgtcacgtcacagcggtggagaacgctgggggaggcaggaagggccgtggaagaaaaaataatccaaggccaggcagacccgaaccgcacgccggagagacacggggagaggagacgcggagccatgttaaaccagaattattcaaccagtgcaatgtgtccaaagagtcgtcttgattaaaaatactacatgagcttttttcttaacaatgacata

SEQ ID NO: 18957 - DNA, 1621 bp, Homo sapiens
cctgatacttcctacactagataatggaacttcaacattagcctattgattgcccaagaacaaacatttttttctaaatgtcaggtgttatggggaggattgatgctgacagcagaggtctagttaaaaactgatgcagaggttcaaatacgttgtgcagtaatcactagaactcaccttctaaagtgtcatgagagctctgattctgcaattagagattttttaatgtgtttttgaaattaccttgtaaaccacaaatctgtgtctctgcattgccccttattgtttcctaccacaaattctacatcaagaagaaagttttaaagttagactggatttatttgtgattttatggagcacaataaggtacattgagatagcatactaaaggaggccaaatacaggaagcatcatcttttcttattctcttactgcctggattttcccactgacctggaattgtgcacagttctacaaaggacaattgacattgttttccttttactaagtagtgggttttccttaaggtccagactgaattttgagacctgtaccaggattgccttctgtgtgactttttcttgcaggatctgacatcattacctatgggtccatatatttgtgatactttggtttcgggaacatcacttttagaatgttgacataaaatgcacccacagaatgccgtatttatcaaaagtaactttctagcaaaatctacagcagtaggcatttggaatctgcatttgagacctctgcagtcatttggtcattccagcaatctatgtccaggttgtcaatttcagaggtcttattagtctatacaggtaccaatgagctttcagatgttcaacacctacccctggcctaactgctgataaccaaccataacccttgcagatgcatgcatgttttctgcaccttgctatcatttttcagtccatttttcacatgtatacatagtgattatttttaaatgcaaccctgatttcacatgcctcatgttgaaatatcgtgtggcttattgtggacttaaagtgtaacattctccttatggtatgtaaggacttttgtacaaaccaatgcctatctatctatcatttctgaaaactttttcctcctatgcaatattttctggcctctgtgaacaacttgtagttccttgagatttctattatcacttatgtttttgcaaatctgcaattgaaatgcccttgttccttgttaatgcctattgaatctatatgaacctgtacgtgtgtttctcactgtgataatataatcattgcatgttttatctttcccactagaaagcttctagaaagctaggactatcttttttgtctgtgtaatttttgcatcacaagctatatttaaatgtgggtgcagtgagtggctgttttctgccacatggagaaacatggtctgcagtgagagagaagaatgaagccatgatgaaagcaaaatcaagaaagagtcccgattgtgttccagtacctggttcttctggtcttcatgttcaggtccacctctgcccttttcatgtcttgattgttgaattcttctgtgagatactccaaatatcctaataaattctcatgtttgcttcaactggctcaag

SEQ ID NO: 18958 - DNA, 391 bp, Homo sapiens
tgatagttgttgttttagtaggcagtctatctggttgggttcagaccccaagtttcaacctggctgctatggcctataattccaatgaatgtcacttctgtttattatatgctgaattggacagatctacatgttctctacttgggctggggccaggagttcataaaccagtttatgggcttgctctcctgagttcttcatctctgtgatctccctagtactttctggttccctgaggcttcccttttctgttctctcaccagaaacttagaacagttacccctttctgatgtatacttgcatatctaggtccaagcagcaggaaaacagaaaaagacagagtgagaattggtctcatcctcttagaactactgctctaccaaaagagagg

SEQ ID NO: 18959 - DNA, 275 bp, Homo sapiens
ctactcaggaggctgagacaggaggaagaccacttgagcccaggagttctaggctgtagtgtattatgccggtcggttgcctgcactaagttggacattaatatggtgacctcttgggagccagggttaccactaggctgcctaaggagagatgagctggcctagtttggaaatggaacaagttaaaactcctgtgttgatcaatagtgggatagtgcctggaaatagccactgtgctacaagcctgggcaaggtagtgaggccccatctcttaa

SEQ ID NO: 18960 - DNA, 342 bp, Homo sapiens
  misc_feature (101)..(101): n is a, c, g, or t
tgggcgtgggtgatgtgcgcctgtaggccagctacttgggaggctgaagcaggaggttgcagtgagctgagatcacaccactgcactccagcctgggcgancagagcgagactccatttcaaaaaaaaaaaaaaaaaaaaagtattttttgccaagcttcattatttacctattacgtgtgggaaaagaaatgcacctttgaagatggtgtgtatgtgtagatttgggaatattaagctacactttctgggaacttgggaaccagaatattctgcagtgttggagtggaacagctaggaaatgacaagggtggataaacaatgtttggcttctcttaagtaa

SEQ ID NO: 18961 - DNA, 456 bp, Homo sapiens
ccctccctctggggattgaaggctctgggtgtggctggctctctttctcactcagcagggaacccaagtcgccagccgaagagagcccgaggcaggtagctgcagttcccctccaagacttctccacacctgtttgaccaggtacaagatcaggcgccggggtcatctgttcactaggccacggggtcaggacaagagtcacccgcagctctgaggccagatggtaattccaatcgcctccccagttcagcagcgaacccagcaagacgaagataattttcgaaacattcaggctcgggagtagacgtcgcaatggagtgctgtcctcgcggctttggagccacggggcatggccaaggtaaatggaatctgacagctaaacttaggctcaggcctcacgtgcagtgtctgtgagtagaaagggtcacagggccggatttcaaattcaaacactac

SEQ ID NO: 18962 - DNA, 188 bp, Homo sapiens
agagtatcttggttattctcagccccttgtattttcagttctcatatttctaattgaaagcatgtaaatttgtcactcctgcagtttctaattgtcttgctgaaattttcaatttcttatctgcttcaaaatgaaaagcataattattttctagtctgtctaataattccagaatcaaaacccgcctg

SEQ ID NO: 18963 - DNA, 532 bp, Homo sapiens
agccatcatcatcataggagacgacagctctgtgccggttattctagaacaagccatcgtcatcataggagacgacaactctgtgcctgttattctagaacaagccatcgtcatcataggagacgacagctctgtgcctgttattctagaacaagccatcgtcgtcgtaggagacgacagctctgtgccggttattctagaacaagccgtcgtcgtcgtaggagacgacagctctgtgccggttattctagaacaagccgtcgtcgtcgtaggagacgacagctctgtgccggttattctagaacaagccgtcgtcgtcgtaggagacgacagctatgtgccggttattctagaacaagccgtcgtcgtcgtaggagacgacagctctgtgccggttattccacctgaagaccttgcagtgggacaggatgcggacgtggaagacagcgacactgatggtcctgaccctgtgcgggtttaggctaatgtgtgtttgtgtcttagtttttaaccaaaaagtttaaaaagttaa

SEQ ID NO: 18964 - DNA, 499 bp, Homo sapiens
aatctgtacagtactttgaataggggaatttgcacataaaatatatgtaaactcttaatagtatgtgtcatggttaattttatgtgtcaacttgactgagtcagtgggtgtctgcatatttggtcaaacattattctgactgtatctgtgagggtgtttctggggccaagataacatttgaatcagtattctgtggaaagcaggttgtccttccttatgtgagtgggccttagccaattgattacagacctgaacagaacaaaaagctgagtaagaggaactttgcctgcctggtccttgagctggagcattgatcatctcctgccttcagactggaacttacactgtctgctctcctggttctcaagccttcaaactcaatctggaactacactgataggtctcctgagatccagcttgccaacctcagatcctgagacttcttagcctttgtaatcatgtgagcctataataaatctctttttctctataaatatat

SEQ ID NO: 18965 - DNA, 885 bp, Homo sapiens
  misc_feature (731)..(731): n is a, c, g, or t
  misc_feature (733)..(733): n is a, c, g, or t
  misc_feature (737)..(737): n is a, c, g, or t
  misc_feature (741)..(742): n is a, c, g, or t
  misc_feature (749)..(750): n is a, c, g, or t
  misc_feature (752)..(752): n is a, c, g, or t
  misc_feature (758)..(759): n is a, c, g, or t
  misc_feature (761)..(761): n is a, c, g, or t
  misc_feature (763)..(763): n is a, c, g, or t
  misc_feature (786)..(786): n is a, c, g, or t
ggcaccgtactggcgggggtctggggagcgcagcagccatggcaagccgtctcctgctcaacaacggcgccaagatgcccatcctggggttgggtacctggaagtcccctccagggcaggtgactgaggccgtgaaggtggccattgacgtcgggtaccgccacatcgactgtgcccatgtgtaccagaatgagaatgaggtgggggtggccattcaggagaagctcagggagcaggtggtgaagcgtgaggagctcttcatcgtcagcaagctgtggtgcacgtaccatgagaagggcctggtgaaaggagcctgccagaagacactcagcgacctgaagctggactacctggacctctaccttattcactggccgactggctttaagcctgggaaggaatttttcccattggatgagtcgggcaatgtggttcccagtgacaccaacattctggacacgtgggcggccatggaagagctggtggatgaagggctggtgaaagctattggcatctccaacttcaaccatctccaggtggagatgatcttaaacaaacctggcttgaagtataagcctgcagttaaccagattgagtgccacccatatctcactcaggagaagttaatccagtactgccagtccaaaggcatcgtggtgaccgcctacagccccctcggctctcctgacaggccctgggcaagccggggaccttctctcctggggatccangntcangggnncgggcanncnataaannangncaggcgtccggtccaggagaatnggggtcccagtggcccacagtgggaccaggttgtgaggcggaacctacacaagggggggggggacaagccaaagagggcccgcacgtcaaataggaaaa

SEQ ID NO: 18966 - DNA, 857 bp, Homo sapiens
ggcaccgtactggcgggggtctggggagcgcagcagccatggcaagccgtctcctgctcaacaacggcgccaagatgcccatcctggggttgggtacctggaagtcccctccagggcaggtgactgaggccgtgaaggtggccattgacgtcgggtaccgccacatcgactgtgcccatgtgtaccagaatgagaatgaggtgggggtggccattcaggagaagctcagggagcaggtggtgaagcgtgaggagctcttcatcgtcagcaagctgtggtgcacgtaccatgagaagggcctggtgaaaggagcctgccagaagacactcagcgacctgaagctggactacctggacctctaccttattcactggccgactggctttaagcctgggaaggaatttttcccattggatgagtcgggcaatgtggttcccagtgacaccaacattctggacacgtgggcggtaagacagcccctggttggaccttgttttcgtgactggttccctcttcttcttagaagcaatctgcctgccatttctcacattgcattttgttattctgtccctgttgtttgctctctctttttttttttttgagttggggtctccctctgttgcccaggctggagtgcagtggcacaatctcggctcactgcaagctccacctcctgggttcacgccattctcctgcctcagcctcctgagtagctgggactacaggtgcccgccaccacgcccggctaatttttttgtatttttagtagagacggggtttcaccgtgttagccaggatggtcttgatctcctgacctcgtgatccgcccgcctcagcctcccaaagtgctgggatta

SEQ ID NO: 18967 - DNA, 1350 bp, Homo sapiens
ggcaccgtactggcgggggtctggggagcgcagcagccatggcaagccgtctcctgctcaacaacggcgccacatcgactgtgcccatgtgtaccagaatgagaatgaggtgggggtggccattcaggagaagctcagggagcaggtggtgaagcgtgaggagctcttcatcgtcagcaagctgtggtgcacgtaccatgagaagggcctggtgaaaggagcctgccagaagacactcagcgacctgaagctggactacctggacctctaccttattcactggccgactggctttaagcctgggaaggaatttttcccattggatgagtcgggcaatgtggttcccagtgacaccaacattctggacacgtgggcggccatggaagagctggtggatgaagggctggtgaaagctattggcatctccaacttcaaccatctccaggtggagatgatcttaaacaaacctggcttgaagtataagcctgcagttaaccagattgagtgccacccatatctcactcaggagaagttaatccagtactgccagtccaaaggcatcgtggtgaccgcctacagccccctcggctctcctgacaggccctgggccaagcccgaggacccttctctcctggaggatcccaggatcaaggcgatcgcagccaagcacaaaactcaggtcctgatccggttccccatgcagaggaacttggtggtgatccccaagtctgtgacaccagaacgcattgctgagaactttaaggtctttgactttgaactgagcagccaggatatgaccaccttactcagctacaacaggaactggagggtctgtgccttgttgagctgtacctcccaaaggattaccccttccatgaagagttttgaagctgtggttgcctgctcgtccccaagtgacctatacctgtgtttcttgcctcatttttttccttgcaaatgtagtatggcctgtgtcactcagcagtgggacagcaacctgtagagtggccagcgagggcgtgtctagcttgatgttggatctcaagagccctgtcagtagagtagaagtctcttccagtttgctttgcccttctttctaccctgctggggaaagtacaacctgaatacccttttctgaccaaagagaagcaaaatctaccaggtcaaaatagtgccactaacggttgagttttgactgcttggaactggaatcctttcagcaagacttctctttgcctcaaataaaaagtgcttttgggggaaaaaagagcaggtttatgatgcggcgcaattgatctattgccaattgcccttttggggcggatatcattaatggcgggttttaaacgg

SEQ ID NO: 18968 - DNA, 634 bp, Homo sapiens
ggcaccgtactggcgggggtctggggagcgcagcagccatggcaagccgtctcctgctcaacaacggcgccaagatgcccatcctggggttgggtacctggaagtcccctccagggcaggtgactgaggccgtgaaggtggccattgacgtcgggtaccgccacatcgactgtgcccatgtgtaccagaatgagaatgaggtgggggtggccattcaggagaagctcagggagcaggtggtgaagcgtgaggagctcttcatcgtcagcaagctgtggtgcacgtaccatgagaagggcctggtgaaaggagcctgccagaagacactcagcgacctgaagctggactacctggacctctaccttattcactggccgactggctttaagcctgggaaggaatttttcccattggatgagtcgggcaatgtggttcccagtgacaccaacattctggacacgtgggcggccatggaagagctggttggtttgcttggggtctagtgagttagatttagggcacttgggaactcgatcctgctctgatactaaagtaatcgagtttttacaaagacgactgggcactagtgtcctggcaagcactagtgtcctgccaagcactagtgtcctgccaa

SEQ ID NO: 18969 - DNA, 967 bp, Homo sapiens
  misc_feature (732)..(732): n is a, c, g, or t
ggcaccgtactggcgggggtctggggagcgcagcagccatggcaagccgtctcctgctcaacaacggcgccaagatgcccatcctggggttgggtacctggaagtcccctccagggcaggtgactgaggccgtgaaggtggccattgacgtcgggtaccgccacatcgactgtgcccatgtgtaccagaatgagaatgaggtgggggtggccattcaggagaagctcagggagcaggtggtgaagcgtgaggagctcttcatcgtcagcaagctgtggtgcacgtaccatgagaagggcctggtgaaaggagcctgccagaagacactcagcgacctgaagctggactacctggacctctaccttattcactggccgactggctttaagcctgggaaggaatttttcccattggatgagtcgggcaatgtggttcccagtgacaccaacattctggacacgtgggcggccatggaagagctggtggatgaagggctggtgaaagctattggcatctccaacttcaaccatctccaggtggagatgatcttaaacaaacctggcttgaagtataagcctgcagttaaccagattgagtgccacccatatctcactcaggagaagttaatccagtactgccagtccaaaggcatcgtggtgaccgcctacagccccctcggctctcctgacaggccctggcaagcccgaggacccttctcctggaggatccagntcaaggatcgcagcagcgaacataaaataacggccagtcctgatcggtccccagcaaagaattgggggtgttcccaagttggacacagaaggctggtgaactcagtcttggttgactggcgcaggttgacacttatcgtaaaaaatgaggttgcctgtggggacccacagtactccgaattgactgtgcgccccaagcaaggttgccttccaagaaggttccagggacactgggg

SEQ ID NO: 18970 - DNA, 1402 bp, Homo sapiens
ggcaccgtactggcgggggtctggggagcgcagcagccatggcaagccgtctcctgctcaacaacggcgccaagatgcccatcctggggttgggtacctggaagtcccctccagggcaggtgactgaggccgtgaaggtggccattgacgtcgggtaccgccacatcgactgtgcccatgtgtaccagaatgagaatgaggtgggggtggccattcaggagaagctcagggagcaggtggtgaagcgtgaggagctcttcatcgtcagcaagctgtggtgcacgtaccatgagaagggcctggtgaaaggagcctgccagaagacactcagcgacctgaagctggactacctggacctctaccttattcactggccgactggctttaagcctgggaaggaatttttcccattggatgagtcgggcaatgtggttcccagtgacaccaacattctggacacgtgggcggccatggaagagctggtggatgaagggctggtgaaagctattggcatctccaacttcaaccatctccaggtggagatgatcttaaacaaacctggcttgaagtataagcctgcagttaaccagattgagtgccacccatatctcactcaggagaagttaatccagtactgccagtccaaaggcatcgtggtgaccgcctacagccccctcggctctcctgacaggccctgggccaagcccgaggacccttctctcctggaggatcccaggatcaaggcgatcgcagccaagcacaaaactcagatccccaagtctgtgacaccagaacgcattgctgagaactttaaggtctttgactttgaactgagcagccaggatatgaccaccttactcagctacaacaggaactggagggtctgtgccttgttgagctgtacctcccaaaggattaccccttccatgaagagttttgaagctgtggttgcctgctcgtccccaagtgacctatacctgtgtttcttgcctcatttttttccttgcaaatgtagtatggcctgtgtcactcagcagtgggacagcaacctgtagagtggccagcgagggcgtgtctagcttgatgttggatctcaagagccctgtcagtagagtagaagtctcttccagtttgctttgcccttctttctaccctgctggggaaagtacaacctgaatacccttttctgaccaaagagaagcaaaatctaccaggtcaaaatagtgccactaacggttgagttttgactgcttggaactggaatcctttcagcaagacttctctttgcctcaaataaaaagtgcttttgggggaaaaaagagcaggtttatgatgcggcgcaattgatctattgccaattgcccttttggggcggatatcattaatggcgggttttaaacgg

SEQ ID NO: 18971 - DNA, 938 bp, Homo sapiens
  misc_feature (732)..(732): n is a, c, g, or t
ggcaccgtactggcgggggtctggggagcgcagcagccatggcaagccgtctcctgctcaacaacggcgccaagatgcccatcctggggttgggtacctggaagtcccctccagggcaggtgactgaggccgtgaaggtggccattgacgtcgggtaccgccacatcgactgtgcccatgtgtaccagaatgagaatgaggtgggggtggccattcaggagaagctcagggagcaggtggtgaagcgtgaggagctcttcatcgtcagcaagctgtggtgcacgtaccatgagaagggcctggtgaaaggagcctgccagaagacactcagcgacctgaagctggactacctggacctctaccttattcactggccgactggctttaagcctgggaaggaatttttcccattggatgagtcgggcaatgtggttcccagtgacaccaacattctggacacgtgggcggccatggaagagctggtggatgaagggctggtgaaagctattggcatctccaacttcaaccatctccaggtggagatgatcttaaacaaacctggcttgaagtataagcctgcagttaaccagattgagtgccacccatatctcactcaggagaagttaatccagtactgccagtccaaaggcatcgtggtgaccgcctacagccccctcggctctcctgacaggccctggcaagcccgaggacccttctcctggaggatccagntcaaggatcgcggcctacccattaaactccaggcccggcctgttccggttcccatgcaaagaacttgtgggggtccccaaactttggaccccaaccccttgtggaaatttaagggtttgcctttacccagccccccatttacccccctcttttttcaaaaaacttggggggggggcctttttagctccccccaaggagcccctcct

SEQ ID NO: 18972 - DNA, 350 bp, Homo sapiens
cgcacagcagtctcacacacacacacgcaaccatctcctgcaacttacggtgctcagttctgaggcaaataaatgaagggctactttttttttggaattgtactttatgagatgttaacgtgtaacctgaagaggcagtactggctgacggcacagcttgtgggtgggcaagttgtattggtgggcacaggagtctgtgggccattggggaagccaaaccctttttgagcttgaccttaggctccaggatggccctcctagaacctccccacaccaaaccccatgaaggtccaggtgaatggacagagggactagtgcggtgtctcctgcacacctgggacactgggcca

SEQ ID NO: 18973 - DNA, 379 bp, Homo sapiens
acttgcatatgtgcttacactggccactgaactgcatacacagtcccaagaggtctccctgcaccgcgaggcccatgctagaaaaggcgttcttcaggaacagactgaggcttcatgaagatccttccctccatcgatcactccattaatcctcccctccattcatccctccactcatcccttcatttactccatccatccttcctcccattttcccatccactccatcagcctctccatccatccctccactcatcccttcatttactccatccatccttcctcccatttccccatccactccatcagcctctccatccatccctccactcatccctcaactcacctcttcatccactccatccatccttccacactt

SEQ ID NO: 18974 - DNA, 311 bp, Homo sapiens
gggatgagaggtggagaagtagagataatcgctatcctcaaatgttgtaaagctgcctaacagagatgcaactcaactagtttttcatattctcaaccaggattgatgaggctacaggaagatagatttcaggtcgatcttcacaataatcctgctctaggcgttgtgtcagatcctggagatatattctacagtgactatattctagtggtcctcaaactttgtgttcgtcacagtcacctgcagggcttgttaaaacgcaggttgttggccccactcccagagtttctgtttcaggaggtctagggtag

SEQ ID NO: 18975 - DNA, 258 bp, Homo sapiens
ctctgtctcaaagatagaactctctctgaatgtattatagtagtgaaccctatttttagtagaggcagcgatgtcatcgtattggcgtttcagaaagttgccttaggctgtgatgtggaaaatggatttggggagagcaaaactaaagtcaggaaactgctaagataatccaattcagtggattcagtaatatttaaatattgcattcaaatattcagtgagtatcttctgtatgccagacacttttctaggccctgg

SEQ ID NO: 18976 - DNA, 451 bp, Homo sapiens
gcccagccatttctaaaatggattaaatcccttgttgtcttgttgtcttttgaagcagttcactgagcacgtgactcatgccaccacctattgatgtcttgggattctggagcatcagtaagttcctgggactaactaagactgtggatgcccgtaaggttgttattgactgcggcgggtgtttgtccctctgttattagatagtcccactctgacttgggtgacctgcttttatatctttcatctggtttttaatttttccacctcctcctctgctgccaggctggcctctgctatcaataagcctgcttcgggcagcttcctctccctttttatggaatggactaagaaatctacatggttggggttgtgcgaaaatcaagagcagtgaggtttaggctggagatctggagacattcgttacagaataaaacatatgaaacagtgcacg

SEQ ID NO: 18977 - DNA, 136 bp, Homo sapiens
tgctgcctggccaggagccaagctgccgcctgtcagtcaccccagagtccaggaccaccaccaccgggaaagagactgttggaggtctggctcagagtcgcagggccacagagagcacagtctaccctgcagtaag

SEQ ID NO: 18978 - DNA, 323 bp, Homo sapiens
cttgtttatggctgaatagtatttcattttgtatatacactgcatttaaaataatccagcagggcgtagtggcttatgcctgtaatcccagcactttggaaggccaaagtgggaggatggcttgaccacaggccttcaagaccagcctaggcaacatagcgagatgccatttctgcaaaaaataaattaatcagacatggtggtgcatgcctgtgttcccagctacttggaaagctgaggtgggaggattgcttgagcttctgtggttgaggctgcagtgagctgtgatcatgtcactgcactccagcctgggtgacagagtg

SEQ ID NO: 18979 - DNA, 262 bp, Homo sapiens
gaggtgatggcaatgctaattagtctgatttgatcattatacaatgtgtgtgtgtatatatgtatatgtgtatgtgtaaatatacaccatactgtgttgcataaatatataaaattactacctgtcagttaaaaatcaaacttttttttaaatggtaacttggacattatggctaggttaaaaaaaagactggaaagaaacaaaactaatcactgcagtatttcaagcaagagatatggattcagagtggtaatactggaga

SEQ ID NO: 18980 - DNA, 218 bp, Homo sapiens
gcaatgtgatgtggcacagtggaaaagcaccaggctgagagcagatctgagtttgggtcagccatgaattttctgtgacttaatagacaacatattccacttccagaggcccttattgcttcttctataagatgagaggattagaccaaatcatttctgtgttttttcccactttcaaactcctatcaccttcctttacctgattcctttacaagatt

SEQ ID NO: 18981 - DNA, 277 bp, Homo sapiens
aaaatgccacggactgcagaacagaactgggcctgaaagcatgtctgggccagctgacggaactgtgcacacgattgatatccacagtgcatatcaacaggcagtctttttggagtttgcaaagcgtgtgccgtgcagtgcccgagcctgcctctgcactcgtgtttccaggttgggtggctctgacagccccttcctgtgggtcctgcgtccttgtgtggagtcacgcttgctcggcagctgctcacttcctccggttgttttgccgctcggctct

SEQ ID NO: 18982 - DNA, 374 bp, Homo sapiens
ctgtaggatggtgctgctaaattgctcccaagctgcctagtgacatattttcaaaaaatatctctctccaactttatcaagtgttctttgtgttctggaaacatgattttgagtcccagctggagctgggacctcataagtcttagatagctgaaattcttctccaactatatccagaggcatatggctagttgggatagacgttaattgcagggattaatatctctgagtctagttgtttattgaagactgaaattaacatttttaagctagataaccaagggttgcacaaaccgtgcatagataaagggctaaaaatgtccattttgatgtctttgacattgggctgaataaatatgtcttggattgtaata

SEQ ID NO: 18983 - DNA, 429 bp, Homo sapiens
agagactgactccacacagctttatctcacctcaaggaaatgctaacatacgccatcagccagcacaccattgacagagaagtgaggagcaagtggttcagcagttcagtaaatatggcggtcaacctgaaacactctgcccacttgaggaagacttgactgtcatctgcaccccgcaagacatatgttctgcacattgccttcctgctccttctgcgaccacagggagaggaagcacggctgctgcaagagctgccaaaaggcagggagcaagagctaattccacaacaagagcaagctcacagtcggtgatctcagtgtcagagtcccactctaccctcttgggatcctatgtatctgagctgctctatgtttaatcatcatcatgtcaccatcaaaaatatttattaaaccgctgcatacataaaa

SEQ ID NO: 18984 - DNA, 398 bp, Homo sapiens
cgagacggagtctcgctctgtcgcccaggctggagtgcagtggcgggatctcggctcactgcaagctcctcctcccgggttcacgccattctcctgcctcagcctcccgagtagctgggactacaggcgcccgccactacgcccggctaattttttgtattttttagtagagacggggtttcaccgttttagccgggatggtctcgatctcctgacctcgtgatccgcccgcctcggcctcccaaagtgctgggattacaggcgtgagccaccgcgcccggcctagaatcctgtttttgctatagtttgttggactccttgcggctaatccttgcagctatattagtctctgagggatgctgaattgaatagaacatcagaagatttggagcctgacg

SEQ ID NO: 18985 - DNA, 472 bp, Homo sapiens
agtaatagaaaacaaatacagatactctcccatgatgtttttcccatgatgatttcccatgatatttacaggttttgcccacatttgaggggtatgtggaaattatacagagcatgtacagcgggaggcttatagtgtacgtactgaaatgtggggttggagccccaacacagagaccccagcaggacactgcctagtagagctatgggaagggtgctgccaccctccagacttgagaattgtagagccaccagcagcttgcactctgagcttggaaaagccacaggcactcaacttcaaccatgagggaagccacgcaccctgcaaagccacaggagtggagctgcccacggcctcgagggcccaccccttgcaccagtgtgccaggatgtgggacatggaatcaaggaatatgttagggcttttttttttttttttttgagacggagtcttgctctgttgcccaggctgg

SEQ ID NO: 18986 - DNA, 422 bp, Homo sapiens
tttgttattctttgacattctatatttttattttctttaaaacactaagtcagtagcttcccaaatgttgctctttgagttagaatttttaccatgaagttcatgatgaaatagaaatgttatcaatgtttatacaatttattcacctttaaattatatccatcctttttctgtgttaaaatgccctttttcttatgaagttgtgattctagatagtagatagattttttccttctaatatttggcaaaaaataaaaaaaaaaaaaaaaagttagctggctatggtggtgtgcacctgtagtcccagctacttggtaggctgaggcaggagaatcacttgaacatgggaggcagaggctgcagtgagtcgagatcataccactgcactccagcttgggtgacagtgagtgaaactccatctc

SEQ ID NO: 18987 - DNA, 448 bp, Homo sapiens
ctgctttgaaacacagatttcaacaaatagagattgcccatcaaagatcagacaccttcagaacctgatccaagtgaaggctttgagtgtgagcagtttacttaggaagtgatccaagaatgtggtaggtaggaagggaagtaggacagggtgtagaaggaatacagtaaagggtgaattatttaccataggcaacctaagcttcctctccacggggcactcagggagctagcgtgaagcacacacacctcagaactcctcgctggaggggggttaagggtgttcaagtcagtctttgtctgcagctgttcctagcgtatctggtctgcatgctggcggagcttgctctgagcccagacacagccttaggtgaggaggtgtgggagggcattcagaagttgagctggtgtgccctgaaacagcctagcacaagaaagtcagggtggga

SEQ ID NO: 18988 - DNA, 372 bp, Homo sapiens
accaagaaggagcgcctaagaggcacagaaaaagagagccacagagacagagagatggagaggcagacagacagaggagagccaaggcacaggggaaggggcaggcagaggcaagcacttcctggtgaactgggtcccctgtgtgattggctgctcctagagaacagtttccctggctcagttgctgtgcaactgcttcctgcaattaactgactttattgactttgtctgtttctccccctcctttaacctcttgtttgccaagccatctaaggagccacaccttcgactggaaggggtagtttcaattagcacactgtacatcttgtcaacccacctccacttgaagctgtgataatagatgtaaacaaa

SEQ ID NO: 18989 - DNA, 439 bp, Homo sapiens
aatgtgaagtttaaaaaagtgattatgatggatcacgacgtcaggagatcgagaccatcctggttaacatggtgaaaccccatctctactaaaaatacaaaaaattaatctggcgtagtggtgggtgcctgtagtcccagctacttgggaggctgaggcaggagaatggcatgagcctgggaggcagggcttacagtgagcccagatcacaccactacactccagcctgagcgacagagcgagactctgtctcaaaaaaaaaaaaaaaagtgattatgatgacgcataaatgttcatcaaatcttatatttaactaacaaggaaatatacaatacacatcattcaatatttttctggcttttctttaaatacatagatgtctaacatgatatgttattttagctatttatatgtgttcaatgatattcaaagttggtga

SEQ ID NO: 18990 - DNA, 438 bp, Homo sapiens
ttaaaatgcacacacagtcacagtttaatggcttaatgatgaagcctgaacttttgttggccatcagacgttaacaatgaccacatggacgtctccgattcctgcatagcatttatagggaaaaccagatctttgaacttatgaaaaacccctaacccatcatccaagcacctttcattcctagagattatcagagttttcattacaggttaaattctttgtaactttttcatgtggaaactatcccgttacctcctgttagttctcctgctgagtgcaaatggagtgtatactctacttcctacagctgttttggattttgttacattttccaggttttgggaaaaaaaatgtgctgacagaatgtggcttcatctacaactctcaactgatttaagagtataaacagaaatacgtttcctgattgtatgtaccaat

SEQ ID NO: 18991 - DNA, 402 bp, Homo sapiens
ggggaggatgcccacaggcttcaccagactctcaaagggatcaacgatcccccaaaacatgaacaatcactgctttcaagccagctgggagtcagacctccgagcaacctctaccacctggagaaaccccaagacatagtaagcaaaaaaaaaaaaaaaagaaaatcactgcaagcaaagtgagaaagtaaactctcccttcctcgctcccttgacttttagaaactacgacaaacactttaacctcagcctgttcaatgcctttaagatcagagatagtcatgtttgcctaactttattcaggtcctattacgcaagcctgctacctattcaggaccccaaatgttcatgatctgccgataaggtattcattcacccttcaatttgtaatctaattctcct

SEQ ID NO: 18992 - DNA, 513 bp, Homo sapiens
aatttgatacccattaatccatcgtgggcatcacccatgagagtttttttaatgatttttctaatttttattgttggataggattccacagtttgttgtccatttacttaccacatggatgcatgtgtctttaatttcttccaatggttacttacatctatgtaactacaatgcagaaaacaggaatttggcaaggatacaatgcatgtgtatagttctatttcatcatatgtgtgaatttgtgtaactactgcaatcaacatagaactgtttcatcatcactaatttgttcttcatctctgtaatattgtcacttatatattgttgtagcaatggaataatatagtgtatgacctttggtttttctcactcagcataaagcccttaagatcatccaagcagttatacctatcaatagctcatttcttttttattgctaagtggtattctctagtatggatgactgtaccacaaataaagatgaagtgaacacttcctacaggtttttgtgta

SEQ ID NO: 18993 - DNA, 289 bp, Homo sapiens
agcttgttgcatggatcggtaatttgtctttttactgctcggtagtagtctgttgtatagagctctgatggataggcctggctgagccatcccccatgtcttccaagtcactagatgtgtcagtgaggtcagcttggtccctccagaagagcctgcttgccagctgaataccaccaagtgatctctgcagtgccatgtgggacagagaagtcacccagccaaaccttgcccaatttccccagccacaaaaaaatgagacataaagaagcagtggctgtttttacccact

SEQ ID NO: 18994 - DNA, 165 bp, Homo sapiens
tccctttccttgaggcctctttcccactaaaacccagaggtagcattagatagaaagaccagatatgccctggcaaggatggtaacagagtatattagtcagggtaaactacacaagctgcagtaacaaacatcccccaaacctctgtggtttaacacatgacag

SEQ ID NO: 18995 - DNA, 360 bp, Homo sapiens
gcacttccaggggtacatctgttacctttaatttgcacacataggtccctgttcatgggctgctgtttataaaaaggggtttcattggcatcatttcagccttcagagtgagaaacattgaccctgcttgcttttgttacctaatattctgagctgaataaatgatgtgtacagtatcattgctccgtatgagaaaatgtaaatgactacattacattgttggaaggcagtaatacaaaagggaaatatgaagtcagccgacatttctcattcgggaaaaacaaagctgattctggtgattctgtgtgggagattgtactgggctgcaaagcgttgtcaattgaagatttttttttcccc

SEQ ID NO: 18996 - DNA, 403 bp, Homo sapiens
tctgccaccccttccatggtgatatttctagagtacacccctgtgctgaaattcttatgaggaaagagacctgatgagatgctatggtgaagaggggccataagggtcttgaataccaagttaattttgctaccagctgagattaggaagtgaagcccaggacccaggagaggaggaggaggagataacacaggaccctgtgatcactctcctggccatctgtgtacagtgagacgcttcccttcggggttgggagcacccagtgtcatggtcctgagtgttgctaccctgctgttctcatctgtgaatgcagccagaccactttcttcctctgatataaataacttggaggatctgtcaccagacacctcatatctacatattaataaattctgtacggtgg

SEQ ID NO: 18997 - DNA, 512 bp, Homo sapiens
tggctcacacctgtaatcctaacactttgggaggccgaggtaggcagattgcttgagcttgagagattgagaccaacctgggcaacatggtgaaaccccacctcaacaaaaaattcaaaaattagccgagcatggtggcatgcacctgtagtcccactacttgggagactgaggcaggaggatgacttgaacccttgaggtcaaagctgcagtgagccatgattgcactgctgcactccagcctggtcgacggtgagaccctgtctcaaaaagaaaaagaaaatgatttggacttggaaaaaaacaatctaacacgatctctgtagcatacttgttaaggagtacaatgaaaagaatttaaaacatggttatttggtaggagaaagttggaaatccagtagccacaaaatgaatttaccaatcaaggtctgatttcctagttacctgacactgaagtcagattgcttggatttggatcctgacttgacttatgtgaccttggactagcttct

SEQ ID NO: 18998 - DNA, 1258 bp, Homo sapiens
gagcgcgctgcctgcctgcccagggccttcccggagagcaggtgacggcggcctccgggcatggagctcgcgctgacgaaaggttctggaagccgccgtaaaaagtaatcaagaaacgggtgacaggacttttccctgaccaacatgatgaaaccccatctaaatacaaaacaattagccggactgtggtggtgcacgcctgtaatcgcagctactcagagggctgaggcgggagaattgcttgcatccgggaggtggaggttgcggtgagctgggatcacgccattgcactccagcctaggcgacagaccctttgaggaaccgtttgaggtgtggcacgatacagcaagtcagctgccaaagaggggcttagccacaggaagtgcgtgcccagaacgcatctcccgtgtccctcacagcagttctatgaggctggctgccctgtttgacaactgaggcccgcatcttccccggaatcaccgacgtgtggctctgagccctgtcccagggattttctccatcagagaagaggagcactttgagctttgagaggagcagccctctgcaagtgaagtggaaaaaaaggaagcaggcgaggaggcccatccagaccctcccccaagacccttgctgaaatggctgggatgcggcgtgcagaagctctcctttccttcacagcccctggctttccaagagtccctgcccacccagatgcccgctggcagatgcagcctcatctcaaggacactgcttgctggataaatccctcaccaccctagagacagcccacggtcctgagacaaggatgcgggccaggcttgttgcacgtaagcgcctcccgcagaaaccagtgaggccggagttccagaggaaatgatgtagggacagaggcagagggcctccaggaggcaccagccccagagtcttccctagaatcagactttaagcacaagcagggagggaaagcacttgagcagtgcccgtccctgcatacctggcctctgctggaacccatgcagggacaggacacttctttatcagcaatcctgttcctctcctgggcagcttcaacctgaacatcctccttcaccttgagctaaaatgggtttcttgtcacccttgcccatcaaacctggccttgccctcaggaaccacacaggacaagcctaatacttccttcttgtggcaacactttagcaattgagacctggctgtcaggtcctccaaataaacatttgtgactgtgatgttgaaaaaa

SEQ ID NO: 18999 - DNA, 1053 bp, Homo sapiens
gagcgcgctgcctgcctgcccagggccttcccggagagcaggtgacggcggcctccgggcatggagctcgcgctgacgaaaggttctggaagccgccgtaaaaaccctttgaggaaccgtttgaggtgtggcacgatacagcaagtcagctgccaaagaggggcttagccacaggaagtgcgtgcccagaacgcatctcccgtgtccctcacagcagttctatgaggctggctgccctgtttgacaactgaggcccgcatcttccccggaatcaccgacgtgtggctctgagccctgtcccagggattttctccatcagagaagaggagcactttgagctttgagaggagcagccctctgcaagtgaagtggaaaaaaaggaagcaggcgaggaggcccatccagaccctcccccaagacccttgctgaaatggctgggatgcggcgtgcagaagctctcctttccttcacagcccctggctttccaagagtccctgcccacccagatgcccgctggcagatgcagcctcatctcaaggacactgcttgctggataaatccctcaccaccctagagacagcccacggtcctgagacaaggatgcgggccaggcttgttgcacgtaagcgcctcccgcagaaaccagtgaggccggagttccagaggaaatgatgtagggacagaggcagagggcctccaggaggcaccagccccagagtcttccctagaatcagactttaagcacaagcagggagggaaagcacttgagcagtgcccgtccctgcatacctggcctctgctggaacccatgcagggacaggacacttctttatcagcaatcctgttcctctcctgggcagcttcaacctgaacatcctccttcaccttgagctaaaatgggtttcttgtcacccttgcccatcaaacctggccttgccctcaggaaccacacaggacaagcctaatacttccttcttgtggcaacactttagcaattgagacctggctgtcaggtcctccaaataaacatttgtgactgtgatgttgaaaaaa

SEQ ID NO: 19000 - DNA, 1796 bp, Homo sapiens
gagcgcgctgcctgcctgcccagggccttcccggagagcaggtgacggcggcctccgggcatggagctcgcgctgacgaaaggttctggaagccgccgtaaaaagtaatcaagaaacgggtgacaggacttttcgaacaaggtctcaccatgctgcccaagctggtctgaaaactcttgtcctcaggcagtcctcccacctcggcctcccaaagatctgagattacaggcatgagccaccacacctggccttggttttaattcctgtcacagtatattagttttcgctgttgtgtattgattgattgagacagggtctcgctctgttgcccaggctggagtgcaggggcatgatcccagctcactgcaacctccacctcttggattcaagtgattctcccgtctcagcctcccgagtaacaggaaccacaggtgtgtgccagcacgcctggctaattttttttttttttttcttgaggtggagtttcactgttgttgcccaggttggagtgcagtggcacaatctcagctcactgcaacctctgcctcctgggttcaagtgattctcctgcttcagcctcacgagttgttgggattacaggcgcccgccaccacgcccaggtaatttttgtttagtagagacggggtttcaccatgttggcctggctggtctcgaactcctgacctcaggtgatccacccacctcggcctcccaaagttgtgggattgcaggcgtgagccactgcgcctggcctaatttttcaattttttggtggagatagggtttcaccatgttggccaggctggagttttgcctgttctagaagcttgtatcagtcatacaacacccctttgaggaaccgtttgaggtgtggcacgatacagcaagtcagctgccaaagaggggcttagccacaggaagtgcgtgcccagaacgcatctcccgtgtccctcacagcagttctatgaggctggctgccctgtttgacaactgaggcccgcatcttccccggaatcaccgacgtgtggctctgagccctgtcccagggattttctccatcagagaagaggagcactttgagctttgagaggagcagccctctgcaagtgaagtggaaaaaaaggaagcaggcgaggaggcccatccagaccctcccccaagacccttgctgaaatggctgggatgcggcgtgcagaagctctcctttccttcacagcccctggctttccaagagtccctgcccacccagatgcccgctggcagatgcagcctcatctcaaggacactgcttgctggataaatccctcaccaccctagagacagcccacggtcctgagacaaggatgcgggccaggcttgttgcacgtaagcgcctcccgcagaaaccagtgaggccggagttccagaggaaatgatgtagggacagaggcagagggcctccaggaggcaccagccccagagtcttccctagaatcagactttaagcacaagcagggagggaaagcacttgagcagtgcccgtccctgcatacctggcctctgctggaacccatgcagggacaggacacttctttatcagcaatcctgttcctctcctgggcagcttcaacctgaacatcctccttcaccttgagctaaaatgggtttcttgtcacccttgcccatcaaacctggccttgccctcaggaaccacacaggacaagcctaatacttccttcttgtggcaacactttagcaattgagacctggctgtcaggtcctccaaataaacatttgtgactgtgatgttgaaaaaa

SEQ ID NO: 19001 - DNA, 831 bp, Homo sapiens
cgcagtttgtcagtttgccaacaccctgctttcatgaaaacagtttgctgtttactcatatagcctccagtggtgcactgagttgatcacgaccctcactctttcggcctgcaacactcaagtgatccacctgcctcggctgcccaaagtgttgggattacaggcatgagccaccacgcccggcctgctcctggcttttggctgaaagttgagacttagaagttgggaggagacctggagcaccgtggctagttctaggccctacactcttcagaacagcagagctgtagctgtctggtagtgagctctctgttgctgggagtattcagaggctggatggctggctgttaagggatttctgcttgggtgggaatttgggtccctctaagacagataacctatgatttctgagataaatgggacaatactttcaatgagggttacatgttaacgctgggtcagtcttgagtacaaaatggattcagagacctgagttgtcatgttcaatctgattttcctagccctttgaggaaccgtttgaggtgtggcacgatacagcaagtcagctgccaaagaggggcttagccacaggaagtgcgtgcccagaacggtaaaggggctgtggcctttcttatcatctccactccctgtcccccccatcacctgctcttcgtgctttgtgataattcagtgagctcatactcatgacctgtgtctccagcatctcccgtgtccctcacagcagttctatgaggctggctgccctgtttgacaactgaggcccgcatcttccccggaatcaccgacgtgtggctctgagccctgtcccag

SEQ ID NO: 19002 - DNA, 558 bp, Homo sapiens
gcaaccaaaccaaaacaaccaaactgggtgaggggtgtgacagtactctggctgtgagatccccaaatccccgcatggttctcttccttccaaaaaacaaaacagctccctcccattgtctagcagctggagagtccactggagtgtgttttgtgcttagtgggggtttccctaccatgggggtaagcaggcagaggagaggccagtctctgctccaaaggtacttccaaactcaaacaagacatccaacgcattgggaaacacaacaagaacagaatctggtactcaaatgagtggttcagctttgaagtacaggggctccggggacaaagtggacctgagggggtcctctgaagatgggcaggaagggcagacaaaggcctatagtgggagagaggggccagcctgacaaggtatggataccctacctgcacagtaggatggggcagggagggccctctgagcaggagccagcctgcccctcacccccattcaagtgtgatcacccagaccctggccaggatgcgggggatatgctgagtgatctaggtctcccag

SEQ ID NO: 19003 - DNA, 2808 bp, Homo sapiens
cccacgcgtccgctgggcccagctcccccgagaggtggtcggatcctctgggctgctcggtcgatgcctgtgccactgacgtccaggcatgaggtggttcctgccctggacgctggcagcagtgacagcagcagccgccagcaccgtcctggccacggccctctctccagcccctacgaccatggactttactccagctccactggaggacacctcctcacgcccccaattctgcaagtggccatgtgagtgcccgccatccccaccccgctgcccgctgggggtcagcctcatcacagatggctgtgagtgctgtaagatgtgcgctcagcagcttggggacaactgcacggaggctgccatctgtgacccccaccggggcctctactgtgactacagcggggaccgcccgaggtacgcaataggagtgtgtgcacaggtggtcggtgtgggctgcgtcctggatggggtgcgctacaacaacggccagtccttccagcctaactgcaagtacaactgcacgtgcatcgacggcgcggtgggctgcacaccactgtgcctccgagtgcgccccccgcgtctctggtgcccccacccgcggcgcgtgagcatacctggccactgctgtgagcagtgggtatgtgaggacgacgccaagaggccacgcaagaccgcaccccgtgacacaggagccttcgatgctgtgggtgaggtggaggcatggcacaggaactgcatagcctacacaagcccctggagcccttgctccaccagctgcggcctgggggtctccactcggatctccaatgttaacgcccagtgctggcctgagcaagagagccgcctctgcaacttgcggccatgcgatgtggacatccatacactcattaaggcagggaagaagtgtctggctgtgtaccagccagaggcatccatgaacttcacacttgcgggctgcatcagcacacgctcctatcaacccaagtactgtggagtttgcatggacaataggtgctgcatcccctacaagtctaagactatcgacgtgtccttccagtgtcctgatgggcttggcttctcccgccaggtcctatggattaatgcctgcttctgtaacctgagctgtaggaatcccaatgacatctttgctgacttggaatcctaccctgacttctcagaaattgccaactaggcaggcacaaatcttgggtcttggggactaacccaatgcctgtgaagcagtcagcccttatggccaataacttttcaccaatgagccttagttaccctgatctggacccttggcctccatttctgtctctaaccattcaaatgacgcctgatggtgctgctcaggcccatgctatgagttttctccttgatatcattcagcatctactctaaagaaaaatgcctgtctctagctgttctggactacacccaagcctgatccagcctttccaagtcactagaagtcctgctggatcttgcctaaatcccaagaaatggaatcaggtagacttttaatatcactaatttcttctttagatgccaaaccacaagactctttgggtccattcagatgaatagatggaatttggaacaatagaataatctattatttggagcctgccaagaggtactgtaatgggtaattctgacgtcagcgcaccaaaactatcctgattccaaatatgtatgcacctcaaggtcatcaaacatttgccaagtgagttgaatagttgcttaattttgatttttaatggaaagttgtatccattaacctgggcattgttgaggttaagtttctcttcacccctacactgtgaagggtacagattaggtttgtcccagtcagaaataaaatttgataaacattcctgttgatgggaaaagcccccagttaatactccagagacagggaaaggtcagcccatttcagaaggaccaattgactctcacactgaatcagctgctgactggcagggctttgggcagttggccaggctcttccttgaatcttctcccttgtcctgcttggggttcataggaattggtaaggcctctggactggcctgtctggcccctgagagtggtgccctggaacactcctctactcttacagagccttgagagacccagctgcagaccatgccagacccactgaaatgaccaagacaggttcaggtaggggtgtgggtcaaaccaagaagtgggtgcccttggtagcagcctggggtgacctctagagctggaggctgtgggactccaggggcccccgtgttcaggacacatctattgcagagactcatttcacagcctttcgttctgctgaccaaatggccagttttctggtaggaagatggaggtttaccagttgtttagaaacagaaatagacttaataaaggtttaaagctgaagaggttgaagctaaaaggaaaaggttgttgttaatgaatatcaggctattatttattgtattaggaaaatataatatttactgttagaattcttttatttagggccttttctgtgccagacattgctctcagtgctttgcatgtattagctcactgaatcttcacgacaatgttgagaagttcccattattatttctgttcttacaaatgtgaaacggaagctcatagaggtgagaaaactcaaccagagtcacccagttggtgactgggaaagttaggattcagatcgaaattggactgtctttataacccatattttccccctgtttttagagcttccaaatgtgtcagaataggaaaacattgcaataaatggcttgatttttt

SEQ ID NO: 19004 - DNA, 4441 bp, Homo sapiens
  misc_feature (3313)..(3313): n is a, c, g, or t
cccacgcgtccgctgggcccagctcccccgagaggtggtcggatcctctgggctgctcggtcgatgcctgtgccactgacgtccaggcatgaggtggttcctgccctggacgctggcagcagtgacagcagcagccgccagcaccgtcctggccacggcagggaagaagtgtctggctgtgtaccagccagaggcatccatgaacttcacacttgcgggctgcatcagcacacgctcctatcaacccaagtactgtggagtttgcatggacaataggtgctgcatcccctacaagtctaagactatcgacgtgtccttccagtgtcctgatgggcttggcttctcccgccaggtcctatggattaatgcctgcttctgtaacctgagctgtaggaatcccaatgacatctttgctgacttggaatcctaccctgacttctcagaaattgccaactaggcaggcacaaatcttgggtcttggggactaacccaatgcctgtgaagcagtcagcccttatggccaataacttttcaccaatgagccttagttaccctgatctggacccttggcctccatttctgtctctaaccattcaaatgacgcctgatggtgctgctcaggcccatgctatgagttttctccttgatatcattcagcatctactctaaagaaaaatgcctgtctctagctgttctggactacacccaagcctgatccagcctttccaagtcactagaagtcctgctggatcttgcctaaatcccaagaaatggaatcaggtagacttttaatatcactaatttcttctttagatgccaaaccacaagactctttgggtccattcagatgaatagatggaatttggaacaatagaataatctattatttggagcctgccaagaggtactgtaatgggtaattctgacgtcagcgcaccaaaactatcctgattccaaatatgtatgcacctcaaggtcatcaaacatttgccaagtgagttgaatagttgcttaattttgatttttaatggaaagttgtatccattaacctgggcattgttgaggttaagtttctcttcacccctacactgtgaagggtacagattaggtttgtcccagtcagaaataaaatttgataaacattcctgttgatgggaaaagcccccagttaatactccagagacagggaaaggtcagcccatttcagaaggaccaattgactctcacactgaatcagctgctgactggcagggctttgggcagttggccaggctcttccttgaatcttctcccttgtcctgcttggggttcataggaattggtaaggcctctggactggcctgtctggcccctgagagtggtgccctggaacactcctctactcttacagagccttgagagacccagctgcagaccatgccagacccactgaaatgaccaagacaggttcaggtaggggtgtgggtcaaaccaagaagtgggtgcccttggtagcagcctggggtgacctctagagctggaggctgtgggactccaggggcccccgtgttcaggacacatctattgcagagactcatttcacagcctttcgttctgctgaccaaatggccagttttctggtaggaagatggaggtttaccagttgtttagaaacagaaatagacttaataaaggtttaaagctgaagaggttgaagctaaaaggaaaaggttgttgttaatgaatatcaggctattatttattgtattaggaaaatataatatttactgttagaattcttttatttagggccttttctgtgccagacattgctctcagtgctttgcatgtattagctcactgaatcttcacgacaatgttgagaagttcccattattatttctgttcttacaaatgtgaaacggaagctcatagaggtgagaaaactcaaccagagtcacccagttggtgactgggaaagttaggattcagatcgaaattggactgtctttataacccatattttccccctgtttttagagcttccaaatgtgtcagaataggaaaacattgcaataaatggcttgattttttaatgtcatttttccctcttatagtctttctagctccttttcaaaagacgagaatatctgattttctgataatttaggtgcttaagcatccaaaatacatgggacacacaaaaatccaggaatcccctgtagcttattccctctttcccatcggaaccagctctcatcacacatttaaaagatgattctgtttacccaatgctgcatattgaatgttgtgtagttattcacagggaattctgtgcagtgtgcagagagattcctaaacgggaaaaggactgggaatacatcctccttactgtgacctccccaaaacctagtccagtgcaaggtatacagtggtgctcattaaatacttgatgaatacaggaagctgtgcatgtgttcctacttttattcgaagctctcttcttccaaagctacatgaaaatagaattttaacagtcaaaattttatattaagtgccttagcaaaagagacatttaatatttcaaagaaatgcatatgtatgtatacatatatttgtgtatgcgtatgcaagaattcttgtataaagagaattcactccatgaatgatctcttctgtaagtcagtgtgaatcatgttagattttctgagagtgaaaacacctgccatctacaaattacaaggctggataacagctcactccatttgaaattcagtggaaacccaagagctaggttcttactgaatttgcatctcaatttgggaaactgaacttagctttcaaagatcataggaagtctggttggagaaactagggattattctggcaatgggtggaggaaggtggtcagaataacccagtcgccattggttttgagaaacggaactatcttatgcagagcccggagggcaagtctcaaacccatgggttgaagccatggagaaggaaatttggatccaatgtaatgaagctctttctaagtcagaatttccctgcaatggtgtggcctgattcaataaaaattaagaataataaatataatggaaaaaaatctccactgattgagtgtttacttggtgccaagcactatgctaagttgttcattattttatttaattgttacagcaattttgagtatgcatctttcactattttataagtggaaaagagaagtgcccccaaaaagttagagctcaaacagcagcttattctaccagcccctgctcttgcggaggcctctggaaaagacctgaatgacacctattggagaatnacatctacaaggggcttcaaacagaccaaatagatcatcacctctgtggtcccttgttaactatatgttctgagacaaaggaaagctaccctaagggttagttaacctttgctgaggaaatttacattcatacttagagtgaattactcaggtgtgcttaggtgtgcaaaagggaaggagacctgaattcaccaagttaaatcttgctaaaccttatcataagcattttttgagcgcttagcatacaccaagccttgtggaaggtgctttcctgccatatctcatttaatcctcacagcaaacctatagaatatggcattatcatctgagtctcacagaagtttagtcgtgtactcaaggtcttaccagctagtgaacagcagaccaagactggaaacccaggatagtctgatacctgagccatctcttcttgtgctacgcctagttattctgtcccccaaatcaaaaggcatgacctttataagaggcgctttactgacaatagctgcaattttaactttgaaaatgattcagaattatcaaagatagtagattcgaatgacatgattgtctataatctcgctagccttgtactgtgtgtgcatagcaattacagggaagtaatctagctcctgactattatgttgaactatgtcgctgctttttacaaacttgtcttgatccaaagcagtcacaatgataaccctgcatatctgggaatcataagtcaactatgtatctctgtgtgtgtatatatatgtatgtatgtatctattttcaaactgtgatttaatatttaaatattcctactgccatttttgtgactgaaaaactacacatgaggaaacgtcttagaattttccaatagaggaaaaataacacttgggcaatctgtcatgtttcacaacagttctcatttttctcatgatttgtgtagcgtggaatgtgtttgctcaatgtgaagggttttcattgctcaatttctctgtgtaagtcttttccttaaggtaataaaccatcagcaaagtcacatactggagttggtggcttttcttgtacaggcagttgttatgagacaatgatggagcattgagcatgttcaataaatgtgcagatggtggaaacgag

SEQ ID NO: 19005 - DNA, 4915 bp, Homo sapiens
  misc_feature (3787)..(3787): n is a, c, g, or t
cccacgcgtccgctgggcccagctcccccgagaggtggtcggatcctctgggctgctcggtcgatgcctgtgccactgacgtccaggcatgaggtggttcctgccctggacgctggcagcagtgacagcagcagccgccagcaccgtcctggccacggccctctctccagcccctacgaccatggactttactccagctccactggaggacacctcctcacgcccccaattctgcaagtggccatgtgagtgcccgccatccccaccccgctgcccgctgggggtcagcctcatcacagatggctgtgagtgctgtaagatgtgcgctcagcagcttggggacaactgcacggaggctgccatctgtgacccccaccggggcctctactgtgactacagcggggaccgcccgaggtacgcaataggagtgtgtgcacatgctgtgggtgaggtggaggcatggcacaggaactgcatagcctacacaagcccctggagcccttgctccaccagctgcggcctgggggtctccactcggatctccaatgttaacgcccagtgctggcctgagcaagagagccgcctctgcaacttgcggccatgcgatgtggacatccatacactcattaaggcagggaagaagtgtctggctgtgtaccagccagaggcatccatgaacttcacacttgcgggctgcatcagcacacgctcctatcaacccaagtactgtggagtttgcatggacaataggtgctgcatcccctacaagtctaagactatcgacgtgtccttccagtgtcctgatgggcttggcttctcccgccaggtcctatggattaatgcctgcttctgtaacctgagctgtaggaatcccaatgacatctttgctgacttggaatcctaccctgacttctcagaaattgccaactaggcaggcacaaatcttgggtcttggggactaacccaatgcctgtgaagcagtcagcccttatggccaataacttttcaccaatgagccttagttaccctgatctggacccttggcctccatttctgtctctaaccattcaaatgacgcctgatggtgctgctcaggcccatgctatgagttttctccttgatatcattcagcatctactctaaagaaaaatgcctgtctctagctgttctggactacacccaagcctgatccagcctttccaagtcactagaagtcctgctggatcttgcctaaatcccaagaaatggaatcaggtagacttttaatatcactaatttcttctttagatgccaaaccacaagactctttgggtccattcagatgaatagatggaatttggaacaatagaataatctattatttggagcctgccaagaggtactgtaatgggtaattctgacgtcagcgcaccaaaactatcctgattccaaatatgtatgcacctcaaggtcatcaaacatttgccaagtgagttgaatagttgcttaattttgatttttaatggaaagttgtatccattaacctgggcattgttgaggttaagtttctcttcacccctacactgtgaagggtacagattaggtttgtcccagtcagaaataaaatttgataaacattcctgttgatgggaaaagcccccagttaatactccagagacagggaaaggtcagcccatttcagaaggaccaattgactctcacactgaatcagctgctgactggcagggctttgggcagttggccaggctcttccttgaatcttctcccttgtcctgcttggggttcataggaattggtaaggcctctggactggcctgtctggcccctgagagtggtgccctggaacactcctctactcttacagagccttgagagacccagctgcagaccatgccagacccactgaaatgaccaagacaggttcaggtaggggtgtgggtcaaaccaagaagtgggtgcccttggtagcagcctggggtgacctctagagctggaggctgtgggactccaggggcccccgtgttcaggacacatctattgcagagactcatttcacagcctttcgttctgctgaccaaatggccagttttctggtaggaagatggaggtttaccagttgtttagaaacagaaatagacttaataaaggtttaaagctgaagaggttgaagctaaaaggaaaaggttgttgttaatgaatatcaggctattatttattgtattaggaaaatataatatttactgttagaattcttttatttagggccttttctgtgccagacattgctctcagtgctttgcatgtattagctcactgaatcttcacgacaatgttgagaagttcccattattatttctgttcttacaaatgtgaaacggaagctcatagaggtgagaaaactcaaccagagtcacccagttggtgactgggaaagttaggattcagatcgaaattggactgtctttataacccatattttccccctgtttttagagcttccaaatgtgtcagaataggaaaacattgcaataaatggcttgattttttaatgtcatttttccctcttatagtctttctagctccttttcaaaagacgagaatatctgattttctgataatttaggtgcttaagcatccaaaatacatgggacacacaaaaatccaggaatcccctgtagcttattccctctttcccatcggaaccagctctcatcacacatttaaaagatgattctgtttacccaatgctgcatattgaatgttgtgtagttattcacagggaattctgtgcagtgtgcagagagattcctaaacgggaaaaggactgggaatacatcctccttactgtgacctccccaaaacctagtccagtgcaaggtatacagtggtgctcattaaatacttgatgaatacaggaagctgtgcatgtgttcctacttttattcgaagctctcttcttccaaagctacatgaaaatagaattttaacagtcaaaattttatattaagtgccttagcaaaagagacatttaatatttcaaagaaatgcatatgtatgtatacatatatttgtgtatgcgtatgcaagaattcttgtataaagagaattcactccatgaatgatctcttctgtaagtcagtgtgaatcatgttagattttctgagagtgaaaacacctgccatctacaaattacaaggctggataacagctcactccatttgaaattcagtggaaacccaagagctaggttcttactgaatttgcatctcaatttgggaaactgaacttagctttcaaagatcataggaagtctggttggagaaactagggattattctggcaatgggtggaggaaggtggtcagaataacccagtcgccattggttttgagaaacggaactatcttatgcagagcccggagggcaagtctcaaacccatgggttgaagccatggagaaggaaatttggatccaatgtaatgaagctctttctaagtcagaatttccctgcaatggtgtggcctgattcaataaaaattaagaataataaatataatggaaaaaaatctccactgattgagtgtttacttggtgccaagcactatgctaagttgttcattattttatttaattgttacagcaattttgagtatgcatctttcactattttataagtggaaaagagaagtgcccccaaaaagttagagctcaaacagcagcttattctaccagcccctgctcttgcggaggcctctggaaaagacctgaatgacacctattggagaatnacatctacaaggggcttcaaacagaccaaatagatcatcacctctgtggtcccttgttaactatatgttctgagacaaaggaaagctaccctaagggttagttaacctttgctgaggaaatttacattcatacttagagtgaattactcaggtgtgcttaggtgtgcaaaagggaaggagacctgaattcaccaagttaaatcttgctaaaccttatcataagcattttttgagcgcttagcatacaccaagccttgtggaaggtgctttcctgccatatctcatttaatcctcacagcaaacctatagaatatggcattatcatctgagtctcacagaagtttagtcgtgtactcaaggtcttaccagctagtgaacagcagaccaagactggaaacccaggatagtctgatacctgagccatctcttcttgtgctacgcctagttattctgtcccccaaatcaaaaggcatgacctttataagaggcgctttactgacaatagctgcaattttaactttgaaaatgattcagaattatcaaagatagtagattcgaatgacatgattgtctataatctcgctagccttgtactgtgtgtgcatagcaattacagggaagtaatctagctcctgactattatgttgaactatgtcgctgctttttacaaacttgtcttgatccaaagcagtcacaatgataaccctgcatatctgggaatcataagtcaactatgtatctctgtgtgtgtatatatatgtatgtatgtatctattttcaaactgtgatttaatatttaaatattcctactgccatttttgtgactgaaaaactacacatgaggaaacgtcttagaattttccaatagaggaaaaataacacttgggcaatctgtcatgtttcacaacagttctcatttttctcatgatttgtgtagcgtggaatgtgtttgctcaatgtgaagggttttcattgctcaatttctctgtgtaagtcttttccttaaggtaataaaccatcagcaaagtcacatactggagttggtggcttttcttgtacaggcagttgttatgagacaatgatggagcattgagcatgttcaataaatgtgcagatggtggaaacgag

SEQ ID NO: 19006 - DNA, 3559 bp, Homo sapiens
cccacgcgtccgctgggcccagctcccccgagaggtggtcggatcctctgggctgctcggtcgatgcctgtgccactgacgtccaggcatgaggtggttcctgccctggacgctggcagcagtgacagcagcagccgccagcaccgtcctggccacggccctctctccagcccctacgaccatggactttactccagctccactggaggacacctcctcacgcccccaattctgcaagtggccatgtgagtgcccgccatccccaccccgctgcccgctgggggtcagcctcatcacagatggctgtgagtgctgtaagatgtgcgctcagcagcttggggacaactgcacggaggctgccatctgtgacccccaccggggcctctactgtgactacagcggggaccgcccgaggtacgcaataggagtgtgtgcacatgctgtgggtgaggtggaggcatggcacaggaactgcatagcctacacaagcccctggagcccttgctccaccagctgcggcctgggggtctccactcggatctccaatgttaacgcccagtgctggcctgagcaagagagccgcctctgcaacttgcggccatgcgatgtggacatccatacactcattaaggcagggaagaagtgtctggctgtgtaccagccagaggcatccatgaacttcacacttgcgggctgcatcagcacacgctcctatcaacccaagtactgtggagtttgcatggacaataggtgctgcatcccctacaagtctaagactatcgacgtgtccttccagtgtcctgatgggcttggcttctcccgccaggtcctatggattaatgcctgcttctgtaacctgagctgtaggaatcccaatgacatctttgctgacttggaatcctaccctgacttctcagaaattgccaactaggcaggcacaaatcttgggtcttggggactaacccaatgcctgtgaagcagtcagcccttatggccaataacttttcaccaatgagccttagttaccctgatctggacccttggcctccatttctgtctctaaccattcaaatgacgcctgatggtgctgctcaggcccatgctatgagttttctccttgatatcattcagcatctactctaaagaaaaatgcctgtctctagctgttctggactacacccaagcctgatccagcctttccaagtcactagaagtcctgctggatcttgcctaaatcccaagaaatggaatcaggtagacttttaatatcactaatttcttctttagatgccaaaccacaagactctttgggtccattcagatgaatagatggaatttggaacaatagaataatctattatttggagcctgccaagaggtactgtaatgggtaattctgacgtcagcgcaccaaaactatcctgattccaaatatgtatgcacctcaaggtcatcaaacatttgccaagtgagttgaatagttgcttaattttgatttttaatggaaagttgtatccattaacctgggcattgttgaggttaagtttctcttcacccctacactgtgaagggtacagattaggtttgtcccagtcagaaataaaatttgataaacattcctgttgatgggaaaagcccccagttaatactccagagacagggaaaggtcagcccatttcagaaggaccaattgactctcacactgaatcagctgctgactggcagggctttgggcagttggccaggctcttccttgaatcttctcccttgtcctgcttggggttcataggaattggtaaggcctctggactggcctgtctggcccctgagagtggtgccctggaacactcctctactcttacagagccttgagagacccagctgcagaccatgccagacccactgaaatgaccaagacaggttcaggtaggggtgtgggtcaaaccaagaagtgggtgcccttggtagcagcctggggtgacctctagagctggaggctgtgggactccaggggcccccgtgttcaggacacatctattgcagagactcatttcacagcctttcgttctgctgaccaaatggccagttttctggtaggaagatggaggtttaccagttgtttagaaacagaaatagacttaataaaggtttaaagctgaagaggttgaagctaaaaggaaaaggttgttgttaatgaatatcaggctattatttattgtattaggaaaatataatatttactgttagaattcttttatttagggccttttctgtgccagacattgctctcagtgctttgcatgtattagctcactgaatcttcacgacaatgttgagaagttcccattattatttctgttcttacaaatgtgaaacggaagctcatagaggtgagaaaactcaaccagagtcacccagttggtgactgggaaagttaggattcagatcgaaattggactgtctttataacccatattttccccctgtttttagagcttccaaatgtgtcagaataggaaaacattgcaataaatggcttgattttttaatgtcatttttccctcttatagtctttctagctccttttcaaaagacgagaatatctgattttctgataatttaggtgcttaagcatccaaaatacatgggacacacaaaaatccaggaatcccctgtagcttattccctctttcccatcggaaccagctctcatcacacatttaaaagatgattctgtttacccaatgctgcatattgaatgttgtgtagttattcacagggaattctgtgcagtgtgcagagagattcctaaacgggaaaaggactgggaatacatcctccttactgtgacctccccaaaacctagtccagtgcaaggtatacagtggtgctcattaaatacttgatgaatacaggaagctgtgcatgtgttcctacttttattcgaagctctcttcttccaaagctacatgaaaatagaattttaacagtcaaaattttatattaagtgccttagcaaaagagacatttaatatttcaaagaaatgcatatgtatgtatacatatatttgtgtatgcgtatgcaagaattcttgtataaagagaattcactccatgaatgatctcttctgtaagtcagtgtgaatcatgttagattttctgagagtgaaaacacctgccatctacaaattacaaggctggataacagctcactccatttgaaattcagtggaaacccaagagctaggttcttactgaatttgcatctcaatttgggaaactgaacttagctttcaaagatcataggaagtctggttggagaaactagggattattctggcaatgggtggaggaaggtggtcagaataacccagtcgccattggttttgagaaacggaactatcttatgcagagcccggagggcaagtctcaaacccatgggttgaagccatggagaaggaaatttggatccaatgtaatgaagctctttctaagtcagaatttccctgcaatggtgtggcctgattcaataaaaattaagaataataaatataatgga

SEQ ID NO: 19007 - DNA, 734 bp, Homo sapiens
gatgggccacctgttttaaatccaaaagctggtaggagtttcaggtacactgcatttgcttctgctgtcctattgcacttggacttggtgcagctatgacctaatgcagaagacaaagtatgaagctaccaaactgtcagggccagaactaagcctgtataattgataggaaccttctgggtgcatgatgagtggatcttctgataagatacatttaaagtgtcccctgttggtggcttctaatatggggctaaggatgtgaccaagaatggcctgtaatcctgaagcctgccaagattgcatcattgaaacaatgcttcctaccaggtggagagaaaatgcagtattcttatccgagacgtaatagaggccagagtgctgaacaacactatccaccagttccgtagccccatagggctggggaagccactggtatatggaaccttactgtaccctgttgaggcttaaacatgtcagtggccactattcttatagtgtctgatatcatgagtggctgaactagaattgtgccattagtggtacttggcatgcaggcttggatagattaatgctggggtttgttttttgttttgttttgtttttgtttttaaagacaaggtctggctcagttgtctaggctggtctctatctcctggactcaagcgatcctcacaccccagccttctgagtagctagaactacaggcttgtgccaccacatccagctaatgctta

SEQ ID NO: 19008 - DNA, 2446 bp, Homo sapiens
ccgagggcggggccgggcccgggagcctgtggcttcaggaagaggagggcaaggtgtctggctgcgcgtttggctgcaatgagctcggcctcggggctccgcagggggcacccggcaggtggggaagaaaacatgacagaaacagatgccttctataaaagagaaatgtttgatccggcagaaaagtacaaaatggaccacaggaggagaggaattgctttaatcttcaatcatgagaggttcttttggcacttaacactgccagaaaggcggggcacctgcgcagatagagacaatcttacccgcaggttttcagatctaggatttgaagtgaaatgctttaatgatcttaaagcagaagaactactgctcaaaattcatgaggtgtcaactgttagccacgcagatgccgattgctttgtgtgtgtcttcctgagccatggcgaaggcaatcacatttatgcatatgatgctaaaatcgaaattcagacattaactggcttgttcaaaggagacaagtgtcacagcctggttggaaaacccaagatatttatcattcaggcatgtcggggaaaccagcacgatgtgccagtcattcctttggatgtagtagataatcagacagagaagttggacaccaacataactgaggtggatgcagcctccgtttacacgctgcctgctggagctgacttcctcatgtgttactctgttgcagaaggatattattctcaccgggaaactgtgaacggctcatggtacattcaagatttgtgtgagatgttgggaaaatatggctcctccttagagttcacagaactcctcacactggtgaacaggaaagtttctcagcgccgagtggacttttgcaaagacccaagtgcaattggaaagaagcaggttccctgttttgcctcaatgctaactaaaaagctgcatttctttccaaaatctaattaattaatagaggctatctaattttacactctgtattgaaaatggctttctcagccaggcgtggttactcacacctgtaatcccagcactttgggagtccaaggtgggcggatcacctgaggtcgggagttcgagaccagcctgaccaacatggagaagccccgtctctactaaaaatgcaaaaaaaaatttagctaggcatggcggcgcatgcctgcaatcccagctacttggaaggctgaggcaggagaatcacttgaacccaggaggtggaggctgcggtgagccgagattgcgccattgcactccagcctgggcaacgagtgaaactccgtctcaaaaaaaagaaaatgtctttctcttccttttatataaatatcgttagggtgaagcattatggtctaatgattcaaatgttttaaagtttaatgcctagcagagaactgccttaaaaaaaaaaaaagttcatgttggccatggtgaaagggtttgatatggagaaacaaaatcctcaggaaattagataaataaaaatttataagcatttgtattattttttaataaactgcagggttacacaaaaatctagctgatttaacttgtattttgtcacttttttataaaagtttattgtttgatgtttttaaaggtttttgaaatccaggaattaaatcatcccttaataaaatattcaaaattcatattttattacatttttctaactcacattcttgttcatttgtgtaattgatagatgttttttactcggtcatttaaatgtttaatatttcatctacatatgaattaccacattttgtgtatgactttaattcctactttaaaaaaaatcagcattccagaattgttgtatggcattctgaggatgaaatagaaaacataattcttagccactataggttgaacacctgcaaaatctgattctgtcagcatcttccatgttaagttcctacaaacagtccaacagtcatcagacccattcacacacaatcacattaatagaataacagatgttactttcaaggttcaattcttattaatatgatatagaatctgaataatactgttttgttaataatctgccagaggctgaagaaagttaactgttttggcttcgatacctgaaacttgtgatttgcaggttcaaaagcaatcgtttatatacactgtttcagttgaagttcaaaaagtaccaactatactttatggttggtggaacatttatgcctttttgataaatgataaaaagatcttactcccaactactgcatattaaaaaaagaagttaatgacaagacgattccgtgggaggttgaggcaggagggttgcttgagcccaggagtttgatttggcaagacctggtctctgatttttttaaaaggatgattccaaattaagtctaagaatggaagtgaatgccaagcacagaccctttcacctccacatagagaataaacgtgggacaagctg

SEQ ID NO: 19009 - DNA, 942 bp, Homo sapiens
ccgagggcggggccgggcccgggagcctgtggcttcaggaagaggagggcaaggtgtctggctgcgcgtttggctgcaatgagctcggcctcggggctccgcagggggcacccggcaggtggggaagaaaacatgacagaaacagatgccttctataaaagagaaatgtttgatccggcagaaaagtacaaaatggaccacaggaggagaggaattgctttaatcttcaatcatgagaggttcttttggcacttaacactgccagaaaggcggggcacctgcgcagatagagacaatcttacccgcaggttttcagatctaggatttgaagtgaaatgctttaatgatcttaaagcagaagaactactgctcaaaattcatgaggtgtcaactgttagccacgcagatgccgattgctttgtgtgtgtcttcctgagccatggcgaaggcaatcacatttatgcatatgatgctaaaatcgaaattcagacattaactggcttgttcaaaggagacaagtgtcacagcctggttggaaaacccaagatatttatcattcaggtaagactgagtacattatcatcttaattataaagtctgtcattctgaacatgtgataaaggtctaaaagccagttttgaaagtaactttctccagtaattggacaggccgtttttgaattctggccaatcatagttgcactttgagctgttagtaataattctttgacactctcattgtctatattacaaaataacagcatttggattgagatttgaagtgactcacaaagtaaccaatgtgctactccctgtccgagcctgataccaaggagagccattggaaagcgtacctgctgattgaagagtgccgcacaaggcaacctcatcagactaggtttgcttctttgggaggtggagagcatataaaccagtggaaaga

SEQ ID NO: 19010 - DNA, 2286 bp, Homo sapiens
tcaatctggaaatacactgcctgcctaaacagaaacacttaggtcaatactatagctttcaaaagggaaggtaacaccgtgtgccctgggtgtggttaatctgtaagaaattttaaaaccacaagctttttcctctacagtatacccttctaccaacataatttgatgtatacttggggatgccaattttttcttaaaacattaactaaaagaaagcctaagtaaggaaacaactttgttggcttttgtgccctccaaacctgaatgtattgcttctgaactgctcagaatgtggtttctgttgtaatgaaggggtactggcttacacattcactgcacacattaagcactgggaaggaaacagtaggcaaagaggtgggtttttcctccttgtcttgtaggcatgtcggggaaaccagcacgatgtgccagtcattcctttggatgtagtagataatcagacagagaagttggacaccaacataactgaggtggatgcagcctccgtttacacgctgcctgctggagctgacttcctcatgtgttactctgttgcagaaggatattattctcaccgggaaactgtgaacggctcatggtacattcaagatttgtgtgagatgttgggaaaatatggctcctccttagagttcacagaactcctcacactggtgaacaggaaagtttctcagcgccgagtggacttttgcaaagacccaagtgcaattggaaagaagcaggttccctgttttgcctcaatgctaactaaaaagctgcatttctttccaaaatctaattaattaatagaggctatctaattttacactctgtattgaaaatggctttctcagccaggcgtggttactcacacctgtaatcccagcactttgggagtccaaggtgggcggatcacctgaggtcgggagttcgagaccagcctgaccaacatggagaagccccgtctctactaaaaatgcaaaaaaaaatttagctaggcatggcggcgcatgcctgcaatcccagctacttggaaggctgaggcaggagaatcacttgaacccaggaggtggaggctgcggtgagccgagattgcgccattgcactccagcctgggcaacgagtgaaactccgtctcaaaaaaaagaaaatgtctttctcttccttttatataaatatcgttagggtgaagcattatggtctaatgattcaaatgttttaaagtttaatgcctagcagagaactgccttaaaaaaaaaaaaagttcatgttggccatggtgaaagggtttgatatggagaaacaaaatcctcaggaaattagataaataaaaatttataagcatttgtattattttttaataaactgcagggttacacaaaaatctagctgatttaacttgtattttgtcacttttttataaaagtttattgtttgatgtttttaaaggtttttgaaatccaggaattaaatcatcccttaataaaatattcaaaattcatattttattacatttttctaactcacattcttgttcatttgtgtaattgatagatgttttttactcggtcatttaaatgtttaatatttcatctacatatgaattaccacattttgtgtatgactttaattcctactttaaaaaaaatcagcattccagaattgttgtatggcattctgaggatgaaatagaaaacataattcttagccactataggttgaacacctgcaaaatctgattctgtcagcatcttccatgttaagttcctacaaacagtccaacagtcatcagacccattcacacacaatcacattaatagaataacagatgttactttcaaggttcaattcttattaatatgatatagaatctgaataatactgttttgttaataatctgccagaggctgaagaaagttaactgttttggcttcgatacctgaaacttgtgatttgcaggttcaaaagcaatcgtttatatacactgtttcagttgaagttcaaaaagtaccaactatactttatggttggtggaacatttatgcctttttgataaatgataaaaagatcttactcccaactactgcatattaaaaaaagaagttaatgacaagacgattccgtgggaggttgaggcaggagggttgcttgagcccaggagtttgatttggcaagacctggtctctgatttttttaaaaggatgattccaaattaagtctaagaatggaagtgaatgccaagcacagaccctttcacctccacatagagaataaacgtgggacaagctg

SEQ ID NO: 19011 - DNA, 1894 bp, Homo sapiens
cagcagcccattgacagcattagactggcggcatggtgcttttctgagcagatcaatactctgcagactcgaaaaaacatcacgtacattcttggaacttcccagtggtttaatctgtgtgcatggttagggagccaggtctggaataccccagatatttatcattcaggatattattctcaccgggaaactgtgaacggctcatggtacattcaagatttgtgtgagatgttgggaaaatatggctcctccttagagttcacagaactcctcacactggtgaacaggaaagtttctcagcgccgagtggacttttgcaaagacccaagtgcaattggaaagaagcaggttccctgttttgcctcaatgctaactaaaaagctgcatttctttccaaaatctaattaattaatagaggctatctaattttacactctgtattgaaaatggctttctcagccaggcgtggttactcacacctgtaatcccagcactttgggagtccaaggtgggcggatcacctgaggtcgggagttcgagaccagcctgaccaacatggagaagccccgtctctactaaaaatgcaaaaaaaaatttagctaggcatggcggcgcatgcctgcaatcccagctacttggaaggctgaggcaggagaatcacttgaacccaggaggtggaggctgcggtgagccgagattgcgccattgcactccagcctgggcaacgagtgaaactccgtctcaaaaaaaagaaaatgtctttctcttccttttatataaatatcgttagggtgaagcattatggtctaatgattcaaatgttttaaagtttaatgcctagcagagaactgccttaaaaaaaaaaaaagttcatgttggccatggtgaaagggtttgatatggagaaacaaaatcctcaggaaattagataaataaaaatttataagcatttgtattattttttaataaactgcagggttacacaaaaatctagctgatttaacttgtattttgtcacttttttataaaagtttattgtttgatgtttttaaaggtttttgaaatccaggaattaaatcatcccttaataaaatattcaaaattcatattttattacatttttctaactcacattcttgttcatttgtgtaattgatagatgttttttactcggtcatttaaatgtttaatatttcatctacatatgaattaccacattttgtgtatgactttaattcctactttaaaaaaaatcagcattccagaattgttgtatggcattctgaggatgaaatagaaaacataattcttagccactataggttgaacacctgcaaaatctgattctgtcagcatcttccatgttaagttcctacaaacagtccaacagtcatcagacccattcacacacaatcacattaatagaataacagatgttactttcaaggttcaattcttattaatatgatatagaatctgaataatactgttttgttaataatctgccagaggctgaagaaagttaactgttttggcttcgatacctgaaacttgtgatttgcaggttcaaaagcaatcgtttatatacactgtttcagttgaagttcaaaaagtaccaactatactttatggttggtggaacatttatgcctttttgataaatgataaaaagatcttactcccaactactgcatattaaaaaaagaagttaatgacaagacgattccgtgggaggttgaggcaggagggttgcttgagcccaggagtttgatttggcaagacctggtctctgatttttttaaaaggatgattccaaattaagtctaagaatggaagtgaatgccaagcacagaccctttcacctccacatagagaataaacgtgggacaagctg

SEQ ID NO: 19012 - DNA, 2179 bp, Homo sapiens
ccgagggcggggccgggcccgggagcctgtggcttcaggaagaggagggcaaggtgtctggctgcgcgtttggctgcaatgagctcggcctcggggctccgcagggggcacccggcagtgtcaactgttagccacgcagatgccgattgctttgtgtgtgtcttcctgagccatggcgaaggcaatcacatttatgcatatgatgctaaaatcgaaattcagacattaactggcttgttcaaaggagacaagtgtcacagcctggttggaaaacccaagatatttatcattcaggcatgtcggggaaaccagcacgatgtgccagtcattcctttggatgtagtagataatcagacagagaagttggacaccaacataactgaggtggatgcagcctccgtttacacgctgcctgctggagctgacttcctcatgtgttactctgttgcagaaggatattattctcaccgggaaactgtgaacggctcatggtacattcaagatttgtgtgagatgttgggaaaatatggctcctccttagagttcacagaactcctcacactggtgaacaggaaagtttctcagcgccgagtggacttttgcaaagacccaagtgcaattggaaagaagcaggttccctgttttgcctcaatgctaactaaaaagctgcatttctttccaaaatctaattaattaatagaggctatctaattttacactctgtattgaaaatggctttctcagccaggcgtggttactcacacctgtaatcccagcactttgggagtccaaggtgggcggatcacctgaggtcgggagttcgagaccagcctgaccaacatggagaagccccgtctctactaaaaatgcaaaaaaaaatttagctaggcatggcggcgcatgcctgcaatcccagctacttggaaggctgaggcaggagaatcacttgaacccaggaggtggaggctgcggtgagccgagattgcgccattgcactccagcctgggcaacgagtgaaactccgtctcaaaaaaaagaaaatgtctttctcttccttttatataaatatcgttagggtgaagcattatggtctaatgattcaaatgttttaaagtttaatgcctagcagagaactgccttaaaaaaaaaaaaagttcatgttggccatggtgaaagggtttgatatggagaaacaaaatcctcaggaaattagataaataaaaatttataagcatttgtattattttttaataaactgcagggttacacaaaaatctagctgatttaacttgtattttgtcacttttttataaaagtttattgtttgatgtttttaaaggtttttgaaatccaggaattaaatcatcccttaataaaatattcaaaattcatattttattacatttttctaactcacattcttgttcatttgtgtaattgatagatgttttttactcggtcatttaaatgtttaatatttcatctacatatgaattaccacattttgtgtatgactttaattcctactttaaaaaaaatcagcattccagaattgttgtatggcattctgaggatgaaatagaaaacataattcttagccactataggttgaacacctgcaaaatctgattctgtcagcatcttccatgttaagttcctacaaacagtccaacagtcatcagacccattcacacacaatcacattaatagaataacagatgttactttcaaggttcaattcttattaatatgatatagaatctgaataatactgttttgttaataatctgccagaggctgaagaaagttaactgttttggcttcgatacctgaaacttgtgatttgcaggttcaaaagcaatcgtttatatacactgtttcagttgaagttcaaaaagtaccaactatactttatggttggtggaacatttatgcctttttgataaatgataaaaagatcttactcccaactactgcatattaaaaaaagaagttaatgacaagacgattccgtgggaggttgaggcaggagggttgcttgagcccaggagtttgatttggcaagacctggtctctgatttttttaaaaggatgattccaaattaagtctaagaatggaagtgaatgccaagcacagaccctttcacctccacatagagaataaacgtgggacaagctg

SEQ ID NO: 19013 - DNA, 2294 bp, Homo sapiens
ccgagggcggggccgggcccgggagcctgtggcttcaggaagaggagggcaaggtgtctggctgcgcgtttggctgcaatgagctcggcctcggggctccgcagggggcacccggcaggtggggaagaaaacatgacagaaacagatgccttctataaaagagaaatgtttgatccggcagaaaagtacaaaatggaccacaggaggagaggaattgctttaatcttcaatcatgagaggttcttttggcacttaacactgccagaaaggcggggcacctgcgcagatagagacaatcttacccgcaggttttcagatctaggatttgaagtgaaatgctttaatgatcttaaagcagaagaactactgctcaaaattcatgaggtgtcaactgttagccacgcagatgccgattgctttgtgtgtgtcttcctgagccatggcgaaggcaatcacatttatgcatatgatgctaaaatcgaaattcagacattaactggcttgttcaaaggagacaagtgtcacagcctggttggaaaacccaagatatttatcattcaggcatgtcggggaaaccagcacgatgtgccagtcattcctttggatgtagtagataatcagacagagaagttggacaccaacataactgaggtggatgcagcctccgtttacacgctgcctgctggagctgacttcctcatgtgttactctgttgcagaaggatattattctcaccgggaaactgtgaacggctcatggtacattcaagatttgtgtgagatgttgggaaaatatggctcctccttagagttcacagaactcctcacactggtgaacaggaaagtttctcagcgccgagtggacttttgcaaagacccaagtgcaattggaaagaagcaggttccctgttttgcctcaatgctaactaaaaagctgcatttctttccaaaatctaattaattaatagaggctatctaattttacactctgtattgaaaatggctttctcagccaggcgtggttactcacacctgtaatcccagcactttgggagtccaaggtgggcggatcacctgaggtcgggagttcgagaccagcctgaccaacatggagaagccccgtctctactaaaaatgcaaaaaaaaaaaaaagaaaatgtctttctcttccttttatataaatatcgttagggtgaagcattatggtctaatgattcaaatgttttaaagtttaatgcctagcagagaactgccttaaaaaaaaaaaaagttcatgttggccatggtgaaagggtttgatatggagaaacaaaatcctcaggaaattagataaataaaaatttataagcatttgtattattttttaataaactgcagggttacacaaaaatctagctgatttaacttgtattttgtcacttttttataaaagtttattgtttgatgtttttaaaggtttttgaaatccaggaattaaatcatcccttaataaaatattcaaaattcatattttattacatttttctaactcacattcttgttcatttgtgtaattgatagatgttttttactcggtcatttaaatgtttaatatttcatctacatatgaattaccacattttgtgtatgactttaattcctactttaaaaaaaatcagcattccagaattgttgtatggcattctgaggatgaaatagaaaacataattcttagccactataggttgaacacctgcaaaatctgattctgtcagcatcttccatgttaagttcctacaaacagtccaacagtcatcagacccattcacacacaatcacattaatagaataacagatgttactttcaaggttcaattcttattaatatgatatagaatctgaataatactgttttgttaataatctgccagaggctgaagaaagttaactgttttggcttcgatacctgaaacttgtgatttgcaggttcaaaagcaatcgtttatatacactgtttcagttgaagttcaaaaagtaccaactatactttatggttggtggaacatttatgcctttttgataaatgataaaaagatcttactcccaactactgcatattaaaaaaagaagttaatgacaagacgattccgtgggaggttgaggcaggagggttgcttgagcccaggagtttgatttggcaagacctggtctctgatttttttaaaaggatgattccaaattaagtctaagaatggaagtgaatgccaagcacagaccctttcacctccacatagagaataaacgtgggacaagctg

SEQ ID NO: 19014 - DNA, 369 bp, Homo sapiens
gagcagggaaccaccagattgcctaaggaggggtgaaccggccctggtcgaaaatggagcaggtcaaaattcctgtgctgatcagatctgtttctacgcattttcatatatttgtgcatattaatgttttatattttaacataaatgagatcactcactatatattgttctttgtaagttgcttcccttttaaaatttaatatgccttggctatctggcacctctcaaccttcaagtgtccttaatttataaattttagttagtaaaataacttttaaatacatgcaactataatttatgttgttgtacttctttcattttaatggcaggttaaatcactttagatagcttgagatgtgactcctagtg

SEQ ID NO: 19015 - DNA, 245 bp, Homo sapiens
gtttccttccacgctgttctcatgatagtgaatgagttctcacaagatctgatgagtttaaaactgtttgaaagttcttccttcccacgccctctctcccctgctgccatgtaagatgtgcctgctttcccttctgccatgattgtaagtttcctgaggcctccccaggcatgcagaactgtgggtcaattaaagctctttcctttataaattacccaatctcaggtatttctttattgcactat

SEQ ID NO: 19016 - DNA, 591 bp, Homo sapiens
tcacatgaggaaatgtgtagcttgtagaggtggctgatttaagtaacttgtgcagctctcaaggggtgtctgccttctgtctcctttctaccccatgaaagaagcggggggatgtgaagagaccaggggagtgactccaccttatgcctcaccctggtctcatcttgcccagctgtggtaccctatgttaaccttggctggtcttcacaaaggcgactggaccctgggccctccctgtcccaggatcccctaacccctaccccagaatggtttgtcataatctggaaatttgttggctcatttttctttcaactcctttatttttcattgaacaaatctctgcttttgaagagttgaggttatctgctatctttttttcttttctctccctccctcctgctgcaaagaaaagaaccaataagttttagggatttttgtgtgtatagacattgtcatccggatgtaacttgctttgaagcagtgtttctgttgtgagtgtctcttgctgtaaatatttgttcatatttttgtgaattcagtactgtgtaccattgtattaatagtaactttttataaagcaaaccataaata

SEQ ID NO: 19017 - DNA, 412 bp, Homo sapiens
ggctcctaaatttcctctctcaaaagacatacctcctttgagtaatgtattatatttccataggcctttattcagatgtgttccctgagagggatactctggctccttaggaaggtggatagttacatctgttccatccaattaacatgtactaattgagtacctaccatgtgcaaggcacttttaagacctccagggtgagaatggcatccttcccttcaaggagtttacaacgaaaggaaattaggttgtcaaagtcaagtttgtttcgaagtaggatggccgctaggtctgaaggagcactgcttgggtcattcaacttggaggttaggagtgcagggatgcttgaggcagggacaaaggagaaagagggtcacagaaggggcaatggggaaatgacaataaaccccac

SEQ ID NO: 19018 - DNA, 778 bp, Homo sapiens
aggaaagctgtttttcatggtgagaaataataatgatgactaataataataaaaaaaactggaaaatgtaagcaaggtggacgcattgcttctcggtactcagaaaggttatctgaatttgcgtggtaagcgctggcctgaagatgtacacaagttaaagccatattttatctggtgagccccttaactgtttctgaaggaatgaacggtcagccgggaaggtgtccggcttagaccttgacaacagacactacccatctgtcagccatgtgcagtggttagaactcttcttgaaagtccaaagagcctttaaaatgtgtataatttgtgttttgttgcttctatttctattgattagatgaaaagacattctggccctctgatcctctttcttctccacaaaagttttacaaataaaagatgttcccctaaatacagaatatggctttaagaagaaaatgaaatgaagaattaaattaagatttcagtgttgggggaaaaaatacagcttctggatgactggattgcataacattgccctggcctcacattgtactaggatgcagcttaaatgaagtcatctctaaatctactaacctttcaccttcttatcaaaactttttgaatagacacacactgtacagttcaattgttagagaacctaactactgtagagattgttaaattttttttttttttttgcaaaaattcaagctgtaaaaacttttcaactttcacaatatttaattaaagttacttcctgtctgtgatggcagct

SEQ ID NO: 19019 - DNA, 325 bp, Homo sapiens
tttcagtgaaacctttttactcactaagatagtttaagaaaatgatatcaccatcatttgaccatggagaaaagtggtacaaaggttagatttgctgaaggtcacacactttgtttctaagactgtgaagactaagcccaggtggctgacttccagctctggcctgcacagcgagaaaataaccacattcagagccatacaatgtcttaaattatttaaaatgtaatgtccttagggaattcttgattgtttccttttcctttgttttcatttttctaaaaagtgcttaaggcagctaaaaaagatagactctaaaaaaaaaaaa

SEQ ID NO: 19020 - DNA, 327 bp, Homo sapiens
actgcatggaaactaggttgagagtttgtgggatgtactcaagtttcctttttagatacatccatggctttactgctttttttcctggactgggactgaaagaactgagtcccagttcagtcactcggtttctttgatgacattgtctttagatcagtgttcttaacctcaactctagttaacacttccctctcatgaggttaaattagatgcttagtttccaaacacatttgcacatttgctaaccctgtccatgttggtttatttcctaccctcataccacattccctagccattcgcaagatccatgtgtgagggatgggattc

SEQ ID NO: 19021 - DNA, 640 bp, Homo sapiens
acagtctggtgtttgcaatagtgtagggtccatcccatctgagttcaaggttagtcttcctgcgatgtcttttccggaggactaaattccctgtttggaaattatgaagaggccgtgatggagtatttggagggaaggcagctcacacttgttagtgacaagcataagtgtacttagtccttgataatatctgagaatgtcgattgtaatagattagagtcctcaagggcccaataggagtagaatccttgtgagtctttgagtgattatttcataagaagattattgatatgtgctctggtaggaagagtaatggcccccccctaagatgtctacatctttatccctggaacctgtgaatatagcaccttttatggaaaaaggaactttttgtgattaagaatcttgagatagggagatttatcttggattatcctggtggacccagtatcatcacaagtttccttataagatggaggcaagaacgttagagtcagagaaatatgtaaatatagaagcagaggccgggccaggcacagtggctcacacctgtaatcccaaagctttgggaggccgagtgggggaggatcgcttgaggccaggactttgagaccagcctgggcaacacgtttctacaaaa

SEQ ID NO: 19022 - DNA, 518 bp, Homo sapiens
ttcctttttagaaaacacctaagtaaaaccattcttgaaaggacacatgaacaaattgaaccagtcagaggggaaagatcaggatgatgaagtgactcagaaatcaggatgtccctcttcatggagagctgcctgaagctgagaagggtgcgacggacctgaaggctgcacagcgccgggtcttacccaaggctcaaggtgaccgctgcctggtttctgctggtgtttattcaaagcccaagggctctccagtcagcaagtggtgaatctagtcagacatgtgtcctacgcttcagggcaatgagcttcccctcagcctaagttcctttgctatctcccctgatggactaccaatagcgcaagtgtctgtgacatgaacataagagggagaatctatttcctacaggaaggaagaaatatcttatatcctgaatactgactcttcttgtatttgttacacattcaggcaattccaagcaaatcccaaatcccattaaagatatgttcacacatgcaaa

SEQ ID NO: 19023 - DNA, 833 bp, Homo sapiens
gggaatagtgtggactctgggaaggatttaaaagggatagtcagaatcagctttttgtaactatgttttctgtgactttagactctacctccttaataaaagccagcctggcccacaggggtaatttcagaagtttaggatgatgaggatttcaaaagtttagaatgatgaatatagtttctacctcatgtagtttcatcagcaatcttcatcttcttaaacttctgaaatttaggatttcagaaagcttagtgctcagaatttacctcaaccaacatgcatctttagtaagtagtattcagagagtattagaaaaatcacaaattggtgctttctgcttggggctacaggaaattgtagtggaaaaggcctatttcctaccaatagaaccaattcatgcatctgtagatcatcttctaggctaatagcagaattcgtgataaataataggcaatttaggttgttttggagcgtttgctctttataataaatatttagggaatggagtaaaatatttatttaaatattaaacactgtgtgattcaaatgtttcaattcctttgctatctcccctgatggactaccaatagcgcaagtgtctgtgacatgaacataagagggagaatgtaagtacaacaccatcagtctggtagaatgactcttttaccccagcactttctggggcagaggtgggagaattacctgagcctagaacttccaggtcagcctcggcaacataccaaggcctggaccctactaaaaaccaaagaaacaaacaaaaaccccccaacccaaaccaaacaaaacatttagcagggcgtgatagtgtgtgt

SEQ ID NO: 19024 - DNA, 457 bp, Homo sapiens
ttcctttttagaaaacacctaagtaaaaccattcttgaaaggacacatgaacaaattgaaccagtcagaggggaaagatcaggatgatgaagtgactcagaaatcagattccattatgacattagtctctggtcacaattatctgaagccttgcaggatgcaccattccacttcatcctgtcttcatcacaagaagaaaatcagtggttcctctgccttgttcctccttccagtggattgcatatccagataatgttgaacttgggagccttcatgctttgatcagtaaaatcttgaatgaatggaagttgacataagctaaaggaatcatcttacaccatgacaaaatggagtaaggctggatccccaaatctccaatgtaacaagcctggaacacttatgtgtagaatgctcagactattagttgagagaaaaataaaattccattttgttcaag

SEQ ID NO: 19025 - DNA, 190 bp, Homo sapiens
agcccagctggacccagccagggcgtctgcagggaaccccagactgaaggctcctggactctggcctcatccctgccaggaaaggggtggaggccagaccacagggttgggcccttctgaagcgggcactcaaaaggaagagacggctgtgcctcgtttgtcaaatgaaatcaattactaacccacaggg

SEQ ID NO: 19026 - DNA, 366 bp, Homo sapiens
attaagaactcttaaaagccaaaaggtaaatgaaagcagaacccacagataggcattgaagtcagcttccattcagacgtcattggccaaaccagtattgagtcatcactggtaagtagcagctcagccagagattacatctccccatcacacatccctcacatctgtatggaacaacaggactaattctcagtcatagaaggtgaatacaaaagattcccaggtcccagaggatggtggagcttcaagaagaaagtagccttggtccctaaattatcacatggagaaaaggggcactcccaccagaaacacctaaattggactattatatgattgagaaataaacttttattatgttaagctact

SEQ ID NO: 19027 - DNA, 211 bp, Homo sapiens
tcaagactctgccaaaaaaaaaaaagaagaagagtaggtggacacagacatgtggatatgtggatggacaaatttcacctttctctccttgccactcctagattgtccttgcaatattgttaaactaataactggaggttcaatatgtcttaaataaaggttcaaactgaaaacttattaactcatgtcttattttttatctaaatcataa

SEQ ID NO: 19028 - DNA, 2892 bp, Homo sapiens
attcctcgagcactgttggcctactggaatcgagtcggccttgttggcctactgggcggcgcttcctagttcggctggttcttctgtcgccggcttcagcagcccgcgcccgggcaggaatagaagatgaacaaacccataacaccatcaacatatgtgcgctgcctcaatgttggactaattaggaagctgtcagattttattgatcctcaagaaggatggaagaagttagctgtagctattaaaaaaccatctggtgatgatagatacaatcagtttcacataaggagatttgaagcattacttcaaactggaaaaagtcccacttctgaattactgtttgactggggcaccacaaattgcacagttggtgatcttgtggatcttttgatccaaaatgaattttttgctcctgcgagtcttttgctcccagatgctgttcccaaaactgctaatacactaccttctaaagaagctataacagttcagcaaaaacagatgcctttctgtgacaaagacaggacattgatgacacctgtgcagaatcttgaacaaagctatatgccacctgactcctcaagtccagaaaataaaagtttagaagttagtgatacacgttttcacagtttttcattttatgaattgaagaatgtcacaaataactttgatgaacgacccatttctgttggtggtaataaaatgggagagggaggatttggagttgtatataaaggctacgtaaataacacaactgtggcagtgaagaagcttgcagcaatggttgacattactactgaagaactgaaacagcagtttgatcaagaaataaaagtaatggcaaagtgtcaacatgaaaacttagtagaactacttggtttctcaagtgatggagatgacctctgcttagtatatgtttacatgcctaatggttcattgctagacagactctcttgcttggatggtactccaccactttcttggcacatgagatgcaagattgctcagggtgcagctaatggcatcaattttctacatgaaaatcatcatattcatagagatattaaaagtgcaaatatcttactggatgaagcttttactgctaaaatatctgactttggccttgcacgggcttctgagaagtttgcccagacagtcatgactagcagaattgtgggaacaacagcttatatggcaccagaagctttgcgtggagaaataacacccaaatctgatatttacagctttggtgtggttttactagaaataataactggacttccagctgtggatgaacaccgtgaacctcagttattgctagatattaaagaagaaattgaagatgaagaaaagacaattgaagattatattgataaaaagatgaatgatgctgattccacttcagttgaagctatgtactctgttgctagtcaatgtctgcatgaaaagaaaaataagagaccagacattaagaaggttcaacagctgctgcaagagatgacagcttcttaaaactttattggaaaagactcttgactttttatatacacctatctcaaccatttttttaactgatttttttcctaaatattcttctttacctttaacaaggcataggctgttgcaggacagtggttattaaagcatgggttgaacttccaaaatataaaaatagagccaccatatcaacacttagccctacccattagtatcacccccagttcttacagtaatccctgagaaatctccttcaagcatcaccaaacacagtttgaaaattacagggttagcaaaaagagcctgggctgtatgtagggtggaaacactctgatctgaagcccagctgactccactactaatttgctgtaaagctttggacatacacttagctgctgtgagccactaataacattgggctaatatctgctgtgcttctctgacaggtagtcatgaaaatcaaatgatgcaaaatatatacaagcactttgtaaattgtaaaatgatacaaaatttaaagtttatagagccagttacaaaatcctattagtcatatatttatagattgtgttcacagcaatcatttaaccacaaataaaatatcccttgatgatactgccataatgatatgtccattattagattatgttacatgacaaagttgaaggaatttggcagatgcagttaaggttcctaaacaactcactttgagactgttgaaagggcctgacctaatcaagtgaacccttgcaagaagaattctccttgtaagccttgaagaagtatgtgagagggccacattggctaaaacctaaaggtggcctctaggagatgagacctaccttccagttgtcagcaagcaggaaaaaaaaattgggacctcagttgcaaccacaaggaactgaattctgccaaaaatctgagtcagcttagaagagtactccaagcttcagatgataaccacagcctgggctgacacctggatttcagctttgcatgatcctcagtatgagaatctatctgttctgtgctggacttctaatatatagaactgtgagataatgggtcacattggctggatgtggtggctcatacctgtaaatcccagcactttgggaggccgaggcaggcagatcacctgaggtcaagagttcaagaccggcctggccaacatggtgaaaccccgtctctactaaaaatacaaaaattagacgagcgtggtggtggacacctgtagtcccagctacttgggaggctgaggcaggagactagctggaaccagggaggtagaggttgcagtgagctgagatcgtgccactgcactccagcctgggtgacagagtgagactccatcataaataaataaataaataaatgggtcacattaagcctttaaaa

SEQ ID NO: 19029 - DNA, 2746 bp, Homo sapiens
attcctcgagcactgttggcctactggaatcgagtcggccttgttggcctactgggcggcgcttcctagttcggctggttcttctgtcgccggcttcagcagcccgcgcccgggcaggaatagaagatgaacaaacccataacaccatcaacatatgtgcgctgcctcaatgttggactaattaggaagctgtcagattttattgatcctcaagaaggatggaagaagttagctgtagctattaaaaaaccatctggtgatgatagatacaatcagtttcacataagatgctgttcccaaaactgctaatacactaccttctaaagaagctataacagttcagcaaaaacagatgcctttctgtgacaaagacaggacattgatgacacctgtgcagaatcttgaacaaagctatatgccacctgactcctcaagtccagaaaataaaagtttagaagttagtgatacacgttttcacagtttttcattttatgaattgaagaatgtcacaaataactttgatgaacgacccatttctgttggtggtaataaaatgggagagggaggatttggagttgtatataaaggctacgtaaataacacaactgtggcagtgaagaagcttgcagcaatggttgacattactactgaagaactgaaacagcagtttgatcaagaaataaaagtaatggcaaagtgtcaacatgaaaacttagtagaactacttggtttctcaagtgatggagatgacctctgcttagtatatgtttacatgcctaatggttcattgctagacagactctcttgcttggatggtactccaccactttcttggcacatgagatgcaagattgctcagggtgcagctaatggcatcaattttctacatgaaaatcatcatattcatagagatattaaaagtgcaaatatcttactggatgaagcttttactgctaaaatatctgactttggccttgcacgggcttctgagaagtttgcccagacagtcatgactagcagaattgtgggaacaacagcttatatggcaccagaagctttgcgtggagaaataacacccaaatctgatatttacagctttggtgtggttttactagaaataataactggacttccagctgtggatgaacaccgtgaacctcagttattgctagatattaaagaagaaattgaagatgaagaaaagacaattgaagattatattgataaaaagatgaatgatgctgattccacttcagttgaagctatgtactctgttgctagtcaatgtctgcatgaaaagaaaaataagagaccagacattaagaaggttcaacagctgctgcaagagatgacagcttcttaaaactttattggaaaagactcttgactttttatatacacctatctcaaccatttttttaactgatttttttcctaaatattcttctttacctttaacaaggcataggctgttgcaggacagtggttattaaagcatgggttgaacttccaaaatataaaaatagagccaccatatcaacacttagccctacccattagtatcacccccagttcttacagtaatccctgagaaatctccttcaagcatcaccaaacacagtttgaaaattacagggttagcaaaaagagcctgggctgtatgtagggtggaaacactctgatctgaagcccagctgactccactactaatttgctgtaaagctttggacatacacttagctgctgtgagccactaataacattgggctaatatctgctgtgcttctctgacaggtagtcatgaaaatcaaatgatgcaaaatatatacaagcactttgtaaattgtaaaatgatacaaaatttaaagtttatagagccagttacaaaatcctattagtcatatatttatagattgtgttcacagcaatcatttaaccacaaataaaatatcccttgatgatactgccataatgatatgtccattattagattatgttacatgacaaagttgaaggaatttggcagatgcagttaaggttcctaaacaactcactttgagactgttgaaagggcctgacctaatcaagtgaacccttgcaagaagaattctccttgtaagccttgaagaagtatgtgagagggccacattggctaaaacctaaaggtggcctctaggagatgagacctaccttccagttgtcagcaagcaggaaaaaaaaattgggacctcagttgcaaccacaaggaactgaattctgccaaaaatctgagtcagcttagaagagtactccaagcttcagatgataaccacagcctgggctgacacctggatttcagctttgcatgatcctcagtatgagaatctatctgttctgtgctggacttctaatatatagaactgtgagataatgggtcacattggctggatgtggtggctcatacctgtaaatcccagcactttgggaggccgaggcaggcagatcacctgaggtcaagagttcaagaccggcctggccaacatggtgaaaccccgtctctactaaaaatacaaaaattagacgagcgtggtggtggacacctgtagtcccagctacttgggaggctgaggcaggagactagctggaaccagggaggtagaggttgcagtgagctgagatcgtgccactgcactccagcctgggtgacagagtgagactccatcataaataaataaataaataaatgggtcacattaagcctttaaaa

SEQ ID NO: 19030 - DNA, 3430 bp, Homo sapiens
attcctcgagcactgttggcctactggaatcgagtcggccttgttggcctactgggcggcgcttcctagttcggctggttcttctgtcgccggcttcagcagcccgcgcccgggcaggtaaggcattccccgccttaatgcctcggtcaaacgtcgtccgaggtccgcttccaggcctcggcacctctgccccagggttgctggggtcggctgcggaacggaaatctctttatcatccgtgagaaaagttagagaggaagtgggttcctttgacagagcttactccagaagaaagacttgggtaggtccccggtaatcaagaagttcgtcggccctgaggaagagcctgaggcttggagggacgtcacccagctgttctggggcgcagtcggacctcaagtttctcacctctcaggccctggattccgtgaacccgactgcgaaatgaagtctcttttccccagaaccaggaagtcaggccagcacctgacagatgcctgtggcgccagcagctcgctgagcctccacacgattgtaattcgcttgtttctccggcctccaagcttccagggaattagaaagtggaggcggcttatgggatcagatgagtacattcgcagatgggggaaaaaagtgtacctgtcagcttggaagccagagggagacaaagggataaaagcaaaccctgtccaggggcctggagcagtatctagcacaaagtagacactcagtaaatatttggaatagaagatgaacaaacccataacaccatcaacatatgtgcgctgcctcaatgttggactaattaggaagctgtcagattttattgatcctcaagaaggatggaagaagttagctgtagctattaaaaaaccatctggtgatgatagatacaatcagtttcacataaggagatttgaagcattacttcaaactggaaaaagtcccacttctgaattactgtttgactggggcaccacaaattgcacagttggtgatcttgtggatcttttgatccaaaatgaattttttgctcctgcgagtcttttgctcccagatgctgttcccaaaactgctaatacactaccttctaaagaagctataacagttcagcaaaaacagatgcctttctgtgacaaagacaggacattgatgacacctgtgcagaatcttgaacaaagctatatgccacctgactcctcaagtccagaaaataaaagtttagaagttagtgatacacgttttcacagtttttcattttatgaattgaagaatgtcacaaataactttgatgaacgacccatttctgttggtgatggttgacattactactgaagaactgaaacagcagtttgatcaagaaataaaagtaatggcaaagtgtcaacatgaaaacttagtagaactacttggtttctcaagtgatggagatgacctctgcttagtatatgtttacatgcctaatggttcattgctagacagactctcttgcttggatggtactccaccactttcttggcacatgagatgcaagattgctcagggtgcagctaatggcatcaattttctacatgaaaatcatcatattcatagagatattaaaagtgcaaatatcttactggatgaagcttttactgctaaaatatctgactttggccttgcacgggcttctgagaagtttgcccagacagtcatgactagcagaattgtgggaacaacagcttatatggcaccagaagctttgcgtggagaaataacacccaaatctgatatttacagctttggtgtggttttactagaaataataactggacttccagctgtggatgaacaccgtgaacctcagttattgctagatattaaagaagaaattgaagatgaagaaaagacaattgaagattatattgataaaaagatgaatgatgctgattccacttcagttgaagctatgtactctgttgctagtcaatgtctgcatgaaaagaaaaataagagaccagacattaagaaggttcaacagctgctgcaagagatgacagcttcttaaaactttattggaaaagactcttgactttttatatacacctatctcaaccatttttttaactgatttttttcctaaatattcttctttacctttaacaaggcataggctgttgcaggacagtggttattaaagcatgggttgaacttccaaaatataaaaatagagccaccatatcaacacttagccctacccattagtatcacccccagttcttacagtaatccctgagaaatctccttcaagcatcaccaaacacagtttgaaaattacagggttagcaaaaagagcctgggctgtatgtagggtggaaacactctgatctgaagcccagctgactccactactaatttgctgtaaagctttggacatacacttagctgctgtgagccactaataacattgggctaatatctgctgtgcttctctgacaggtagtcatgaaaatcaaatgatgcaaaatatatacaagcactttgtaaattgtaaaatgatacaaaatttaaagtttatagagccagttacaaaatcctattagtcatatatttatagattgtgttcacagcaatcatttaaccacaaataaaatatcccttgatgatactgccataatgatatgtccattattagattatgttacatgacaaagttgaaggaatttggcagatgcagttaaggttcctaaacaactcactttgagactgttgaaagggcctgacctaatcaagtgaacccttgcaagaagaattctccttgtaagccttgaagaagtatgtgagagggccacattggctaaaacctaaaggtggcctctaggagatgagacctaccttccagttgtcagcaagcaggaaaaaaaaattgggacctcagttgcaaccacaaggaactgaattctgccaaaaatctgagtcagcttagaagagtactccaagcttcagatgataaccacagcctgggctgacacctggatttcagctttgcatgatcctcagtatgagaatctatctgttctgtgctggacttctaatatatagaactgtgagataatgggtcacattggctggatgtggtggctcatacctgtaaatcccagcactttgggaggccgaggcaggcagatcacctgaggtcaagagttcaagaccggcctggccaacatggtgaaaccccgtctctactaaaaatacaaaaattagacgagcgtggtggtggacacctgtagtcccagctacttgggaggctgaggcaggagactagctggaaccagggaggtagaggttgcagtgagctgagatcgtgccactgcactccagcctgggtgacagagtgagactccatcataaataaataaataaataaatgggtcacattaagcctttaaaa

SEQ ID NO: 19031 - DNA, 1952 bp, Homo sapiens
attcctcgagcactgttggcctactggaatcgagtcggccttgttggcctactgggcggcgcttcctagttcggctggttcttctgtcgccggcttcagcagcccgcgcccgggcaggtaaggcattccccgccttaatgcctcggtcaaacgtcgtccgaggtccgcttccaggcctcggcacctctgccccagggttgctggggtcggctgcggaacggaaatctctttatcatccgtgagaaaagttagagaggaagtgggttcctttgacagagcttactccagaagaaagacttgggtaggtccccggtaatcaagaagttcgtcggccctgaggaagagcctgaggcttggagggacgtcacccagctgttctggggcgcagtcggacctcaagtttctcacctctcaggccctggattccgtgaacccgactgcgaaatgaagtctcttttccccagaaccaggaagtcaggccagcacctgacagatgcctgtggcgccagcagctcgctgagcctccacacgattgtaattcgcttgtttctccggcctccaagcttccagggaattagaaagtggaggcggcttatgggatcagatgagtacattcgcagatgggggaaaaaagtgtacctgtcagcttggaagccagagggagacaaagggataaaagcaaaccctgtccaggggcctggagcagtatctagcacaaagtagacactcagtaaatatttggaatagaagatgaacaaacccataacaccatcaacatatgtgcgctgcctcaatgttggactaattaggaagctgtcagattttattgatcctcaagaaggatggaagaagttagctgtagctattaaaaaaccatctggtgatgatagatacaatcagtttcacataaggagatttgaagcattacttcaaactggaaaaagtcccacttctgaattactgtttgactggggcaccacaaattgcacagttggtgatcttgtggatcttttgatccaaaatgaattttttgctcctgcgagtcttttgctcccagatgctgttcccaaaactgctaatacactaccttctaaagaagctataacagttcagcaaaaacagatgcctttctgtgacaaagacaggacattgatgacacctgtgcagaatcttgaacaaagctatatgccacctgactcctcaagtccagaaaataaaagtttagaagttagtgatacacgttttcacagtttttcattttatgaattgaagaatgtcacaaataactttgatgaacgacccatttctgttggtggtaataaaatgggagagggaggatttggagttgtatataaaggctacgtaaataacacaactgtggcagtgaagaagcttgcagcagtaagttatattttcaggaataaaaagaaagagttgcttcatagtgtgccctataataggttttaaagttaatctttaggaaatacattatttcagtatgtattttctttaaataaacatcattctaaatagtagttcttaaaattttaaaatctgttgaacactatggaccctacccctagaaaaatgtggttatgtccatgtacacaagatcatacatacaattttgggagattcacaaactaaagttgagaagccctgctccacatagtgcttcatgtgtaatcaagattaaaatggtaagataccaggaaaactatttttaaaaaaccttgtttgcattacttttcccatttaaaaataaaatttaggaagtatacattaagaaaaaacattaaaattttttttatctgtgtcctttgttgccatttctactgaggtgtttaccttttacttacttgttatattctaaatcttttgttagagcctaaaaatatcaatagaatgcatatgtatgtgataaagatagtcactctttgtcatatatgttg

SEQ ID NO: 19032 - DNA, 3370 bp, Homo sapiens
attcctcgagcactgttggcctactggaatcgagtcggccttgttggcctactgggcggcgcttcctagttcggctggttcttctgtcgccggcttcagcagcccgcgcccgggcaggtaaggcattccccgccttaatgcctcggtcaaacgtcgtccgaggtccgcttccaggcctcggcacctctgccccagggttgctggggtcggctgcggaacggaaatctctttatcatccgtgagaaaagttagagaggaagtgggttcctttgacagagcttactccagaagaaagacttgggtaggtccccggtaatcaagaagttcgtcggccctgaggaagagcctgaggcttggagggacgtcacccagctgttctggggcgcagtcggacctcaagtttctcacctctcaggccctggattccgtgaacccgactgcgaaatgaagtctcttttccccagaaccaggaagtcaggccagcacctgacagatgcctgtggcgccagcagctcgctgagcctccacacgattgtaattcgcttgtttctccggcctccaagcttccagggaattagaaagtggaggcggcttatgggatcagatgagtacattcgcagatgggggaaaaaagtgtacctgtcagcttggaagccagagggagacaaagggataaaagcaaaccctgtccaggggcctggagcagtatctagcacaaagtagacactcagtaaatatttggaatagaagatgaacaaacccataacaccatcaacatatgtgcgctgcctcaatgttggactaattaggaagctgtcagattttattgatcctcaagaaggatggaagaagttagctgtagctattaaaaaaccatctggtgatgatagatacaatcagtttcacataagatgctgttcccaaaactgctaatacactaccttctaaagaagctataacagttcagcaaaaacagatgcctttctgtgacaaagacaggacattgatgacacctgtgcagaatcttgaacaaagctatatgccacctgactcctcaagtccagaaaataaaagtttagaagttagtgatacacgttttcacagtttttcattttatgaattgaagaatgtcacaaataactttgatgaacgacccatttctgttggtggtaataaaatgggagagggaggatttggagttgtatataaaggctacgtaaataacacaactgtggcagtgaagaagcttgcagcaatggttgacattactactgaagaactgaaacagcagtttgatcaagaaataaaagtaatggcaaagtgtcaacatgaaaacttagtagaactacttggtttctcaagtgatggagatgacctctgcttagtatatgtttacatgcctaatggttcattgctagacagactctcttgcttggatggtactccaccactttcttggcacatgagatgcaagattgctcagggtgcagctaatggcatcaattttctacatgaaaatcatcatattcatagagatattaaaagtgcaaatatcttactggatgaagcttttactgctaaaatatctgactttggccttgcacgggcttctgagaagtttgcccagacagtcatgactagcagaattgtgggaacaacagcttatatggcaccagaagctttgcgtggagaaataacacccaaatctgatatttacagctttggtgtggttttactagaaataataactggacttccagctgtggatgaacaccgtgaacctcagttattgctagatattaaagaagaaattgaagatgaagaaaagacaattgaagattatattgataaaaagatgaatgatgctgattccacttcagttgaagctatgtactctgttgctagtcaatgtctgcatgaaaagaaaaataagagaccagacattaagaaggttcaacagctgctgcaagagatgacagcttcttaaaactttattggaaaagactcttgactttttatatacacctatctcaaccatttttttaactgatttttttcctaaatattcttctttacctttaacaaggcataggctgttgcaggacagtggttattaaagcatgggttgaacttccaaaatataaaaatagagccaccatatcaacacttagccctacccattagtatcacccccagttcttacagtaatccctgagaaatctccttcaagcatcaccaaacacagtttgaaaattacagggttagcaaaaagagcctgggctgtatgtagggtggaaacactctgatctgaagcccagctgactccactactaatttgctgtaaagctttggacatacacttagctgctgtgagccactaataacattgggctaatatctgctgtgcttctctgacaggtagtcatgaaaatcaaatgatgcaaaatatatacaagcactttgtaaattgtaaaatgatacaaaatttaaagtttatagagccagttacaaaatcctattagtcatatatttatagattgtgttcacagcaatcatttaaccacaaataaaatatcccttgatgatactgccataatgatatgtccattattagattatgttacatgacaaagttgaaggaatttggcagatgcagttaaggttcctaaacaactcactttgagactgttgaaagggcctgacctaatcaagtgaacccttgcaagaagaattctccttgtaagccttgaagaagtatgtgagagggccacattggctaaaacctaaaggtggcctctaggagatgagacctaccttccagttgtcagcaagcaggaaaaaaaaattgggacctcagttgcaaccacaaggaactgaattctgccaaaaatctgagtcagcttagaagagtactccaagcttcagatgataaccacagcctgggctgacacctggatttcagctttgcatgatcctcagtatgagaatctatctgttctgtgctggacttctaatatatagaactgtgagataatgggtcacattggctggatgtggtggctcatacctgtaaatcccagcactttgggaggccgaggcaggcagatcacctgaggtcaagagttcaagaccggcctggccaacatggtgaaaccccgtctctactaaaaatacaaaaattagacgagcgtggtggtggacacctgtagtcccagctacttgggaggctgaggcaggagactagctggaaccagggaggtagaggttgcagtgagctgagatcgtgccactgcactccagcctgggtgacagagtgagactccatcataaataaataaataaataaatgggtcacattaagcctttaaaa

SEQ ID NO: 19033 - DNA, 3516 bp, Homo sapiens
attcctcgagcactgttggcctactggaatcgagtcggccttgttggcctactgggcggcgcttcctagttcggctggttcttctgtcgccggcttcagcagcccgcgcccgggcaggtaaggcattccccgccttaatgcctcggtcaaacgtcgtccgaggtccgcttccaggcctcggcacctctgccccagggttgctggggtcggctgcggaacggaaatctctttatcatccgtgagaaaagttagagaggaagtgggttcctttgacagagcttactccagaagaaagacttgggtaggtccccggtaatcaagaagttcgtcggccctgaggaagagcctgaggcttggagggacgtcacccagctgttctggggcgcagtcggacctcaagtttctcacctctcaggccctggattccgtgaacccgactgcgaaatgaagtctcttttccccagaaccaggaagtcaggccagcacctgacagatgcctgtggcgccagcagctcgctgagcctccacacgattgtaattcgcttgtttctccggcctccaagcttccagggaattagaaagtggaggcggcttatgggatcagatgagtacattcgcagatgggggaaaaaagtgtacctgtcagcttggaagccagagggagacaaagggataaaagcaaaccctgtccaggggcctggagcagtatctagcacaaagtagacactcagtaaatatttggaatagaagatgaacaaacccataacaccatcaacatatgtgcgctgcctcaatgttggactaattaggaagctgtcagattttattgatcctcaagaaggatggaagaagttagctgtagctattaaaaaaccatctggtgatgatagatacaatcagtttcacataaggagatttgaagcattacttcaaactggaaaaagtcccacttctgaattactgtttgactggggcaccacaaattgcacagttggtgatcttgtggatcttttgatccaaaatgaattttttgctcctgcgagtcttttgctcccagatgctgttcccaaaactgctaatacactaccttctaaagaagctataacagttcagcaaaaacagatgcctttctgtgacaaagacaggacattgatgacacctgtgcagaatcttgaacaaagctatatgccacctgactcctcaagtccagaaaataaaagtttagaagttagtgatacacgttttcacagtttttcattttatgaattgaagaatgtcacaaataactttgatgaacgacccatttctgttggtggtaataaaatgggagagggaggatttggagttgtatataaaggctacgtaaataacacaactgtggcagtgaagaagcttgcagcaatggttgacattactactgaagaactgaaacagcagtttgatcaagaaataaaagtaatggcaaagtgtcaacatgaaaacttagtagaactacttggtttctcaagtgatggagatgacctctgcttagtatatgtttacatgcctaatggttcattgctagacagactctcttgcttggatggtactccaccactttcttggcacatgagatgcaagattgctcagggtgcagctaatggcatcaattttctacatgaaaatcatcatattcatagagatattaaaagtgcaaatatcttactggatgaagcttttactgctaaaatatctgactttggccttgcacgggcttctgagaagtttgcccagacagtcatgactagcagaattgtgggaacaacagcttatatggcaccagaagctttgcgtggagaaataacacccaaatctgatatttacagctttggtgtggttttactagaaataataactggacttccagctgtggatgaacaccgtgaacctcagttattgctagatattaaagaagaaattgaagatgaagaaaagacaattgaagattatattgataaaaagatgaatgatgctgattccacttcagttgaagctatgtactctgttgctagtcaatgtctgcatgaaaagaaaaataagagaccagacattaagaaggttcaacagctgctgcaagagatgacagcttcttaaaactttattggaaaagactcttgactttttatatacacctatctcaaccatttttttaactgatttttttcctaaatattcttctttacctttaacaaggcataggctgttgcaggacagtggttattaaagcatgggttgaacttccaaaatataaaaatagagccaccatatcaacacttagccctacccattagtatcacccccagttcttacagtaatccctgagaaatctccttcaagcatcaccaaacacagtttgaaaattacagggttagcaaaaagagcctgggctgtatgtagggtggaaacactctgatctgaagcccagctgactccactactaatttgctgtaaagctttggacatacacttagctgctgtgagccactaataacattgggctaatatctgctgtgcttctctgacaggtagtcatgaaaatcaaatgatgcaaaatatatacaagcactttgtaaattgtaaaatgatacaaaatttaaagtttatagagccagttacaaaatcctattagtcatatatttatagattgtgttcacagcaatcatttaaccacaaataaaatatcccttgatgatactgccataatgatatgtccattattagattatgttacatgacaaagttgaaggaatttggcagatgcagttaaggttcctaaacaactcactttgagactgttgaaagggcctgacctaatcaagtgaacccttgcaagaagaattctccttgtaagccttgaagaagtatgtgagagggccacattggctaaaacctaaaggtggcctctaggagatgagacctaccttccagttgtcagcaagcaggaaaaaaaaattgggacctcagttgcaaccacaaggaactgaattctgccaaaaatctgagtcagcttagaagagtactccaagcttcagatgataaccacagcctgggctgacacctggatttcagctttgcatgatcctcagtatgagaatctatctgttctgtgctggacttctaatatatagaactgtgagataatgggtcacattggctggatgtggtggctcatacctgtaaatcccagcactttgggaggccgaggcaggcagatcacctgaggtcaagagttcaagaccggcctggccaacatggtgaaaccccgtctctactaaaaatacaaaaattagacgagcgtggtggtggacacctgtagtcccagctacttgggaggctgaggcaggagactagctggaaccagggaggtagaggttgcagtgagctgagatcgtgccactgcactccagcctgggtgacagagtgagactccatcataaataaataaataaataaatgggtcacattaagcctttaaaa

SEQ ID NO: 19034 - DNA, 1657 bp, Homo sapiens
attcctcgagcactgttggcctactggaatcgagtcggccttgttggcctactgggcggcgcttcctagttcggctggttcttctgtcgccggcttcagcagcccgcgcccgggcaggaatagaagatgaacaaacccataacaccatcaacatatgtgcgctgcctcaatgttggactaattaggaagctgtcagattttattgatcctcaagaaggatggaagaagttagctgtagctattaaaaaaccatctggtgatgatagatacaatcagtttcacataaggagatttgaagcattacttcaaactggaaaaagtcccacttctgaattactgtttgactggggcaccacaaattgcacagttggtgatcttgtggatcttttgatccaaaatgaattttttgctcctgcgagtcttttgctcccagatgctgttcccaaaactgctaatacactaccttctaaagaagctataacagttcagcaaaaacagatgcctttctgtgacaaagacaggacattgatgacacctgtgcagaatcttgaacaaagctatatgccacctgactcctcaagtccagaaaataaaagtttagaagttagtgatacacgttttcacagtttttcattttatgaattgaagaatgtcacaaataactttgatgaacgacccatttctgttggtggtaataaaatgggagagggaggatttggagttgtatataaaggctacgtaaataacacaactgtggcagtgaagaagcttgcagcaatggttgacattactactgaagaactgaaacagcagtttgatcaagaaataaaagtaatggcaaagtgtcaacatgaaaacttagtagaactacttggtttctcaagtgatggagatgacctctgcttagtatatgtttacatgcctaatggttcattgctagacagactctcttgcttggatggtactccaccactttcttggcacatgagatgcaagattgctcagggtgcagctaatggcatcaattttctacatgaaaatcatcatattcatagagatattaaaagtgcaaatatcttactggatgaagcttttactgctaaaatatctgactttggccttgcacgggcttctgagaagtttgcccagacagtcatgactagcagaattgtgggaacaacagcttatatggcaccagaagctttgcgtggagaaataacacccaaatctgatatttacagctttggtgtggttttactagaaataataactggacttccagctgtggatgaacaccgtgaacctcagttattgctagatattaaagaagaaattgaagatgaagaaaagacaattgaagattatattgataaaaagatgaatgatgctgattccacttcagttgaagctatgtactctgttgctagtcaatgtctgcatgaaaagaaaaataagagaccagacattaagaaggttcaacagctgctgcaagagatgacagcttcttaaaactttattggaaaagactcttgactttttatatacacctatctcaaccatttttttaactgatttttttcctaaatattcttctttacctttaacaaggcataggctgttgcaggacagtggttattaaagcatgggttgaacttcc

SEQ ID NO: 19035 - DNA, 463 bp, Homo sapiens
acaactcaaattccccaaattatttgccattaaaacccattagggatataagcagtgagcccaagagttccctacctttggtgtatatgaactcccatggcattccatagctattttttacttcaaagaaaaagagtaagataaatccatacaactgtctcaaaataatgggagttttagcttgacaaaacaaacgtgaaggacttgaggcctgttagtggactgacaggaagttcagtgggcctgatgtaagtcaagggaaatagtaggaattagtaccctaagttgtgggacgtcagatcgcttaggaccttccaagctatgatagaagtttgaatgttatttttatttatttatttttgagacggggtctggctctttcgcccaggaggcggaggttgtggtgagtcgaggttgcgccattgcactccagcctgggcaacaagagcgaaattccatctca

SEQ ID NO: 19036 - DNA, 400 bp, Homo sapiens
tgcaaaatgtgcaggcttcaattgctggttcgttctgtctttgcattcagctcgtactgggggaaccaggcccacagttgggttgcatgggtccctccagtctcctattccatggtcgtacacaccttaagggcacccatagagtttgttcatctcctgcaaaaacacaagcgtaccctcatccccacattagcaaattaattgaaaaaaggcaaaggcttttgaggctgtagctgggggcatgctgttgctgatgcatctgctccacaagctgcaattcagcttcttcctctttggttaaccacgcggtaaaactttccattgataatgagaggcaggctctttctgattaacagaaggcacagagaaaacaaagaaaacaaatcaaagcttatttttc

SEQ ID NO: 19037 - DNA, 836 bp, Homo sapiens
gttgttaaaatcatttcatgaaagaaaaaaaacaacaaaaaacttaaaatcataaaaaatacgggatggatgtaatctcataaaaaagagcagtcttttaagtaaataaatgaaagcaaacctccaagtccctcatgttcccatacttatttttttgatttcatcactgacaggtgagaacttgtctggcctgggagcggctttggagaagtgcttttctaggttgcttctcctgctgataaggaccatgactcacaggaaggctgctctgaaaccccttacaggagaatggggaccatggttgtgttttcttggttacctctcactcggggcatcttcccattagcggttttgacttaattcactctgggcttgaggctcctccttggtaagttggatagttggaaatgatctctgagtcccatgctctggtttcatgggttcctttccttttaagggaaaacaaacttctctgcaatgttaagagaggttgtgatggtaaataaccgaaaattaataagcaatgactgaggagtagccagcccacgatcgctttcctagaatatactctgactcccaaaataagcaggcacagacaacagtgtggagcccctctcatcatatcccgcatgcaaaattcagggagacttggagctaaaaacgcattgacttcttagttgtctccatttgttctgggttaggtgatggatccacagtgacttagcagctttgatgacagccggggcttctggaggcttggcggcatgttaaaaccacctgggtctattccagatggattaaatcaggctctctgggactggggtccagacatcatt

SEQ ID NO: 19038 - DNA, 411 bp, Homo sapiens
atttctttataaaagttttaagtgagtctgtagtcccagatactagggaggctgaggcaagagaattgcttgaacctgggaaatggaggttgtagtgagccgagatggtgccactttctagcctgggcgaaagagtaacaccgaaaaaagttttcggtggagtgagatgctagggagcaacatttgtcacgtaaatcacatgtgtactctgaggcataaggcctagaaaatgacctgaatttcctaagggtagaattcttcaataagtttggagttgagaagcagaggagctgaagggagagatggagaaggcctttttctttttggcttcattctgcttgttaagcattataaaaacaaaccccaagtaaaggaataaatgtaaatgaaataaaacatttaaaatgagac

SEQ ID NO: 19039 - DNA, 350 bp, Homo sapiens
gactaaatttacacagccccctagtatagcctgtggatctatagtatcagcatcgcctgggaacttgttagaaatgccgctagagcttcacttcagatctactgaatgagaatttgcagttttaacaaggtccccaggtgattcttatgcacagtgaagtctggaaaaatactgccctataaggtcctccaaaagaagtgatatggaactcaggagtcaaccaggcaaaggggccagtgaagagtgttccagcatcgcctatatttatgtcatattttcactaccttttcaaaagttttatcttttccctcattcccatgaatatacacttgtactttgtcagaccatgt

SEQ ID NO: 19040 - DNA, 570 bp, Homo sapiens
agttttttttgtagttttatttttttattttttgcgtggggcccttcaggcgtcctggatctatggaacagcacaccacatcacatatcatatcactttcggaaaattcttagctagtatcttctccccattctcttttctgtccttctggaactttaatattaaatctcctcttttttttttttttttagcttgtctgtgatatttcccatttattttgtgtcttcgtactatagtctgtgtaatttcttcagataattctcagtacaccaatactctctgcctgcacctaatctgttgttcagtccatccattgaatgttgttttcatttgttttgtgtgagggcagtgggaggggtgagcgtacaattgtttcttttgaaatctacctagtcagttaacagtctcttcctggtatgtaattctgatttcctaatttcttcctcaaacttctaaatcatttatattctgcaaacactaacgttaacatctgaaatctttgtaaatgtgattcctctgcaggttttcttagctaactcctgcttattggactttgtttcctttttttac

SEQ ID NO: 19041 - DNA, 378 bp, Homo sapiens
agttttttttgtagttttatttttttattttttgcgtggggcccttcaggcgtcctggatctatggaacagcacaccacatcacatatcatatcactttcggaaaattcttagctagtatcttctccccattctcttttctgtccttctggaactttaatattaaatctcctcttttttttttttttttagcttgtctgtgatatttcccatttattttgtgtcttcgtactatagtctgtgtaatttcttcagataattctcaatcatttatattctgcaaacactaacgttaacatctgaaatctttgtaaatgtgattcctctgcaggttttcttagctaactcctgcttattggactttgtttcctttttttac

SEQ ID NO: 19042 - DNA, 426 bp, Homo sapiens
ttctgtaactttagtgtgtgtacttccctctccaccccagatatagttggaagagaatgaccttcttagatggtcacttctatgcttttaaagggtatgcatgaagctggaagtctccaactgaactgtttttaaaaacaaagatgccagctgggcactattgctctcacctgtaaatcccaacactttgggaggccgaggaagaaggatcacttgaggccaggagttcgaaaccagcctggtcaacagagcaagaccctatttgtacacccaaacaaaaattagccaggtgtagttgtgtgcacctgtagtcctagctactggggaggcagcggtgggaggatctcttggcaggagttcaaggtttcaatgaaccatgattgcaccaccgccctccagcctgggtaacagcaagactttgtctct

SEQ ID NO: 19043 - DNA, 307 bp, Homo sapiens
ttccaaaagtgtttatagctaatataaaatggatataacaaaaatatttccctcttttgccttaactaaagaatattttatttggttgtgagatatttttacagtgctcttagaggccctggataattatataaaactccaaattacacaaactgtacacttagattataaattatgttcatattgtgaattttctaagcaaataatgggaaacttaaaaaattaatcaccatattcctgagaccttgattttatttttaatgtaaaggatatcctgctcacacttttatattcttttatatatata

SEQ ID NO: 19044 - DNA, 434 bp, Homo sapiens
gtaccctgagcccagtccctacctgccttctggaagatgttggctccagaattctctgcctccctcctgcaggcattgtggcattcacagctgatttgcagagagcccagatgcatctcataaataaggaatgtactgttctgcaggacggctgtggcgtggctgtgtgggggtgggcaggctggagtagacaggaaccacgagaggcagggaggactgtacaggggttgctgaccaggtggaagatgatgggagcctcagaaggtgtcgtgggacagggtcagggagagggctctatgcggccaggatctggatgcagattgttgagactgaaatttggctcagatcccttctagttgtgtctgtttatcttcagtttccttgtctataaaatggggagagattgtgtgtccccggcatcactggactgttaa

SEQ ID NO: 19045 - DNA, 281 bp, Homo sapiens
gactggagtctagagagccaaggagttcaacacaggtcaagcactggatgaatgctgggtagcagtggccagaactgaggcaggggagatgggcctggacacagaggagggcatgtgacaagtcttacacatggcgtgggtggaggtagttacccagaaggtaataggaaccagggaaagctttgaagtaggagaatgtgtgagaatgtatgatttagatcatgtggattaacgtcgctcaaaattaaagaaataatttgcagctttggtatgtgatattt

SEQ ID NO: 19046 - DNA, 285 bp, Homo sapiens
gtggatttctaatggtaatttcctctttccctgtttcttataagggagatttgcccatttaatcccattttaaaatttattcaatcatttgtgtatgttattataaactcacaaatatttattttattatttgggctataatccaatgctgtatatagagagggagacagggtcttgctccattgcctaggctggagtgcagtggtacagtcatggcttgctgcatccctaaccttctgggctcaagcgatcctctcaagtagctggtgtcatctgccttgctaa

SEQ ID NO: 19047 - DNA, 344 bp, Homo sapiens
ctagtcagaaagaactgctacaaaataagattgaattatgagttgcagctctgatcctaacagacaaacaaaataaggctgaaaatacgtactagaaagaatttgaattccttccgtggtggactagggcaaagatggtgtgaatgccagtaacccaggctcacgtcaggatggggtgacagaagtcagctggatgggatcaaattgttacccagaaggtctggaaaccaacgaggtccctggtgtagtgaaggagaatgggctggcatcagatgtcagaagtgggaaccagaggctggaactgaggtaaccataagcagtcttggtaggtaaataagtagaga

SEQ ID NO: 19048 - DNA, 376 bp, Homo sapiens
ggtttctaaggcctattatggccgagtccccagagacaaagtttcctcctgtctgacttggagcagatgctcgtctgcctcaggaaaggctctgaagaatccaggagaacatgctttgcaaggcactttcaaattgctgggtcccttcaggggaaaaggggtttttatgacaccactagtctgaagataatttttatcagatcctatagcctgaggtcttaaaacagaacaacactaaagagcccctctcaggcctggcttcctagcagcagttggatgggaccttgaagtggtggctcccttcatgttggccctgcagggtcaggcatctaagactcgtggaggcccaggcagtctggagggataccagatgaca

SEQ ID NO: 19049 - DNA, 381 bp, Homo sapiens
ccatgggctaacttgacaagcccactggatttgactttagcttcttgctctagccagaggttaccaacacctaaacacaaaatagactatctgctcctgactgctgcagaactaaagagctgactttattcttgagttctttattcagagtcccagaaaattatttctaaaatgcatgctgggataactttcaaaatcaggatttggtttactttgcaacagatattaccacacaaaaaatattaaattttagaaaacaagacaaatcatctttaacttaatgccctagtcttccttaacaaaagcaaagacaacaaaatttaagaagctgtaccctaacagaatcttggtaaggggaaccttattaaaaggatatgccag

SEQ ID NO: 19050 - DNA, 410 bp, Homo sapiens
ttttaggttttgtagatcacactatctgttggaactacaattctgccattgttgcacaaaagcagccatagacaatagataaatgaataactgtggctgtatcccaataaaactttattcacagaaacaggtggcaggtcagatctggcctgcaggctgtagtttgccaacctttggttgtacctttagcaccgtctactttcaagtgatattgtactatttcactaatagtattagtaccttatcacagcacacttccattctcctctaccagcctttgtgctaatgttttcacacattttacttttatacaaaatgtaaaccttaaaatacattgttattgtttttcttttaatagttgtattttcaggagatttaaataataaatgaagtcatttgaattatctaca

SEQ ID NO: 19051 - DNA, 1649 bp, Homo sapiens
tgagagtgagaaagaggagagagactattctccaaaccttttttgttttgttttgtttccgatgtttacacatgttgcctgagctggttaaccacatcggcagcctcagctaccacaacatactgactaaatgatgatatttactcaagttcagtctgcagccaaaaccattagggtgtgcattgcagactgttttgttgtcttttttttttcttttttcctttttttttaagtggaggggaaaagaagagataaacaaggaatattttgtcaaacagtacacaataatttaaagagaatgtatttcttttttgcatttaatggcctcagacatttctttcatcagtctaaaagttagaaatatccctttattttaacttttatgtcgtttccatttttcatgtttttgtaattattttttctatgttcacatcagcattcacttccgttaaatttgccaaaggaaactgttaatatgtttctgttgttattattcctgtaggatttattgtacctcacagtatttattgtttcccaaaataagcatcattagttggggattcagtatttttgttgtgaaaatttcagaaacaatagattcttaaagataagctagctatgtctaggagctttatcttttcacctccttcagaggatgctatggggtccattttaattcttcatttgttctacggggaggaaagaccaaaagtatttgcagtacaaaagaaactatatcaaacactatgttaaatgacaagtgtttatggtaaaaagctgaggaattagtaataatcgtttttgttttcttgtactttgaattccccaaagtcttaattgctttattttggtgttgtgttaaattgaacagacagatgttttcctttgttttataccatataagactctgtacagtatgtttgtgaaagattgaactagaataatgaaagtttgtttgcaaacattttggtcctctcagcgttctctgtgttgtgctgttgccccattaccaaatggttagattcaaaaagggtgggaaaagatttttaatatcccaacaaaacattatagaaactctggcttttgcagtgtgcatagactacatgtagttttatgaaaataaatacacatttttatttcagcaactttgaaaagttacactcagttgagttactagaactcatcttgtacaacagcaatgtttagtctgtttaatttaatgtcaaataaaaggtcagatagccctcgtgagtgaattacatagctgtcggcagtcacatcagcaaatgcaccaggcttagaacaaatgtttgttacttgctgcaaaccaagctaatgtgtatagccagttagaaaaagtccagaagtaatgagattctagaagtagagtttcccttgcttggaaacatgaatgtgttcacctgtgttttgtcagagaagtggcaataagtcctggacagctgacactttttaagtatctcccctatttgctactacttttgtgcctcaagtgcccagtcgttacggtggccttctaaatgagtaaataacattttccaatataaagcctatttgcttaaaagggacaggggagtggatggatgtagtacatgcaatggaaaatcataaaatgtacaattcttctgttt

SEQ ID NO: 19052 - DNA, 168 bp, Homo sapiens
aatcttccctgatgagaacgtgtccttattcagctcagagttggtatccctcacacttgttctctgatagactttctaatttattcaggatatatgaatgctgtcatattctcctatatataggttgtgaagaagaggatcttggatagacattttgacttcatacat

SEQ ID NO: 19053 - DNA, 1205 bp, Homo sapiens
gtggaatcctaatagttttttccgtaatctccaactatatttaaaataatgcccttctaaatagctctgtaaagagcctattggaagctgcacatttaaaaatggcaatagcactgcaatatgctgtagcatgatgcctgtcagccatgttccagacaattccttgtaagtcatctttcatttaagtaaaaaacaggttatgaagtactgcctcccagaccggaagtgccattctaaaaactccactatatatatcctgggagccataaaactgcctattgggaggctaaatgctctgcttttctataaaacagagataaggttctagaggaagtactgttaccagaaacaaggcacgtttcttctctgcctaggaatgcttcatctgggggacagaggggaaggtttcaatggaaaaggaacttatattaacaagtccctactacatgatgcaacccatttcaaatgactcctctcattttgatcttcaggaataactgatctctgggcattgatttcacagatgaagtctactattgttttggtagtatttaaaattgggatctcaagtttcaaattgatcatcattgggcttttcatgtgtatagaacaccttcactctgcataatcctacataacaacattcttgtcttctagtacatgaaaaaattggggtaacatagcatttaaagtagttatcagggaaaagtctatactgaagtgaaccctacactgttattcaagttgccttaacacattataagctattattctaaatagctttaacagattattgtggtcacactgtattactaatagttaatttaaaaggcagactcagcatgttttaaactcctttaagttacatcttcagaaagtcctgaagtccttcagtattaggtcagctaagggaagatatatttttaaaaatagtgataagactatcactaatatcatactcatcctgtaatatgtaaacacagttctgttgttactggcagaaaaattggaatacccagcattaagtgagagaagtcagcctacttttatgatgaagctactgggatttatttgaactattatttttgttagatagtataaaaatgttctaagtgcctatttttctcattccccttttaaaaatgtaatgctaaaatttctagaagtgttgtaaacacggaatacaaaaaaactatgattgatta

SEQ ID NO: 19054 - DNA, 1522 bp, Homo sapiens
gtggaatcctaatagttttttccgtaatctccaactatatttaaaataatgcccttctaaatagctctgtaaagagcctattggaagctgcacatttaaaaatggcaatagcactgcaatatgctgtagcatgatgcctgtcagccatgttccagacaattccttgtaagtcatctttcatttaagtaaaaaacaggttatgaagtactgcctcccagaccggaagtgccattctaaaaactccactatatatatcctgggagccataaaactgcctattgggaggctaaatgctctgcttttctataaaacagagataaggttctagaggaagtactgttaccagaaacaaggcacgtttcttctctgcctaggaatgcttcatctgggggacagaggggaaggtttcaatggaaaaggaacttatattaacaagtccctactacatgatgcaacccatttcaaatgactcctctcattttgatcttcaggaataactgatctctgggcattgatttcacagatgaagtctactattgttttggtagtatttaaaattgggatctcaagtttcaaattgatcatcattgggcttttcatgtgtatagaacaccttcactctgcataatcctacataacaacattcttgtcttctagtacatgaaaaaattggggtaacatagcatttaaagtagttatcagggaaaagtctatactgaagtgaaccctacactgttattcaagttgccttaacacattataagctattattctaaatagctttaacagattattgtggtcacactgtattactaatagttaatttaaaaggcagactcagcatgttttaaactcctttaagttacatcttcagaaagtcctgaagtccttcagtattaggtcagctaagggaagatatatttttaaaaatagtgataagactatcactaatatcatactcatcctgtaatatgtaaacacagttctgttgttactggcagaaaaattggaatacccagcattaagtgagagaagtcagcctacttttatgatgaagctactgggatttatttgaactattatttttgttagatagtataaaaatgttctaagtgcctatttttctcattccccttttaaaaatgtaatgctaaaatttctagaagtgttgtaaacacggaatacaaaaaaactatgattgattactcaaactctccttccttcttagtaaggaaaattaaaattccctttggctttctaatttacttgttctactaggtacactaacaaaactacttctggctgggcgcggtggctcacgcctgtatcccagcactttgggaggccgaggcgggaggatcacaaggtcaggagatctagaccatcctggctaacacggtgaaagcccgtctatactaaaaatacaaaaaattagccgggcgtggtggcgggtgcctgtagtcccagctacttggaaggctgaggcagaagaatggtgtgaacccaggaggcggagcttgca

SEQ ID NO: 19055 - DNA, 954 bp, Homo sapiens
gcaggatgagcagcgctcaaaacctcccactactgctgctgtctgtccggtcctagacaagttgtctgcatttgttagatgtggacgaatagtagtaccaacttctaatgttgcagtggggattggaccacagccccagaccagccctacaggagtttgctccaagcgccactggcctggcccagcacacaggttgcctcgtccgccgcctccccacagcacctttcctgaattctgtcagcattgagacccatctcctctttctctgtctctctttgcctgaccctcgtccattctcctagtgggcaggatgctgtcagctattgctatttggagggtgagatgacccctgagtagaaataactcctataagttcagaggttcagcctttaacaaactcacattcctgtttgactgacagatctcccagaaaggaaaataaaagcaccttgaggacagagctggaagtagtctacctgggtattctccacagctgcaagctcaatgtcctgagcttgctggtactcagaaaatgtttaggaacttctttttacattgagggtagtgcttatgggcaaaatgaatgcccatgggcctagccctgagatggctggacagcaagaaaggagaaaggacagcatgggcaattttccacacatgttttaagtttacagggggaaagagaccaagagaataagatcaagtcaaatcaaacccatgtataataataccattaccaattgttttcttattttatgttttattctgattccttctaacaaaagttcacacacacatacacacacacacacacacacacacacgttcagcagagctcaggttgaaaataagtgccagtccttataccaaaaagtagtatgctgtgctttgaaattcctgaaagctcatttgctgcctcaccctccctctccccatgtcctatagaccctgtgt

SEQ ID NO: 19056 - DNA, 725 bp, Homo sapiens
gcaggatgagcagcgctcaaaacctcccactactgctgctgtctgtccggtcctagacaagttgtctgcatttgttagatgtggacgaatagtagtaccaacttctaatgttgcagtggggattggaccacagccccagaccagccctacaggagtttgctccaagcgccactggcctggcccagcacacagatctcccagaaaggaaaataaaagcaccttgaggacagagctggaagtagtctacctgggtattctccacagctgcaagctcaatgtcctgagcttgctggtactcagaaaatgtttaggaacttctttttacattgagggtagtgcttatgggcaaaatgaatgcccatgggcctagccctgagatggctggacagcaagaaaggagaaaggacagcatgggcaattttccacacatgttttaagtttacagggggaaagagaccaagagaataagatcaagtcaaatcaaacccatgtataataataccattaccaattgttttcttattttatgttttattctgattccttctaacaaaagttcacacacacatacacacacacacacacacacacacacgttcagcagagctcaggttgaaaataagtgccagtccttataccaaaaagtagtatgctgtgctttgaaattcctgaaagctcatttgctgcctcaccctccctctccccatgtcctatagaccctgtgt

SEQ ID NO: 19057 - DNA, 419 bp, Homo sapiens
actggatgaagtgttaccttggctacggaacagagctaccctttctaaacagagggacattttgggtaccttgaatgactgactcttagaaagatcacgggcacaggagatgcctcagcaaagctgagatcagagctttggagccaccctgcgacatctttgggcctctgccttgtctccttgaaagcatgcctcgtagccagcttcaaagtcagactccccatgcctggtgttcagtaacagcgggcttctcattcaaaaattttgcagaggtaatagactgtgactttcttttgtgacaacggtgcctcagcacaatcagacaacttgaatatgtttaaaataaccttgcagaaatcctcagaaaaagtaggcaagatagacatcaattgccaaaacagtcccagctagggatccac

SEQ ID NO: 19058 - DNA, 500 bp, Homo sapiens
  misc_feature (274)..(274): n is a, c, g, or t
cctggaccctctctccttatcccgagcactaacaatatgggttccactaccaataccgtaccctctaatcaacataaatctaggagtactattcatgcgacccatgtcaagcctagcagtctattctatcctatgatcagaaacctggcccctcagagcgatctcgagccacaaagtcaggaagtcgagggaccgaacggactgtagtaatggataaatccaaaggggtgcctgtgattagtgtaaaaacgtccgggtccaaagagagagcttnccaaagccaggatcgcaaatcagccagcagagaggctccaggcgcctggaccctctctgcacgagagaggtgaggaaggaggggccttgagagaggccgcagagtagagccccaagctgcaaaggccaacagcatggggagaaggaccccgcttttggacccggcctgcacctgagtgtgacgggttacaagcagaggcacccagagagggtacagcggggatctc

SEQ ID NO: 19059 - DNA, 2062 bp, Homo sapiens
  misc_feature (1620)..(1620): n is a, c, g, or t
  misc_feature (1630)..(1631): n is a, c, g, or t
  misc_feature (1634)..(1634): n is a, c, g, or t
gtaaatgattctgtcttcagggcgcaaaccagaagaagagggtgtggaagataacgggctggaggaaaactctggggatggacaggaggatgttgagaccagtctggagaacttgcaggacatcgacatcatggatatcagtgtgttggatgaagcagaaattgataatggaagcgttgcagattgtgtcgaagacgatgatgctgataacctccaggagtccctgtcggatagtagagagctagtcgagggggaaatgaaagagcttccggagcagcttcaggaacatgctatagaggacaaagaaactataaacaatttagatacttcatcatctgacttcactatattacaggaaattgaagagccatccctggagccagaaaatgagaaaatactcgacattttgggggaaacttgtaaatctgagccagtaaaagaagaaagttccgagctggagcagccatttgcacaggacacaagtagcgtggggccagacagaaagcttgcggaggaagaggacctatttgacagcgcccatccggaagagggtgatttagatttggccagcgagtcaacagcacacgctcagtcgagcaaggcagacagcctgttagcggtagtgaaaagggagcccgcggagcagccaggcgatggcgagaggacggactgtgagcctgtagggctagagccggcagttgagcagagtagtgcggcctccgagctcgcggaggcctctagcgaggagctcgcagaagcacccacggaagccccaagcccagaagccagagatagcaaagaagacgggaggaagtttgattttgacgcttgtaatgaagtccctccggctcctaaagagtcctcaaccagtgagggcgctgatcagaaaatgagttctcccgaagatgactcggatacaaaaaggctttccaaagaggaaaagggtcgcagcagttgtggtagaaatttctgggttagtggactctcttctacaaccagagctacagatttgaagaatcttttcagcaaatatgggaaggtggtgggcgccaaggttgtgacaaatgcccggagtcctggagctcgctgttacggttttgtcacgatgtccacagcagaagaggccacaaaatgcattaaccacctgcacaagacggagctccacggaaagatgatctccgtggagaaagccaaaaatgaacctgtgggaaagaaaacctctgacaaaagagacagtgacgggaaaaaggagaagtcgagcaacagtgacagatctacaaaccttaagagggatgataaatgtgacagaaaagatgatgctaagaagggtgacgacggaagtggagaaaagagtaaggaccaagatgatcagaaacctggcccctcagagcgatctcgagccacaaagtcaggaagtcgagggaccgaacggactgtagtaatggataaatccaaaggggtgcctgtgattagtgtaaaaacgtccgggtccaaagagagagcttccaaaagccaggatcgcaaatcagccagcagagagaagcggtccgtcgtgtcctttgataaggtcaaggagcctcggaagtcaagagactcagagtcccatagcagggtgcgtgnacgcagtganngcngaacacgcatgcaggcgcaggggagcgcgaggagcgtgagcgggtgggagataggccggagagagggtgggctacagaggcaagggtggaacgagagccctagagcgggacaggtggacgcgaaagaatgactggaggacaagcaggggcaagagagaggatcactgcggagggaagggagtagtggctccgaaatgtatataatagaaaaggggcgcgaggaggggggacgaaactgatggggagagtaatgtgtggaaaaaaagacagattaggaaattgatatagcaaacgaacaataaaatgagggcagaattagaggaaagacggagtagagattaatagtgtgtgatgatatgcgaatatgattatgttattgttagtatgtttgttatgctaatgagaatagtgaagaagaaggtggaggt

SEQ ID NO: 19060 - DNA, 1729 bp, Homo sapiens
gtaaatgattctgtcttcagggcgcaaaccagaagaagagggtgtggaagataacgggctggaggaaaactctggggatggacaggaggatgttgagaccagtctggagaacttgcaggacatcgacatcatggatatcagtgtgttggatgaagcagaaattgataatggaagcgttgcagattgtgtcgaagacgatgatgctgataacctccaggagtccctgtcggatagtagagagctagtcgagggggaaatgaaagagcttccggagcagcttcaggaacatgctatagaggacaaagaaactataaacaatttagatacttcatcatctgacttcactatattacaggaaattgaagagccatccctggagccagaaaatgagaaaatactcgacattttgggggaaacttgtaaatctgagccagtaaaagaagaaagttccgagctggagcagccatttgcacaggacacaagtagcgtggggccagacagaaagcttgcggaggaagaggacctatttgacagcgcccatccggaagagggtgatttagatttggccagcgagtcaacagcacacgctcagtcgagcaaggcagacagcctgttagcggtagtgaaaagggagcccgcggagcagccaggcgatggcgagaggacggactgtgagcctgtagggctagagccggcagttgagcagagtagtgcggcctccgagctcgcggaggcctctagcgaggagctcgcagaagcacccacggaagccccaagcccagaagccagagatagcaaagaagacgggaggaagtttgattttgacgcttgtaatgaagtccctccggctcctaaagagtcctcaaccagtgagggcgctgatcagaaaatgagttctcccgaagatgactcggatacaaaaaggctttccaaagaggaaaagggtcgcagcagttgtggtagaaatttctgggttagtggactctcttctacaaccagagctacagatttgaagaatcttttcagcaaatatgggaaggtggtgggcgccaaggttgtgacaaatgcccggagtcctggagctcgctgttacggttttgtcacgatgtccacagcagaagaggccacaaaatgcattaaccacctgcacaagacggagctccacggaaagatgatctccgtggagaaagccaaaaatgaacctgtgggaaagaaaacctctgacaaaagagacagtgacgggaaaaaggagaagtcgagcaacagtgacagatctacaaaccttaagagggatgataaatgtgacagaaaagatgatgctaagaagggtgacgacggaagtggagaaaagagtaaggaccaagatgatcagaaacctggcccctcagagcgatctcgagccacaaagtcaggaagtcgagggaccgaacggactgtagtaatggataaatccaaaggggtgcctgtgattagtgtaaaaacgtccgggtccaaagagagagcttccaaaagccaggatcgcaaatcagccagcagagagaagcggtccgtcgtgtcctttgataaggtcaaggagctgaggcgccagcaggaactgcgctatgagcaggagcggcggcccgcggtgcggcggccctacgacctggaccggcgagatgatgcctattggccggaagccaagcgggccgccctggatgagcgctaccattctgactttaaccgccaggac

SEQ ID NO: 19061 - DNA, 1686 bp, Homo sapiens
  misc_feature (1620)..(1620): n is a, c, g, or t
  misc_feature (1630)..(1631): n is a, c, g, or t
  misc_feature (1634)..(1634): n is a, c, g, or t
gtaaatgattctgtcttcagggcgcaaaccagaagaagagggtgtggaagataacgggctggaggaaaactctggggatggacaggaggatgttgagaccagtctggagaacttgcaggacatcgacatcatggatatcagtgtgttggatgaagcagaaattgataatggaagcgttgcagattgtgtcgaagacgatgatgctgataacctccaggagtccctgtcggatagtagagagctagtcgagggggaaatgaaagagcttccggagcagcttcaggaacatgctatagaggacaaagaaactataaacaatttagatacttcatcatctgacttcactatattacaggaaattgaagagccatccctggagccagaaaatgagaaaatactcgacattttgggggaaacttgtaaatctgagccagtaaaagaagaaagttccgagctggagcagccatttgcacaggacacaagtagcgtggggccagacagaaagcttgcggaggaagaggacctatttgacagcgcccatccggaagagggtgatttagatttggccagcgagtcaacagcacacgctcagtcgagcaaggcagacagcctgttagcggtagtgaaaagggagcccgcggagcagccaggcgatggcgagaggacggactgtgagcctgtagggctagagccggcagttgagcagagtagtgcggcctccgagctcgcggaggcctctagcgaggagctcgcagaagcacccacggaagccccaagcccagaagccagagatagcaaagaagacgggaggaagtttgattttgacgcttgtaatgaagtccctccggctcctaaagagtcctcaaccagtgagggcgctgatcagaaaatgagttctcccgaagatgactcggatacaaaaaggctttccaaagaggaaaagggtcgcagcagttgtggtagaaatttctgggttagtggactctcttctacaaccagagctacagatttgaagaatcttttcagcaaatatgggaaggtggtgggcgccaaggttgtgacaaatgcccggagtcctggagctcgctgttacggttttgtcacgatgtccacagcagaagaggccacaaaatgcattaaccacctgcacaagacggagctccacggaaagatgatctccgtggagaaagccaaaaatgaacctgtgggaaagaaaacctctgacaaaagagacagtgacgggaaaaaggagaagtcgagcaacagtgacagatctacaaaccttaagagggatgataaatgtgacagaaaagatgatgctaagaagggtgacgacggaagtggagaaaagagtaaggaccaagatgatcagaaacctggcccctcagagcgatctcgagccacaaagtcaggaagtcgagggaccgaacggactgtagtaatggataaatccaaaggggtgcctgtgattagtgtaaaaacgtccgggtccaaagagagagcttccaaaagccaggatcgcaaatcagccagcagagagaagcggtccgtcgtgtcctttgataaggtcaaggagcctcggaagtcaagagactcagagtcccatagcagggtgcgtgnacgcagtganngcngaacatacgccacccaggcgcagtggagcgcgatgaacgagacccgtcgaag

SEQ ID NO: 19062 - DNA, 3007 bp, Homo sapiens
  misc_feature (2565)..(2565): n is a, c, g, or t
  misc_feature (2575)..(2576): n is a, c, g, or t
  misc_feature (2579)..(2579): n is a, c, g, or t
gtaaatgattctgtcttcagggcgcaaaccagaagaagagggtgtggaagataacgggctggaggaaaactctggggatggacaggaggatgttgagaccagtctggagaacttgcaggacatcgacatcatggatatcagtgtgttggatgaagcagaaattgataatggaagcgttgcagattgtgtcgaagacgatgatgctgataacctccaggagtccctgtcggatagtagagagctagtcgagggggaaatgaaagagcttccggagcagcttcaggaacatgctatagaggacaaagaaactataaacaatttagatacttcatcatctgacttcactatattacaggaaattgaagagccatccctggagccaggtactgttaaatgaaaaacttaccagcgggggtttggaaccattctagttttccaccttctctaatttgaattctttgatttttaaaagttaccttactatagtatacattgttctaaaggtttacaatccaaaacctaccaggatcatagagattggaaacccagccatatcaccagatctgtgaaagtggctcacttctcattttacaaaatgtattggtgagatgaaagtatctcatgcctttttgaatatcaacagcattgaatcatacatagagaaagagttccagatgcctctcttgagagctaatacctctgcacccacaaaacagatcttgtgatattgggcagtagcttaattttgttgtttttaattgaggcagctcaggtagtggtagggagatacattttaaaacataaatttgagacataactggattccagaagaggaaagagtgtcttcatgagaattccaaacactgttcactttctggactgcaaatatctcagagcacggatggaagagattctggttttcatgttggactgttctgttaaaagaaattcaaagaaatttggaaattgagctgttcagtgaatggtgatacattcagttaagcaacttggactttggaagctaaatttggaagagtcatatctaaacgacgacagaatgaagactgtcaagaatcagccagaaggttttgggggttaaatctctgggatgcttttctcttccgtgtagcgtagaggcttacctagaggcggtcgcggcgcaggtagtgtaaccagtataactttgtgtacccgcgggttttccaatctctgtgtagctagcagttctcttcgtgttagtgtggcagccgtgccagttccacatttgtgattgctttatttccctggtaattaaaccttgtgccattctattcctgttaaatccgtagaaaatgagaaaatactcgacattttgggggaaacttgtaaatctgagccagtaaaagaagaaagttccgagctggagcagccatttgcacaggacacaagtagcgtggggccagacagaaagcttgcggaggaagaggacctatttgacagcgcccatccggaagagggtgatttagatttggccagcgagtcaacagcacacgctcagtcgagcaaggcagacagcctgttagcggtagtgaaaagggagcccgcggagcagccaggcgatggcgagaggacggactgtgagcctgtagggctagagccggcagttgagcagagtagtgcggcctccgagctcgcggaggcctctagcgaggagctcgcagaagcacccacggaagccccaagcccagaagccagagatagcaaagaagacgggaggaagtttgattttgacgcttgtaatgaagtccctccggctcctaaagagtcctcaaccagtgagggcgctgatcagaaaatgagttctcccgaagatgactcggatacaaaaaggctttccaaagaggaaaagggtcgcagcagttgtggtagaaatttctgggttagtggactctcttctacaaccagagctacagatttgaagaatcttttcagcaaatatgggaaggtggtgggcgccaaggttgtgacaaatgcccggagtcctggagctcgctgttacggttttgtcacgatgtccacagcagaagaggccacaaaatgcattaaccacctgcacaagacggagctccacggaaagatgatctccgtggagaaagccaaaaatgaacctgtgggaaagaaaacctctgacaaaagagacagtgacgggaaaaaggagaagtcgagcaacagtgacagatctacaaaccttaagagggatgataaatgtgacagaaaagatgatgctaagaagggtgacgacggaagtggagaaaagagtaaggaccaagatgatcagaaacctggcccctcagagcgatctcgagccacaaagtcaggaagtcgagggaccgaacggactgtagtaatggataaatccaaaggggtgcctgtgattagtgtaaaaacgtccgggtccaaagagagagcttccaaaagccaggatcgcaaatcagccagcagagagaagcggtccgtcgtgtcctttgataaggtcaaggagcctcggaagtcaagagactcagagtcccatagcagggtgcgtgnacgcagtganngcngaacacgcatgcaggcgcaggggagcgcgaggagcgtgagcgggtgggagataggccggagagagggtgggctacagaggcaagggtggaacgagagccctagagcgggacaggtggacgcgaaagaatgactggaggacaagcaggggcaagagagaggatcactgcggagggaagggagtagtggctccgaaatgtatataatagaaaaggggcgcgaggaggggggacgaaactgatggggagagtaatgtgtggaaaaaaagacagattaggaaattgatatagcaaacgaacaataaaatgagggcagaattagaggaaagacggagtagagattaatagtgtgtgatgatatgcgaatatgattatgttattgttagtatgtttgttatgctaatgagaatagtgaagaagaaggtggaggt

SEQ ID NO: 19063 - DNA, 1343 bp, Homo sapiens
  misc_feature (1259)..(1260): n is a, c, g, or t
  misc_feature (1289)..(1289): n is a, c, g, or t
gtaaatgattctgtcttcagggcgcaaaccagaagaagagggtgtggaagataacgggctggaggaaaactctggggatggacaggaggatgttgagaccagtctggagaacttgcaggacatcgacatcatggatatcagtgtgttggatgaagcagaaattgataatggaagcgttgcagattgtgtcgaagacgatgatgctgataacctccaggagtccctgtcggatagtagagagctagtcgagggggaaatgaaagagcttccggagcagcttcaggaacatgctatagaggacaaagaaactataaacaatttagatacttcatcatctgacttcactatattacaggaaattgaagagccatccctggagccagaaaatgagaaaatactcgacattttgggggaaacttgtaaatctgagccagtaaaagaagaaagttccgagctggagcagccatttgcacaggacacaagtagcgtggggccagacagaaagcttgcggaggaagaggacctatttgacagcgcccatccggaagagggtgatttagatttggccagcgagtcaacagcacacgctcagtcgagcaaggcagacagcctgttagcggtagtgaaaagggagcccgcggagcagccaggcgatggcgagaggacggactgtgagcctgtagggctagagccggcagttgagcagagtagtgcggcctccgagctcgcggaggcctctagcgaggagctcgcagaagcacccacggaagccccaagcccagaagccagagatagcaaagaagacgggaggaagtttgattttgacgcttgtaatgaagtccctccggctcctaaagagtcctcaaccagtgagggcgctgatcagaaaatgagttctcccgaagatgactcggatacaaaaaggctttccaaagaggaaaagggtcgcagcagttgtggtagaaatttctgggttagtggactctcttctacaaccagagctacagatttgaagaatcttttcagcaaatatgggaaggtggtgggcgccaaggttgtgacaaatgcccggagtcctggagctcgctgttacggttttgtcacgatgtccacagcagaagaggccacaaaatgcattaaccacctgcacaagacggagctccacggaaagatgatctccgtggagaaagccaaaaatgaaagacacagacagtgaagaagaaattagagaagcattccgtgtgtttgataaggatggnnatggctatattagtgctgcagaacttcgncatgtgatgacaaagcttggagagaagttacagatgaagaagttgatgaatgat

SEQ ID NO: 19064 - DNA, 3433 bp, Homo sapiens
  misc_feature (2991)..(2991): n is a, c, g, or t
  misc_feature (3001)..(3002): n is a, c, g, or t
  misc_feature (3005)..(3005): n is a, c, g, or t
gtaaatgattctgtcttcagggcgcaaaccagaagaagagggtgtggaagataacgggctggaggaaaactctggggatggacaggaggatgttgagaccagtctggagaacttgcaggacatcgacatcatggatatcagtgtgttggatgaagcagaaattgataatggaagcgttgcagattgtgtcgaagacgatgatgctgataacctccaggagtccctgtcggatagtagagagctagtcgagggggaaatgaaagagcttccggagcagcttcaggaacatgctatagaggacaaagaaactataaacaatttagatacttcatcatctgacttcactatattacaggaaattgaagagccatccctggagccaggtactgttaaatgaaaaacttaccagcgggggtttggaaccattctagttttccaccttctctaatttgaattctttgatttttaaaagttaccttactatagtatacattgttctaaaggtttacaatccaaaacctaccaggatcatagagattggaaacccagccatatcaccagatctgtgaaagtggctcacttctcattttacaaaatgtattggtgagatgaaagtatctcatgcctttttgaatatcaacagcattgaatcatacatagagaaagagttccagatgcctctcttgagagctaatacctctgcacccacaaaacagatcttgtgatattgggcagtagcttaattttgttgtttttaattgaggcagctcaggtagtggtagggagatacattttaaaacataaatttgagacataactggattccagaagaggaaagagtgtcttcatgagaattccaaacactgttcactttctggactgcaaatatctcagagcacggatggaagagattctggttttcatgttggactgttctgttaaaagaaattcaaagaaatttggaaattgagctgttcagtgaatggtgatacattcagttaagcaacttggactttggaagctaaatttggaagagtcatatctaaacgacgacagaatgaagactgtcaagaatcagccagaaggttttgggggttaaatctctgggatgcttttctcttccgtgtagcgtagaggcttacctagaggcggtcgcggcgcaggtagtgtaaccagtataactttgtgtacccgcgggttttccaatctctgtgtagctagcagttctcttcgtgttagtgtggcagccgtgccagttccacatttgtgattgctttatttccctggtaattaaaccttgtgccattctattcctgttaaatccgtagaaaatgagaaaatactcgacattttgggggaaacttgtaaatctgagccagtaaaagaagaaagttccgagctggagcagccatttgcacaggacacaagtagcgtggggccagacagaaagcttgcggaggaagaggacctatttgacagcgcccatccggaagagggtgatttagatttggccagcgagtcaacagcacacgctcagtcgagcaaggcagacagcctgttagcggtagtgaaaagggagcccgcggagcagccaggcgatggcgagaggacggactgtgagcctgtagggctagagccggcagttgagcagagtagtgcggcctccgagctcgcggaggcctctagcgaggagctcgcagaagcacccacggaagccccaagcccagaagccagagatagcaaagaagacgggaggaagtttgattttgacgcttgtaatgaagtccctccggctcctaaagagtcctcaaccagtgagggcgctgatcagaaaatgaggtttgttttttctcagttttagaccagacgctatctccttttcattggtcatgtaatgacacacataagctgtttttttctgcaattggccagccagactgacgaaattgtagttttgcttctaaagaatgtttcgtttctctttgtgtgtttttaatgggtgattcaattccttttctttttctcaacctaccatggttgtgttcttaaattcttcctaattacctttagcccagcagaattaattaactcctgtgggtctgaaatcttatggttaggtcagattttcaatacaagtttgtcggggtatcattttttcagaactaaatttcgggtaggtatgcaacctcagcacgaattttatggttttgagtttgtttcctccatgctgcttccttgtggagtgacattgtcttttgtctctagttctcccgaagatgactcggatacaaaaaggctttccaaagaggaaaagggtcgcagcagttgtggtagaaatttctgggttagtggactctcttctacaaccagagctacagatttgaagaatcttttcagcaaatatgggaaggtggtgggcgccaaggttgtgacaaatgcccggagtcctggagctcgctgttacggttttgtcacgatgtccacagcagaagaggccacaaaatgcattaaccacctgcacaagacggagctccacggaaagatgatctccgtggagaaagccaaaaatgaacctgtgggaaagaaaacctctgacaaaagagacagtgacgggaaaaaggagaagtcgagcaacagtgacagatctacaaaccttaagagggatgataaatgtgacagaaaagatgatgctaagaagggtgacgacggaagtggagaaaagagtaaggaccaagatgatcagaaacctggcccctcagagcgatctcgagccacaaagtcaggaagtcgagggaccgaacggactgtagtaatggataaatccaaaggggtgcctgtgattagtgtaaaaacgtccgggtccaaagagagagcttccaaaagccaggatcgcaaatcagccagcagagagaagcggtccgtcgtgtcctttgataaggtcaaggagcctcggaagtcaagagactcagagtcccatagcagggtgcgtgnacgcagtganngcngaacacgcatgcaggcgcaggggagcgcgaggagcgtgagcgggtgggagataggccggagagagggtgggctacagaggcaagggtggaacgagagccctagagcgggacaggtggacgcgaaagaatgactggaggacaagcaggggcaagagagaggatcactgcggagggaagggagtagtggctccgaaatgtatataatagaaaaggggcgcgaggaggggggacgaaactgatggggagagtaatgtgtggaaaaaaagacagattaggaaattgatatagcaaacgaacaataaaatgagggcagaattagaggaaagacggagtagagattaatagtgtgtgatgatatgcgaatatgattatgttattgttagtatgtttgttatgctaatgagaatagtgaagaagaaggtggaggt

SEQ ID NO: 19065 - DNA, 1263 bp, Homo sapiens
  misc_feature (821)..(821): n is a, c, g, or t
  misc_feature (831)..(832): n is a, c, g, or t
  misc_feature (835)..(835): n is a, c, g, or t
ggtatacagaggcgtgacagtgccattcatctgcataaagtccctccggctcctaaagagtcctcaaccagtgagggcgctgatcagaaaatgagttctcccgaagatgactcggatacaaaaaggctttccaaagaggaaaagggtcgcagcagttgtggtagaaatttctgggttagtggactctcttctacaaccagagctacagatttgaagaatcttttcagcaaatatgggaaggtggtgggcgccaaggttgtgacaaatgcccggagtcctggagctcgctgttacggttttgtcacgatgtccacagcagaagaggccacaaaatgcattaaccacctgcacaagacggagctccacggaaagatgatctccgtggagaaagccaaaaatgaacctgtgggaaagaaaacctctgacaaaagagacagtgacgggaaaaaggagaagtcgagcaacagtgacagatctacaaaccttaagagggatgataaatgtgacagaaaagatgatgctaagaagggtgacgacggaagtggagaaaagagtaaggaccaagatgatcagaaacctggcccctcagagcgatctcgagccacaaagtcaggaagtcgagggaccgaacggactgtagtaatggataaatccaaaggggtgcctgtgattagtgtaaaaacgtccgggtccaaagagagagcttccaaaagccaggatcgcaaatcagccagcagagagaagcggtccgtcgtgtcctttgataaggtcaaggagcctcggaagtcaagagactcagagtcccatagcagggtgcgtgnacgcagtganngcngaacacgcatgcaggcgcaggggagcgcgaggagcgtgagcgggtgggagataggccggagagagggtgggctacagaggcaagggtggaacgagagccctagagcgggacaggtggacgcgaaagaatgactggaggacaagcaggggcaagagagaggatcactgcggagggaagggagtagtggctccgaaatgtatataatagaaaaggggcgcgaggaggggggacgaaactgatggggagagtaatgtgtggaaaaaaagacagattaggaaattgatatagcaaacgaacaataaaatgagggcagaattagaggaaagacggagtagagattaatagtgtgtgatgatatgcgaatatgattatgttattgttagtatgtttgttatgctaatgagaatagtgaagaagaaggtggaggt

SEQ ID NO: 19066 - DNA, 938 bp, Homo sapiens
  misc_feature (481)..(481): n is a, c, g, or t
  misc_feature (671)..(671): n is a, c, g, or t
  misc_feature (726)..(726): n is a, c, g, or t
gtaaatgattctgtcttcagggcgcaaaccagaagaagagggtgtggaagataacgggctggaggaaaactctggggatggacaggaggatgttgagaccagtctggagaacttgcaggacatcgacatcatggatatcagtgtgttggatgaagcagaaattgataatggaagcgttgcagattgtgtcgaagacgatgatgctgataacctccaggagtccctgtcggatagtagagagctagtcgagggggaaatgaaagagcttccggagcagcttcaggaacatgctatagtgaagtcagatgatgaagtatctaaattgtttatagtttcatagatttattaagtgatttggaaaacatcttgtcaagtaatctgcctgcccagacattggatcatcgtagtctttgtctgacacaaatcctggacctgacacccagtcccatctggcccagcccagaaccccggaatcgatttngatatcgaagagttcttttcggcctcaaatatccagactcaaactgaagagagtgaacttagcaccatgaccaccgagccagtcttggagtcactggacatagagactcaaacggacttcttactcgcagatacctctgctcagtcctatgggtgtaggggaaatctaacttcttaggccttgagatgtngacacacagacacagacagacttaaactttttcttagacagtagccctcatctgnctctgcgaagtatcctgaaacactccagactttcccgtgagtactgattcaactgacacagagacccaaaacgtgaaggagtctccatgtacagaattatagctgtactagaagcaaagtcagttgacgcagtaagaacgacagacaatgaggtctggattgaaacctggggagcttgtcttcaccagcaagcacaactccggacgatgatg

SEQ ID NO: 19067 - DNA, 324 bp, Homo sapiens
tgaggtgtctcagatgtttataaagtgaccacttgtgtagtgctcagggcattgttgcttctgtaaagtgcgtatcatttgatctcatgctgtaaatgattctgtcttcagggcgcaaaccagaagaagagggtgtggaagataacgggctggaggaaaactctggggatggacaggtatgtgcagccttgcgagtgagtagcgtggtggatggaccagtggcggtcacatgatggttcggtctggttgtgtcacaggaggatgttgagaccagtctggagaacttgcaggacatcgacatcatggatatcagtgtgttggatg

SEQ ID NO: 19068 - DNA, 507 bp, Homo sapiens
gttgctatttgaattaaaacaacaagtctccttggtttaattctgtgctcacaggtaacgttttgatccataagaagagatgatgcatatcttgcagaagcgtatattctagttctcaggacaatgatatttttcattataaattaataacttgctcttttgattcagaacaagtctctagaacttaaggaagcttttcctcagaggggctccacttgcactggctcactgagccggcagcagcccttgaaagaacccccctgggcagtagggtgtatccttcccaacagcaccttgaccaggagagtcttctcgaaatgcccgtaccctgtggccctgcctaatggtgtctgtagcattaatacaaatcttaccttgtaaattccttgccttgacaaagtgtcccagttaggtgcgactctttccatttcctaagaagaatgaagctcagatcacttgttgttaatgagcttcagcagtctgcaatgtgaaatgtttggatctgct

SEQ ID NO: 19069 - DNA, 2177 bp, Homo sapiens
ggaagctggctggctgcctgttaagatgtatcttaggacaaagagatttgggatcctggagagcacgggggagattctgctgcctgccttaggacctttatgaacaagcgtgatgttgggagggcggctgtggctgtgtaccaggtgctgtaggaggcgctggaactggagccttgcatccgaatgacaaagtgcctgccttcccggagcttacattgagtgcggaggacagaccagggactagccagcagacagtcccatgtgtcagggtctggtgtttgcagagggtgtttgcaggggtagagcatgacaggaagtggctgttttggataagacgatcaggaaaggtacccgtctgcggaagtgatactgggtctggagtgaagcggttggaagaaaactgcacctctctggaggaagacagtgccaggcacagctgaaaatccggggctagagctactgggaggaacaggaggagcagctgggaaactgggtggccggagcagacggggagggtgagcagggagggtaaagataagcaagcaaggggctggggctgtcaccgaggtggggtgcctcggagggtgcaggagcagagtcaggatctgacttaggtttgataggctcctctggctgtcctgcgatttatcagggacccaggttgcgagcaggccgaccactcaagaggcgtctacatcaatgcagtcaaaggctatgctgacttggaccagatggatggcggaagagccatgacagtggtccggggagagaccacaagtttgcaggcagggtgctagtgaaaaagaggcgtctactgaaagctgtccaggagaaatcagactaggttagccatgaatattttctctaattctgtcttctatttttctcctccagttatatgtaagggtcttactgcaaattgtcagtctatcgttctctgagccaaagtggaaaccaataaaagtgttgggagctgcctacattctagaactgaccgtacagggaaagaggccacacttttccacgcatatttcctggagtcctggaatggcttcttcacatatttctccacccccattagacaactcagtcactaggcaagaggatggatcttggagtctgacagacaggcatgggttcaatttctctccaacgattatttcatctcggtgcgacctcaggcatctttgctttcccagactttgttttctcattagcaaaacagacctaataaaaggactcatttcataggttttttatgaggattaattgagataaaccagataatacgcttaacaccgtggtacttgcaatgaagaaaatggtgaatggtacatacatggtaagtggtcaatacattttagtcattctattaacaagttaataatcctctccatgccttgatttccttattggtagaatggggataataaaacccccttctgggtagttgggagaagtcaagcattaataccagtgaagcacttcaaatggtgctttgcatacagcgagtgctcaataaatgttaaattcttaaaatcatcaccacgattctgaccttatggactttgaagggcagatgttgtgtctcattgctttcgtgtccacaagacctggcacatagacgatgctcaataaatattatttgaaggagtgaatgatggtgacatggttcttaggagttaaaatgagaaaacccaaggagccgaaagcatgtctctacggggaaaggttagagagcactgactcaaaccatcgtctccaattatgcagttttaatgaggaagcaagcccaaccttgaacattatttaagccagagttatcccaataagcattttcctaccatgagtggtagattaagtagcattgagtcatgtagtgaaagtaatgtcccttcttcataccatttcaatgcctctggtaagtcaagagaaagtctttgataatagcctatttttaacacctctcacccttgtttgtcagaaagagcagacctcagattcagagactttagcaagcaaagatatccagtaaagaaatgaaataatggccgggcacagtggctcacgcctgtaatcccagcactttgggagtcctaggcaggcggatcacgaggttgggagttcgagaccagcctgaccaacatggcgaaaccccgtctctactaaaaatacag

SEQ ID NO: 19070 - DNA, 340 bp, Homo sapiens
cccctgctttctgacggcatccaattagagtgaaatcctaactcctcagacccttccccatatccccaaagcccaaaccctacaaaagcttttcttgcaccctcctaccgggacaccccatagttcctcagggtgtgtgtgctctctggctgccatgagtaataaacctaatttgtttaacttacagggttgctcctggtggtctttggccaaagggcactgaccaagtaaatgctaagaaaaaaaaaagttatgtccctacttccaagtacactataaatactgtatgaatcctagcttgtgagggttgtattaggtatagaagacttcttgaaagacg

SEQ ID NO: 19071 - DNA, 383 bp, Homo sapiens
ggccactgagtttgggtggtgtctccggtaccagcaaggcaatggaaggcacactgcccatgcttgacatttaatgaacccttttcactctctatttgctgaaccaactctctaaagtttaggttgttaatctccagaagtggtggaattaaacacaagcacacacacacatacacacaaacaaaaactcacctgtagtcttactctttcctcaatcctaggattgattcccagccagcatcagacagcctccttagtcttttcctggagtgtagaatagtctggagataataatcttccttagtacgactgtaaaatactgtaatacaactgtaaaataaaatatagaaaaaattacagagggcaaaaccaatgttttttaa

SEQ ID NO: 19072 - DNA, 229 bp, Homo sapiens
actagctttagtttagaaatcgcaatagacatttctcaaaatccattctttacagagaagaccagaaacttttgaaatccaatttagattctttctgattaagcaacattgttagtagagagaagcatttctttgttttgctcatgtcctttgaagagtaaataactgctgactgtccagatgtaggtgttaggaaaatcagtgctgagctctggcctttggagccaga

SEQ ID NO: 19073 - DNA, 413 bp, Homo sapiens
ctgtgctgggaggtccgctgctgtcttcagagccgtcaggcagagacgtttaagtctgctataagcccctgactggggctgctgccttttttacagagatgccctgtccagagaggagaaatctcagttttatctttttcttatgtgggagtatacctgcagaataaattcatactttctctctttttatttctagaatggggattctaggaggacagtccatgttttattcatctctctgcgtctactgcccatcataatacctgacacataatgggcactctaaatgtttgtatgagtgaacttcagatttcattgcaggttgactcaataatttttaaacagaagattctatttcattacaaggactgcagatccaagccttgtcacctatcagacacacatgcacactt

SEQ ID NO: 19074 - DNA, 104 bp, Homo sapiens
tccagccccatcaggtgtcccaggccccgaggcatagactcagcctctttccccccaacctcgtgcccatctccttcttctctgaccattaccctgacccctct

SEQ ID NO: 19075 - DNA, 404 bp, Homo sapiens
ggggaaaatgtctttccagaagctaaggattattttttaactgctggaaccatttttggaggagaaatggagaaagttttagagtggtaatctgtagaatgaaaactaagaatcaaaatccataagcacctctgctgatgcttattatctggtagcctcactggcctctggctgaggactaacgctggaagaaaagtaaactggtgttggctggcctagaggttgtcttctggggctgctagtttggtaagatgctttattctttgtctttcagttatttacttgctcattatttatagaactgcctttaaaaaatcctaccctgtttgtacccactattaccagtatattagcaattgaaatactggcataaaatgttttcagttaaaacgtttatgagagga

SEQ ID NO: 19076 - DNA, 2339 bp, Homo sapiens
caggagaggccgccacccggggttccggtggcgttaggctgcagcagtggcgcttcccgccgcccgagcttcggaaacttcccggccgcgacgcagggaaccggcgcggagaaccgagcagagcggagcgcccgtggtccagcgtgtagggagccgatcgcccatggagggtctgggccgctcgtgcctgtggctgcgtcgggagctgtcgcccccgcggccgcggctcctgctcctggactgccgcagccgcgagctgtacgagtcggcgcgcatcggtggggcgctgagcgtggccctgccggcgctcctgctgcgccgcctgcggaggggcagcctgtcggtgcgcgcgctcctgcctgggccgccgctgcagccgcccccgcctgcccccgtgctcctgtacgaccagggcgggggccggcgccggcgcggggaggccgaggccgaggccgaggagtgggaggccgagtcggtgctgggcaccctgctgcagaagctgcgagaggaaggctacctggcctactacctccagggaggcttcagcagattccaggccgagtgccctcacctgtgtgagaccagccttgctggccgtgccggctccagcatggcgccggtgcccggtccagtgcccgtggtggggttgggcagcctgtgcctgggctccgactgctctgatgcggaatccgaggctgaccgcgactccatgagctgtggcctggattcggagggtgccacacccccaccagtggggctgcgggcatccttccctgtccagatcctgcccaacctctatctgggcagtgcccgggattccgccaatttggagagcctggccaaactgggcatccgctacatcctcaatgtcacccccaacctcccaaacttcttcgagaagaatggtgactttcactacaagcagatccccatctccgaccactggagccagaacctgtcgcggttctttccggaggccattgagttcattgatgaggccttgtcccagaactgcggggtgctcgtccactgcttggcgggggtcagccgttctgtcaccgtcactgtggcctacctcatgcagaagctccacctctctctcaacgatgcctatgacctggtcaagaggaagaagtctaacatctcccccaacttcaacttcatggggcagttgctggactttgagcgcagcttgcggctggaggagcgccactcgcaggagcagggcagtggggggcaggcatctgcggcctccaacccgccctccttcttcaccacccccaccagtgatggcgccttcgagctggcccccacctagggccccgtggccggcaggccggcccctgccccacccccacccacgggtgtccctgcccactcgtgtggcaagggaggggagggcaggagggctcggcctgagcagggtgctggggggagagcgcaatacctcacgcgggctgccgtcctaatcaacgtgcctatggcgggaccacgctcggagcctgcctcttctgcgactgttactttttctttgcgggatgggggtgggggttccctctccaggtggttgtccaggcccaggtcccggccctgggtgctcagccagctcggctaggccctgcgcctccctgcgcttcccccttcaggaagggtgtgtgccacctcgttgcactggatcccagtggctgcttgggggagaggcgtttgccatcactggtgttgtcacctccctgtttctccaccaagggcttgggcctctcggggctggggcctcccaggggatggggacccagaggtgcagtggccgcccacatccatggcctaggagctactgggcaggttcccggccacacatctggtgggctgttttgtttttttttttcctcttcccccagatgtcttgacgggatcactggggctctttgtgagtgagggtggccaaactaccgccggaggagatggggtctcagagcgagagctgcggagggggaggggaagaagaaggcctcacttttgctgctgcggggcccacacagccgctgctactttggggggtggggaaggggccaagctgcagacacacacagtcattcatttctgtccacacccctgtgggtggcgggtgtgcgtgtgtgtgcttgtgtgtgcgcacgtgtcggcgctcacacacacatgctagcccactgatgcacccagcccagggctggcagtctttgcagcgtggggccgtctcaccctggagcctggagaggatctatgcttgtttgtttttgtaatccatatcatagttgctttctttaattgttccttctgaataaacagtttatttaagatactga

SEQ ID NO: 19077 - DNA, 494 bp, Homo sapiens
ggactggatcccagtcccgcccctgtccccaagtggctgcttgggggagaggcgtttgccatcactggtgttgtcacctccctgtttctccaccaagggcttgggcctctcggggctggggcctcccaggggatggggacccagaggtgcagtggccgcccacatccatggcctaggagctactgggcaggttcccggccacacatctggtgggctgttttgtttttttttttcctcttcccccagatgtcttgacgggatcactggggctctttgtgagtgagggtggccaaactaccgccggaggagatggggtctcagagcgagagctgcggagggggaggggaagaagaaggcctcacttttgctgctgcggggcccacacagccgctgctactttggggggtggggtaataatccatttcattactgtcttcaaaggtttatttgtttttcccatactcataacttttagtgcattttaaaagacatta

SEQ ID NO: 19078 - DNA, 2554 bp, Homo sapiens
caggagaggccgccacccggggttccggtggcgttaggctgcagcagtggcgcttcccgccgcccgagcttcggaaacttcccggccgcgacgcagggaaccggcgcggagaaccgagcagagcggaggggtagggggagatgggggaccgggggccagaccacctctgagaggactcgctgaggcccagcacctcggcgcctcctctgttcccctggcccacctggccctgggggagatctaggcctcgaacggcactcctcgcacgcacacccccagccagagtcggaagctcgaacttggggagcgttcgcgagaagaccgagacaggagcagaaaggggcgcccgtggtccagcgtgtagggagccgatcgcccatggagggtctgggccgctcgtgcctgtggctgcgtcgggagctgtcgcccccgcggccgcggctcctgctcctggactgccgcagccgcgagctgtacgagtcggcgcgcatcggtggggcgctgagcgtggccctgccggcgctcctgctgcgccgcctgcggaggggcagcctgtcggtgcgcgcgctcctgcctgggccgccgctgcagccgcccccgcctgcccccgtgctcctgtacgaccagggcgggggccggcgccggcgcggggaggccgaggccgaggccgaggagtgggaggccgagtcggtgctgggcaccctgctgcagaagctgcgagaggaaggctacctggcctactacctccagggaggcttcagcagattccaggccgagtgccctcacctgtgtgagaccagccttgctggccgtgccggctccagcatggcgccggtgcccggtccagtgcccgtggtggggttgggcagcctgtgcctgggctccgactgctctgatgcggaatccgaggctgaccgcgactccatgagctgtggcctggattcggagggtgccacacccccaccagtggggctgcgggcatccttccctgtccagatcctgcccaacctctatctgggcagtgcccgggattccgccaatttggagagcctggccaaactgggcatccgctacatcctcaatgtcacccccaacctcccaaacttcttcgagaagaatggtgactttcactacaagcagatccccatctccgaccactggagccagaacctgtcgcggttctttccggaggccattgagttcattgatgaggccttgtcccagaactgcggggtgctcgtccactgcttggcgggggtcagccgttctgtcaccgtcactgtggcctacctcatgcagaagctccacctctctctcaacgatgcctatgacctggtcaagaggaagaagtctaacatctcccccaacttcaacttcatggggcagttgctggactttgagcgcagcttgcggctggaggagcgccactcgcaggagcagggcagtggggggcaggcatctgcggcctccaacccgccctccttcttcaccacccccaccagtgatggcgccttcgagctggcccccacctagggccccgtggccggcaggccggcccctgccccacccccacccacgggtgtccctgcccactcgtgtggcaagggaggggagggcaggagggctcggcctgagcagggtgctggggggagagcgcaatacctcacgcgggctgccgtcctaatcaacgtgcctatggcgggaccacgctcggagcctgcctcttctgcgactgttactttttctttgcgggatgggggtgggggttccctctccaggtggttgtccaggcccaggtcccggccctgggtgctcagccagctcggctaggccctgcgcctccctgcgcttcccccttcaggaagggtgtgtgccacctcgttgcactggatcccagtggctgcttgggggagaggcgtttgccatcactggtgttgtcacctccctgtttctccaccaagggcttgggcctctcggggctggggcctcccaggggatggggacccagaggtgcagtggccgcccacatccatggcctaggagctactgggcaggttcccggccacacatctggtgggctgttttgtttttttttttcctcttcccccagatgtcttgacgggatcactggggctctttgtgagtgagggtggccaaactaccgccggaggagatggggtctcagagcgagagctgcggagggggaggggaagaagaaggcctcacttttgctgctgcggggcccacacagccgctgctactttggggggtggggaaggggccaagctgcagacacacacagtcattcatttctgtccacacccctgtgggtggcgggtgtgcgtgtgtgtgcttgtgtgtgcgcacgtgtcggcgctcacacacacatgctagcccactgatgcacccagcccagggctggcagtctttgcagcgtggggccgtctcaccctggagcctggagaggatctatgcttgtttgtttttgtaatccatatcatagttgctttctttaattgttccttctgaataaacagtttatttaagatactga

SEQ ID NO: 19079 - DNA, 2089 bp, Homo sapiens
gctagcttggcctcttccctaagaaataaagaaggcactttggggtccaaggtagggtacttagatgtggaagcaaggggccccggggaggggcggggaggcggcggagagagcccgccgctgcagccgcccccgcctgcccccgtgctcctgtacgaccagggcgggggccggcgccggcgcggggaggccgaggccgaggccgaggagtgggaggccgagtcggtgctgggcaccctgctgcagaagctgcgagaggaaggctacctggcctactacctccagggaggcttcagcagattccaggccgagtgccctcacctgtgtgagaccagccttgctggccgtgccggctccagcatggcgccggtgcccggtccagtgcccgtggtggggttgggcagcctgtgcctgggctccgactgctctgatgcggaatccgaggctgaccgcgactccatgagctgtggcctggattcggagggtgccacacccccaccagtggggctgcgggcatccttccctgtccagatcctgcccaacctctatctgggcagtgcccgggattccgccaatttggagagcctggccaaactgggcatccgctacatcctcaatgtcacccccaacctcccaaacttcttcgagaagaatggtgactttcactacaagcagatccccatctccgaccactggagccagaacctgtcgcggttctttccggaggccattgagttcattgatgaggccttgtcccagaactgcggggtgctcgtccactgcttggcgggggtcagccgttctgtcaccgtcactgtggcctacctcatgcagaagctccacctctctctcaacgatgcctatgacctggtcaagaggaagaagtctaacatctcccccaacttcaacttcatggggcagttgctggactttgagcgcagcttgcggctggaggagcgccactcgcaggagcagggcagtggggggcaggcatctgcggcctccaacccgccctccttcttcaccacccccaccagtgatggcgccttcgagctggcccccacctagggccccgtggccggcaggccggcccctgccccacccccacccacgggtgtccctgcccactcgtgtggcaagggaggggagggcaggagggctcggcctgagcagggtgctggggggagagcgcaatacctcacgcgggctgccgtcctaatcaacgtgcctatggcgggaccacgctcggagcctgcctcttctgcgactgttactttttctttgcgggatgggggtgggggttccctctccaggtggttgtccaggcccaggtcccggccctgggtgctcagccagctcggctaggccctgcgcctccctgcgcttcccccttcaggaagggtgtgtgccacctcgttgcactggatcccagtggctgcttgggggagaggcgtttgccatcactggtgttgtcacctccctgtttctccaccaagggcttgggcctctcggggctggggcctcccaggggatggggacccagaggtgcagtggccgcccacatccatggcctaggagctactgggcaggttcccggccacacatctggtgggctgttttgtttttttttttcctcttcccccagatgtcttgacgggatcactggggctctttgtgagtgagggtggccaaactaccgccggaggagatggggtctcagagcgagagctgcggagggggaggggaagaagaaggcctcacttttgctgctgcggggcccacacagccgctgctactttggggggtggggaaggggccaagctgcagacacacacagtcattcatttctgtccacacccctgtgggtggcgggtgtgcgtgtgtgtgcttgtgtgtgcgcacgtgtcggcgctcacacacacatgctagcccactgatgcacccagcccagggctggcagtctttgcagcgtggggccgtctcaccctggagcctggagaggatctatgcttgtttgtttttgtaatccatatcatagttgctttctttaattgttccttctgaataaacagtttatttaagatactga

SEQ ID NO: 19080 - DNA, 690 bp, Homo sapiens
ggactggatcccagtcccgcccctgtccccaagtggctgcttgggggagaggcgtttgccatcactggtgttgtcacctccctgtttctccaccaagggcttgggcctctcggggctggggcctcccaggggatggggacccagaggtgcagtggccgcccacatccatggcctaggagctactgggcaggttcccggccacacatctggtgggctgttttgtttttttttttcctcttcccccagatgtcttgacgggatcactggggctctttgtgagtgagggtggccaaactaccgccggaggagatggggtctcagagcgagagctgcggagggggaggggaagaagaaggcctcacttttgctgctgcggggcccacacagccgctgctactttggggggtggggaaggggccaagctgcagacacacacagtcattcatttctgtccacacccctgtgggtggcgggtgtgcgtgtgtgtgcttgtgtgtgcgcacgtgtcggcgctcacacacacatgctagcccactgatgcacccagcccagggctggcagtctttgcagcgtggggccgtctcaccctggagcctggagaggatctatgcttgtttgtttttgtaatccatatcatagttgctttctttaattgttccttctgaataaacagtttatttaagatactga

SEQ ID NO: 19081 - DNA, 2441 bp, Homo sapiens
agtttccaaggtggaagctgggtccggctgccaggaagcggccggtgcgcgggctgcgcgggctgcgcggggctcggcttccacgtgcgagcctgcaccgccgccccgccctctcctggcggccaggcctggggactctctgccgcgggacggcgcctcgcgttccgccgtggcagtggccgtggccagaacgtccacgcgcggtcgtccaccgccggatctcgctccagcgcccgtggtccagcgtgtagggagccgatcgcccatggagggtctgggccgctcgtgcctgtggctgcgtcgggagctgtcgcccccgcggccgcggctcctgctcctggactgccgcagccgcgagctgtacgagtcggcgcgcatcggtggggcgctgagcgtggccctgccggcgctcctgctgcgccgcctgcggaggggcagcctgtcggtgcgcgcgctcctgcctgggccgccgctgcagccgcccccgcctgcccccgtgctcctgtacgaccagggcgggggccggcgccggcgcggggaggccgaggccgaggccgaggagtgggaggccgagtcggtgctgggcaccctgctgcagaagctgcgagaggaaggctacctggcctactacctccagggaggcttcagcagattccaggccgagtgccctcacctgtgtgagaccagccttgctggccgtgccggctccagcatggcgccggtgcccggtccagtgcccgtggtggggttgggcagcctgtgcctgggctccgactgctctgatgcggaatccgaggctgaccgcgactccatgagctgtggcctggattcggagggtgccacacccccaccagtggggctgcgggcatccttccctgtccagatcctgcccaacctctatctgggcagtgcccgggattccgccaatttggagagcctggccaaactgggcatccgctacatcctcaatgtcacccccaacctcccaaacttcttcgagaagaatggtgactttcactacaagcagatccccatctccgaccactggagccagaacctgtcgcggttctttccggaggccattgagttcattgatgaggccttgtcccagaactgcggggtgctcgtccactgcttggcgggggtcagccgttctgtcaccgtcactgtggcctacctcatgcagaagctccacctctctctcaacgatgcctatgacctggtcaagaggaagaagtctaacatctcccccaacttcaacttcatggggcagttgctggactttgagcgcagcttgcggctggaggagcgccactcgcaggagcagggcagtggggggcaggcatctgcggcctccaacccgccctccttcttcaccacccccaccagtgatggcgccttcgagctggcccccacctagggccccgtggccggcaggccggcccctgccccacccccacccacgggtgtccctgcccactcgtgtggcaagggaggggagggcaggagggctcggcctgagcagggtgctggggggagagcgcaatacctcacgcgggctgccgtcctaatcaacgtgcctatggcgggaccacgctcggagcctgcctcttctgcgactgttactttttctttgcgggatgggggtgggggttccctctccaggtggttgtccaggcccaggtcccggccctgggtgctcagccagctcggctaggccctgcgcctccctgcgcttcccccttcaggaagggtgtgtgccacctcgttgcactggatcccagtggctgcttgggggagaggcgtttgccatcactggtgttgtcacctccctgtttctccaccaagggcttgggcctctcggggctggggcctcccaggggatggggacccagaggtgcagtggccgcccacatccatggcctaggagctactgggcaggttcccggccacacatctggtgggctgttttgtttttttttttcctcttcccccagatgtcttgacgggatcactggggctctttgtgagtgagggtggccaaactaccgccggaggagatggggtctcagagcgagagctgcggagggggaggggaagaagaaggcctcacttttgctgctgcggggcccacacagccgctgctactttggggggtggggaaggggccaagctgcagacacacacagtcattcatttctgtccacacccctgtgggtggcgggtgtgcgtgtgtgtgcttgtgtgtgcgcacgtgtcggcgctcacacacacatgctagcccactgatgcacccagcccagggctggcagtctttgcagcgtggggccgtctcaccctggagcctggagaggatctatgcttgtttgtttttgtaatccatatcatagttgctttctttaattgttccttctgaataaacagtttatttaagatactga

SEQ ID NO: 19082 - DNA, 3093 bp, Homo sapiens
agtttccaaggtggaagctgggtccggctgccaggaagcggccggtgcgcgggctgcgcgggctgcgcggggctcggcttccacgtgcgagcctgcaccgccgccccgccctctcctggcggccaggcctggggactctctgccgcgggacggcgcctcgcgttccgccgtggcagtggccgtggccagaacgtccacgcgcggtcgtccaccgccggatctcgctccagcgcccgtggtccagcgtgtagggagccgatcgcccatggagggtctgggccgctcgtgcctgtggctgcgtcgggagctgtcgcccccgcggccgcggctcctgctcctggactgccgcagccgcgagctgtacgagtcggcgcgcatcggtggggcgctgagcgtggccctgccggcgctcctgctgcgccgcctgcggaggggcagcctgtcggtgcgcgcgctcctgcctgggccgccgctgcagccgcccccgcctgcccccgtgctcctgtacgaccagggcgggggccggcgccggcgcggggaggccgaggccgaggccgaggagtgggaggccgagtcggtgctgggcaccctgctgcagaagctgcgagaggaaggctacctggcctactacctccagggaggcttcagcagattccaggccgagtgccctcacctgtgtgagaccagccttgctggccgtgccggctccagcatggcgccggtgcccggtccagtgcccgtggtggggttgggcagcctgtgcctgggctccgactgctctgatgcggaatccgaggctgaccgcgactccatgagctgtggcctggattcggagggtgccacacccccaccagtggggctgcgggcatccttccctgtccagatcctgcccaacctctatctgggcagtgcccgggattccgccaatttggagagcctggccaaactgggcatccgctacatcctcaatgtcacccccaacctcccaaacttcttcgagaagaatggtgactttcactacaagcagatccccatctccgaccactggagccagaacctgtcgcggttctttccggaggccattgagttcattgatgaggccttgtcccagaactgcggggtgctcgtccactgcttggcgggggtcagccgttctgtcaccgtcactgtggcctacctcatgcagaagctccacctctctctcaacgatgcctatgacctggtcaagaggaagaagtctaacatctcccccaacttcaacttcatggggcagttgctggactttgagcgcagcttgcggctggaggagcgccactcgcaggagcagggcagtggggggcaggcatctgcggcctccaacccgccctccttcttcaccacccccaccagtgatggcgccttcgagctggcccccacctagggccccgtggccggcaggccggcccctgccccacccccacccacgggtgtccctgcccactcgtgtggcaagggaggggagggcaggagggctcggcctgagcagggtgctggggggagagcgcaatacctcacgcgggctgccgtcctaatcaacgtgcctatggcgggaccacgctcggagcctgcctcttctgcgactgttactttttctttgcgggatgggggtgggggttccctctccaggtggttgtccaggcccaggtcccggccctgggtgctcagccagctcggctaggccctgcgcctccctgcgcttcccccttcaggaagggtgtgtgccacctcgttgcactggatcccagtggctgcttgggggagaggcgtttgccatcactggtgttgtcacctccctgtttctccaccaagggcttgggcctctcggggctggggcctcccaggggatggggacccagaggtgcagtggccgcccacatccatggcctaggagctactgggcaggttcccggccacacatctggtgggctgttttgtttttttttttcctcttcccccagatgtcttgacgggatcactggggctctttgtgagtgagggtggccaaactaccgccggaggagatggggtctcagagcgagagctgcggagggggaggggaagaagaaggcctcacttttgctgctgcggggcccacacagccgctgctactttggggggtggggaaggggccaagctgcagacacacacagtcattcatttctgtccacacccctgtgggtggcgggtgtgcgtgtgtgtgcttgtgtgtgcgcacgtgtcggcgctcacacacacatgctagcccactgatgcacccagcccagggctggcagtctttgcagcgtggggccgtctcaccctggagcctggagaggatctatgcttgtttgtttttgtaatccatatcatagttgctttctttaattgttccttctgaataaacagtttatttaagatactgaaaagaaaaaaaaagacatacataataaggaaaagaaaacaaggggggcgcccaacgcttcaatagtagttctcccccctgcgggggcgccccaaagtctttccgacgggctacccacgtatttgtctggtccacacaaggtggcgccccttattgtgcgagcgagcatttatcaataacgctaaagcgagcaggtggccgctgccgtgtttccacaagacgggcggcgcgacagctgggtgggaaccagccgcgtgtccataaccgagtgaggcaatctcttggtgagtgagagagggcgacccctatataggaatctgcggggagggggcgggagaaaccagacatatatgtgcggcggaccacatacttatccgccccatcacaagaagaggagattttacaacgccgccctcaataagggggcggagcaatcttttctatcaacaggcttcctgagcacaagggcggtgtgtacgaaaatgcgcgcggggatgcaacaccagcgacaagcgctgtgagacaatatatatggtgcgttaagcgatgcgcgttctgagagaagcaacctctttagcgagcggatacccttaggggagcgttaatgttaaccctcttatgcgggacaggaacgtcattctttatatgacccg

SEQ ID NO: 19083 - DNA, 629 bp, Homo sapiens
ttttgtccatttttccgccaagctcaaaattacccccccttaaagggaccaaaagcgggaactcccccccggtggcggccctctctaaaattatgggttccccgggctgcaggcttgggtcttgatccctgtgaccatttggtgaaagttctggaccttttctttgagtgatgcatatatacatgctcagttatgttccggtttcagtctatccgttgatttgggtgagaatccctgatctagactctccctctcatccttaggcttaggctgtctatcactactgctatgccatccatttttcttcctgttttgatgcctgtgtttccttcctgcctctgctttttttttttttttaaatacaaattcagctgtggcatttttaaaatgggcttaattcccacctctctgcctttccaattgctgagttccctagcttaagtaatcagtgcccatccactcagattaatgttgttacttagttcccatatgatggaaagattgttttctccctgcttttgaggggtgcaggcggcaaattaaaaatgttcttctttaacatcttatgcagctgccttgctgtgatctgttgaaagtcagccctcaacatgaaggtttatgagaaaaag

SEQ ID NO: 19084 - DNA, 896 bp, Homo sapiens
ccagacgtggctctcacgagggggagaaatgatgtcccctgcaaatggccactaaaaatagcccacaatctctgcatctgtcccaccccaagttgcaaacccgaatgctttgagggcctggcaggtgacgtggaagagtgaggagggctgccttggcttcacagaagcatcctgagttgtactcttccaataaagacacactctatctgcatactaaatacataaacattgaggatccaagactattcttcacttctacatcaaacatgcacgctgtcttgtaacctcgtgtaaaagcaccggagggattgctccaggcaatgtcagagccttctctttttcttaatctgggaagaaagtggccaaggcatcctccaaaaatgcagaaattatttaatccctctcttccaagttctaagctgtgtcaacatcgtctaaaagcctccctagaatgaggaagtgaacagggaaaaaggagcccccacaacctgcagagactctgtgattccctgggtctcctaccaagacgccgggcaggtcacagttgcacattcaaagtaaacacagctggactaagaagaagaaaaagaaaatccatccttctgttttcatctctaaaagctagaaaactacactcttgcctatcaaatatagcctcgctccctctgctgccaatctggctctagtcgtcttcgctggcggccttgttcagagaaaggatgggctgaatctgtttaagggagaggaaggagaggagggagaggaaggagaggagagagaggagagggcagggcatgctcctgtgatagcctcacttccaggtctctgtctggtcctcaaagctttctctcttgttcagagccttcaatgttcacttcacaaaaggggaaacaaag

SEQ ID NO: 19085 - DNA, 886 bp, Homo sapiens
atagatttgaagtttcttaacctcaaaactctattttagctccaactagtattattttaaaataggtggtttagcaacacatatatccaaaaatggttagattctccagatatccagaatctaaaccatcatcagagtaaaaaggtaagaatatacttcaaagttttctcaagacaatcctggccagaatgcttaagtttgagtagtcaaatacttaacaaaatgaatataaaaaatttagcactagcaactaatcaacaaacatgaatataaatgctttagtatgaagaagccattgatagttgtaataactttgcattgttaattggtatcttacaaattacaacttatgcaaacaaaattatgttggtctataaatattggttaaatgaacatgtttcctgtacatttataaattctccatatgaaaaatactcatctgaaatgctaaaagcaaaaatgttatcagtagaaaagcagctattttatgactttttaaagcaagttatgtctgttatttttcacctgtttcaaaggaatgcataagatgcttttataagtgtttttgttcatgtataacatacttagcacttactacagatgaatgctgtagactacttaatttcaaatgcctacattttcaaaacaatgaagacatattactgaccataaaatggaaatagcaaccattcaaaatagttgaacatttattgtgtcatttactctacggaggcaatctcattattaaagaagttatagccagtttatgtgcatatgtaggtgcaagtatctataatgtacattataatttgtaactatcaaatatgtaagtgtaatgaatatcggtttattttgaatacaagcttatataaaacaaaaaaaaaaa

SEQ ID NO: 19086 - DNA, 296 bp, Homo sapiens
ttgcaccatcgtcaaaaatcaattgaccataaccagggtctctagtttgctaggattttgttgaggacttttgcatctatgtttatcaaggatattaccctgtaattttcttttcttgtagtgtcctagtctgactttgaatgtgtttaagagtgttctcccaggccggtgcagtggctcatgtctctaatcccagtgctttggaaggccgtaagtgggaggatcacttcaggccaggccaggagcttgaaaccagcctggaaaacagcaagaatccatctctataaaaagtaaaa

SEQ ID NO: 19087 - DNA, 605 bp, Homo sapiens
tcgagccggtccagtgctacctacacaaacagagtgctccggcgctacaaggaagcacactgaaaataacaagctgatgatacattatcacattgtacaatagtattttatattttcttacacactttccagtaagttttttcacatcctgaaatgtcacggtgtcatttttgaaaggagagctgtggagagattctgatatgactcagagttgtgaaggcacctggtggagctccttcattaatttctctaaccgttcagggcactgaagtctgtggggacagtaagttcacatttactgtttgtgttaagtgaatccccaacctactttgatttgcactaaaacgcctctaccctcaaagtaccgcgtcattaaggttatatgataacaaattaggaaaaacaaattaagcatcacttgcttggcaacattaactggcccaccacactcccaccacagattttagaagtgtacattagcaaaagatgcttctctatgcattatggcagaagtctattaaagaatatttaatttattgactaatatttctaataagcacattcagaggatactctttctacgttttatatactggctgtctgcc

SEQ ID NO: 19088 - DNA, 303 bp, Homo sapiens
ccagggcacagaaacattttcatggtataatggaatacaaagtacattaaactcctgggtcactctacagtaagcaacaagcctaactctgcttcttgtccccttttacattaagtagacaattaaaaacagctgcaaacatatttcccaaccactaaaatgcatatatgatctctatgtaaaatgatatttatgcaacatatagtctgactggttaattaatggaccttttgtgaattgacacagtcaatatatatgttttctgcacataaaaaatcaaaacaataaaacctatgtacaggt

SEQ ID NO: 19089 - DNA, 816 bp, Homo sapiens
agatggggtttcactgtgttagccaggatggtcttgatctcctgacctcgtgatcacccgcctcggcctcccaaagtgccagtatttaaagtttaatgtcttcccagctgggtttcagacttgccaggatcctgttgcccctttctttagccaatttctcccttttgggacaagaatgttttacttattgcctgtaccaccaactgtatcttggaaataaataacttatattttatttcagaggctcataggcggcaggaacttaccttgagtctcaaatgagacttaggacttttgagtgatgctagaatgagttaagactttgggaagggatgattatattttgcaatgtgagaaagacattagatttggggggctgggggtagaatgacattgtttagatgtttgtctccttcaaatttcatgtttaaatgtaatccccagtgttgggggtggaggtggggcctgatgggaagtgtttgggtcatggtggatgatccctcatgaatggcttagagccactggtgatgagtgagttctcactcagttcgtgtgagatctggtggcttaaaagagtctgctccccctttgccttccattgtgattgtaaccttcctggggccttcatcaaaggccaggcaaatattggtgccgtgctagtatggcctgcagaaccgtaagccaaaacaaaccttttttctttataaattacccagcctcagttattcctttatagtgatgcaaaacgggctaactatataaatttgtaatttttaagttatagattgtttttattaaacacttatgaatactgtt

SEQ ID NO: 19090 - DNA, 1320 bp, Homo sapiens
agatggggtttcactgtgttagccaggatggtcttgatctcctgacctcgtgatcacccgcctcggcctcccaaagtgccagtatttaaagtttaatgtcttcccagctgggtttcagacttgccaggatcctgttgcccctttctttagccaatttctcccttttgggacaagaatgttttacttattgcctgtaccaccaactgtatcttggaaataaataacttatattttatttcagaggctcataggcggcaggaacttaccttgagtctcaaatgagacttaggacttttgagtgatgctagaatgagttaagactttgggaagggatgattatattttgcaatgtgagaaagacattagatttggggggctgggggtagaatgacattgtttagatgtttgtctccttcaaatttcatgtttaaatgtaatccccagtgttgggggtggaggtggggcctgatgggaagtgtttgggtcatggtggatgatccctcatgaatggcttagagccactggtgatgagtgagttctcactcagttcgtgtgagatctggtggcttaaaagagtctgctccccctttgccttccattgtgattgtaaccttcctggggccttcatcaaaggccaggcaaatattggtgccgtgctagtatggcctgcagaaccgtaagccaaaacaaaccttttttctttataaattacccagcctcagttattcctttatagtgatgcaaaacgggctaactatataaatttgtaatttttaagttatagattgtttttattaaacacttatgaatactgttaaaaaaaaaaaaaaaaaaaaaaaaaaaaaaaacacaaacaaaaaaaaaaaaaaaaaaaaaaaaaaaaaaaaaaaaggggggcgcggccccccgaccccccccccgggggccccccaccctcacgcgccccccctgttgttgttctgcagcacaaagggcggtcctcaaatacgaggaggcgttctatttatttataccgctcacgcgagagcgggccgcgcgcattaataaaacacaagcggtgtagatgcggagcaaaacctcgtcactcccgggtggacacctttggaggaaagagagcacccccttactctgtcggggggggggcgagaagaccaaccactgcgtgggagcaaacacttctcctccacggaagagtatttacttaaagaccctctatggaggggagaaaaaatctaaaacaatcttttctaaagagggcttgaactcagggtggggacttacaacactgctagccgcttaacttatgtgtctcgggccctc

SEQ ID NO: 19091 - DNA, 476 bp, Homo sapiens
atagattgtttttattaaacacttatgaatactgtttgaagtgctttaatttttataacaatcctatgaatttggtaataatcacattttacagatgaggaaattacccaagattatatagctaataagttgcgtggcagaaattagcatctggtatcagtttgcgatctttaccactaacacgatgtctgtgcatcatattaatcataatcattttctctgtcatatgttgaaagttattgtgccaaacattgtgctgagttttagaagcatgatctgatttgataaatctacaatgtaggttctattcttttacttcttgaggaaattttgagacccccaatgattaaataacttctttcccttgttcattgtattagactgcaattctccactcattatatttgatgccttttgcaatatggctttgtaatttttcccatcaggaagtaaagtctatttcctcaaccattaaa

SEQ ID NO: 19092 - DNA, 340 bp, Homo sapiens
tgaagggggactcctggggctggaggagtcggtaggacaatggccatgggaagcatggaggccatgctgacgtgcctggccttgagtctgtagaccttggcgtgaggaaagagctgatgtggcaagcaattgggtacgtggccgcagcctctgtcctgatgactgcttttactaacaggtgggattttgttctaggaaagcgcccccactgcctttaaataaaatggttgcagcagggtgcctgttgtctcagctagtcaggaggctgaggtgggaggctcacttgagcccaggagttctcgagaccagcctaggcaacatagcaggaccccatctctga

SEQ ID NO: 19093 - DNA, 348 bp, Homo sapiens
aaaaagagcaaaactccatcttataaaaaaaataaaaataaaaattagctggttgtggtggtgggcgtccgtaatcccagctactcaggaggctgaggcaggagaatcccttgaacctgggaggtggaggttgcagtgagcaaaggtcacgccacactgcactccagcctgggtggtagagcaagactcagtctcaaataaataaaaataaataaaaagtcagatctgccagtggtaataatgcttttagaaattttgtctttgattaccaggaaaaaccctacatgctagtccttatactccgtcgtgacatttggtaattaagtagagtgaggtggaatgatctcc

SEQ ID NO: 19094 - DNA, 398 bp, Homo sapiens
gtggacatttcactctgcaaagggttgatgagggtacacacagcaggcttcctgcatttccatgggtccacagcagccctggaagtcttagatctaagagtgggcctcactatgcctgttgtcaaacctctcaggtcaccaactcctctgtctgtcaaatggggatgcagtttttctcacccacttcacggagcggtttgagtactagatgctccgtaggcctgtgagccatttctgacgttattaccatgtccttggcagcagctatgtccccggttgactcagattcagtcccaggcagattaaaatcttcaaatgctttgcatatcagtggctgaccagccagtagcctcaccccaccctgccagcctccattgctaaatcatgcagtgggtgtt

SEQ ID NO: 19095 - DNA, 210 bp, Homo sapiens
actgcatattagcaatcacattaaactaaatgcaaggttttaggaatgaattaatgagaaagatgttctctctccttgcattagtaattaggtttgttatcttctcagagacctaaatcgcatcggcattaacgccgtggcagcacctagatggcagccatatgctgtcagggaacaaattagttcatgagcatcattaccagatcctaa

SEQ ID NO: 19096 - DNA, 599 bp, Homo sapiens
tataatttgttgtattttatcttatattaaatatttttaatactcttgatatctgagctgctcccagtggtccaattgtatgatgtcagaccctcatttcaaagaacttgcttatacaatacctatcatgagtactaatgactcatgtattttaatatcataactttgtgatatggaagtttattttgtcacgagataattgtgttcttcttatcatgtgccagatttctttcagtattttagcaattaacaaataaatatgggtgtgggttttgtaaaccaaataaagtatatatcaaaacattatcggctgggcaccgtgactcagtcctgtaatcccagcactttgggaggccaaggtgggtggttcatgaagtcaggagttcgagaccagcctgaccaacatggtgaaaccctgtctctactaaaaatacgaaaattacttggcgtggtggcgtgtgcctgtaatcctagctactcaggaggctgaggcaggagaattgcttgaacccggaaggcagaggttgcagtgagccgagattgtgccactgcactccagcctgggcaacagaacaagactccatctcaaaacaaaaaag

SEQ ID NO: 19097 - DNA, 456 bp, Homo sapiens
attcacagaggtgatgctctccccagaacctagttgcttccagctcagtgaggacacacacaggcaaatgagtcatggctgggttgagctgcaggttctttgaagcaggtatggggtgtaccatggggcccaaaggaagaaaacaccgtcccatggtttgtgagaaaggcatgaataatactaagaggtgagcactctggcacttgtggtgaccctggcagccctccaatgaaggagaatgttgtgacctcggctagcaaagtgtaaaagttttcactttgacagaggttgagttacattcaagtttctaaagcattccccagcaattccctccagacagcaactgagctatgaatctggaatttatttggtagggacttttctctctcagaaatgcagccaaacaccaaagaaaaagatcaccttttaaataaaagaagcacattgtactattag

SEQ ID NO: 19098 - DNA, 442 bp, Homo sapiens
gtaatcccagctactcggaaggctgaggtgggagaatagcttgaacccaggaggcagaggttgcagtgagccgagatcacgccattgcactccaacctgggcaacagagcaagactcatctcaaaaaagaagaagaagaagaagaagcagcagcaaatctaaaatgtaatccataaaagtaagaaattgaaaataaaggatttaaaaaatactagactgacacaaaccaaaacagaaagctgatagaccaaaaatagatttgtaaggcagaaagcattgttagtgatgaagaaagccattacataatgaagatgatgaagaaagccattaattacataatgaagaatggaataattcaccaggaagaaatagttatcttgaatctgtgtgtccaaataatattgtctcaaagcacataaagcaaaaatttgcaggcaaaaaa

SEQ ID NO: 19099 - DNA, 247 bp, Homo sapiens
ttcccagagaagcacacatactgaaaccatctgcatttgtgtgtggggagaagtttgcagatgtggggagtcacaggtcatttgaaattccaagattaagaaaccctgttacctttaagataaagtctgactccatggtatgacaaataaatcccttcccagtctggtcttaacccagacctcatttgccacatgtgcccactccccatccccctgcaggccattcctcagccaccatggcctttgg

SEQ ID NO: 19100 - DNA, 379 bp, Homo sapiens
ggctgggttaatgctgtttccttcattgctgcctcacaaaaagcctcctccaaggtcacctcactgctcctcagtttcccttcctttgggacaggctcaggaaagccgctcagtgtaaatctgtggcggaaccccaggccttgtgaagaggtagcagaatgggggcatctgctttcttctcttcgatatccaagtttctaaaaggaagaaaagggagaattacaaagcacatgcaagctcacaaaaatgtagatggctactgaggatcctaaagggcctgatcacaattcctcccttaatttaggggagccaagtgcttcccaatgtgctctgggaaaaacatgtgacacaaacatgcacttaggatatctaaacactg

SEQ ID NO: 19101 - DNA, 432 bp, Homo sapiens
actctgagtacttgattaaggtagcgtctgctggcttcctccttgtgcagttgccctttttcccttccacaactattttgtggggaggaactttgaaactattaaatattgtggaactgggcacagtggtggctcacacctgtaatcccagcactttgggaagctgagacggttggatcacttgaggccaggagttcgagaccagcatgggcagcatggcaaaaccccatctctacaaaaaatacaaaaatatttgctgggctgtggtggtgcgctcctttagtcccagcaactggggaggctgaggtggctggattgcttgaacctaagaggttgaggctgcagtgagctgagattgtgtcaccacactccagcctgggtgacacacaagaccctacctcaataaataaataaatattgtgttcctcttta

SEQ ID NO: 19102 - DNA, 250 bp, Homo sapiens
catttatctgaatttattggcaggtcagggtatccttctggaggtcagcaagtgaaataatttcttattactttacaagtggcaggtggtgaacagtgttacacaaaatgcgttatataaaataagtgtatatgaataaagatgtggttagtggatgccgttcagtgtgagtgcaaggtgtactcagaagctttttttccaactcaaagacaagaaatgaattccattgtaattgatccagtttttctct

SEQ ID NO: 19103 - DNA, 301 bp, Homo sapiens
tccattctgtaggttgccttttttaatgttgatagtgtctattgatgccccaaaagtgttaattttcatgaagtccagtttgtctggttttgtagttgttgcctgtgccttttggtgtcatagctcagaaatcaatgccaaatcaaatgtcacgacagttttgccccgtgttttcttcttagagttttataattttaggtcttacatttaggtcatggatcaattttgagttaatgtttgtatatggtgtaagataagtgtccaaattcattctcttgcatgtggatatccagttttccca

SEQ ID NO: 19104 - DNA, 477 bp, Homo sapiens
gtatcatggttatgaaagaaaatgcctttattctttaggaatgccttcacttaggagtgaaaggtcttatctaaaacttattttcaaatagttctgcaagtaaataaatgtgtaaacttatatagatattcatatatacatatatctataaagcaaatatggcaaaatgttaatgattttgaatgtaggtagaaggcatatacagtttattattaccattatattatatatattaacttctctttacatatcagattttccttaataaaaagttggaaaaattcaaacaaatccacaaaatgtcacggtcaattatacaaatacatatgatagaaatgtacttagcggcctatcacagtggctcacgcctgtaatcccagcactttgggaggccgaggtgggcgaatcacctgaggtcaggagtttgagatcagtctggccgacacggtgaaaccctgtctctactaaaaaaaaaaa

SEQ ID NO: 19105 - DNA, 319 bp, Homo sapiens
gtgaaatttgaagtcatgtcctctgatgctggagctaggaaatgaaaccattatattatattgtgtttctgtcaggtgacacatctctgagagaaatgctatcactaatatgatcatgaatagaagcattagattaaaacttgtttcatcagcctgaaatactgggctgaaatcaacacaatcattctggtgtaattgaatcaatcaaaattggttactttagaacaggattggagagaactgactttccaggaggtcttgaaaaagaaatactggtgttattgttgaccacagtcaggtaacttagcctagaaaaaaa

SEQ ID NO: 19106 - DNA, 850 bp, Homo sapiens
gtacagtggtgcgatcacagctcactgcagcctcgatctcccaggctcaagtgatcctcccacctcaacttcccaaaggattggaattacaggtgtgagccaccatgcctggcctcatagaatcttatacacttccttataaccataattgatttatcagactatttagcatgaatctcctgtacctctggagaacgtaagaggaacaacaacaggcaaggtccttgaatctcataatgattacattctgggggaaagagcattctagcagtactgtatctaatcaactggctaacagtttgtataattcttttttttttctttttttgagacagaaaactgcacaattatgattccgggatgatcagtaaattaaggattttaaacacacataaccacagcaataccttgaacgaaagactgaagagaatttctttgtctgctaagattacttgaaaaacaaaagaaaagaaaaatggtttaaattgttattacagaaggacaaaaccagaaaaggagagcctggaagaggaacaagacggtcacttccatctcttcctaaaaagacacagaaggcttcaatgccttcactgttgttttggattggaatggtgctgcaatgggaactgcaaatacaaataaacatgaaaacaacaaatgcagatgtaaaataaagacatgctagaaatcaaagaaaccgacctctaccagacacacccaggtctgggtgtacctttgcctgttcttcccgacttgcacagcccaagcaaggtggaaggagaaacataacaaaatgatacaggaaccagagagcagagggtcttggagcataaactgttaaaataataat

SEQ ID NO: 19107 - DNA, 633 bp, Homo sapiens
gttgtggtaaactcagtttctagacctaagaagagatggctccttctccttaatatttccaccctgagagagcctcttatcattgataattttaaaacataatttaaaaccctagacctctctctacaaccctagttactgttctctttacatatattctcccattgcaaccaaagttctatgaagaattctcaatactcaactcacatccctttgcacctccctccacctcagtcctcattcctcatctaatggtgctttgttcccgcacccctctgttgaaatgaaccccatcaaaaccaacagccacccctttgtcccatttatagatcaagagtgttaaaatgaacatctatatggagacaaagcttcccccgcaatgacaaaattcagttgcttttgtatagacaaagattatattgcaatgctatatttacctaaaagctagcattgtaaaatagcttccataagagtcagtcagataacgtgaaggctgtgctacaggaactgtgctatcagttgaagtacaacatttccccaacatatcccatactattgcttcaataaaaggaattttgcaaatagatttactgcatgttagcaatatttttatgatcacttcaataaattctg

SEQ ID NO: 19108 - DNA, 2504 bp, Homo sapiens
attttctggggaaagccttatttctatctttgccatccagtttgattttacaagacaatgctgtcccacctcaagacagtgctgaccccaatgaaccatccagtttccgatcatttcacctctaatacccagggataggtgagcatgttagtcagcagttccaacatccaggtgtggccttcaagtggtctctagagcagcactgtccaaagaactttctgtgatgatggaagtgttctatggcttatagactatactgagcaattgaaatgtggctacagcaaataaagaactaattttaattttaattaaaatgaaaatgaacttttaattgtaattttcattttaatttaaatagctgcatgtggcaatttaataccatattggacagataattctaaagtaatgatatctaatagaaatatagactggggctgggcacagtggctcacgcctgtaatcccaacactttgggaggctgaagtgggcggatcacttgaggtcaggagttcaagaccagcctggccaacatagtgaaaccccattgctactgaaaatgcaaaaaaatcaaccaggcgtggtggtgggtgcctgtaatcccaactactcgggaggctgaggtgtgagaatcaaaaaaaataataaaattaaaataaaaataatgtgagctggacttggtggcatgtgcctatagtcccagctacccaggcggcttaggcgagaagattatttgagcccaggagttaaagagaccagcctggggaatgtagtgagcctctactgtaaaacaaaacaaaacaaaagcaacaacgacaacaacaatataattacacaagaaattttaaattttctaatagctatatgaaagcagtatttaaaaagtgaaattagcctggcgtgcatgcccggccttccttgaagttttttgtttggttttgatttctttttggagattgggtctcgctctgtcacccatgctggagtgcagtggcacaatcttggctcagagcaacctctgccaagcgatcctcccgcttcagtctgagtggctgggactacgggtgtgtgccaccacgcccagctgatttttgtggttttgttagagatgaggttttgccatgttgcccaggctcgtcttgaacaccggggctcaaggaatctgcccatcttcgcctcccaaagttctgagatagcaggtgtgagtcatcatgcccagcctccttgaagtttactaacaattgggataactgagggaagagaagtgacaattccactcagtctattagaggtctggatataaggtagccacacaataactctaacttgacttctaaccattctatcttattgatttggaggctgtcttctgccagattttttgtggcttgagatgatattttcgaacccttctttcactacctttcttacccttaatgtgccaagcttgaaacaggatttgatttcctgagctacttgttcgccttctgtgcgtcaccaagtaatctggttcatctttcgtctcattcatgttattttcaagtgaaacaagacattttgggggtcaagtctctttgggtgttttgtttttatgtatataaaaatggattttgtgttccctttccatgtaagtaccaacttatatggaaactcacaatcataatgtaaagaagaaatgaaagcctggtgtattgtacttcaagatgcctccctgatgtatagaatctccttgtaaaataaataattgcattgtatatcagtcttcccatcaatattaattattaaatattttagaatttttaaataccaactataaaaaaaaaaaaaaaaaaaaaaaaaaaaaatttggggggggggggcgccccaggaaaaatttttgaaacccaccctgttggggggggcgggggaccccagtggtaattgagaacatggggcagaacggggcgggcagaaggacactgggggccgagacaaaggccgcgggcgtctgtcccccaataaaaaagccgcggggcgaccgcgcgggttctggaaccaaacccaaaggcgccgaggcaccaccgggtccacacccaggggcccagcgagcgtaaaaatgcagcgcgcggatgtaaaccaccagaccatgcaaacagcagacgtgacagcacaagacgaaccatcccccacgactagacgcacaacccccgacacactctaggacgacaccaactagatcagccaaatcgcgcgcccagcaacatgcacacaacagacacaccggccgccgacgccaccgtgtccacacgtgcaacagacccccactgcgcgacagcacgcacgccatcaaggcccacatcagggtctgtgcctgggacaagaccacagcctgccgacagacccgacaccgcacgactgccacaccgcctgcgatgcacccgcgctcacgtcgcaccacccagaacagcgcaacaaccaccgcacgcaccgcctcgcgccccacccccccccactcaagcccccaacac

SEQ ID NO: 19109 - DNA, 1806 bp, Homo sapiens
attttctggggaaagccttatttctatctttgccatccagtttgattttacaagacaatgctgtcccacctcaagacagtgctgaccccaatgaaccatccagtttccgatcatttcacctctaatacccagggataggtgagcatgttagtcagcagttccaacatccaggtgtggccttcaagtggtctctagagcagcactgtccaaagaactttctgtgatgatggaagtgttctatggcttatagactatactgagcaattgaaatgtggctacagcaaataaagaactaattttaattttaattaaaatgaaaatgaacttttaattgtaattttcattttaatttaaatagctgcatgtggcaatttaataccatattggacagataattctaaagtaatgatatctaatagaaatatagactggggctgggcacagtggctcacgcctgtaatcccaacactttgggaggctgaagtgggcggatcacttgaggtcaggagttcaagaccagcctggccaacatagtgaaaccccattgctactgaaaatgcaaaaaaatcaaccaggcgtggtggtgggtgcctgtaatcccaactactcgggaggctgaggtgtgagaatcaaaaaaaataataaaattaaaataaaaataatgtgagctggacttggtggcatgtgcctatagtcccagctacccaggcggcttaggcgagaagattatttgagcccaggagttaaagagaccagcctggggaatgtagtgagcctctactgtaaaacaaaacaaaacaaaagcaacaacgacaacaacaatataattacacaagaaattttaaattttctaatagctatatgaaagcagtatttaaaaagtgaaattagcctggcgtgcatgcccggccttccttgaagttttttgtttggttttgatttctttttggagattgggtctcgctctgtcacccatgctggagtgcagtggcacaatcttggctcagagcaacctctgccaagcgatcctcccgcttcagtctgagtggctgggactacgggtgtgtgccaccacgcccagctgatttttgtggttttgttagagatgaggttttgccatgttgcccaggctcgtcttgaacaccggggctcaaggaatctgcccatcttcgcctcccaaagttctgagatagcaggtgtgagtcatcatgcccagcctccttgaagtttactaacaattgggataactgagggaagagaagtgacaattccactcagtctattagaggtctggatataaggtagccacacaataactctaacttgacttctaaccattctatcttattgatttggaggctgtcttctgccagattttttgtggcttgagatgatattttcgaacccttctttcactacctttcttacccttaatgtgccaagcttgaaacaggatttgatttcctgagctacttgttcgccttctgtgcgtcaccaagtaatctggttcatctttcgtctcattcatgttattttcaagtgaaacaagacattttgggggtcaagtctctttgggtgttttgtttttatgtatataaaaatggattttgtgttccctttccatgtaagtaccaacttatatggaaactcacaatcataatgtaaagaagaaatgaaagcctggtgtattgtacttcaagatgcctccctgatgtatagaatctccttgtaaaataaataattgcattgtatatcagtcttcccatcaatattaattattaaatattttagaatttttaaatacca

SEQ ID NO: 19110 - DNA, 1751 bp, Homo sapiens
attttctggggaaagccttatttctatctttgccatccagtttgattttacaagacaatgctgtcccacctcaagacagtgctgaccccaatgaaccatccagtttccgatcatttcacctctaatacccagggataggtgagcatgttagtcagcagttccaacatccaggtgtggccttcaagtggtctctagagcagcactgtccaaagaactttctgtgatgatggaagtgttctatggcttatagactatactgagcaattgaaatgtggctacagcaaataaagaactaattttaattttaattaaaatgaaaatgaacttttaattgtaattttcattttaatttaaatagctgcatgtggcaatttaataccatattggacagataattctaaagtaatgatatctaatagaaatatagactggggctgggcacagtggctcacgcctgtaatcccaacactttgggaggctgaagtgggcggatcacttgaggtcaggagttcaagaccagcctggccaacatagtgaaaccccattgctactgaaaatgcaaaaaaatcaaccaggcgtggtggtgggtgcctgtaatcccaactactcgggaggctgaggtgtgagaatcaaaaaaaataataaaattaaaataaaaataatgtgagctggacttggtggcatgtgcctatagtcccagctacccaggcggcttaggcgagaagattatttgagcccaggagttaaagagaccagcctggggaatgtagtgagcctctactgtaaaacaaaacaaaacaaaagcaacaacgacaacaacaatataattacacaagaaattttaaattttctaatagctatatgaaagcagtatttaaaaagtgaaattagcctggcgtgcatgcccggccttccttgaagttttttgtttggttttgatttctttttggagattgggtctcgctctgtcacccatgctggagtgcagtggcacaatcttggctcagagcaacctctgccaagcgatcctcccgcttcagtctgagtggctgggactacgggtgtgtgccaccacgcccagctgatttttgtggttttgttagagatgaggttttgccatgttgcccaggctcgtcttgaacaccggggctcaaggaatctgcccatcttcgcctcccaaagttctgagatagcaggtgtgagtcatcatgcccagcctccttgaagtttactaacaattgggataactgagggaagagaagtgacaattccactcagtctattagaggtctggatataaggtagccacacaataactctaacttgacttctaaccattctatcttattgatttggaggctgtcttctgccagattttttgtggcttgagatgatattttcgaacccttctttcactacctttcttacccttaatgtgccaagcttgaaacaggatttgatttcctgagctacttgttcgccttctgtgcgtcaccaagtaatctggttcatctttcgtctcattcatgttattttcaagtgaaacaagacattttgggggtcaagtctctttgggtgttttgtttttatgtatataaaaatggattttgtgttccctttccatgtaagtaccaacttatatggaaactcacaatcataatgtaaagaagaaatgaaagcctggtgtattgtacttcaagatgcctccctgatgtatagaatctccttgtaaaataaataattgcattgta

SEQ ID NO: 19111 - DNA, 1759 bp, Homo sapiens
attttctggggaaagccttatttctatctttgccatccagtttgattttacaagacaatgctgtcccacctcaagacagtgctgaccccaatgaaccatccagtttccgatcatttcacctctaatacccagggataggtgagcatgttagtcagcagttccaacatccaggtgtggccttcaagtggtctctagagcagcactgtccaaagaactttctgtgatgatggaagtgttctatggcttatagactatactgagcaattgaaatgtggctacagcaaataaagaactaattttaattttaattaaaatgaaaatgaacttttaattgtaattttcattttaatttaaatagctgcatgtggcaatttaataccatattggacagataattctaaagtaatgatatctaatagaaatatagactggggctgggcacagtggctcacgcctgtaatcccaacactttgggaggctgaagtgggcggatcacttgaggtcaggagttcaagaccagcctggccaacatagtgaaaccccattgctactgaaaatgcaaaaaaatcaaccaggcgtggtggtgggtgcctgtaatcccaactactcgggaggctgaggtgtgagaatcaaaaaaaataataaaattaaaataaaaataatgtgagctggacttggtggcatgtgcctatagtcccagctacccaggcggcttaggcgagaagattatttgagcccaggagttaaagagaccagcctggggaatgtagtgagcctctactgtaaaacaaaacaaaacaaaagcaacaacgacaacaacaatataattacacaagaaattttaaattttctaatagctatatgaaagcagtatttaaaaagtgaaattagcctggcgtgcatgcccggccttccttgaagttttttgtttggttttgatttctttttggagattgggtctcgctctgtcacccatgctggagtgcagtggcacaatcttggctcagagcaacctctgccaagcgatcctcccgcttcagtctgagtggctgggactacgggtgtgtgccaccacgcccagctgatttttgtggttttgttagagatgaggttttgccatgttgcccaggctcgtcttgaacaccggggctcaaggaatctgcccatcttcgcctcccaaagttctgagatagcaggtgtgagtcatcatgcccagcctccttgaagtttactaacaattgggataactgagggaagagaagtgacaattccactcagtctattagaggtctggatataaggtagccacacaataactctaacttgacttctaaccattctatcttattgatttggaggctgtcttctgccagattttttgtggcttgagatgatattttcgaacccttctttcactacctttcttacccttaatgtgccaagcttgaaacaggatttgatttcctgagctacttgttcgccttctgtgcgtcaccaagtaatctggttcatctttcgtctcattcatgttattttcaagtgaaacaagacattttgggggtcaagtctctttgggtgttttgtttttatgtatataaaaatggattttgtgttccctttccatgtaagtaccaacttatatggaaactcacaatcataatgtaaagaagaaatgaaagcctggtgtattgtttcacttgaaaataacatgaatgagacgaaagatgaaccagattacttggtgacgcacgtcgacgcg

SEQ ID NO: 19112 - DNA, 379 bp, Homo sapiens
cttttcatttcagcatttttacaatgatgttcctagctgtgttttcattgcatttatcctgtctagggtttatggtgatatttgaacccatggcttatttctttagtaagttctgaaaaattctgtcttttcaaatattctgtgccttttttctctctctcttctctcctccaattacgcatgtttgatgtttgtgctctgtcccacacttttcttatactctttttatttttcattctttgttctcttttatttcaatctgaatattttctcctgacctacatccagaccactaaatctctctttagctttggataatcatttaatcatcatattaaattaatattttattttaattaattaaaaattaaaataatta

SEQ ID NO: 19113 - DNA, 686 bp, Homo sapiens
acaacttccacctcccagccccatctcattttcatcctagcggatgatcagggatttagagatgtgggttaccacggatctgagattaaaacacctactcttgacaagctcgctgccgaaggagttaaactggagaactactatgtccagcctatttgcacaccatccaggagtcagtttattactggaaagtatcagatacacaccggacttcaacattctatcataagacctacccaacccaactgtttacctctggacaatgccaccctacctcagaaactgaaggaggttggatattcaacgcatatggtcggaaaatggcacttgggtttttacagaaaagaatgcatgcccaccagaagaggatttgataccttttttggttcccttttgggaagtggggattactatacacactacaaatgtgacagtcctgggatgtgtggctatgacttgtatgaaaacgacaatgctgcctgggactatgacaatggcatatactccacacagatgtacactcagagagtacagcaaatcttagcttcccataaccccacaaagcctatatttttatatattgcctatcaagctgttcattcaccactgcaagctcctggcaggtatttcgaacactaccgatccattatcaacataaacaggaggagatatgctgccatgctttc

SEQ ID NO: 19114 - DNA, 545 bp, Homo sapiens
gtagcagagagatacgtgttcccgttcttttccctcgaaaaaacacctatgtatcagatacacaccggacttcaacattctatcataagacctacccaacccaactgtttacctctggacaatgccaccctacctcagaaactgaaggaggttggatattcaacgcatatggtcggaaaatggcacttgggtttttacagaaaagaatgcatgcccaccagaagaggatttgataccttttttggttcccttttgggaagtggggattactatacacactacaaatgtgacagtcctgggatgtgtggctatgacttgtatgaaaacgacaatgctgcctgggactatgacaatggcatatactccacacagatgtacactcagagagtacagcaaatcttagcttcccataaccccacaaagcctatatttttatatattgcctatcaagctgttcattcaccactgcaagctcctggcaggtatttcgaacactaccgatccattatcaacataaacaggaggagatatgctgccatgctttc

SEQ ID NO: 19115 - DNA, 660 bp, Homo sapiens
atttcaagggttgtgggacttcagaagagagaaagacgtgggctggacatcaaagaaggcctgccagaggaggtcgcgtttgagctggacctcgaaagatggcaggggactttccacaggcagagattggaggtggtgctagttatgaagccagacaccttcagtttgaggctgtgatctgtgaggacagtggggagaggggaaagccagagaagggtaaaaggctgaggaaaccctggccaccttctctagtaagaggacaccaaggatcacgctttgcctgctttaacatcttgcctaccattgccctgatgaaaataggccactgttttgaattagctaaaagttgagaactcagacttggatttgacaagggccctctgagggcagttaaaccaactctcagccccatgattctatgagtctgtgattcgcaggtggagccaatgacacacctttgggactagcaaggcctcttggtcagcgaattccctcaggggaataatgctccttcacaggagaatggcagatggaaaaaccccaaaaagtgaatatgcccaggactgctcaattgaatttacaatagttccagattattgactagctcatgcctgtcagcagagccagaatggacacatactttgaagagtatgatggcag

SEQ ID NO: 19116 - DNA, 1055 bp, Homo sapiens
  misc_feature (934)..(934): n is a, c, g, or t
  misc_feature (972)..(973): n is a, c, g, or t
  misc_feature (1040)..(1040): n is a, c, g, or t
gccctgtgttcctccagcccctactgagggcaaagtgcctggcacagaaccaaggagctataactttcccaggtgagactcgcttctgacaataccgtcagtcagtcctctagggttcccatctgctgggttccctgctcatatggcccagggaatgttctctgtaggatgctgcacagcctgtggacctctccagaggagaagaggacaaaggagagagtgtgctgcaaagttactgtaatcatactaataccaacacgctggaacatttactgtgtgtgctagctattgttcaaagactccactctctatatggcagctcctagccacatggctatttaatgaaatgtaaattaataaaaatcaaaatttataattcagtctttcagccacacagccacatttcaagtgcttcatagcttcctgtggctggcagctaccgtgtccaacagtgcagatctagaacatttccattgccccagaaggctctgttgaacagtgctgttgtgagagctttgtttgtgttgtctcatttacaccaatcctgtgaagtggattccgttattttatcattttacagataaggtaccaggggcagcaaagagttaatgacttgacaatttatagcttagtagatgaaagaactggatttcaaacccaggttgaatggctcagagcttttttctcttaggcatcgtgctacacttattcctgtatagcatggacaatttgtttctgctctgttgaaggtttaggggaagacattgttaaagcttggccagaattaatctctcatgtttatttggattatctttgttattcttactcacttttcccaagcacctctctacatcctccataccaccccttacaccaccaacttttttcgtaacaaaaaatgatctggccaccgcgcctggcctaatttttgtanttttagtagagatacaaaaatacaaaagataccggganncggagcttgcagtgagctgagattgcgccactgcagtccgcagtccggcctgggcgacagaagcganctccgtctcaaaaaa

SEQ ID NO: 19117 - DNA, 1156 bp, Homo sapiens
gccctgtgttcctccagcccctactgagggcaaagtgcctggcacagaaccaaggagctataactttcccaggtgagactcgcttctgacaataccgtcagtcagtcctctagggttcccatctgctgggttccctgctcatatggcccagggaatgttctctgtaggatgctgcacagcctgtggacctctccagaggagaagaggacaaaggagagagtgtgctgcaaagttactgtaatcatactaataccaacacgctggaacatttactgtgtgtgctagctattgttcaaagactccactctctatatggcagctcctagccacatggctatttaatgaaatgtaaattaataaaaatcaaaatttataattcagtctttcagccacacagccacatttcaagtgcttcatagcttcctgtggctggcagctaccgtgtccaacagtgcagatctagaacatttccattgccccagaaggctctgttgaacagtgctgttgtgagagctttgtttgtgttgtctcatttacaccaatcctgtgaagtggattccgttattttatcattttacagataaggtaccaggggcagcaaagagttaatgacttgacaatttatagcttagtagatgaaagaactggatttcaaacccaggttgaatggctcagagcttttttctcttaggcatcgtgctacacttattcctgtatagcatggacaatttgtttctgctctgttgaaggtttaggggaagacattgttaaagcttggccagaattaatctctcatgtttatttggattatctttgttattcttactcacttttcccaagcacctctctacatcctccataccaccccttacaccaccaacttttttcgtaacaaaaaatgatctggccaggcttggtggctcacgcctgtaatcccagcactttgggatgccgaggcgggcagatcacaaggtcagaagatcgagaccatcctggctaacgtggtgaaaccccatctctactgaaaatacaaaaaattagccaggtgtggtggtggatgcctgtagtcccagctacttgggaggctgaggcaggagaatggtgtgaagctgggaggtggagcttgcagtgagctgagatcacgccactgcactcc

SEQ ID NO: 19118 - DNA, 382 bp, Homo sapiens
tctcctgcctcagcctcccaagtagctgggattacaggcacctgccaccaagcctggctaatttttgtatttttagtagagatggggtttcaccatgttggccaggctggtcttgaattcctgacctcaagtgatctgcccaccttggcctcccaaagtgctacgtgagccaccacgcctgaccttctacaaaaaactttttaaaaatttacccaggtttggtggggtgtgcctgtagtcccagctacatgggaggctgaggcgggaggatcacctgagcccaggaggtcaaggctgcagcgagtcatgatcgcaccactgtactcagcctgggtgacagagctcttgctctgtctcgcggaggggaaaaaaagagagagag

SEQ ID NO: 19119 - DNA, 414 bp, Homo sapiens
tccatttggccctgttctgtcccaacatgaaggcaataatttgttacctcattaatggatctatccttttacttttttaaccacttccttatgctacccatgaaacctagttggggctctgttgtgtctgatttcccctggcgtattctttactttttcctccttttccaggctcagcagggagctgctggaggtagtagagcctgaagtcttgcaggactcactggatagatgttattcaactccttccagttgtcttgaacagcctgactcctgccagccgtatggaagttccttttatgcattggaggaaaaacatgttggcttttctcttgacgtgggagaaattgaaaagaaggggaaggggaagataagaaggggaagaagatcaaagaagaaaagaagaaggggaag

SEQ ID NO: 19120 - DNA, 440 bp, Homo sapiens
gaggaggaagtcccccaggagtcctgggatgaaggttattcgactctctcaattcctcctgaaatgttggcctcgtacaagtcttacagcagcacatttcactcattagaggaacagcaagtctgcatggctgttgacataggcagacatcggtggaatcaagtgaaaaaggaggaccaagaggcaacaggtcccaggctcagcagggagctgctggaggtagtagagcctgaagtcttgcaggactcactggatagatgttattcaactccttccagttgtcttgaacagcctgactcctgccagccgtatggaagttccttttatgcattggaggaaaaacatgttggcttttctcttgacgtgggagaaattgaaaagaaggggaaggggaagataagaaggggaagaagatcaaagaagaaaagaagaaggggaag

SEQ ID NO: 19121 - DNA, 683 bp, Homo sapiens
cctacggaggtggcagccatctccttctcggcatcatggccgccctcagaccccttgtgaagcccaagatcgtcaaaaagagaaccaagaagttcatccggcaccagtcagaccgatatgtcaaaattaagcgtaactggcggaaacccagaggcattgacaacagggttcgtagaagattcaagggccagatcttgatgcccaacattggttatggaagcaacaaaaaaacaaagcacatgctgcccagtggcttccggaagttcctggtccacaacgtcaaggagctggaagtgctgctgatgtgcaacaaatcttactgtgccgagatcgctcacaatgtttcctccaagaaccgcaaagccatcgtggaaagagctgcccaactggccatcagagtcaccaacccaatgccaggctgcgcagtgaagaaaatgagtaggcagctcatgtgcacgttttctgtttgaatagatgttactgcaattgctgatgctgtcctagtactcgaactgaactctagcttaccttgaatcatcgctgaattgaacacagtcatgtttaggacctgtgtaggtggcttttgcacaatggatttagaatgctgaagatagatgttgcccggatgacgttcatatggtaactctgtctaagggggtcaggtcaagtagctgcccgttgtt

SEQ ID NO: 19122 - DNA, 1113 bp, Homo sapiens
cctacggaggtggcagccatctccttctcggcatcatggccgccctcagaccccttgtgaagcccaagatcgtcaaaaagagaaccaagaagttcatccggcaccagtcagaccgatatgtcaaaattaagcgtaactggcggaaacccagaggcattgacaacagggttcgtagaagattcaagggccagatcttgatgcccaacattggttatggaagcaacaaaaaaacaaagcacatgctgcccagtggcttccggaagttcctggtccacaacgtcaaggagctggaagtgctgctgatgtgcaaatcttactgtgccgagatcgctcacaatgtttcctccaagaaccgcaaagccatcgtggaaagagctgcccaactggccatcagagtcaccaaccccaatgccagcgtgcgcagtgaagaaaatgagtaggcagctcatgtgcaacaaatcttactgtgccgagatcgctcacaatgtttcctccaagaaccgcaaagccatcgtggaaagagctgcccaactggccatcagagtcaccaacccaatgccaggctgcgcagtgaagaaaatgagtaggcagctcatgtgcacgttttctgttttaaataaatgtaaaaactgccatctggcatcttccttccttgcattcttaagtcttcagcttcttggacaaacttagtattgccaccagagatcgtgctttcgcttaagcccctttggaatctcccatattggaggggatcagtaacaggacactcagtcccttgaacaggggaatgtggcctacaagtgcaccagactagcccttagtcatctccagctcgacgctgggctatgagccgtacaagacatgggcccctcacaacaagggtaggtcccgagcacacctcgaacgaacgctagcggcgtccaaggtcaacaacgaacgccattccttaagccctgctccgcgaaaagtcaaggtgaccacggcatgccaatgcgcaccccccccgcaaagcgcgaacacaccgcatggcacacaccacacggacaccacacacgcacatcacacgcagcccacacgacccgaacaaccaggccacacaaaaagacgaaccaa

SEQ ID NO: 19123 - DNA, 968 bp, Homo sapiens
cctacggaggtggcagccatctccttctcggcatcatggccgccctcagaccccttgtgaagcccaagatcgtcaaaaagagaaccaagaagttcatccggcaccagtcagaccgatatgtcaaaattaagcgtaactggcggaaacccagaggcattgacaacagggttcgtagaagattcaagggccagatcttgatgcccaacattggttatggaagcaacaaaaaaacaaagcacatgctgcccagtggcttccggaagttcctggtccacaacgtcaaggagctggaagtgctgctgatgtgcaacaaatcttactgtgccgagatcgctcacaatgtttcctccaagaaccgcaaagccatcgtggaaagagctgcccaactggccatcagagtcaccaacccaatgccaggctgcgcagtgaagaaaatgagtaggcagctcatgtgcacgttttctgttttaaataaatgtaaaaactgccatctggcatcttccttccttgcattcttaagtcttcagcttcttggacaaacttagtattgccaccagagatcgtgctttcgcttaagcccctttggaatctcccatattggaggggatcagtaacaggacactcagtcccttgaacaggggaatgtggcctacaagtgcaccagactagcccttagtcatctccagctcgacgctgggctatgagccgtacaagacatgggcccctcacaacaagggtaggtcccgagcacacctcgaacgaacgctagcggcgtccaaggtcaacaacgaacgccattccttaagccctgctccgcgaaaagtcaaggtgaccacggcatgccaatgcgcaccccccccgcaaagcgcgaacacaccgcatggcacacaccacacggacaccacacacgcacatcacacgcagcccacacgacccgaacaaccaggccacacaaaaagacgaaccaa

SEQ ID NO: 19124 - DNA, 370 bp, Homo sapiens
cgcccgccaccacgcctggctaattttttgtatttttagtagagacggggtttcactgtgttagccaggatgatcttgatctcctgacctcgtgatccgcccaccagacatcattctgtatttgcaacccttatttgtggacatttataaaactgacatgagttcatgaatgcttcctgtgagaagtgtgcttctaagaaaggagtcagcttttatatgtggaaaagccaagctgtggtctgtgggaaatacatatgtgttagatacaaccttgcctaggaaacttgcggggtttattccagcctagggaattttccttctcttttcctcccttttcttcatacttaagaacccatgaaactagtgttct

SEQ ID NO: 19125 - DNA, 420 bp, Homo sapiens
cgcccgccaccacgcctggctaattttttgtatttttagtagagacggggtttcactgtgttagccaggatgatcttgatctcctgacctcgtgatccgcccacctcgacctcccaaagtgctgggattacaggcgtgagccaccaagcccagccagacatcattctgtatttgcaacccttatttgtggacatttataaaactgacatgagttcatgaatgcttcctgtgagaagtgtgcttctaagaaaggagtcagcttttatatgtggaaaagccaagctgtggtctgtgggaaatacatatgtgttagatacaaccttgcctaggaaacttgcggggtttattccagcctagggaattttccttctcttttcctcccttttcttcatacttaagaacccatgaaactagtgttct

SEQ ID NO: 19126 - DNA, 4739 bp, Homo sapiens
agctcggcggagacggggaaggggtcgccgtggctgccggtcctcgagttgggggctgccgcggacactgctaggcagacggcgagtaccgagcgcgggtggccgcggtgtccgtgggccacgctcagctgcggtcagaggcgacatgagtgccgcggggctgctggccccggccccggcccaggctggagcgccgccggcccccgagtactaccccgaggaggatgaagagctggagagcgccgaggacgacgagcgcagctgtcggggccgcgagtcggacgaagacactgaggatgctagtgaaactgacctggcaaagcatgatgaagaagactatgtagaaatgaaggaacagatgtatcaggacaaactggcttctctcaagaggcagttgcaacaactgcaagaaggtacattacaggaatatcagaagagaatgaaaaaactagatcagcagtacaaagagaggatacggaatgcagaactcttcctccagctggaaactgaacaagtggaacgaaattacattaaagaaaagaaggcagcagtgaaagaatttgaagacaagaaggttgagctgaaagagaacctgattgctgagctagaagaaaagaagaaaatgattgaaaatgaaaagctgacaatggaactgactggagattctatggaggtgaaacctatcatgaccagaaagttgcggaggcgaccaaatgatcccgtccccatcccagacaagaggaggaaacctgctccagcccagctaaactatttgttaacagatgaacagatcatggaggatctgagaacattaaataagcttaagtcacccaagagaccagcatctccatcctctcctgagcacttgcctgcaacacccgcggaatctccagcccagaggttcgaagctcggatagaagatggcaaactgtactatgacaaaagatggtaccacaagagccaggccatctatctggagtcaaaggacaaccagaaactgagctgcgtgatcagttctgtaggagccaatgagatctgggtgaggaagacaagtgacagcaccaagatgaggatctacctgggccagcttcagcgcgggctcttcgtgatccgccggcgctcagctgcttgactttctacagtgctcttctcttgaccctttttctggagtgggttttatttttgttttgtttcgttttctccttaatagaaaaatgttaacttactgggaatagctactcagccttggaaatggagagcactgcagtgaattctttagggcacttttgtggccggatgcttccaactttgtcagtcttttctgcctcaacttcttccagacatcagtcaccatgagactgttttactttcaggcgtattggggggtttgatttactttccttttatttctttattttttgcttatacttgtttttgaaaacctcctctgagtttgaagggacagctatttttattgattatctttaagtctctctaccatggagaagagcaggaagggatacactctccagtgcattttcatgttttgaatctgattagtggatcacgtagctactttccctgtcgcgtccaattcactatttgcccagaagcttggggcagaggtcctagcaggagatgatgaattctcgtggctctcggccttctcagagaaataaatgctttgtgtaacatctgtgcacaccatccattccgctcgctgagcgatggaaaagcttgcctggaagactatgtgcactgaagtaaatggggttgggggaggggacatttcatatttataatgtgctgaaggtaccatattttaaatgttatttaatgcaggtgatttattcaaacatttgttctagcttaagctggaataagcagtggtcatttcagaagttttcatttgtaattccttcctctcccttgttcccaagtaggtagtagtaagtatgtgccacaggctgattatctgggtaatcttttacgggtgggaggtgagattgatagtgcaataatcagtgatctatagaccctcatgcacgattcaagtttcactcttgtggctgatgccattattgcacattggccattccaaacctgtggagaactttgttgtcaggccctgagcgctcacagcttcatttggcccaggttgaagacaaggaaagctctgctgtggctgcctctggactgacaccctccctaatgagtcctgatgaaacagcctttcctacatccttccctcactcccatgattggagaaatgattcattgggtgatgagtgttggggttttctatactcatgttgccatcttgagatgttcaaaaaatttggggttagagcaactgttagcgtctctatgagcaatcagtagaacttacacatcctaggaaatctttctttgtaagtaattcttttggtctcaagtgattctcttcatgttgtctcttgatgtacatacccccaagcaagttggggggactgtgatgacaattaaatcaccttctctgaagttctggctctgcagagaccaaaccttactgacttgtacagacttgtacaagtaaagacttatacagatagatttttgttttaacttacaatccgttttttcctcttttttttttttttttctggtgttggagtcttatttagaaaacaggataaatgacgctgttatcaaaagttgcctggggttctgtatttcttctctgccctccaatccccgactgctatgatgtttactacagtgaacccagcccatggtaaacacaggcttcacctgttcttgtttgttagccttgactgtgaggcaggacttccctcgcttgaactgttacacatacgatgtgtgtgtcacatcacatattgtgcagctgttggttttcatgtagtgccctgcgatggaaattagatatatttcatgtatttttccattgaaggtggagtttttcaatgatcatgtgttttgtcctcctaaacagtataccaaagtttgtttttatagttgaggattgtattgataaccactggggttccgcattgaagcaggaacaaattgcctctttttctggccttctctgtgggacctctgcttttgtgaagcaactatttatttgaagaccagggtatgggcacttttgccttctctcctctctgacttttgagggtattgagggcgcccttagtcatagtctcgactccgccattgccttctcctcggcgtcctcacaactcttaattgggcctagtgaaaatgggggcaggtgagaagtccattttgagaatcagcatagtaaattacatttctaatcccagaggacttaatattttcttttgtcaccccagaggtgaaaaatcagcagttgaagcctgacaggcctcagtggtgaccaggaacagaagcagccttcctgttagtagatgggggtacttctgtggtgggcagaagccttactaaaggggaagacagactttgaagtttctagacgagaaggaggctagcttctagcctgggtggccattattccaaaaggtcattgtttctcactagaccccagggcaccagatgaatttccaagtttaaactctttcctgcaggtgattactttgaaaaaggttggtccagaccattttgatcaagaacctgtatatgtgttgtgttagaggcatctgcctcaagtctatgtacagtgtttgctgcgggtgtgttccaatattcattttacctctgcttgggggttttgtgtgttcccctccccccatgccctgcctacccccttttccctgaaccacgtccttttgaataatttccagatggatttctgtagccataccaaagccagggtgttttcattcatgcggatactagtatttatagatgtctgactacctaacttaatttttgtttttgaacttctaattggggccagtgtaaggtcgatcccagaggctgatctgcaaatcaagctacatgtatttgtgtataagaccctgtgttcaggactgggtgacttttctaagaaatatggggtttagaatggggttgactgtattttttaacctaattctggagagaagattgtattttttacagttttttgggtttggcttccttctcacatttctttagctttgaatttttactaaataaatttcctcctgattaattttttttttctcatctgggaatttgaaatctcggtgcttactgttacaccaatttgtccaaagagttgaaatcactttaatgccagaacatggtaaatttgcagccatttcaagcaggtgatggtctttttttataacatcgttaacgggtaccattaaatattctgagaggtgaatgtaaaatataaaaggtataggtttttttttttttttaaagaaaacaataaactttcaaagagaaaaccagcatgaagtctgtattgtatccattgacttgataagtgatagaaatttattttaggtttttgatccattgcttatggggaaaggaagttagggcagaggaagggatattctagacatttaattcttagtgaagactaagatacagaatgatgtcaggctaatactcagttttgtaaagagcaatctggggtgttgacccttaaatgtttgtgcactcttcttgttgcagataaaagtcattaaaaatcaagtgaatagaatggatcttgggtggaaaaacaatcttgaaataaacttgtgattgaggatattgtt

SEQ ID NO: 19127 - DNA, 4578 bp, Homo sapiens
agctcggcggagacggggaaggggtcgccgtggctgccggtcctcgagttgggggctgccgcggacactgctaggcagacggcgagtaccgagcgcgggtggccgcggtgtccgtgggccacgctcagctgcggtcagaggcgacatgagtgccgcggggctgctggccccggccccggcccaggctggagcgccgccggcccccgagtactaccccgaggaggatgaagagctggagagcgccgaggacgacgagcgcagctgtcggggccgcgagtcggacgaagacactgaggatgctagtgaaactgacctggcaaagcatgatgaagaagactatgtagaaatgaaggaacagatgtatcaggacaaactggcttctctcaagaggcagttgcaacaactgcaagaaggtacattacaggaatatcagaagagaatgaaaaaactagatcagcagtacaaagagaggatacggaatgcagaactcttcctccagctggaaactgaacaagtggaacgaaattacattaaagaaaagaaggcagcagtgaaagaatttgaagacaagaaggttgagctgaaagagaacctgattgctgagctagaagaaaagaagaaaatgattgaaaatgaaaagctgacaatggaactgactggagattctatggaggtgaaacctatcatgaccagaaagttgcggaggcgaccaaatgatcccgtccccatcccagacaagaggaggaaacctgctccagcccagctaaactatttgttaacagatgaacagatcatggaggatctgagaacattaaataagcttaagtcacccaagagaccagcatctccatcctctcctgagcacttgcctgcaacacccgcggaatctccagcccagaggttcgaagctcggatagaagatggcaaactgtactatgacaaaagatggtaccacaagagccaggccatctatctggagtcaaaggacaaccagaaactgagctgcgtgatcagttctgtaggagccaatgagatctgggtgaggaagacaagtgacagcaccaagatgaggatctacctgggccagcttcagcgcgggctcttcgtgatccgccggcgctcagctgcttgactttctacagtgctcttctcttgaccctttttctggagtgggttttatttttgttttgtttcgttttctccttaatagaaaaatgttaacttactgggaatagctactcagccttggaaatggagagcactgcagtgaattctttagggcacttttgtggccggatgcttccaactttgtcagtcttttctgcctcaacttcttccagacatcagtcaccatgagactgttttactttcaggcgtattggggggtttgatttactttccttttatttctttattttttgcttatacttgtttttgaaaacctcctctgagtttgaagggacagctatttttattgattatctttaagtctctctaccatggagaagagcaggaagggatacactctccagtgcattttcatgttttgaatctgattagtggatcacgtagctactttccctgtcgcgtccaattcactatttgcccagaagcttggggcagaggtcctagcaggagatgatgaattctcgtggctctcggccttctcagagaaataaatgctttgtgtaacatctgtgcacaccatccattccgctcgctgagcgatggaaaagcttgcctggaagactatgtgcactgaagtaaatggggttgggggaggggacatttcatatttataatgtgctgaaggtaccatattttaaatgttatttaatgcaggtgatttattcaaacatttgttctagcttaagctggaataagcagtggtcatttcagaagttttcatttgtaattccttcctctcccttgttcccaagtaggtagtagtaagtatgtgccacaggctgattatctgggtaatcttttacgggtgggaggtgagattgatagtgcaataatcagtgatctatagaccctcatgcacgattcaagtttcactcttgtggctgatgccattattgcacattggccattccaaacctgtggagaactttgttgtcaggccctgagcgctcacagcttcatttggcccaggttgaagacaaggaaagctctgctgtggctgcctctggactgacaccctccctaatgagtcctgatgaaacagcctttcctacatccttccctcactcccatgattggagaaatgattcattgggtgatgagtgttggggttttctatactcatgttgccatcttgagatgttcaaaaaatttggggttagagcaactgttagcgtctctatgagcaatcagtagaacttacacatcctaggaaatctttctttgtaagtaattcttttggtctcaagtgattctcttcatgttgtctcttgatgtacatacccccaagcaagttggggggactgtgatgacaattaaatcaccttctctgaagttctggctctgcagagaccaaaccttactgacttgtacagacttgtacaagtaaagacttatacagatagatttttgttttaacttacaatccgttttttcctcttttttttttttttttctggtgttggagtcttatttagaaaacaggataaatgacgctgttatcaaaagttgcctggggttctgtatttcttctctgccctccaatccccgactgctatgatgtttactacagtgaacccagcccatggtaaacacaggcttcacctgttcttgtttgttagccttgactgtgaggcaggacttccctcgcttgaactgttacacatacgatgtgtgtgtcacatcacatattgtgcagctgttggttttcatgtagtgccctgcgatggaaattagatatatttcatgtatttttccattgaaggtggagtttttcaatgatcatgtgttttgtcctcctaaacagtataccaaagtttgtttttatagttgaggattgtattgataaccactggggttccgcattgaagcaggaacaaattgcctctttttctggccttctctgtgggacctctgcttttgtgaagcaactatttatttgaagaccagggtatgggcacttttgccttctctcctctctgacttttgagggtattgagggcgcccttagtcatagtctcgactccgccattgccttctcctcggcgtcctcacaactcttaattgggcctagtgaaaatgggggcaggtgagaagtccattttgagaatcagcatagtaaattacatttctaatcccagaggacttaatattttcttttgtcaccccagaggtgaaaaatcagcagttgaagcctgacaggcctcagtggtgaccaggaacagaagcagccttcctgttagtagatgggggtacttctgtggtgggcagaagccttactaaaggggaagacagactttgaagtttctagacgagaaggaggctagcttctagcctgggtggccattattccaaaaggtcattgtttctcactagaccccagggcaccagatgaatttccaagtttaaactctttcctgcaggtgattactttgaaaaaggttggtccagaccattttgatcaagaacctgtatatgtgttgtgttagaggcatctgcctcaagtctatgtacagtgtttgctgcgggtgtgttccaatattcattttacctctgcttgggggttttgtgtgttcccctccccccatgccctgcctacccccttttccctgaaccacgtccttttgaataatttccagatggatttctgtagccataccaaagccagggtgttttcattcatgcggatactagtatttatagatgtctgactacctaacttaatttttgtttttgaacttctaattggggccagtgtaaggtcgatcccagaggctgatctgcaaatcaagctacatgtatttgtgtataagaccctgtgttcaggactgggtgacttttctaagaaatatggggtttagaatggggttgactgtattttttaacctaattctggagagaagattgtattttttacagttttttgggtttggcttccttctcacatttctttagctttgaatttttactaaataaatttcctcctgattaattttttttttctcatctgggaatttgaaatctcggtgcttactgttacaccaatttgtccaaagagttgaaatcactttaatgccagaacatggtaaatttgcagccatttcaagcaggtgatggtctttttttataacatcgttaacgggtaccattaaatattctgagaggtgaatgtaaaatataaaaggtataggtttttttttttttttaaagaaaacaataaactttcaaagagaaaaagtaatgtaaaaaaaaatgttgtgtgggggggtgggggcccggaagaaaatttaaaaaaccacgctgggggggggggggcccgaaaggtggtgaggggaaattgtggcaaagtgttcaagaaaaccgggtgtgcatggggtgtggtttccccaaaag

SEQ ID NO: 19128 - DNA, 4322 bp, Homo sapiens
ggatttatcataaaagagacatttgattgattgattgatttccttctgtgtaggcatcaggcataagatttaagtacacatccatttttgaaaatgaaaccagaaggatttttaagtattactggctttctaaagccaagtcctaggcagttctgctcccgtggcttttcgtggcctgactctggtaaggcattccaaggctgctctgactcgcagttcatagaagagaccaaccagctcagtattcatagttgttccttccggaacagcacttgagatcatcagtgctagctgccaactagaattctgaattggtgacatcttttttttgtttaaagcaccatgattactcgattactcgattactcacacatccctctacttactgagtcttgtggaagaaaacaagagtcttctttttctagcatctccatcctctcctgagcacttgcctgcaacacccgcggaatctccagcccagaggttcgaagctcggatagaagatggcaaactgtactatgacaaaagatggtaccacaagagccaggccatctatctggagtcaaaggacaaccagaaactgagctgcgtgatcagttctgtaggagccaatgagatctgggtgaggaagacaagtgacagcaccaagatgaggatctacctgggccagcttcagcgcgggctcttcgtgatccgccggcgctcagctgcttgactttctacagtgctcttctcttgaccctttttctggagtgggttttatttttgttttgtttcgttttctccttaatagaaaaatgttaacttactgggaatagctactcagccttggaaatggagagcactgcagtgaattctttagggcacttttgtggccggatgcttccaactttgtcagtcttttctgcctcaacttcttccagacatcagtcaccatgagactgttttactttcaggcgtattggggggtttgatttactttccttttatttctttattttttgcttatacttgtttttgaaaacctcctctgagtttgaagggacagctatttttattgattatctttaagtctctctaccatggagaagagcaggaagggatacactctccagtgcattttcatgttttgaatctgattagtggatcacgtagctactttccctgtcgcgtccaattcactatttgcccagaagcttggggcagaggtcctagcaggagatgatgaattctcgtggctctcggccttctcagagaaataaatgctttgtgtaacatctgtgcacaccatccattccgctcgctgagcgatggaaaagcttgcctggaagactatgtgcactgaagtaaatggggttgggggaggggacatttcatatttataatgtgctgaaggtaccatattttaaatgttatttaatgcaggtgatttattcaaacatttgttctagcttaagctggaataagcagtggtcatttcagaagttttcatttgtaattccttcctctcccttgttcccaagtaggtagtagtaagtatgtgccacaggctgattatctgggtaatcttttacgggtgggaggtgagattgatagtgcaataatcagtgatctatagaccctcatgcacgattcaagtttcactcttgtggctgatgccattattgcacattggccattccaaacctgtggagaactttgttgtcaggccctgagcgctcacagcttcatttggcccaggttgaagacaaggaaagctctgctgtggctgcctctggactgacaccctccctaatgagtcctgatgaaacagcctttcctacatccttccctcactcccatgattggagaaatgattcattgggtgatgagtgttggggttttctatactcatgttgccatcttgagatgttcaaaaaatttggggttagagcaactgttagcgtctctatgagcaatcagtagaacttacacatcctaggaaatctttctttgtaagtaattcttttggtctcaagtgattctcttcatgttgtctcttgatgtacatacccccaagcaagttggggggactgtgatgacaattaaatcaccttctctgaagttctggctctgcagagaccaaaccttactgacttgtacagacttgtacaagtaaagacttatacagatagatttttgttttaacttacaatccgttttttcctcttttttttttttttttctggtgttggagtcttatttagaaaacaggataaatgacgctgttatcaaaagttgcctggggttctgtatttcttctctgccctccaatccccgactgctatgatgtttactacagtgaacccagcccatggtaaacacaggcttcacctgttcttgtttgttagccttgactgtgaggcaggacttccctcgcttgaactgttacacatacgatgtgtgtgtcacatcacatattgtgcagctgttggttttcatgtagtgccctgcgatggaaattagatatatttcatgtatttttccattgaaggtggagtttttcaatgatcatgtgttttgtcctcctaaacagtataccaaagtttgtttttatagttgaggattgtattgataaccactggggttccgcattgaagcaggaacaaattgcctctttttctggccttctctgtgggacctctgcttttgtgaagcaactatttatttgaagaccagggtatgggcacttttgccttctctcctctctgacttttgagggtattgagggcgcccttagtcatagtctcgactccgccattgccttctcctcggcgtcctcacaactcttaattgggcctagtgaaaatgggggcaggtgagaagtccattttgagaatcagcatagtaaattacatttctaatcccagaggacttaatattttcttttgtcaccccagaggtgaaaaatcagcagttgaagcctgacaggcctcagtggtgaccaggaacagaagcagccttcctgttagtagatgggggtacttctgtggtgggcagaagccttactaaaggggaagacagactttgaagtttctagacgagaaggaggctagcttctagcctgggtggccattattccaaaaggtcattgtttctcactagaccccagggcaccagatgaatttccaagtttaaactctttcctgcaggtgattactttgaaaaaggttggtccagaccattttgatcaagaacctgtatatgtgttgtgttagaggcatctgcctcaagtctatgtacagtgtttgctgcgggtgtgttccaatattcattttacctctgcttgggggttttgtgtgttcccctccccccatgccctgcctacccccttttccctgaaccacgtccttttgaataatttccagatggatttctgtagccataccaaagccagggtgttttcattcatgcggatactagtatttatagatgtctgactacctaacttaatttttgtttttgaacttctaattggggccagtgtaaggtcgatcccagaggctgatctgcaaatcaagctacatgtatttgtgtataagaccctgtgttcaggactgggtgacttttctaagaaatatggggtttagaatggggttgactgtattttttaacctaattctggagagaagattgtattttttacagttttttgggtttggcttccttctcacatttctttagctttgaatttttactaaataaatttcctcctgattaattttttttttctcatctgggaatttgaaatctcggtgcttactgttacaccaatttgtccaaagagttgaaatcactttaatgccagaacatggtaaatttgcagccatttcaagcaggtgatggtctttttttataacatcgttaacgggtaccattaaatattctgagaggtgaatgtaaaatataaaaggtataggtttttttttttttttaaagaaaacaataaactttcaaagagaaaaccagcatgaagtctgtattgtatccattgacttgataagtgatagaaatttattttaggtttttgatccattgcttatggggaaaggaagttagggcagaggaagggatattctagacatttaattcttagtgaagactaagatacagaatgatgtcaggctaatactcagttttgtaaagagcaatctggggtgttgacccttaaatgtttgtgcactcttcttgttgcagataaaagtcattaaaaatcaagtgaatagaatggatcttgggtggaaaaacaatcttgaaataaacttgtgattgaggatattgtt

SEQ ID NO: 19129 - DNA, 4079 bp, Homo sapiens
tttcactgcgcgacccgttttcttcttgcgttggagtatcggctttgtgcttttccctccacgccgtgatttctcactacctgggagcgcctggtccggctccgactgtgtctgcgtccagcgtgtaattgggcaggtctgccccgttgcctaggttgagcttaagtcacccaagagaccagcatctccatcctctcctgagcacttgcctgcaacacccgcggaatctccagcccagaggttcgaagctcggatagaagatggcaaactgtactatgacaaaagatggtaccacaagagccaggccatctatctggagtcaaaggacaaccagaaactgagctgcgtgatcagttctgtaggagccaatgagatctgggtgaggaagacaagtgacagcaccaagatgaggatctacctgggccagcttcagcgcgggctcttcgtgatccgccggcgctcagctgcttgactttctacagtgctcttctcttgaccctttttctggagtgggttttatttttgttttgtttcgttttctccttaatagaaaaatgttaacttactgggaatagctactcagccttggaaatggagagcactgcagtgaattctttagggcacttttgtggccggatgcttccaactttgtcagtcttttctgcctcaacttcttccagacatcagtcaccatgagactgttttactttcaggcgtattggggggtttgatttactttccttttatttctttattttttgcttatacttgtttttgaaaacctcctctgagtttgaagggacagctatttttattgattatctttaagtctctctaccatggagaagagcaggaagggatacactctccagtgcattttcatgttttgaatctgattagtggatcacgtagctactttccctgtcgcgtccaattcactatttgcccagaagcttggggcagaggtcctagcaggagatgatgaattctcgtggctctcggccttctcagagaaataaatgctttgtgtaacatctgtgcacaccatccattccgctcgctgagcgatggaaaagcttgcctggaagactatgtgcactgaagtaaatggggttgggggaggggacatttcatatttataatgtgctgaaggtaccatattttaaatgttatttaatgcaggtgatttattcaaacatttgttctagcttaagctggaataagcagtggtcatttcagaagttttcatttgtaattccttcctctcccttgttcccaagtaggtagtagtaagtatgtgccacaggctgattatctgggtaatcttttacgggtgggaggtgagattgatagtgcaataatcagtgatctatagaccctcatgcacgattcaagtttcactcttgtggctgatgccattattgcacattggccattccaaacctgtggagaactttgttgtcaggccctgagcgctcacagcttcatttggcccaggttgaagacaaggaaagctctgctgtggctgcctctggactgacaccctccctaatgagtcctgatgaaacagcctttcctacatccttccctcactcccatgattggagaaatgattcattgggtgatgagtgttggggttttctatactcatgttgccatcttgagatgttcaaaaaatttggggttagagcaactgttagcgtctctatgagcaatcagtagaacttacacatcctaggaaatctttctttgtaagtaattcttttggtctcaagtgattctcttcatgttgtctcttgatgtacatacccccaagcaagttggggggactgtgatgacaattaaatcaccttctctgaagttctggctctgcagagaccaaaccttactgacttgtacagacttgtacaagtaaagacttatacagatagatttttgttttaacttacaatccgttttttcctcttttttttttttttttctggtgttggagtcttatttagaaaacaggataaatgacgctgttatcaaaagttgcctggggttctgtatttcttctctgccctccaatccccgactgctatgatgtttactacagtgaacccagcccatggtaaacacaggcttcacctgttcttgtttgttagccttgactgtgaggcaggacttccctcgcttgaactgttacacatacgatgtgtgtgtcacatcacatattgtgcagctgttggttttcatgtagtgccctgcgatggaaattagatatatttcatgtatttttccattgaaggtggagtttttcaatgatcatgtgttttgtcctcctaaacagtataccaaagtttgtttttatagttgaggattgtattgataaccactggggttccgcattgaagcaggaacaaattgcctctttttctggccttctctgtgggacctctgcttttgtgaagcaactatttatttgaagaccagggtatgggcacttttgccttctctcctctctgacttttgagggtattgagggcgcccttagtcatagtctcgactccgccattgccttctcctcggcgtcctcacaactcttaattgggcctagtgaaaatgggggcaggtgagaagtccattttgagaatcagcatagtaaattacatttctaatcccagaggacttaatattttcttttgtcaccccagaggtgaaaaatcagcagttgaagcctgacaggcctcagtggtgaccaggaacagaagcagccttcctgttagtagatgggggtacttctgtggtgggcagaagccttactaaaggggaagacagactttgaagtttctagacgagaaggaggctagcttctagcctgggtggccattattccaaaaggtcattgtttctcactagaccccagggcaccagatgaatttccaagtttaaactctttcctgcaggtgattactttgaaaaaggttggtccagaccattttgatcaagaacctgtatatgtgttgtgttagaggcatctgcctcaagtctatgtacagtgtttgctgcgggtgtgttccaatattcattttacctctgcttgggggttttgtgtgttcccctccccccatgccctgcctacccccttttccctgaaccacgtccttttgaataatttccagatggatttctgtagccataccaaagccagggtgttttcattcatgcggatactagtatttatagatgtctgactacctaacttaatttttgtttttgaacttctaattggggccagtgtaaggtcgatcccagaggctgatctgcaaatcaagctacatgtatttgtgtataagaccctgtgttcaggactgggtgacttttctaagaaatatggggtttagaatggggttgactgtattttttaacctaattctggagagaagattgtattttttacagttttttgggtttggcttccttctcacatttctttagctttgaatttttactaaataaatttcctcctgattaattttttttttctcatctgggaatttgaaatctcggtgcttactgttacaccaatttgtccaaagagttgaaatcactttaatgccagaacatggtaaatttgcagccatttcaagcaggtgatggtctttttttataacatcgttaacgggtaccattaaatattctgagaggtgaatgtaaaatataaaaggtataggtttttttttttttttaaagaaaacaataaactttcaaagagaaaaccagcatgaagtctgtattgtatccattgacttgataagtgatagaaatttattttaggtttttgatccattgcttatggggaaaggaagttagggcagaggaagggatattctagacatttaattcttagtgaagactaagatacagaatgatgtcaggctaatactcagttttgtaaagagcaatctggggtgttgacccttaaatgtttgtgcactcttcttgttgcagataaaagtcattaaaaatcaagtgaatagaatggatcttgggtggaaaaacaatcttgaaataaacttgtgattgaggatattgtt

SEQ ID NO: 19130 - DNA, 4175 bp, Homo sapiens
agctcggcggagacggggaaggggtcgccgtggctgccggtcctcgagttgggggctgccgcggacactgctaggcagacggcgagtaccgagcgcgggtggccgcggtgtccgtgggccacgctcagctgcggtcagaggcgacatgagtgccgcggggctgctggccccggccccggcccaggctggagcgccgccggcccccgagtactaccccgaggaggatgaagagctggagagcgccgaggacgacgagcgcagctgtcggggccgcgagtcggacgaagacactgaggatgctagtgaaactgacctggcaaagcatgatgaagaagactatgtagaaatgaaggaacagatgtatcaggacaaactggcttctctcaagaggcagttgcaacaactgcaagaaggtacattacaggaatatcagaagagaatgaaaaaactagatcagcagtacaaagagaggatacggaatgcagaactcttcctccagctggaaactgaacaagtggaacgaaattacattaaagaaaagaaggcagcagtgaaagaatttgaagacaagaaggttgagctgaaagagaacctgattgctgagctagaagaaaagaagaaaatgattgaaaatgaaaagctgacaatggaactgactggagattctatggaggtgaaacctatcatgaccagaaagttgcggaggcgaccaaatgatcccgtccccatcccagacaagaggaggaaacctgctccagcccagctaaactatttgttaacagatgaacagatcatggaggatctgagaacattaaataagcttaagtcacccaagagaccagcatctccatcctctcctgagcacttgcctgcaacacccgcggaatctccagcccagaggttcgaagctcggatagaagatggcaaactgtactatgacaaaagatggtaccacaagagccaggccatctatctggagtcaaaggacaaccagaaactgagctgcgtgatcagttctgtaggagccaatgagatctgggtgaggaagacaagtgacagcaccaagatgaggatctacctgggccagcttcagcgcgggctcttcgtgatccgccggcgctcagctgcttgactttctacagtgctcttctcttgaccctttttctggagtgggttttatttttgttttgtttcgttttctccttaatagaaaaatgttaacttactgggaatagctactcagccttggaaatggagagcactgcagtgaattctttagggcacttttgtggccggatgcttccaactttgtcagtcttttctgcctcaacttcttccagacatcagtcaccatgagactgttttactttcaggcgtattggggggtttgatttactttccttttatttctttattttttgcttatacttgtttttgaaaacctcctctgagtttgaagggacagctatttttattgattatctttaagtctctctaccatggagaagagcaggaagggatacactctccagtgcattttcatgttttgaatctgattagtggatcacgtagctactttccctgtcgcgtccaattcactatttgcccagaagcttggggcagaggtcctagcaggagatgatgaattctcgtggctctcggccttctcagagaaataaatgctttgtgtaacatctgtgcacaccatccattccgctcgctgagcgatggaaaagcttgcctggaagactatgtgcactgaagtaaatggggttgggggaggggacatttcatatttataatgtgctgaaggtaccatattttaaatgttatttaatgcaggtgatttattcaaacatttgttctagcttaagctggaataagcagtggtcatttcagaagttttcatttgtaattccttcctctcccttgttcccaagtaggtagtagtaagtatgtgccacaggctgattatctgggtaatcttttacgggtgggaggtgagattgatagtgcaataatcagtgatctatagaccctcatgcacgattcaagtttcactcttgtggctgatgccattattgcacattggccattccaaacctgtggagaactttgttgtcaggccctgagcgctcacagcttcatttggcccaggttgaagacaaggaaagctctgctgtggctgcctctggactgacaccctccctaatgagtcctgatgaaacagcctttcctacatccttccctcactcccatgattggagaaatgattcattgggtgatgagtgttggggttttctatactcatgttgccatcttgagatgttcaaaaaatttggggttagagcaactgttagcgtctctatgagcaatcagtagaacttacacatcctaggaaatctttctttgtaagtaattcttttggtctcaagtgattctcttcatgttgtctcttgatgtacatacccccaagcaagttggggggactgtgatgacaattaaatcaccttctctgaagttctggctctgcagagaccaaaccttactgacttgtacagacttgtacaagtaaagacttatacagatagatttttgttttaacttacaatccgttttttcctcttttttttttttttttctggtgttggagtcttatttagaaaacaggataaatgacgctgttatcaaaagttgcctggggttctgtatttcttctctgccctccaatccccgactgctatgatgtttactacagtgaacccagcccatggtaaacacaggcttcacctgttcttgtttgttagccttgactgtgaggcaggacttccctcgcttgaactgttacacatacgatgtgtgtgtcacatcacatattgtgcagctgttggttttcatgtagtgccctgcgatggaaattagatatatttcatgtatttttccattgaaggtggagtttttcaatgatcatgtgttttgtcctcctaaacagtataccaaagtttgtttttatagttgaggattgtattgataaccactggggttccgcattgaagcaggaacaaattgcctctttttctggccttctctgtgggacctctgcttttgtgaagcaactatttatttgaagaccagggtatgggcacttttgccttctctcctctctgacttttgagggtattgagggcgcccttagtcatagtctcgactccgccattgccttctcctcggcgtcctcacaactcttaattgggcctagtgaaaatgggggcaggtgagaagtccattttgagaatcagcatagtaaattacatttctaatcccagaggacttaatattttcttttgtcaccccagaggtgaaaaatcagcagttgaagcctgacaggcctcagtggtgaccaggaacagaagcagccttcctgttagtagatgggggtacttctgtggtgggcagaagccttactaaaggggaagacagactttgaagtttctagacgagaaggaggctagcttctagcctgggtggccattattccaaaaggtcattgtttctcactagaccccagggcaccagatgaatttccaagtttaaactctttcctgcaggtgattactttgaaaaaggttggtccagaccattttgatcaagaacctgtatatgtgttgtgttagaggcatctgcctcaagtctatgtacagtgtttgctgcgggtgtgttccaatattcattttacctctgcttgggggttttgtgtgttcccctccccccatgccctgcctacccccttttccctgaaccacgtccttttgaataatttccagatggatttctgtagccataccaaagccagggtgttttcattcatgcggatactagtatttatagatgtctgactacctaacttaatttttgtttttgaacttctaattggggccagtgtaaggtcgatcccagaggctgatctgcaaatcaagctacatgtatttgtgtataagaccctgtgttcaggactgggtgacttttctaagaaatatggggtttagaatggggttgactgtattttttaacctaattctggagagaagattgtattttttacagttttttgggtttggcttccttctcacatttctttagctttgaatttttactaaataaatttcctcctgatt

SEQ ID NO: 19131 - DNA, 2671 bp, Homo sapiens
gactgctgggatcaggtgccatctccgccataatcaaggtgataagtctgtccttcaatgtcgcaggtgcttttctaaagagtaagtgctggcacacagggctcaggctgggtcggcccatgattgtggatggtgcctccctaatgagtcctgatgaaacagcctttcctacatccttccctcactcccatgattggagaaatgattcattgggtgatgagtgttggggttttctatactcatgttgccatcttgagatgttcaaaaaatttggggttagagcaactgttagcgtctctatgagcaatcagtagaacttacacatcctaggaaatctttctttgtaagtaattcttttggtctcaagtgattctcttcatgttgtctcttgatgtacatacccccaagcaagttggggggactgtgatgacaattaaatcaccttctctgaagttctggctctgcagagaccaaaccttactgacttgtacagacttgtacaagtaaagacttatacagatagatttttgttttaacttacaatccgttttttcctcttttttttttttttttctggtgttggagtcttatttagaaaacaggataaatgacgctgttatcaaaagttgcctggggttctgtatttcttctctgccctccaatccccgactgctatgatgtttactacagtgaacccagcccatggtaaacacaggcttcacctgttcttgtttgttagccttgactgtgaggcaggacttccctcgcttgaactgttacacatacgatgtgtgtgtcacatcacatattgtgcagctgttggttttcatgtagtgccctgcgatggaaattagatatatttcatgtatttttccattgaaggtggagtttttcaatgatcatgtgttttgtcctcctaaacagtataccaaagtttgtttttatagttgaggattgtattgataaccactggggttccgcattgaagcaggaacaaattgcctctttttctggccttctctgtgggacctctgcttttgtgaagcaactatttatttgaagaccagggtatgggcacttttgccttctctcctctctgacttttgagggtattgagggcgcccttagtcatagtctcgactccgccattgccttctcctcggcgtcctcacaactcttaattgggcctagtgaaaatgggggcaggtgagaagtccattttgagaatcagcatagtaaattacatttctaatcccagaggacttaatattttcttttgtcaccccagaggtgaaaaatcagcagttgaagcctgacaggcctcagtggtgaccaggaacagaagcagccttcctgttagtagatgggggtacttctgtggtgggcagaagccttactaaaggggaagacagactttgaagtttctagacgagaaggaggctagcttctagcctgggtggccattattccaaaaggtcattgtttctcactagaccccagggcaccagatgaatttccaagtttaaactctttcctgcaggtgattactttgaaaaaggttggtccagaccattttgatcaagaacctgtatatgtgttgtgttagaggcatctgcctcaagtctatgtacagtgtttgctgcgggtgtgttccaatattcattttacctctgcttgggggttttgtgtgttcccctccccccatgccctgcctacccccttttccctgaaccacgtccttttgaataatttccagatggatttctgtagccataccaaagccagggtgttttcattcatgcggatactagtatttatagatgtctgactacctaacttaatttttgtttttgaacttctaattggggccagtgtaaggtcgatcccagaggctgatctgcaaatcaagctacatgtatttgtgtataagaccctgtgttcaggactgggtgacttttctaagaaatatggggtttagaatggggttgactgtattttttaacctaattctggagagaagattgtattttttacagttttttgggtttggcttccttctcacatttctttagctttgaatttttactaaataaatttcctcctgattaattttttttttctcatctgggaatttgaaatctcggtgcttactgttacaccaatttgtccaaagagttgaaatcactttaatgccagaacatggtaaatttgcagccatttcaagcaggtgatggtctttttttataacatcgttaacgggtaccattaaatattctgagaggtgaatgtaaaatataaaaggtataggtttttttttttttttaaagaaaacaataaactttcaaagagaaaaccagcatgaagtctgtattgtatccattgacttgataagtgatagaaatttattttaggtttttgatccattgcttatggggaaaggaagttagggcagaggaagggatattctagacatttaattcttagtgaagactaagatacagaatgatgtcaggctaatactcagttttgtaaagagcaatctggggtgttgacccttaaatgtttgtgcactcttcttgttgcagataaaagtcattaaaaatcaagtgaatagaatggatcttgggtggaaaaacaatcttgaaataaacttgtgattgaggatattgtt

SEQ ID NO: 19132 - DNA, 2230 bp, Homo sapiens
actctataggatcccccacacacctgagaccaaaccttactgacttgtacagacttgtacaagtaaagacttatacagatagatttttgttttaacttacaatccgttttttcctcttttttttttttttttctggtgttggagtcttatttagaaaacaggataaatgacgctgttatcaaaagttgcctggggttctgtatttcttctctgccctccaatccccgactgctatgatgtttactacagtgaacccagcccatggtaaacacaggcttcacctgttcttgtttgttagccttgactgtgaggcaggacttccctcgcttgaactgttacacatacgatgtgtgtgtcacatcacatattgtgcagctgttggttttcatgtagtgccctgcgatggaaattagatatatttcatgtatttttccattgaaggtggagtttttcaatgatcatgtgttttgtcctcctaaacagtataccaaagtttgtttttatagttgaggattgtattgataaccactggggttccgcattgaagcaggaacaaattgcctctttttctggccttctctgtgggacctctgcttttgtgaagcaactatttatttgaagaccagggtatgggcacttttgccttctctcctctctgacttttgagggtattgagggcgcccttagtcatagtctcgactccgccattgccttctcctcggcgtcctcacaactcttaattgggcctagtgaaaatgggggcaggtgagaagtccattttgagaatcagcatagtaaattacatttctaatcccagaggacttaatattttcttttgtcaccccagaggtgaaaaatcagcagttgaagcctgacaggcctcagtggtgaccaggaacagaagcagccttcctgttagtagatgggggtacttctgtggtgggcagaagccttactaaaggggaagacagactttgaagtttctagacgagaaggaggctagcttctagcctgggtggccattattccaaaaggtcattgtttctcactagaccccagggcaccagatgaatttccaagtttaaactctttcctgcaggtgattactttgaaaaaggttggtccagaccattttgatcaagaacctgtatatgtgttgtgttagaggcatctgcctcaagtctatgtacagtgtttgctgcgggtgtgttccaatattcattttacctctgcttgggggttttgtgtgttcccctccccccatgccctgcctacccccttttccctgaaccacgtccttttgaataatttccagatggatttctgtagccataccaaagccagggtgttttcattcatgcggatactagtatttatagatgtctgactacctaacttaatttttgtttttgaacttctaattggggccagtgtaaggtcgatcccagaggctgatctgcaaatcaagctacatgtatttgtgtataagaccctgtgttcaggactgggtgacttttctaagaaatatggggtttagaatggggttgactgtattttttaacctaattctggagagaagattgtattttttacagttttttgggtttggcttccttctcacatttctttagctttgaatttttactaaataaatttcctcctgattaattttttttttctcatctgggaatttgaaatctcggtgcttactgttacaccaatttgtccaaagagttgaaatcactttaatgccagaacatggtaaatttgcagccatttcaagcaggtgatggtctttttttataacatcgttaacgggtaccattaaatattctgagaggtgaatgtaaaatataaaaggtataggtttttttttttttttaaagaaaacaataaactttcaaagagaaaaccagcatgaagtctgtattgtatccattgacttgataagtgatagaaatttattttaggtttttgatccattgcttatggggaaaggaagttagggcagaggaagggatattctagacatttaattcttagtgaagactaagatacagaatgatgtcaggctaatactcagttttgtaaagagcaatctggggtgttgacccttaaatgtttgtgcactcttcttgttgcagataaaagtcattaaaaatcaagtgaatagaatggatcttgggtggaaaaacaatcttgaaataaacttgtgattgaggatattgtt

SEQ ID NO: 19133 - DNA, 1166 bp, Homo sapiens
  misc_feature (16)..(16): n is a, c, g, or t
cacttacaactactanattcgcgggcggcgtcgacgtgattactttgaaaaaggttggtccagaccattttgatcaagaacctgtatatgtgttgtgttagaggcatctgcctcaagtctatgtacagtgtttgctgcgggtgtgttccaatattcattttacctctgcttgggggttttgtgtgttcccctccccccatgccctgcctacccccttttccctgaaccacgtccttttgaataatttccagatggatttctgtagccataccaaagccagggtgttttcattcatgcggatactagtatttatagatgtctgactacctaacttaatttttgtttttgaacttctaattggggccagtgtaaggtcgatcccagaggctgatctgcaaatcaagctacatgtatttgtgtataagaccctgtgttcaggactgggtgacttttctaagaaatatggggtttagaatggggttgactgtattttttaacctaattctggagagaagattgtattttttacagttttttgggtttggcttccttctcacatttctttagctttgaatttttactaaataaatttcctcctgattaattttttttttctcatctgggaatttgaaatctcggtgcttactgttacaccaatttgtccaaagagttgaaatcactttaatgccagaacatggtaaatttgcagccatttcaagcaggtgatggtctttttttataacatcgttaacgggtaccattaaatattctgagaggtgaatgtaaaatataaaaggtataggtttttttttttttttaaagaaaacaataaactttcaaagagaaaaccagcatgaagtctgtattgtatccattgacttgataagtgatagaaatttattttaggtttttgatccattgcttatggggaaaggaagttagggcagaggaagggatattctagacatttaattcttagtgaagactaagatacagaatgatgtcaggctaatactcagttttgtaaagagcaatctggggtgttgacccttaaatgtttgtgcactcttcttgttgcagataaaagtcattaaaaatcaagtgaatagaatggatcttgggtggaaaaacaatcttgaaataaacttgtgattgaggatattgtt

SEQ ID NO: 19134 - DNA, 1070 bp, Homo sapiens
gcggccgctactactactactactactaattcgcggccgcgtcgacgtgttccaatattcattttacctctgcttgggggttttgtgtgttcccctccccccatgccctgcctacccccttttccctgaaccacgtccttttgaataatttccagatggatttctgtagccataccaaagccagggtgttttcattcatgcggatactagtatttatagatgtctgactacctaacttaatttttgtttttgaacttctaattggggccagtgtaaggtcgatcccagaggctgatctgcaaatcaagctacatgtatttgtgtataagaccctgtgttcaggactgggtgacttttctaagaaatatggggtttagaatggggttgactgtattttttaacctaattctggagagaagattgtattttttacagttttttgggtttggcttccttctcacatttctttagctttgaatttttactaaataaatttcctcctgattaattttttttttctcatctgggaatttgaaatctcggtgcttactgttacaccaatttgtccaaagagttgaaatcactttaatgccagaacatggtaaatttgcagccatttcaagcaggtgatggtctttttttataacatcgttaacgggtaccattaaatattctgagaggtgaatgtaaaatataaaaggtataggtttttttttttttttaaagaaaacaataaactttcaaagagaaaaccagcatgaagtctgtattgtatccattgacttgataagtgatagaaatttattttaggtttttgatccattgcttatggggaaaggaagttagggcagaggaagggatattctagacatttaattcttagtgaagactaagatacagaatgatgtcaggctaatactcagttttgtaaagagcaatctggggtgttgacccttaaatgtttgtgcactcttcttgttgcagataaaagtcattaaaaatcaagtgaatagaatggatcttgggtggaaaaacaatcttgaaataaacttgtgattgaggatattgtt

SEQ ID NO: 19135 - DNA, 461 bp, Homo sapiens
agctcggcggagacggggaaggggtcgccgtggctgccggtcctcgagttgggggctgccgcggacactgctaggcagacggcgagtaccgagcgcgggtggccgcggtgtccgtgggccacgctcagctgcggtcagaggcgacatgagtgccgcggggctgctggccccggccccggcccaggctggagcgccgccggcccccgagtactaccccgaggaggatgaagagctggagagcgccgaggacgacgagcgcagctgtcggggccgcgagtcggacgaagacactgaggatgctagtgaaactgacctggcaaagcatgatgaagaagactatgtagaaatgaaggaacagtacattacaggaatatcagaagagaatgaaaaaactagatcagcagtacaaagagaggatacggaatgcaggtaaggctcctttaaatggcaatgaatcatct

SEQ ID NO: 19136 - DNA, 494 bp, Homo sapiens
aatgatcccgtccccatcccagacaagaggaggaaacctgctccagatatccatttacatcaagccttaaccgcctttcttttttaagactgtggaatcctatgtttatccgtttgctagggtacacatggccgttgtcctacagaaaatagtaacatttaactggaaagcgtgtgttaaatgtttgtccacaggtcaggggttgctcattttatcatggtagtcctcatttgctactgcttttggtgggagagatgtatagagttgtgatttggaaaggtgctttgcatgcaaagttcagcctggttttaatgctaacatcaagattcaggggcatctgaaaacttgatgtgccttaattttttcacctgtaattttccaccttccaactgtaaaatgaaggcagtaatatctacctttatgtacctctgttatctatgtccataatgtagtggattgcaacctgtttttaaattaaagcaaatgagatttca

SEQ ID NO: 19137 - DNA, 475 bp, Homo sapiens
ctgtatcaaaaataatagtaactttttgaatatacacaatttatctagaatctattttcctttgaagctgtaactttatgagcgattatttactacctttgagaaatgtgttttagtataaaatataggatgtggaagcgaaaaaatatctgggtagcaagtgaggtgtactcaaaaataagcaaaagtcacgtgggtctgattttataccctcgctggaaagcttgttctcagacacactgttactgcaagtgtgtgtgagggggaaactctcacacactttgcagttgaggacagggctagactttgagttggagccctggctcccagggctgtgtactcccagcccgtgtttctcttttgctcagactgaacaagtggaacgaaattacattaaagaaaagaaggcagcagtgaaagaatttgaagacaagaaggttgagctgaaagagaacctgattgctgagctagaaga

SEQ ID NO: 19138 - DNA, 672 bp, Homo sapiens
gggtccgtggggcatgaacctctgaatgcatcacttggcagaaatcctctgcccatcagccgagtactttactccttagttcctcattcaaaacatgatgaggccgggcgcagtggctcacgcctataatctcaatgctttgggaggcctaggtgggcggatcacttgagctcagcagttccagaccaccctgggcaaaatggtgaaaccctgtctctaaaaaaatggaaaaattagccaggcatggtggtgtgtgcctgtggttccagttacttgggaggctgaggtggaagggtcacctgagcatagggacctgtgatcacagcactgtacttcagcctgggggacagagtgggaccctgtctcaaaaaaggaaaaaacaaaaaacaaaaaccccatgattaacaaactcaattaacctacacaggcttagttattgttcctaggacatagaaggttggaaagagatagagcaaagtgagctgtgagaattgatagcagaggctctgactctacaaaagtaaatagtaactcaaaagttgacaggcttagaatactatagtaaaaatagtaataataatggatgtttgataaatggtctaagatcagttctctctctaagaactcaaggaattataaacctactcagaaattatttctatcagaggatta

SEQ ID NO: 19139 - DNA, 3313 bp, Homo sapiens
ggctccaggcctggcatcccggtagccgcagctgtcttttccggcccccgtgcactctccgcccgaggcggagccccccggctcgcggggatcgcccccgagcgctgcgtcctgcgggtgggtcacctaacccatttgtggcttcctctacctgtgctcagccatggccagcgagagctcacctctgctggcctaccggctcctgggggaggagggggttgccctccctgccaatggggccgggggtcctggaggggcgtctgcccggaagctgtccaccttcctgggtgtggtggtgcccactgtcctgtccatgttcagcatagttgtttttctgaggattgggttcgtggtgggtcatgctgggctactgcaggccctggccatgctgctggttgcctacttcatcctggcactcaccgtcctctctgtctgtgccatcgccaccaatggagccgtgcaggggggcggagcctacttcatgatcagccgcacactggggcccgaggtcgggggcagcattgggctcatgttctacctggctaacgtctgtggctgtgccgtctccctcctggggctggtggagtctgtgcttgatgtcttcggggccgatgccacagggcccagtgggctccgggtcctgccccagggctacggctggaacctgctgtatggctccctgctgctgggccttgtgggtggggtctgcaccctgggagccggcctctatgcccgggcctcattcctcacattcctgctggtctctggctccctggcctctgtgctcatcagttttgtggctgtggggccgagggacatccgcttgactcctaggcctggccccaatggctcctccctgccgccccggtttggccacttcaccggcttcaacagcagtaccctgaaggacaacttgggcgctggctatgctgaggactacaccacgggagccgtgatgaattttgccagcgtctttgctgtcctctttaacggctgtacaggcatcatggctggggccaacatgtcaggggagctgaaggaccccagccgggcgatccctctgggcacgatcgtcgccgtcgcctacaccttcttcgtctatgtcctgcttttctttctctccagcttcacttgtgacaggaccctgctgcaggaagactatgggttcttccgcgccatcagcctgtggcccccactggtgttgatcggaatctatgccacagcgctctcagcgtccatgagctcgctcattggtgcctcccgcatcctccatgccctggcccgggatgacctctttggcgtgatcttggcaccggccaaggttgtgtcccgagggggaaacccctgggcagctgtactttattcttggggcctggtgcagctggtgctcctggctgggaagctgaacacactggctgctgtggtcactgtcttctacctggtggcctatgctgccgtggacctgtcctgcctgagcctggagtgggcctcggcccccaacttccgccccaccttcagcctgttctcctggcacacctgcctgctgggggtggcctcctgcctgctcatgatgttcctcatcagtcctggcgcggctggtggctccctgctcctcatgggtctgctggctgccctgctcaccgcgcgaggaggccccagtagctggggctatgtcagccaggccttgcttttccaccaggtgcgtaagtatctgcttcggctggacgtccggaaggatcacgtgaagttctggcggccccagctgctgctcctggtggggaacccccggggcgccctgcctctgctgcggttggccaaccagcttaagaagggggggctgtatgtgctgggccacgtcaccctgggagacctcgactccctgccctcggaccctgtacagccgcagtatggggcatggctcagcctggtggaccgtgcccaggtgaaggcttttgtggatctaaccctctcaccctccgtgcgccagggggctcagcatctgctgcgaatctccggcctcggtggcatgaagcccaacacgttggtcctaggtttctacgatgacgctccaccgcaggaccatttcctgacggacccggctttctctgagcctgcagacagcaccagggagggcagttccccagctctgagcaccctgttccctcctccccgggctcctgggagcccccgggccctcaatccccaggactatgtggccacggtggccgacgccctcaagatgaacaagaatgtggtgctggcccgggccagcggggccttgccccctgagcggctgagccgggggtctgggggcacctctcagctgcaccatgtggacgtgtggcccctcaacctgctgcggccccggggtgggcccggctatgtggatgtctgcggcctcttcctgctgcagatggcaaccatcttgggcatggtgcccgcttggcatagcgcccggctccggatcttcctgtgcctggggcctcgggaggcgcctggggcggccgaggggcggctgcgggcactgctgagccaactgaggatccgggctgaggtgcaggaggtggtgtggggcgagggggccggggctggggaacccgaggcggaggaggaaggggactttgtgaacagtgggcggggagacgcagaggcagaggccctggcacgcagcgccaacgccctggttcgggcccagcaggggcgcggcacaggaggagggccgggtgggccggagggtggggatgctgagggccccatcacagccctcaccttcctgtacttgcctcggccgccagccgatcccgcccgatacccccgctacctggcgctactggagactctaacccgagacctgggccccacgctgctggttcatggggtcactccagtcacctgcactgatctgtgatgcccctgcctccagggctaggtagagagggcccaggcaggcggcctatcctgatccttggaggaggaggaagaggaggccactgtggcccgtggccctgcccttgggacgtggagcccaggggaggtttgaaggggatcctgggcttgggcatcacgcccacctcctttggcagagggaccccagcacactaactctgggtggctgtccccaccgtgcaggggagggagtccgcagcctcccttcactggtgccttgatgctaggggccaggcctcctctgtgactctgggctacctcagtttccccattttggccagactcaccggcccactggggtggtgatgttttcgttctgttttatttttctaactctgctgaccatgaataaaagaccaaaacacta

SEQ ID NO: 19140 - DNA, 1937 bp, Homo sapiens
ggctccaggcctggcatcccggtagccgcagctgtcttttccggcccccgtgcactctccgcccgaggcggagccccccggctcgcggggatcgcccccgagcgctgcgtcctgcgggtgggtcacctaacccatttgtggcttcctctacctgtgctcagccatggccagcgagagctcacctctgctggcctaccggctcctgggggaggagggggttgccctccctgccaatggggccgggggtcctggaggggcgtctgcccggaagctgtccaccttcctgggtgtggtggtgcccactgtcctgtccatgttcagcatagttgtttttctgaggattgatgccacagggcccagtgggctccgggtcctgccccagggctacggctggaacctgctgtatggctccctgctgctgggccttgtgggtggggtctgcaccctgggagccggcctctatgcccgggcctcattcctcacattcctgctggtctctggctccctggcctctgtgctcatcagttttgtggctgtggggccgagggacatccgcttgactcctaggcctggccccaatggctcctccctgccgccccggtttggccacttcaccggcttcaacagcagtaccctgaaggacaacttgggcgctggctatgctgaggactacaccacgggagccgtgatgaattttgccagcgtctttgctgtcctctttaacggctgtacaggcatcatggctggggccaacatgtcaggggagctgaaggaccccagccgggcgatccctctgggcacgatcgtcgccgtcgcctacaccttcttcgtctatgtcctgcttttctttctctccagcttcacttgtgacaggaccctgctgcaggaagactatgggttcttccgcgccatcagcctgtggcccccactggtgttgatcggaatctatgccacagcgctctcagcgtccatgagctcgctcattggtgcctcccgcatcctccatgccctggcccgggatgacctctttggcgtgatcttggcaccggccaaggttgtgtcccgagggggaaacccctgggcagctgtactttattcttggggcctggtgcagctggtgctcctggctgggaagctgaacacactggctgctgtggtcactgtcttctacctggtggcctatgctgccgtggacctgtcctgcctgagcctggagtgggcctcggcccccaacttccgccccaccttcagcctgttctcctggcacacctgcctgctgggggtggcctcctgcctgctcatgatgttcctcatcagtcctggcgcggctggtggctccctgctcctcatgggtctgctggctgccctgctcaccgcgcgaggaggccccagtagctggggctatgtcagccaggccttgcttttccaccaggtgcgtaagtatctgcttcggctggacgtccggaaggatcacgtgaagttctggcggccccagctgctgctcctggtggggaacccccggggcgccctgcctctgctgcggttggccaaccagcttaagaagggggggctgtatgtgctgggccacgtcaccctgggagacctcgactccctgccctcggaccctgtacagccgcagtatggggcatggctcagcctggtggaccgtgcccaggtgaaggcttttgtggatctaaccctctcaccctccgtgcgccagggggctcagcatctgctgcgaatctccggcctcgagtcaaactcgcatcccctgccgtgaaacagatgccccgctagaagccgggagtggacagcatcctcctctccatagaattggagtgctcattagtggcaagaatcctaaggcgaactttgcctgtttaagtggaggagattagtcactgagataataaaataaatgcatgtgaaagtgttta

SEQ ID NO: 19141 - DNA, 414 bp, Homo sapiens
aaatgtgcagcaggcaggctggtatagtgaaggagatcaacattgcccggcacgaggccaatttctagtccaacaatctcatctgttaggcagtgattgttttacagatgcagaaactggcactcagaggatatgagtgacttgggcaaagccacatggctggggcctggctgcacttgggttcagtgcttggagctatggcaacttcctcacgtccatttcagtcttttcccttaatgctcacccctgcttccactttcagtcatgatcagccgcacactggggcccgaggtcgggggcagcattgggctcatgttctacctggcagactcaccggcccactggggtggtgatgttttcgttctgttttatttttctaactctgctgaccatgaataaaagaccaaaacacta

SEQ ID NO: 19142 - DNA, 6942 bp, Homo sapiens
  misc_feature (1784)..(1784): n is a, c, g, or t
ggctccaggcctggcatcccggtagccgcagctgtcttttccggcccccgtgcactctccgcccgaggcggagccccccggctcgcggggatcgcccccgagcgctgcgtcctgcgggtgggtcacctaacccatttgtggcttcctctacctgtgctcagccatggccagcgagagctcacctctgctggcctaccggctcctgggggaggagggggttgccctccctgccaatggggccgggggtcctggaggggcgtctgcccggaagctgtccaccttcctgggtgtggtggtgcccactgtcctgtccatgttcagcatagttgtttttctgaggattgggttcgtggtgggtcatgctgggctactgcaggccctggccatgctgctggttgcctacttcatcctggcactcaccgtcctctctgtctgtgccatcgccaccaatggagccgtgcaggggggcggagcctacttcatgatcagccgcacactggggcccgaggtcgggggcagcattgggctcatgttctacctggctaacgtctgtggctgtgccgtctccctcctggggctggtggagtctgtgcttgatgtcttcggggccgatgccacagggcccagtgggctccgggtcctgccccagggctacggctggaacctgctgtatggctccctgctgctgggccttgtgggtggggtctgcaccctgggagccggcctctatgcccgggcctcattcctcacattcctgctggtctctggctccctggcctctgtgctcatcagttttgtggctgtggggccgagggacatccgcttgactcctaggcctggccccaatggctcctccctgccgccccggtttggccacttcaccggcttcaacagcagtaccctgaaggacaacttgggcggtgagctgggtgctgccgtggcagggatctcggggtgaggggtgggcagacgtcgggccgggcccgtaaaacctctggatgagcacaggtgtcagagggaatggagggcaggaggtctggactgcagagcagtgcaatttaattcaagcctgtctagcgtgtgcttggccggcagggcaggaggaagcccacaaaacagtccctgctttagaggaacttgtgttctagctgaggagagacatgcattcaggaatcagttaaatagcacagaatggcccagcatgacttaaacagatcaggatcacccaggagtggagagaagggaggcctgactatgggctggggagggcaggagccggggagctggaggtggcctgagatagacaggtgggggattcagccaggagctgggagcagagagggaaggcatctcaggaaagagcttgagaccaggtgcggtggctcacgcctgtaatcccagcattctgggaggccgaggcaggaggatcacctgaggtcaggagtttgagaccagtctggccaacatggtgaaaccctctccccgtctctactaaaaacacgaaaattagctgggcacgctggcttgcacctgtagtgccagacactcgggaagctgagggagaactgattgaacccgggaggaggagccgagattgtgccattcagtgagccgagattgcaccattgcactccagcctgggagacagtgaggttccctctccaaaaaacaaacaaacaaaaaaaacaccataaaataaaaatacaaaaattagccaggggtggtggtgcgcacctgtagtcccagctactcaggaggctgaggcatgagaatctcttgaaccngggaggcagaggctgcagtgagctaagatcgccaccactgccctccagcctgggcttcagaacgagactccgtctcaaaaaaataaataggctgggtgcggtggctcccgcctgtaatcccaggactttcggaggtcgaggcgggtggatcacctgagtccaggagttcgagatcagcctggccaacatggtgaaaccccatctctactaaaaatacaaaaattagccaggcgtggtggcgggcacctgtaatcccagctacctgagaggctgagacaggggaattgcttgaacctgggaggcagaagttgcagtgagccgagatcgcaccactgcactctcgcctgggtgacacagcgagactccatctcaaaataaataaataaataaaattaaaaagttagatgggcatggtggtgcacacctgtagtcccagctacttggcagactgaggcaggaggatcgctctagcccaggaggtagaggttgcagtgagctacgatggtgccactgcactccagcctggatgacagagccagaccctgtctctaaaaaataaataaataaataaaagagcgtggattagggtctggagggaggaatatcggagcactggggggacgtggcaatgtgtctggctgacccagggccagtgcaggaacaggctggggtcttagtgagggcagtgcaggggaggcaagaggaccgtgggaatgtgtggagagggtggctaagaggcctggatccctgagacggatgctgatgcactctcctccctgggaggatcctcctagctggctatgctgaggactacaccacgggagccgtgatgaattttgccagcgtctttgctgtcctctttaacggctgtacaggcatcatggctggggccaacatgtcaggtgagagtccctgcctgctgcctcctgggggtttggggctgccaccgtgagggacccagggggatggctggagggctgacctcactccctctgctccccctctccaggggagctgaaggaccccagccgggcgatccctctgggcacgatcgtcgccgtcgcctacaccttcttcgtctatgtcctgcttttctttctctccagcttcacttgtgacaggtgtctggggagggatgggggtggagtgtcgaacaagattggtgcacctgggtcaccaaggggaaacacaggctgggggactgggaagcagaaacccagcttgttggggtggagggtggctaccggcgattgacaacctatagccagcagctgccatggacccagtactgttgcaggcacttagcttgggagtgagggtgggtagtggctttctacccagtttgcatttccacaaatatttggcctcttgtgcatataccattaggtatgacagccgggtgcggtggctcacacctgtaatcccagcactttgggaggctgaggcaggaggatcgctggagcccaggagttccagaccagcctgggcaacagagcaagagcctccccccaaatacaaaaattagccaggtgtgatggcaaatgcttgtagtcttggctacttgggaggctgaggtgggaggattgcttgagtccaagaggtcgaggctgcagtgagctatgattacagcactgcactttagcctgggggttggagtgagaccttgtctcttaaaaaaaaggaaggaatgaccactgagtgattaaatccaaggctgcccaatgaataccaggcatatccctttagcacatttgatatctgagtctgatccttaagatcggggctggagattttcttaccccgtgacgcatgatcatccgtgtcctccttttcctccttcctaggaccctgctgcaggaagactatgggttcttccgcgccatcagcctgtggcccccactggtgttgatcggaatctatgccacagcgctctcagcgtccatgagctcgctcattggtgcctcccgcatcctccatgccctggcccgggatgacctctttggtgggttctctgcctccttgctggcttggagcacgccctcccttgtctgtctctccgtccccgctgagccctggctgatgtgtctgctgtggattctgtttttctaggcgtgatcttggcaccggccaaggttgtgtcccgagggggaaacccctgggcagctgtactttattcttggggcctggtgcaggtgagccttcttcttcaaggggccctttccctcaccccaccagctggcaggatgggggtgcagttagatgcaggctgggagacaaatgtaaagacaaatgcgtatgcacttggggttgcactggcactctgcagggttcactggcactttgtggggttcaccagcaccttgcaggttgccccagtgctttgcagagttcattggcaccctgggaggttcactggcactttttggggtacacgggcattgtgcagggttcactgacactttttggggtatactagtatttttcagtattcactggcactttgtggggtgccccagcactttgagggattcactggcactctgtgggatgtaccaacactttgtgggggttcactgatactttggaggtttggtggcactctgtgggagtgcattggccctttctggggatcactgacattgggggtgcacttgcactttacagggctcacgggcacttttcagggttcattgacactttggggtgcactggcactctctggggttcattgacactttgggggtgcgctggcactttgcatggttcactggtactttccagggttcactgacactttgggggtacactggcactttctggggttcactgacactggggatacactggcacttttggggtttaatagcattttaggggctcattgacactttgggggtgcactggcacttttggggtttaatagcattttgggggttcattgacactttgggggtgcactggcactttgcagggttcactggcactttctggggctcattgacactttggggtacactggcattctttggtgttcactggcattttgggggtgcactggcactttggaacaacggcacgcctcttggcccttgcccagctggtgctcctggctgggaagctgaacacactggctgctgtggtcactgtcttctacctggtggcctatgctgccgtggacctgtcctgcctgagcctggagtgggcctcggcccccaacttccggtgagagactcagatctgtgtccccagagagaagaagggaggactcgggctcaggcgtggggctggggactgcagcctcgtgtgcggcctgccctgagtttctgtccctcctcccctccatgcccgcagccccaccttcagcctgttctcctggcacacctgcctgctgggggtggcctcctgcctgctcatgatgttcctcatcagtcctggcgcggctggtggctccctgctcctcatgggtctgctggctgccctgctcaccgcgcgaggaggccccagtagctggggctatgtcagccaggccttgcttttccaccaggtgcgtaagtatctgcttcggctggacgtccggaaggatcacgtgaagttctggcggccccagctgctgctcctggtggggaacccccggggcgccctgcctctgctgcggttggccaaccagcttaagaagggggggctgtatgtgctgggccacgtcaccctgggagacctcgactccctgccctcggaccctgtacagccgcagtatggggcatggctcagcctggtggaccgtgcccaggtgaaggcttttgtggatctaaccctctcaccctccgtgcgccagggggctcagcatctgctgcgaatctccggcctcggtggcatgaagcccaacacgttggtcctaggtttctacgatgacgctccaccgcaggaccatttcctgacggacccggctttctctgagcctgcagacagcaccagggagggcagttccccagctctgagcaccctgttccctcctccccgggctcctgggagcccccgggccctcaatccccaggactatgtggccacggtggccgacgccctcaagatgaacaagaatgtggtgctggcccgggccagcggggccttgccccctgagcggctgagccgggggtctgggggcacctctcagctgcaccatgtggacgtgtggcccctcaacctgctgcggccccggggtgggcccggctatgtggatgtctgcggcctcttcctgctgcagatggcaaccatcttgggcatggtgcccgcttggcatagcgcccggctccggatcttcctgtgcctggggcctcgggaggcgcctggggcggccgaggggcggctgcgggcactgctgagccaactgaggatccgggctgaggtgcaggaggtggtgtggggcgagggggccggggctggggaacccgaggcggaggaggaaggggactttgtgaacagtgggcggggagacgcagaggcagaggccctggcacgcagcgccaacgccctggttcgggcccagcaggggcgcggcacaggaggagggccgggtgggccggagggtggggatgctgagggccccatcacagccctcaccttcctgtacttgcctcggccgccagccgatcccgcccgatacccccgctacctggcgctactggagactctaacccgagacctgggccccacgctgctggttcatggggtcactccagtcacctgcactgatctgtgatgcccctgcctccagggctaggtagagagggcccaggcaggcggcctatcctgatccttggaggaggaggaagaggaggccactgtggcccgtggccctgcccttgggacgtggagcccaggggaggtttgaaggggatcctgggcttgggcatcacgcccacctcctttggcagagggaccccagcacactaactctgggtggctgtccccaccgtgcaggggagggagtccgcagcctcccttcactggtgccttgatgctaggggccaggcctcctctgtgactctgggctacctcagtttccccattttggccagactcaccggcccactggggtggtgatgttttcgttctgttttatttttctaactctgctgaccatgaataaaagaccaaaacacta

SEQ ID NO: 19143 - DNA, 4829 bp, Homo sapiens
ggctccaggcctggcatcccggtagccgcagctgtcttttccggcccccgtgcactctccgcccgaggcggagccccccggctcgcggggatcgcccccgagcgctgcgtcctgcgggtgggtcacctaacccatttgtggcttcctctacctgtgctcagccatggccagcgagagctcacctctgctggcctaccggctcctgggggaggagggggttgccctccctgccaatggggccgggggtcctggaggggcgtctgcccggaagctgtccaccttcctgggtgtggtggtgcccactgtcctgtccatgttcagcatagttgtttttctgaggattgggttcgtggtgggtcatgctgggctactgcaggccctggccatgctgctggttgcctacttcatcctggcactcaccgtcctctctgtctgtgccatcgccaccaatggagccgtgcaggggggcggagcctacttcatgatcagccgcacactggggcccgaggtcgggggcagcattgggctcatgttctacctggctaacgtctgtggctgtgccgtctccctcctggggctggtggagtctgtgcttgatgtcttcggggccggtctgtgctctgtccgatctgggcagtgctgcgggtttacagggtctgggagtgtgggatcatgagggagaaggtcctctccagcagaggggcagactgagccattaccttggctttctggagcttctgctgtgtggccagcatcgtgcaggagatatggacatccctgagattgtccttgcctgcagggagctaaccatctaatcggagagaccaggctaagattcttaaaactgacagagaccaccagggagagctaagatgctaggatggagctaagagggaagtggggaaggtggactctctgatagcaggtgggcagaggagggcttgtcttgctttgggtcacagttggggctgggtcccttcttatttatttatttattttgagatggagtcttgctttgttgcccaggctggagtacagtggtgtgatctccgctcactgcaacctttgcctcccgggttcaagcaattctcccacctcagcctcccagtagctggactacaggcatgcctccccacacctggctaattttgcagtttttgtggagctggggtttcacaatgttgcccaggttggttttgaactcctggactcaagcaatcctcccacctcggcctcccaaagtgctggaattatagatgtgagccgcccaccatgcccggctggtggggtgccttaggatcgggccttctaactctgtccctacctctctccagatgccacagggcccagtgggctccgggtcctgccccagggctacggctggaacctgctgtatggctccctgctgctgggccttgtgggtggggtctgcaccctgggagccggcctctatgcccgggcctcattcctcacattcctgctggtctctggctccctggcctctgtgctcatcagttttgtggctgtggggccgagggacatccgcttgactcctaggcctggccccaatggctcctccctgccgccccggtttggccacttcaccggcttcaacagcagtaccctgaaggacaacttgggcgctggctatgctgaggactacaccacgggagccgtgatgaattttgccagcgtctttgctgtcctctttaacggctgtacaggcatcatggctggggccaacatgtcaggaccctgctgcaggaagactatgggttcttccgcgccatcagcctgtggcccccactggtgttgatcggaatctatgccacagcgctctcagcgtccatgagctcgctcattggtgcctcccgcatcctccatgccctggcccgggatgacctctttggcgtgatcttggcaccggccaaggttgtgtcccgagggggaaacccctgggcagctgtactttattcttggggcctggtgcaggtgagccttcttcttcaaggggccctttccctcaccccaccagctggcaggatgggggtgcagttagatgcaggctgggagacaaatgtaaagacaaatgcgtatgcacttggggttgcactggcactctgcagggttcactggcactttgtggggttcaccagcaccttgcaggttgccccagtgctttgcagagttcattggcaccctgggaggttcactggcactttttggggtacacgggcattgtgcagggttcactgacactttttggggtatactagtatttttcagtattcactggcactttgtggggtgccccagcactttgagggattcactggcactctgtgggatgtaccaacactttgtgggggttcactgatactttggaggtttggtggcactctgtgggagtgcattggccctttctggggatcactgacattgggggtgcacttgcactttacagggctcacgggcacttttcagggttcattgacactttggggtgcactggcactctctggggttcattgacactttgggggtgcgctggcactttgcatggttcactggtactttccagggttcactgacactttgggggtacactggcactttctggggttcactgacactggggatacactggcacttttggggtttaatagcattttaggggctcattgacactttgggggtgcactggcacttttggggtttaatagcattttgggggttcattgacactttgggggtgcactggcactttgcagggttcactggcactttctggggctcattgacactttggggtacactggcattctttggtgttcactggcattttgggggtgcactggcactttggaacaacggcacgcctcttggcccttgcccagctggtgctcctggctgggaagctgaacacactggctgctgtggtcactgtcttctacctggtggcctatgctgccgtggacctgtcctgcctgagcctggagtgggcctcggcccccaacttccgccccaccttcagcctgttctcctggcacacctgcctgctgggggtggcctcctgcctgctcatgatgttcctcatcagtcctggcgcggctggtggctccctgctcctcatgggtctgctggctgccctgctcaccgcgcgaggaggccccagtagctggggctatgtcagccaggccttgcttttccaccaggtgcgtaagtatctgcttcggctggacgtccggaaggatcacgtgaagttctggcggccccagctgctgctcctggtggggaacccccggggcgccctgcctctgctgcggttggccaaccagcttaagaagggggggctgtatgtgctgggccacgtcaccctgggagacctcgactccctgccctcggaccctgtacagccgcagtatggggcatggctcagcctggtggaccgtgcccaggtgaaggcttttgtggatctaaccctctcaccctccgtgcgccagggggctcagcatctgctgcgaatctccggcctcggtggcatgaagcccaacacgttggtcctaggtttctacgatgacgctccaccgcaggaccatttcctgacggacccggctttctctgagcctgcagacagcaccagggagggcagttccccagctctgagcaccctgttccctcctccccgggctcctgggagcccccgggccctcaatccccaggactatgtggccacggtggccgacgccctcaagatgaacaagaatgtggtgctggcccgggccagcggggccttgccccctgagcggctgagccgggggtctgggggcacctctcagctgcaccatgtggacgtgtggcccctcaacctgctgcggccccggggtgggcccggctatgtggatgtctgcggcctcttcctgctgcagatggcaaccatcttgggcatggtgcccgcttggcatagcgcccggctccggatcttcctgtgcctggggcctcgggaggcgcctggggcggccgaggggcggctgcgggcactgctgagccaactgaggatccgggctgaggtgcaggaggtggtgtggggcgagggggccggggctggggaacccgaggcggaggaggaaggggactttgtgaacagtgggcggggagacgcagaggcagaggccctggcacgcagcgccaacgccctggttcgggcccagcaggggcgcggcacaggaggagggccgggtgggccggagggtggggatgctgagggccccatcacagccctcaccttcctgtacttgcctcggccgccagccgatcccgcccgatacccccgctacctggcgctactggagactctaacccgagacctgggccccacgctgctggttcatggggtcactccagtcacctgcactgatctgtgatgcccctgcctccagggctaggtagagagggcccaggcaggcggcctatcctgatccttggaggaggaggaagaggaggccactgtggcccgtggccctgcccttgggacgtggagcccaggggaggtttgaaggggatcctgggcttgggcatcacgcccacctcctttggcagagggaccccagcacactaactctgggtggctgtccccaccgtgcaggggagggagtccgcagcctcccttcactggtgccttgatgctaggggccaggcctcctctgtgactctgggctacctcagtttccccattttggccagactcaccggcccactggggtggtgatgttttcgttctgttttatttttctaactctgctgaccatgaataaaagaccaaaacacta

SEQ ID NO: 19144 - DNA, 3263 bp, Homo sapiens
ggctccaggcctggcatcccggtagccgcagctgtcttttccggcccccgtgcactctccgcccgaggcggagccccccggctcgcggggatcgcccccgagcgctgcgtcctgcgggtgggtcacctaacccatttgtggcttcctctacctgtgctcagccatggccagcgagagctcacctctgctggcctaccggctcctgggggaggagggggttgccctccctgccaatggggccgggggtcctggaggggcgtctgcccggaagctgtccaccttcctgggtgtggtggtgcccactgtcctgtccatgttcagcatagttgtttttctgaggattgggttcgtggtgggtcatgctgggctactgcaggccctggccatgctgctggttgcctacttcatcctggcactcaccgtcctctctgtctgtgccatcgccaccaatggagccgtgcaggggggcggagcctacttcatgatcagccgcacactggggcccgaggtcgggggcagcattgggctcatgttctacctggctaacgtctgtggctgtgccgtctccctcctggggctggtggagtctgtgcttgatgtcttcggggccgatgccacagggcccagtgggctccgggtcctgccccagggctacggctggaacctgctgtatggctccctgctgctgggccttgtgggtggggtctgcaccctgggagccggcctctatgcccgggcctcattcctcacattcctgctggtctctggctccctggcctctgtgctcatcagttttgtggctgtggggccgagggacatccgcttgactcctaggcctggccccaatggctcctccctgccgccccggtttggccacttcaccggcttcaacagcagtaccctgaaggacaacttgggcgctggctatgctgaggactacaccacgggagccgtgatgaattttgccagcgtctttgctgtcctctttaacggctgtacaggcatcatggctggggccaacatgtcaggggagctgaaggaccccagccgggcgatccctctgggcacgatcgtcgccgtcgcctacaccttcttcgtctatgtcctgcttttctttctctccagcttcacttgtgacaggaccctgctgcaggaagactatgggttcttccgcgccatcagcctgtggcccccactggtgttgatcggaatctatgccacagcgctctcagcgtccatgagctcgctcattggtgcctcccgcatcctccatgccctggcccgggatgacctctttggcgtgatcttggcaccggccaaggttgtgtcccgagggggaaacccctgggcagctgtactttattcttggggcctggtgcagctggtgctcctggctgggaagctgaacacactggctgctgtggtcactgtcttctacctggtggcctatgctgccgtggacctgtcctgcctgagcctggagtgggcctcggcccccaacttccgccccaccttcagcctgttctcctggcacacctgcctgctgggggtggcctcctgcctgctcatgatgttcctcatcagtcctggcgcggctggtggctccctgctcctcatgggtctgctggctgccctgctcaccgcgcgaggaggccccagtagctggggctatgtcagccaggccttgcttttccaccaggtgcgtaagtatctgcttcggctggacgtccggaaggatcacgtgaagttctggcggccccagctgctgctcctggtggggaacccccggggcgccctgcctctgctgcggttggccaaccagcttaagaagggggggctgtatgtgctgggccacgtcaccctgggagacctcgactccctgccctcggaccctgtacagccgcagtatggggcatggctcagcctggtggaccgtgcccaggtgaaggcttttgtggatctaaccctctcaccctccgtgcgccagggggctcagcatctgctgcgaatctccggcctcggtggcatgaagcccaacacgttggtcctaggtttctacgatgacgctccaccgcaggaccatttcctgacggacccggctttctctgagcctgcagacagcaccagggagggcagttccccagctctgagcaccctgttccctcctccccgggctcctgggagcccccgggccctcaatccccaggactatgtggccacggtggccgacgccctcaagatgaacaagaatgtggtgctggcccgggccagcggggccttgccccctgagcggctgagccgggggtctgggggcacctctcagctgcaccatgtggacgtgtggcccctcaacctgctgcggccccggggtgggcccggctatgtggatgtctgcggcctcttcctgctgcagatggcaaccatcttgggcatggtgcccgcttggcatagcgcccggctccggatcttcctgtgcctggggcctcgggaggcgcctggggcggccgaggggcggctgcgggcactgctgagccaactgaggatccgggctgaggtgcaggaggtggtgtggggcgagggggccggggctggggaacccgaggcggaggaggaaggggactttgtgaacagtgggcggggagacgcagaggcagaggccctggcacgcagcgccaacgccctggttcgggcccagcaggggcgcggcacaggaggagggccgggtgggccggagggtggggatgctgagggccccatcacagccctcaccttcctgtacttgcctcggccgccagccgatcccgcccgatacccccgctacctggcgctactggagactctaacccgagacctgggccccacgctgctggttcatggggtcactccagtcacctgcactgatctgtgatgcccctgcctccagggctaggtagaaggccactgtggcccgtggccctgcccttgggacgtggagcccaggggaggtttgaaggggatcctgggcttgggcatcacgcccacctcctttggcagagggaccccagcacactaactctgggtggctgtccccaccgtgcaggggagggagtccgcagcctcccttcactggtgccttgatgctaggggccaggcctcctctgtgactctgggctacctcagtttccccattttggccagactcaccggcccactggggtggtgatgttttcgttctgttttatttttctaactctgctgaccatgaataaaagaccaaaacacta

SEQ ID NO: 19145 - DNA, 1201 bp, Homo sapiens
ggctccaggcctggcatcccggtagccgcagctgtcttttccggcccccgtgcactctccgcccgaggcggagccccccggctcgcggggatcgcccccgagcgctgcgtcctgcgggtgggtcacctaacccatttgtggcttcctctacctgtgctcagccatggccagcgagagctcacctctgctggcctaccggctcctgggggaggagggggttgccctccctgccaatggggccgggggtcctggaggggcgtctgcccggaagctgtccaccttcctgggtgtggtggtgcccactgtcctgtccatgttcagcatagttgtttttctgaggattgggttcgtggtgggtcatgctgggctactgcaggccctggccatgctgctggttgcctacttcatcctggcactcaccgtcctctctgtctgtgccatcgccaccaatggagccgtgcaggggggcggagcctacttcatgatcagccgcacactggggcccgaggtcgggggcagcattgggctcatgttctacctggctaacgtctgtggctgtgccgtctccctcctggggctggtggagtctgtgcttgatgtcttcggggccgatgccacagggcccagtgggctccgggtcctgccccagggctacggctggaacctgctgtatggctccctgctgctgggccttgtgggtggggtctgcaccctgggagccggcctctatgcccgggcctcattcctcacattcctgctggtctctggctccctggcctctgtgctcatcagttttgtggctgtggggccgagggacatccgcttgactcctaggcctggccccaatggctcctccctgccgccccggtttgaggccactgtggcccgtggccctgcccttgggacgtggagcccaggggaggtttgaaggggatcctgggcttgggcatcacgcccacctcctttggcagagggaccccagcacactaactctgggtggctgtccccaccgtgcaggggagggagtccgcagcctcccttcactggtgccttgatgctaggggccaggcctcctctgtgactctgggctacctcagtttccccattttggccagactcaccggcccactggggtggtgatgttttcgttctgttttatttttctaactctgctgaccatgaataaaagaccaaaacacta

SEQ ID NO: 19146 - DNA, 4124 bp, Homo sapiens
aaatgtgcagcaggcaggctggtatagtgaaggagatcaacattgcccggcacgaggccaatttctagtccaacaatctcatctgttaggcagtgattgttttacagatgcagaaactggcactcagaggatatgagtgacttgggcaaagccacatggctggggcctggctgcacttgggttcagtgcttggagctatggcaacttcctcacgtccatttcagtcttttcccttaatgctcacccctgcttccactttcagtcatgatcagccgcacactggggcccgaggtcgggggcagcattgggctcatgttctacctggctaacgtctgtggctgtgccgtctccctcctggggctggtggagtctgtgcttgatgtcttcggggccggtctgtgctctgtccgatctgggcagtgctgcgggtttacagggtctgggagtgtgggatcatgagggagaaggtcctctccagcagaggggcagactgagccattaccttggctttctggagcttctgctgtgtggccagcatcgtgcaggagatatggacatccctgagattgtccttgcctgcagggagctaaccatctaatcggagagaccaggctaagattcttaaaactgacagagaccaccagggagagctaagatgctaggatggagctaagagggaagtggggaaggtggactctctgatagcaggtgggcagaggagggcttgtcttgctttgggtcacagttggggctgggtcccttcttatttatttatttattttgagatggagtcttgctttgttgcccaggctggagtacagtggtgtgatctccgctcactgcaacctttgcctcccgggttcaagcaattctcctgccttagcctcttgagtagctgggattacaggcactcaccaccacgcctggctaatgtttgtatttttagtagagacggggtttcaccatgttggccaggctggtcttgaactcctgacctcaagtgatccacctgcctcagcttcccaaagtgttgggattacaggcgtgagccccggcgccctgccccttctttttttttttttttcttgagagaaggtctcactctgtcaccaaggctggagtgcagtggtaccatctcggctcaatgcaacttctgcctcccgggctcatgcgattctcccacctcagcctcccagtagctggactacaggcatgcctccccacacctggctaattttgcagtttttgtggagctggggtttcacaatgttgcccaggttggttttgaactcctggactcaagcaatcctcccacctcggcctcccaaagtgctggaattatagatgtgagccgcccaccatgcccggctggtggggtgccttaggatcgggccttctaactctgtccctacctctctccagatgccacagggcccagtgggctccgggtcctgccccagggctacggctggaacctgctgtatggctccctgctgctgggccttgtgggtggggtctgcaccctgggagccggcctctatgcccgggcctcattcctcacattcctgctggtctctggctccctggcctctgtgctcatcagttttgtggctgtggggccgagggacatccgcttgactcctaggcctggccccaatggctcctccctgccgccccggtttggccacttcaccggcttcaacagcagtaccctgaaggacaacttgggcgctggctatgctgaggactacaccacgggagccgtgatgaattttgccagcgtctttgctgtcctctttaacggctgtacaggcatcatggctggggccaacatgtcaggggagctgaaggaccccagccgggcgatccctctgggcacgatcgtcgccgtcgcctacaccttcttcgtctatgtcctgcttttctttctctccagcttcacttgtgacaggaccctgctgcaggaagactatgggttcttccgcgccatcagcctgtggcccccactggtgttgatcggaatctatgccacagcgctctcagcgtccatgagctcgctcattggtgcctcccgcatcctccatgccctggcccgggatgacctctttggcgtgatcttggcaccggccaaggttgtgtcccgagggggaaacccctgggcagctgtactttattcttggggcctggtgcagctggtgctcctggctgggaagctgaacacactggctgctgtggtcactgtcttctacctggtggcctatgctgccgtggacctgtcctgcctgagcctggagtgggcctcggcccccaacttccgccccaccttcagcctgttctcctggcacacctgcctgctgggggtggcctcctgcctgctcatgatgttcctcatcagtcctggcgcggctggtggctccctgctcctcatgggtctgctggctgccctgctcaccgcgcgaggaggccccagtagctggggctatgtcagccaggccttgcttttccaccaggtgcgtaagtatctgcttcggctggacgtccggaaggatcacgtgaagttctggcggccccagctgctgctcctggtggggaacccccggggcgccctgcctctgctgcggttggccaaccagcttaagaagggggggctgtatgtgctgggccacgtcaccctgggagacctcgactccctgccctcggaccctgtacagccgcagtatggggcatggctcagcctggtggaccgtgcccaggtgaaggcttttgtggatctaaccctctcaccctccgtgcgccagggggctcagcatctgctgcgaatctccggcctcggtggcatgaagcccaacacgttggtcctaggtttctacgatgacgctccaccgcaggaccatttcctgacggacccggctttctctgagcctgcagacagcaccagggagggcagttccccagctctgagcaccctgttccctcctccccgggctcctgggagcccccgggccctcaatccccaggactatgtggccacggtggccgacgccctcaagatgaacaagaatgtggtgctggcccgggccagcggggccttgccccctgagcggctgagccgggggtctgggggcacctctcagctgcaccatgtggacgtgtggcccctcaacctgctgcggccccggggtgggcccggctatgtggatgtctgcggcctcttcctgctgcagatggcaaccatcttgggcatggtgcccgcttggcatagcgcccggctccggatcttcctgtgcctggggcctcgggaggcgcctggggcggccgaggggcggctgcgggcactgctgagccaactgaggatccgggctgaggtgcaggaggtggtgtggggcgagggggccggggctggggaacccgaggcggaggaggaaggggactttgtgaacagtgggcggggagacgcagaggcagaggccctggcacgcagcgccaacgccctggttcgggcccagcaggggcgcggcacaggaggagggccgggtgggccggagggtggggatgctgagggccccatcacagccctcaccttcctgtacttgcctcggccgccagccgatcccgcccgatacccccgctacctggcgctactggagactctaacccgagacctgggccccacgctgctggttcatggggtcactccagtcacctgcactgatctgtgatgcccctgcctccagggctaggtagagagggcccaggcaggcggcctatcctgatccttggaggaggaggaagaggaggccactgtggcccgtggccctgcccttgggacgtggagcccaggggaggtttgaaggggatcctgggcttgggcatcacgcccacctcctttggcagagggaccccagcacactaactctgggtggctgtccccaccgtgcaggggagggagtccgcagcctcccttcactggtgccttgatgctaggggccaggcctcctctgtgactctgggctacctcagtttccccattttggccagactcaccggcccactggggtggtgatgttttcgttctgttttatttttctaactctgctgaccatgaataaaagaccaaaacacta

SEQ ID NO: 19147 - DNA, 5999 bp, Homo sapiens
  misc_feature (2812)..(2812): n is a, c, g, or t
ggctccaggcctggcatcccggtagccgcagctgtcttttccggcccccgtgcactctccgcccgaggcggagccccccggctcgcggggatcgcccccgagcgctgcgtcctgcgggtgggtcacctaacccatttgtggcttcctctacctgtgctcagccatggccagcgagagctcacctctgctggcctaccggctcctgggggaggagggggttgccctccctgccaatggggccgggggtcctggaggggcgtctgcccggaagctgtccaccttcctgggtgtggtggtgcccactgtcctgtccatgttcagcatagttgtttttctgaggattgggttcgtggtgggtcatgctgggctactgcaggccctggccatgctgctggttgcctacttcatcctggcactcaccgtcctctctgtctgtgccatcgccaccaatggagccgtgcaggggggcggagcctacttcatgatcagccgcacactggggcccgaggtcgggggcagcattgggctcatgttctacctggctaacgtctgtggctgtgccgtctccctcctggggctggtggagtctgtgcttgatgtcttcggggccggtctgtgctctgtccgatctgggcagtgctgcgggtttacagggtctgggagtgtgggatcatgagggagaaggtcctctccagcagaggggcagactgagccattaccttggctttctggagcttctgctgtgtggccagcatcgtgcaggagatatggacatccctgagattgtccttgcctgcagggagctaaccatctaatcggagagaccaggctaagattcttaaaactgacagagaccaccagggagagctaagatgctaggatggagctaagagggaagtggggaaggtggactctctgatagcaggtgggcagaggagggcttgtcttgctttgggtcacagttggggctgggtcccttcttatttatttatttattttgagatggagtcttgctttgttgcccaggctggagtacagtggtgtgatctccgctcactgcaacctttgcctcccgggttcaagcaattctcctgccttagcctcttgagtagctgggattacaggcactcaccaccacgcctggctaatgtttgtatttttagtagagacggggtttcaccatgttggccaggctggtcttgaactcctgacctcaagtgatccacctgcctcagcttcccaaagtgttgggattacaggcgtgagccccggcgccctgccccttctttttttttttttttcttgagagaaggtctcactctgtcaccaaggctggagtgcagtggtaccatctcggctcaatgcaacttctgcctcccgggctcatgcgattctcccacctcagcctcccagtagctggactacaggcatgcctccccacacctggctaattttgcagtttttgtggagctggggtttcacaatgttgcccaggttggttttgaactcctggactcaagcaatcctcccacctcggcctcccaaagtgctggaattatagatgtgagccgcccaccatgcccggctggtggggtgccttaggatcgggccttctaactctgtccctacctctctccagatgccacagggcccagtgggctccgggtcctgccccagggctacggctggaacctgctgtatggctccctgctgctgggccttgtgggtggggtctgcaccctgggagccggcctctatgcccgggcctcattcctcacattcctgctggtctctggctccctggcctctgtgctcatcagttttgtggctgtggggccgagggacatccgcttgactcctaggcctggccccaatggctcctccctgccgccccggtttggccacttcaccggcttcaacagcagtaccctgaaggacaacttgggcggtgagctgggtgctgccgtggcagggatctcggggtgaggggtgggcagacgtcgggccgggcccgtaaaacctctggatgagcacaggtgtcagagggaatggagggcaggaggtctggactgcagagcagtgcaatttaattcaagcctgtctagcgtgtgcttggccggcagggcaggaggaagcccacaaaacagtccctgctttagaggaacttgtgttctagctgaggagagacatgcattcaggaatcagttaaatagcacagaatggcccagcatgacttaaacagatcaggatcacccaggagtggagagaagggaggcctgactatgggctggggagggcaggagccggggagctggaggtggcctgagatagacaggtgggggattcagccaggagctgggagcagagagggaaggcatctcaggaaagagcttgagaccaggtgcggtggctcacgcctgtaatcccagcattctgggaggccgaggcaggaggatcacctgaggtcaggagtttgagaccagtctggccaacatggtgaaaccctctccccgtctctactaaaaacacgaaaattagctgggcacgctggcttgcacctgtagtgccagacactcgggaagctgagggagaactgattgaacccgggaggaggagccgagattgtgccattcagtgagccgagattgcaccattgcactccagcctgggagacagtgaggttccctctccaaaaaacaaacaaacaaaaaaaacaccataaaataaaaatacaaaaattagccaggggtggtggtgcgcacctgtagtcccagctactcaggaggctgaggcatgagaatctcttgaaccngggaggcagaggctgcagtgagctaagatcgccaccactgccctccagcctgggcttcagaacgagactccgtctcaaaaaaataaataggctgggtgcggtggctcccgcctgtaatcccaggactttcggaggtcgaggcgggtggatcacctgagtccaggagttcgagatcagcctggccaacatggtgaaaccccatctctactaaaaatacaaaaattagccaggcgtggtggcgggcacctgtaatcccagctacctgagaggctgagacaggggaattgcttgaacctgggaggcagaagttgcagtgagccgagatcgcaccactgcactctcgcctgggtgacacagcgagactccatctcaaaataaataaataaataaaattaaaaagttagatgggcatggtggtgcacacctgtagtcccagctacttggcagactgaggcaggaggatcgctctagcccaggaggtagaggttgcagtgagctacgatggtgccactgcactccagcctggatgacagagccagaccctgtctctaaaaaataaataaataaataaaagagcgtggattagggtctggagggaggaatatcggagcactggggggacgtggcaatgtgtctggctgacccagggccagtgcaggaacaggctggggtcttagtgagggcagtgcaggggaggcaagaggaccgtgggaatgtgtggagagggtggctaagaggcctggatccctgagacggatgctgatgcactctcctccctgggaggatcctcctagctggctatgctgaggactacaccacgggagccgtgatgaattttgccagcgtctttgctgtcctctttaacggctgtacaggcatcatggctggggccaacatgtcaggggagctgaaggaccccagccgggcgatccctctgggcacgatcgtcgccgtcgcctacaccttcttcgtctatgtcctgcttttctttctctccagcttcacttgtgacaggaccctgctgcaggaagactatgggttcttccgcgccatcagcctgtggcccccactggtgttgatcggaatctatgccacagcgctctcagcgtccatgagctcgctcattggtgcctcccgcatcctccatgccctggcccgggatgacctctttggcgtgatcttggcaccggccaaggttgtgtcccgagggggaaacccctgggcagctgtactttattcttggggcctggtgcagctggtgctcctggctgggaagctgaacacactggctgctgtggtcactgtcttctacctggtggcctatgctgccgtggacctgtcctgcctgagcctggagtgggcctcggcccccaacttccgccccaccttcagcctgttctcctggcacacctgcctgctgggggtggcctcctgcctgctcatgatgttcctcatcagtcctggcgcggctggtggctccctgctcctcatgggtctgctggctgccctgctcaccgcgcgaggaggccccagtagctggggctatgtcagccaggccttgcttttccaccaggtgcgtaagtatctgcttcggctggacgtccggaaggatcacgtgaagttctggcggccccagctgctgctcctggtggggaacccccggggcgccctgcctctgctgcggttggccaaccagcttaagaagggggggctgtatgtgctgggccacgtcaccctgggagacctcgactccctgccctcggaccctgtacagccgcagtatggggcatggctcagcctggtggaccgtgcccaggtgaaggcttttgtggatctaaccctctcaccctccgtgcgccagggggctcagcatctgctgcgaatctccggcctcggtggcatgaagcccaacacgttggtcctaggtttctacgatgacgctccaccgcaggaccatttcctgacggacccggctttctctgagcctgcagacagcaccagggagggcagttccccagctctgagcaccctgttccctcctccccgggctcctgggagcccccgggccctcaatccccaggactatgtggccacggtggccgacgccctcaagatgaacaagaatgtggtgctggcccgggccagcggggccttgccccctgagcggctgagccgggggtctgggggcacctctcagctgcaccatgtggacgtgtggcccctcaacctgctgcggccccggggtgggcccggctatgtggatgtctgcggcctcttcctgctgcagatggcaaccatcttgggcatggtgcccgcttggcatagcgcccggctccggatcttcctgtgcctggggcctcgggaggcgcctggggcggccgaggggcggctgcgggcactgctgagccaactgaggatccgggctgaggtgcaggaggtggtgtggggcgagggggccggggctggggaacccgaggcggaggaggaaggggactttgtgaacagtgggcggggagacgcagaggcagaggccctggcacgcagcgccaacgccctggttcgggcccagcaggggcgcggcacaggaggagggccgggtgggccggagggtggggatgctgagggccccatcacagccctcaccttcctgtacttgcctcggccgccagccgatcccgcccgatacccccgctacctggcgctactggagactctaacccgagacctgggccccacgctgctggttcatggggtcactccagtcacctgcactgatctgtgatgcccctgcctccagggctaggtagagagggcccaggcaggcggcctatcctgatccttggaggaggaggaagaggaggccactgtggcccgtggccctgcccttgggacgtggagcccaggggaggtttgaaggggatcctgggcttgggcatcacgcccacctcctttggcagagggaccccagcacactaactctgggtggctgtccccaccgtgcaggggagggagtccgcagcctcccttcactggtgccttgatgctaggggccaggcctcctctgtgactctgggctacctcagtttccccattttggccagactcaccggcccactggggtggtgatgttttcgttctgttttatttttctaactctgctgaccatgaataaaagaccaaaacacta

SEQ ID NO: 19148 - DNA, 2657 bp, Homo sapiens
ggctccaggcctggcatcccggtagccgcagctgtcttttccggcccccgtgcactctccgcccgaggcggagccccccggctcgcggggatcgcccccgagcgctgcgtcctgcgggtggctggctatgctgaggactacaccacgggagccgtgatgaattttgccagcgtctttgctgtcctctttaacggctgtacaggcatcatggctggggccaacatgtcaggaccctgctgcaggaagactatgggttcttccgcgccatcagcctgtggcccccactggtgttgatcggaatctatgccacagcgctctcagcgtccatgagctcgctcattggtgcctcccgcatcctccatgccctggcccgggatgacctctttggcgtgatcttggcaccggccaaggttgtgtcccgagggggaaacccctgggcagctgtactttattcttggggcctggtgcagggttcactggcactttctggggctcattgacactttggggtacactggcattctttggtgttcactggcattttgggggtgcactggcactttggaacaacggcacgcctcttggcccttgcccagctggtgctcctggctgggaagctgaacacactggctgctgtggtcactgtcttctacctggtggcctatgctgccgtggacctgtcctgcctgagcctggagtgggcctcggcccccaacttccggtgagagactcagatctgtgtccccagagagaagaagggaggactcgggctcaggcgtggggctggggactgcagcctcgtgtgcggcctgccctgagtttctgtccctcctcccctccatgcccgcagccccaccttcagcctgttctcctggcacacctgcctgctgggggtggcctcctgcctgctcatgatgttcctcatcagtcctggcgcggctggtggctccctgctcctcatgggtctgctggctgccctgctcaccgcgcgaggaggccccagtagctggggctatgtcagccaggccttgcttttccaccaggtgcgtaagtatctgcttcggctggacgtccggaaggatcacgtgaagttctggcggccccagctgctgctcctggtggggaacccccggggcgccctgcctctgctgcggttggccaaccagcttaagaagggggggctgtatgtgctgggccacgtcaccctgggagacctcgactccctgccctcggaccctgtacagccgcagtatggggcatggctcagcctggtggaccgtgcccaggtgaaggcttttgtggatctaaccctctcaccctccgtgcgccagggggctcagcatctgctgcgaatctccggcctcggtggcatgaagcccaacacgttggtcctaggtttctacgatgacgctccaccgcaggaccatttcctgacggacccggctttctctgagcctgcagacagcaccagggagggcagttccccagctctgagcaccctgttccctcctccccgggctcctgggagcccccgggccctcaatccccaggactatgtggccacggtggccgacgccctcaagatgaacaagaatgtggtgctggcccgggccagcggggccttgccccctgagcggctgagccgggggtctgggggcacctctcagctgcaccatgtggacgtgtggcccctcaacctgctgcggccccggggtgggcccggctatgtggatgtctgcggcctcttcctgctgcagatggcaaccatcttgggcatggtgcccgcttggcatagcgcccggctccggatcttcctgtgcctggggcctcgggaggcgcctggggcggccgaggggcggctgcgggcactgctgagccaactgaggatccgggctgaggtgcaggaggtggtgtggggcgagggggccggggctggggaacccgaggcggaggaggaaggggactttgtgaacagtgggcggggagacgcagaggcagaggccctggcacgcagcgccaacgccctggttcgggcccagcaggggcgcggcacaggaggagggccgggtgggccggagggtggggatgctgagggccccatcacagccctcaccttcctgtacttgcctcggccgccagccgatcccgcccgatacccccgctacctggcgctactggagactctaacccgagacctgggccccacgctgctggttcatggggtcactccagtcacctgcactgatctgtgatgcccctgcctccagggctaggtagagagggcccaggcaggcggcctatcctgatccttggaggaggaggaagaggaggccactgtggcccgtggccctgcccttgggacgtggagcccaggggaggtttgaaggggatcctgggcttgggcatcacgcccacctcctttggcagagggaccccagcacactaactctgggtggctgtccccaccgtgcaggggagggagtccgcagcctcccttcactggtgccttgatgctaggggccaggcctcctctgtgactctgggctacctcagtttccccattttggccagactcaccggcccactggggtggtgatgttttcgttctgttttatttttctaactctgctgaccatgaataaaagaccaaaacacta

SEQ ID NO: 19149 - DNA, 2519 bp, Homo sapiens
ggctccaggcctggcatcccggtagccgcagctgtcttttccggcccccgtgcactctccgcccgaggcggagccccccggctcgcggggatcgcccccgagcgctgcgtcctgcgggtgggtcacctaacccatttgtggcttcctctacctgtgctcagccatggccagcgagagctcacctctgctggcctaccggctcctgggggaggagggggttgccctccctgccaatggggccgggggtcctggaggggcgtctgcccggaagctgtccaccttcctgggtgtggtggtgcccactgtcctgtccatgttcagcatagttgtttttctgaggattgggttcgtggtgggtcatgctgggctactgcaggccctggccatgctgctggttgcctacttcatcctggcactcaccgtcctctctgtctgtgccatcgccaccaatggagccgtgcaggggggcggagcctacttcatgatcagccgcacactggggcccgaggtcgggggcagcattgggctcatgttctacctggctaacgtctgtggctgtgccgtctccctcctggggctggtggagtctgtgcttgatgtcttcggggccgatgccacagggcccagtgggctccgggtcctgccccagggctacggctggaacctgctgtatggctccctgctgctgggccttgtgggtggggtctgcaccctgggagccggcctctatgcccgggcctcattcctcacattcctgctggtctctggctccctggcctctgtgctcatcagttttgtggctgtggggccgagggacatccgcttgactcctaggcctggccccaatggctcctccctgccgccccggtttggccacttcaccggcttcaacagcagtaccctgaaggacaacttgggcgctggctatgctgaggactacaccacgggagccgtgatgaattttgccagcgtctttgctgtcctctttaacggctgtacaggcatcatggctggggccaacatgtcaggggagctgaaggaccccagccgggcgatccctctgggcacgatcgtcgccgtcgcctacaccttcttcgtctatgtcctgcttttctttctctccagcttcacttgtgacaggaccctgctgcaggaagactatgggttcttccgcgccatcagcctgtggcccccactggtgttgatcggaatctatgccacagcgctctcagcgtccatgagctcgctcattggtgcctcccgcatcctccatgccctggcccgggatgacctctttggcgtgatcttggcaccggccaaggttgtgtcccgagggggaaacccctgggcagctgtactttattcttggggcctggtgcagctggtgctcctggctgggaagctgaacacactggctgctgtggtcactgtcttctacctggtggcctatgctgccgtggacctgtcctgcctgagcctggagtgggcctcggcccccaacttccgccccaccttcagcctgttctcctggcacacctgcctgctgggggtggcctcctgcctgctcatgatgttcctcatcagtcctggcgcggctggtggctccctgctcctcatgggtctgctggctgccctgctcaccgcgcgaggaggccccagtagctggggctatgtcagccaggccttgcttttccaccaggtgcgtaagtatctgcttcggctggacgtccggaaggatcacgtgaagttctggcggccccagctgctgctcctggtggggaacccccggggcgccctgcctctgctgcggttggccaaccagcttaagaagggggggctgtatgtgctgggccacgtcaccctgggagacctcgactccctgccctcggaccctgtacagccgcagtatggggcatggctcagcctggtggaccgtgcccaggtgaaggcttttgtggatctaaccctctcaccctccgtgcgccagggggctcagcatctgctgcgaatctccggcctcggtggcatgaagcccaacacgttggtcctaggtttctacgatgacgctccaccgcaggaccatttcctgacggacccggctttctctgagcctgcagacagcaccagggagggcagttccccagctctgagcaccctgttccctcctccccgggctcctgggagcccccgggccctcaatccccaggactatgtggccacggtggccgacgccctcaagatgaacaagaatgtggtgctggcccgggccagcggggccttgccccctgagcggctgagccgggggtctgggggcacctctcagctgcaccatgtggacgtgtggcccctcaacctgctgcggccccggggtgggcccggctatgtggatgtctgcggcctcttcctgctgcagatggcaaccatcttgggcatggtgcccgcttgactgaggacagcatagacgacaccttcctcccagtgcctgaatacataaaccagtccgttcccaaaaggcccgc

SEQ ID NO: 19150 - DNA, 585 bp, Homo sapiens
gccatgaggaggtgtcaatagagattagagatggtctttgtgctgtgagagagacctcacatttccaaatgccaagtcctttcttcctcagtcaaatgtaccccctagaacatagatacctactaagctgtagatttttgaggggatacagagctgaatccataagatagtggattattcagataagaatttctgtagatagagagtttccaatcaattatgtaccccaacaatgtgaggtcaactacttagactacctcttagcttctacatttagatgtttcaaagtctgttctgatccttaaatttgacacttctctttaatataaacaaagcccttttagtattctttgggattagcttaccacttaataaattccttccaacactatcttctgtgagtcaacaaacagcttcctcctgtgatttgggcctggctaacaacaagttagacttcagacgaataattactaggctgaggcattttccaggtggtacattcccactttgaggaaacttggtcattttacttttgcatttaagatgtccttaggctgaaaataaagtgtcagtgtttgaaatgtc

SEQ ID NO: 19151 - DNA, 393 bp, Homo sapiens
ggctctaccaacacgccagctagtccctacctcagagctacccacagtgacctttctagagaaatctccattaaggcccaaagagagcccattcatttcattctgtggaccctaggtccaggaagaaacatccttacggactctcagcaccctttgcgtaacagtaacagcttggcactcacccaccagagaccacttccacaacagaaagaggaccttgctgtcttctccctcttagaagaagggcaggagaactcatgcatagcgtatttcccaaaggctggcaaagaatgtaatcccagcctctgggtgtgggcaagtccatcctaaaagctatgctggcttaggtgggccacagtaggaaaaagtattttctgcagtacagagatgttt

SEQ ID NO: 19152 - DNA, 944 bp, Homo sapiens
aaaagattggacagataaattgttccttcaatggcaatgaaaatggatgttacagagatacatggatacatggaacaccctgagtgaatcttacatttattttgcagaagatatcaaaccaaacagagcacatattattccattcatgtaaaggtcagtaacagccacatataaactatattttggagattcatacacaatagaaaaaactatttaaaaagtcagataatactgattttaaaaatcgggatgttgaattcatctgggtgttgagggaggagcacattgtgacccagacagagcactcaggactctgagcacactaatactctgtattgccttcagtggtagttacatcagtatcaacttaagaaaaatttattaaaatctacataaataataaataattttctatatgtatgttatatttcccaatgctatgaaatgaattgtgtctccccaaaatgtatgtgttgaagtcctagcccccagcacctcagaatgtgaccgcatttggagatggaaccctttttttttatttttgagacacagttgcccagactagagtgtagtggcgtgatctcggctcactgacctctgcctcctggctcaaacaattctcatgcctcagcctcctgaggagctgggattacaggtgtgtgccaccgcatatggctaatttttgtatttttagtagaaatagtagacgccatgcataaataccaattctctccaaattgatctatttctcaatctacacatattctactggtgatctcatccaaggttgtggctgcaagtacaccactacaagccaaaaaattatgtgtatatctccatctcaggcttgtcttccaaactccatggtcatatatctaatattgtatttcttcttgtcttctctttgtatttgtgtagaacaaaagaaaaaaaattttaaagta

SEQ ID NO: 19153 - DNA, 348 bp, Homo sapiens
tgtgcaaaggtgggaaagaccagagtgaacaacggccatttacgttctgaacatttactcagtctttcaattggtgtgactgacaagctgaagtgcaatggcaaatagagacagcagagagtgcacaatcactaatgtgggactgttagccaaggagtggagaggtatgtgtgggaaagaaaccactctatttcagcagtggaagtgagagaagaccacatccactctcttgaaccaaatcaaatagctcatgaatgacactttggctttatttcaaaataatttttatgcaagtattgagttcacaagactgtcacctggacaagaggcaatgaagatgtcatttct

SEQ ID NO: 19154 - DNA, 425 bp, Homo sapiens
ggcttggaattgttcaagctgtttactgttttttaaccaatactcccagctttcctctaaaaaaaattaatagctttattttaaggtctgtatattgtgtaaataaatgacattaaagagatacgggtttttactattgtttgacaaaggtttcttgggacttctctcaggagtgacatattctttgtcagtatctgggggacaatagaagagggattattactaaacctatcattactttagtcatcccactttacaatatgtctgaactcagaacgttcctaatatatgggccagaataccttgttcctaataccactctttgcccttaataggaattacataaaacagagaagccataaaactatacctcaggtttatgagcagagacaaagggttttattaaaggcttaccagataccaat

SEQ ID NO: 19155 - DNA, 189 bp, Homo sapiens
ttcattgttgtgggagtgggctcctgctaaaaggataagtttggcccccatcttgtctctctgtctaatgtgcttgcttccaccttccactcttctccatgggatgacccttgtcagatgcttgtgctatgctcttggacttcccagtctctagaaccatgagtcaaataaatttcttttctttataaa

SEQ ID NO: 19156 - DNA, 545 bp, Homo sapiens
tcgattccatgtctttgctgttgtgaatagtgtgctgcaatgaacatgtgcatgcgtgtgtgtagaagcacttgatttcaagctaccaatttccatactagtctaagtaattaatactaactgttcatggaagacaaacttccaaactctcaatgttgaatgcagcaatgtatttctcacattataattggatgtggatgaggcatccttccttcatctaaagcttagccacctgggaatgccgggtgtctgaggtcacaaagaccatggtgaagggaaggactaatggatgtgttaccctagcttttaaccatcttgtcccatagttaatacacaccactcttgcttgcgtctacttgctgggaactagtctgatggctccaatctcaattcaagtatggctaggaagtttaggagaacacatgtaatatttggtgaggattaaatctctttctcacactattacacatcgagcttcctttgtaaaactgctttcacatcccatgattaatattaatctcactgtttcctagaggtgagacagc

SEQ ID NO: 19157 - DNA, 374 bp, Homo sapiens
ttcctttagcattaatgaatgacattcttttaaacaagactgtgtcctaaggatgaatcacatgagtgacaattgataacgtgaattttaatattttaaaaaattgattaaggccaaaaacgccagagtaatcaggacagtgtggaattagtataaggacagacttgagagcccagccacagacttgcaggtgtagtcacccggtgtgtggcacaggggccacagcaatgacgcagggggaaaatggtcctgactcagttggaaatttgtataaaagtttgcttgcagatggattactgacttaaatgtaaaagctaaaacaataaggttttagaagatggcatggaaaaatattttcatgattgtggaatggg

SEQ ID NO: 19158 - DNA, 294 bp, Homo sapiens
aggttacaattctattccaggaatgattactgtgctctaggtgacagaatactagagcttatctagtgtaggtcagacagctgcctctggggtcaggagagtggggtctgtgatcatagaagggagttgaggaagaaaaggggacatggaggtgtagaagatttaaattttgtggctgggtgcagtggctcacacctgtaatcccaacactttgggaggccgaggtgggaggattgcttgagcccaggagtttgagaccagcctgggcaacgaagtgagacttggcctccacac

SEQ ID NO: 19159 - DNA, 302 bp, Homo sapiens
ggcgtgcagcggcccttctccaagccactctcgggctgtgctgtccaaggctgtgcgggaggagggcaggtgggaaggttctgacgttgcagagccccccttcctccctccttgtcctccctcttcaagttcctcccttccccagctaagagccccccagccattcctgatcgatgggcccaggcatggcaggggtgagggggtgggagagtggttcttgaggacggctgggcatctgcaggggtccaggcctggctgactggaggggctggggccccgggggttgggaggcacagtgggag

SEQ ID NO: 19160 - DNA, 907 bp, Homo sapiens
tatacatacaatttctgcctattgatgagtatgtacacccacgagaccagtggtttgtaactgagggagggttaatagttttgttctcttccaaggggacatttggcaatgtctggaagcattttcgactgtcaggactgggaggatggtgctactggcatttggtaggtagaggccaggcatgctgctgggcatccagtagtgcacaggacagccaccgcaggaaagaattatccagtccaaaatgtcagcaatgcagcctttgagaaacccaacactgaacaatgagcctctagtgcctctttttgtctcactgcaaaaatgggcttgggttcaacatgggcttcctatattttatcttcccattatagtactggtgggtgtatgaaacatgaattaatagaaaatggtgttttctggaagaagtcaacaaggaaggtgagctatgaattagtggcatagcaggtaactggtattgtggacagagccagaagtttacaacagacctggtagtggatttgtttatgggctttggggaaatggactgttttgaaccctaggaagtctagctttttttgggtaaacatcacctcttaaatgttaactcttctaagtgatggattattaaacaggtgctgatgaaagcatcttaataaaacacatcacacagttgtgttactccttcacgctgagctctgcctaatgaagattggctgtgtagagccactactgcttcattttgttgcattttgtatacacagttcagaaaattaagagacaagggaactagtattgagtagaataataaaaggactttcttgaatgatggcacttctgattttttttttccctgccctacgtgactggacgaataagggaggaagatgtcatggggcctctaaacagc

SEQ ID NO: 19161 - DNA, 1055 bp, Homo sapiens
  misc_feature (42)..(42): n is a, c, g, or t
ggatgctggggacacacggggcacagtgcagccagaggttgngccatcatagagctcacattctagtggaatcagacaggggggttacaggaaatattcaagtaaacaatataaaatgagatcacttgatgatacatggatacatgttacatacatgatgagacagagtaagagaatggggaaagggtttttagatgggggaatggcaggcttttccgaggctgaaagagatccaacccacttctatttcttcaggctcccagtgatatgaaaaagtgccaaacaggactataaaattgtggtctactgtaaatggtttgcagtaaaagttctcaaccagcttccactcaaccaactcaccagttagacaatgggccctctcctgtgtttaaaacagtccggtgcccacctgggtccacatgcagctggcaggtgtttgctagtgtgcccacccatgtctgttccccccacgtgagttatgtgcttacaacgagtcgtttctttgcattttccaactttcttacatttatatttaattaaagatgatctaaactgagaaatgaatgtgaaaagaaacaaagctcttttttgtttggtttttaactaaattaaatgtttttaacaagttgaaacgtgaatcatttaaaaaattgctatcagatccacagagggcaatccactcatatagttgactataaagcttgaggaggaattcataaaaatctaaaggttttacacatgcagattgattaataaatgtcgagatatggtccacttcaaaaataaggaaagtaattattgtagatgttgcactagagcatagtttatgcaggaaatgcaccagagaccttctactggtgaccccatattcgaagaaaaaaagcctctgctctacatcaaaaggtgtcaagtacacttgtgttttcaatgaaaatataaaatgtttaaggtatatttgcaccatcatttaaggttacccactttagccatttttaaattcactgatcaatcacatggggagtactcctaacgtacctacagcaaactaatgcttt

SEQ ID NO: 19162 - DNA, 1001 bp, Homo sapiens
  misc_feature (42)..(42): n is a, c, g, or t
ggatgctggggacacacggggcacagtgcagccagaggttgngccatcatagagctcacattctagtggaatcagacaggggggttacaggaaatattcaagtaaacaatataaaatgagatcacttgatgatacatggatacatgttacatacatgatgagacagagtaagagaatggggaaagggtttttagatgggggaatggcaggcttttccgaggctgaaagagatccaacccacttctatttcttcaggctcccagtgatatgaaaaagtgccaaacaggactataaaattgtggtctactgtaaatggtttgcagtaaaagttctcaaccagcttccactcaaccaactcaccagttagacaatgggccctctcctgtgtttaaaacagtccggtgcccacctgggtccacatgcagctggcaggtgtttgctagtgtgcccacccattccaactttcttacatttatatttaattaaagatgatctaaactgagaaatgaatgtgaaaagaaacaaagctcttttttgtttggtttttaactaaattaaatgtttttaacaagttgaaacgtgaatcatttaaaaaattgctatcagatccacagagggcaatccactcatatagttgactataaagcttgaggaggaattcataaaaatctaaaggttttacacatgcagattgattaataaatgtcgagatatggtccacttcaaaaataaggaaagtaattattgtagatgttgcactagagcatagtttatgcaggaaatgcaccagagaccttctactggtgaccccatattcgaagaaaaaaagcctctgctctacatcaaaaggtgtcaagtacacttgtgttttcaatgaaaatataaaatgtttaaggtatatttgcaccatcatttaaggttacccactttagccatttttaaattcactgatcaatcacatggggagtactcctaacgtacctacagcaaactaatgcttt

SEQ ID NO: 19163 - DNA, 239 bp, Homo sapiens
ccggtcctctagtttcctcatagccctatttttgggtacattggtggatttcaaatgcctacagttgagcagccgaaggattctaagaaaattttgcttgtatttcaaaggctcatgtccccagccccattcactacaccctcagcagagcccagcgtggagcaaccttgtcccttcattccccaaatcttcattttatatagtcatttagtaaatatttgttaagtgcctcctgtgat

SEQ ID NO: 19164 - DNA, 585 bp, Homo sapiens
tccagatcaaggccagtttgcacaaccttaggcccaagggacagttgtttgcaaggggtgtgcactgagtagattgatgtttgcactggtgtttccaccgacgtttaaaggaggatgttcatgctggggcacagaacccaggtggaaagggaagaactgtgggtcagactttaattggtgtttcccacccaggaatacatattttaggggcaggtctgggcatggcacagctgtctgctatctctgcctcacttactctgcggaagtaaacaaacccccctgggttaacccaagtctagactgtgtccagcagctgtttcttgtgaggtagccctgagtagtgttgcttgtcttttgacctggtggctcaattggctaatatcccaaggtgcagaggacccccactgaggatgctgagtgggatggacctgtcctgcaggagcgggcgtgcttgccctctaatgcatttttgctttttgtaagaaaagaggacaaatgtctaatgtgcttttcagttcttttccaaattcagacaatagaggaaattagaggggattcaataaacccagaatattgttgtgtagc

SEQ ID NO: 19165 - DNA, 418 bp, Homo sapiens
gttggaaagtccaaattcagtgtgtgttgaacttcaggcaagtgttcatgaaaatgtacctggaactagtgggccctcctcgctgtttggctccagatcacactggccacgagttgtcttctcgggggggtggatccgcggtcaccagacttcatgccttaatagaacaaaaagctatggtctgcgctgggcgcggtgggtcacacctgtaatcccagcactttgggaggccgaggcaggcacatcacttgaggtcaggagttcgagaccagcctggccaacatggcgaaaccccgtctctacaaaaaatacaaaaaaccaactagaaaaccgagttccgatgcctggttccccaccaccccacctgcttccagtccagttaaatcaaaatcactagggctggtgtccaggcactttg

SEQ ID NO: 19166 - DNA, 948 bp, Homo sapiens
actgcttttttaatctttagatgtgtatattttacatttgttagggaacacagagtatagtctacagcattgtgtacatttcattacctgtcatcttttagcttaaaataataaatgtttcgcaagtgccacccccttcaaaaacatctcatgttctttcctactgtggatgactgagatggtgtgaatatttattgatttgtttaaatgtgtcaaccattatatggtacctgtaacccaagactaaaagttttttttttaatgggttctgcaaatggaatataaaaattggttatcattttattatttatttttgagacagagtctcattctgttccccaggctggagtgcagtggcgggatatcggctcactgcaacctctgcctcccgggttcaggcgattctagtgcctcagcctccccagtagctgtgattacaggcgtgtgccatcacacctggcaaatagtagagatggggtgacggggtttcaccatgtcggccaggctggtcttgaactcgtggcctcaagtgatctgcccgccttggcctccaaaagtgctgggattacaggcatgagtcacaacgtccagcccaaaaattggtttataattaaggaaaatgcagcacaatgtttaactgcattaagttattggataaaaagacaaatacacttgtaggagagcttctgtggtttactgttcgaaggcacaaatgcctgttgctttggcttccatatcagtcagtataaaaatcacttgatgtgctttgtgcaaaatttccaggaccttatgttttatatgggtgtcatgaagtgaatggctgaaagctcttcatagaaggaaggtggtttacatctgtgtgcctaggtgagactgttttagtaggtttcatagcagagtaacaaacaggagaaaacagcttctaatatttgtcatgatgtagtctta

SEQ ID NO: 19167 - DNA, 575 bp, Homo sapiens
gtaataatgacattgtggttatgttacaaaaaggagtcatttcagaaacagactgaaatatttacaaataaaatcatgtgttgtctgggacttacttcaaaataatgtgtgagtgtagggaatgggcagggttgcagtagggacaggattggccatgggttgatggttactgaggctgagcgatggcatgtgaggttttattattttattgtttactttcatctattttcaaaaagttaaaaaatcagccctccctttgctgaaaaaagaaaaaaagaaaagaaaaactacaggttttgtccctgcctcctggagctttcagttgtagagagaaagcaacacttactgagaaactaaaagatgatgtgtgttgtaaaatgagagtgcagggtgacattgcaattgagcaagctatcttgaggtagagagagaaggtagtcaaagattttgttgacagtttagttagaactaaaattgatagcgccattgtactccagtctgtcacagactgagatattatctcttaaaaaaaaaatggccgggcttactttgggaggccgaggcaggtggatcac

SEQ ID NO: 19168 - DNA, 598 bp, Homo sapiens
ttcagtgatggattttgcttccaggttttcagattataagcaattctgcaaaatgtcattatctggttggaactaagttcatataattgtcttaatggcatgcttaactagcttttgcaagtacagttttcttcagtatgtttctactgacctgatcattcaaaacactcttttaatgttttctaccaagccacacctccttcttgatggtaaggacaaaaacaactatgagatatttcgtattttgaatgccccacaaataaacagatattccaaatacggcagtgaattaaatgttttcaatagggggaaaatgaggaatctcctgtcaggaaatgcccaagggaaaggttgttatggaaagggaaaacatccattatgggcaagtttcttgtttacacaaatttcgggttattacagatcagaccatgtcccttgaactaccactgcacactgggaaaattcattcattcatagtagcgtccttccacacagtattcagttttccatttaccttgtttgctaacacccacgttataaagagttgtcactgattacataaaggatggtttgccaatcaggatatgcatacatggcc

SEQ ID NO: 19169 - DNA, 491 bp, Homo sapiens
atcttacacctcagctattacaactctgctttcagacttctctggaaaagtaaagtgcacattttccagaaaattctttcagagaaaatattgctgctggatgccagatatctgtctaagacctgtagaaatagtcgtttcaagggtacaagatccaggctcccagattagccttgaaactatcattatttcatcctagctttgcttaatattattttttaatctttttgcaaatctcccacacctgtttgatgagtgttaattcctgcattgtttccttgatgctgtcttcaacctagaccacattaaggaacctgctcaattcagttagctgggtgtggtgcctggcacctgtaatcccagctactcaggaggctgaggcaggagaattgcttgaacccaggaggcggatgttgcagtcagccgcaattgcaccagtgcactccagcctgggcaacagtgagactccacctcaaaaaaaaaaaaaaaaa

SEQ ID NO: 19170 - DNA, 425 bp, Homo sapiens
atgactccatttatacacacagaatgcacgtagatgtttggatttgtcttaattatccgacagatggcataaatactttccggcagtctgctcagtggggctgtgctgacttgggaggttagaaacaaactgagcccgtgactgccaggtaccactcgtgtctccatatttcccatgcagcaatagctcctgctgtagtcacagtgactttgcaagcctacccaaggggaatgtagacaatttagtaggaaaataatatttcttaccaaaatgtcttggccaagcacagtggcttacgcctgtaatcctaatactttaggaggctgaggtggggaaatcacatgagcccaggaatttgagaccagcctgtgcagcatggccaaaccccctctctacaaaaaatgagccagggatggtggcacatg

SEQ ID NO: 19171 - DNA, 600 bp, Homo sapiens
ctctgttgcccaggctggtctcaaactcttgggctcaagcaatactcctgtcttggcctcccagaatgttgagatcagaggcatgagccatcacactcagctgtttttaaccatttaaaaatgtttaaattctgtggcattaagtacattcatactgttgtgcaaccatcaccaccatccacctccagaactttttcattttccccagttgaaactctatacccattaaatactaacttctattccatccttccctcagcccttggccaacagcattctactttctgtctctacggatttgacactttagtagcctcatgtaggaagaatcataatacttgtctttttgtgactggcttatttcacttagcataatattttcaatgttcatccattttgaagctccatgtgagtgggcaggaacttgttaactggaggccttcactgagaagtgataaggtgatgaatacctgccaggtgcagtggctcacacctgtactccagcactttgggaggccaaggcaggaagatcatttgagcccaggaattcgagaccacccttggcaatatagtgagaccctgtgtctaccaaaaaaaaaa

SEQ ID NO: 19172 - DNA, 161 bp, Homo sapiens
aaccaccatgcacactgcctttcacgtacacatgaatagaaaaggcaggctgtaaatattcagggcccagtgacttacaaaagtaaatacctgatctgtaaggaaagtagcaagtctgattgcatttaattaatttaacttcccttttaaaattcatcttc

SEQ ID NO: 19173 - DNA, 453 bp, Homo sapiens
cccacagtaggtattaatgggagtttacctttactaagtaatttttgcatatatgtgatatttaaatttgtttacattgtatatatcactctaagaataccacagagtataatgtataattaaatacagatgaagaaaatctaataaattaagcacagtcaattcctgatgattttatattagggttatctcccccacccgccaacttaaaacactccaaggccactgttacctggctcttatactcaaaacgatcaaaatatttttataaggagcttagtaataaaaacaattcactattgtttcctcattactcagcacgtggtagatgtttcatgtatttatgtgtatatagagagatacatatatctctacacacacacacacacacacagacatatatataatgaaagagatccatacttaaagaataaagaagaaacataatttttg

SEQ ID NO: 19174 - DNA, 412 bp, Homo sapiens
ctgcccatcactgtccacatttctatcagcattttggttataaccacttaaccagtttctaaggatctccaaactttccctcatcttcctgtcgtcttttgagtcctccaaactcttccaatctctacccattacctagttccaaagccacttccatattttcaagtatctttatagcaacatcccactcctggtaccatttttctgtattaggctgtttttgaatttccatgtagaaatacccaaggctaggtaacttataaatgaaagaggtttaattggctgacctgtagatgaggcctcaactggtgaggcctcatcaagcattcaatcatgttggaagtgaaaggggcagacagtgcatcacatagcaagagtgagaacgagagagagaggagaggagccacatact

SEQ ID NO: 19175 - DNA, 409 bp, Homo sapiens
ctactaaacttgacatggctgagaggttgttatggtatacagttgcaaagatgagaagacaccttatttatcagtttgcttggccgatttataatttaagaaattttaacagattgtataagagtctttatttgaatttttgccccagggactgtaatttggggagtatcttgaaattcccattgtggtttcagtttagaaccttttgtatcgtccactggtgtctctaattaagaaccctgcaatacagtgggctctattataaatagtacacatttatctctgtaaatttcaaatcctgttaattgatattatccttattccccaaaccacattttaatttgttgtagtttttaaaattcattatgatttcaagaaactttatgtggaaatcatataaattatctca

SEQ ID NO: 19176 - DNA, 707 bp, Homo sapiens
ctgttcctgcttttccttgtagctaagaggccggtgtcaccatacagcgggtacaatgggcagctgctgaccagtgtgtaccagcccactgagatggccctgatgcacaaagttccgtccgaaggagcttacgacatcatcctcccacgggccaccgccaacagccaggtgatgggcagtgccaactcgaccctgcgggctgaagacatgtactcggcccagagccaccaggcggccacaccgccgaaagacggcaagaactctcaggtctttagaaacccctacgtgtgggactgagtcagcggtggcgaggagaggcggtcggatttggggagggccctgaggacctggccccgggcaagggactctccaggctcctcctccccctggcaggcccagcaacatgtgccccagatgtggaagggcctccctctctgccagtgtttgggtgggtgtcatgggtgtccccacccactcctcagtgtttgtggagtcgaggagccaaccccagcctcctgccaggatcacctcggcggtcacactccagccaaatagtgttctcggggtggtggctgggcagcgcctatgtttctctggagattcctgcaacctcaagagacttcccaggcgctcaggcctggatcttgctcctctgtgaggaacaagggtgcctaataaatacatttctgctttattaaaaaaaaaac

SEQ ID NO: 19177 - DNA, 1838 bp, Homo sapiens
cgggcaggtggggaacctccctgaagagtgccctggtcacagcacccttgaagacagccattggccatggggacccaaccagagcctggcctgggagccaggatggccatccacaaagccttggtgatgtgcctgggactgcctctcttcctgttcccaggggcctgggcccagggccatgtcccacccggctgcagccaaggcctcaaccccctgtactacaacctgtgtgaccgctctggggcgtggggcatcgtcctggaggccgtggctggggcgggcattgtcaccacgtttgtgctcaccatcatcctggtggccagcctcccctttgtgcaggacaccaagaaacggagcctgctggggacccaggtattcttccttctggggaccctgggcctcttctgcctcgtgtttgcctgtgtggtgaagcccgacttctccacctgtgcctctcggcgcttcctctttggggttctgttcgccatctgcttctcttgtctggcggctcacgtctttgccctcaacttcctggcccggaagaaccacgggccccggggctgggtgatcttcactgtggctctgctgctgaccctggtagaggtcatcatcaatacagagtggctgatcatcaccctggttcggggcagtggcgagggcggccctcagggcaacagcagcgcaggctgggccgtggcctccccctgtgccatcgccaacatggactttgtcatggcactcatctacgtcatgctgctgctgctgggtgccttcctgggggcctggcccgccctgtgtggccgctacaagcgctggcgtaagcatggggtctttgtgctcctcaccacagccacctccgttgccatatgggtggtgtggatcgtcatgtatacttacggcaacaagcagcacaacagtcccacctgggatgaccccacgctggccatcgccctcgccgccaatgcctgggccttcgtcctcttctacgtcatccccgaggtctcccaggtgaccaagtccagcccagagcaaagctaccagggggacatgtaccccacccggggcgtgggctatgagaccatcctgaaagagcagaagggtcagagcatgttcgtggagaacaaggccttttccatggatgagccggttgcagctaagaggccggtgtcaccatacagcgggtacaatgggcagctgctgaccagtgtgtaccagcccactgagatggccctgatgcacaaagttccgtccgaaggagcttacgacatcatcctcccacgggccaccgccaacagccaggtgatgggcagtgccaactcgaccctgcgggctgaagacatgtactcggcccagagccaccaggcggccacaccgccgaaagacggcaagaactctcaggtctttagaaacccctacgtgtgggactgagtcagcggtggcgaggagaggcggtcggatttggggagggccctgaggacctggccccgggcaagggactctccaggctcctcctccccctggcaggcccagcaacatgtgccccagatgtggaagggcctccctctctgccagtgtttgggtgggtgtcatgggtgtccccacccactcctcagtgtttgtggagtcgaggagccaaccccagcctcctgccaggatcacctcggcggtcacactccagccaaatagtgttctcggggtggtggctgggcagcgcctatgtttctctggagattcctgcaacctcaagagacttcccaggcgctcaggcctggatcttgctcctctgtgaggaacaagggtgcctaataaatacatttctgctttattaaaaaaaaaac

SEQ ID NO: 19178 - DNA, 2086 bp, Homo sapiens
cagggccctggccaggcccaacaacctctccctcctctgtgcgcctcagcccctacgggcctctggcgcgggctaactaggcctcgctgcgggcccccaggactgcgcaccccaccccccgcgaggccagcagccccgggggaaggcggccggaaaatctcttgtttatcgggctggataagtaccagcctggattcgcttcccaatttctgcggtccagcttcagcagattcctggggccggaggggaaagggtggcaacccacagatccaccccggaacagggagtggggggtggggctggtgggaacctgacctcctggaaaggacggactcggagtcagagccaacgtgtcccggagcgcagaggcccagggggtcgcgctaaacactgtacctcggggaacaaaaccgtgaaggctaattaggacaagtcggagcagggaacggggacgccgggaggggagagcgcgctccgagttgggcagaacctggaacggtcacaggaaacccgggcgcggggtagtcgggccgagggggacctttgcccacggtccagagtggtctggactcggcccacgcgtgagaggagcgcttggtgacgatcccacgtacgcttggtgactggtggaggtcccagagaaggaccgtgcgtgcaaaaggcgaacctcggtgtgcggtgtgtccacgtgtgcaagctggggaggggagggggcgcagaaggcgtgacaaagacggactctgtcttgagtgtgcgcctcgctccggcccgctcccagcgaactgtgcctgaagtgtgtctcacgggagggccaggacgaaggtgacaaaggctaggtgtcccccacggagacgcgccaaggtagccccgcgcgtgtccgtaggcgcgctctctggaagacgcggtggggggtgcgcagggctgcaccctcacaccaattgccccggcgaaggccgagcccagaaagtgagtgcgcgtgagtgtgcgcgcgcccgcatgcgggggcgtggcagtcaacagcaacaacccacacgccggcagggccagaaactcccatctccctcaccagccggaaagtacgagtcggctcagcctggagggacccaaccagagcctggcctgggagccaggatggccatccacaaagccttggtgatgtgcctgggactgcctctcttcctgttcccaggggcctgggcccagggccatgtcccacccggctgcagccaaggcctcaaccccctgtactacaacctgtgtgaccgctctggggcgtggggcatcgtcctggaggccgtggctggggcgggcattgtcaccacgtttgtgctcaccatcatcctggtggccagcctcccctttgtgcaggacaccaagaaacggagcctgctggggacccagctaagaggccggtgtcaccatacagcgggtacaatgggcagctgctgaccagtgtgtaccagcccactgagatggccctgatgcacaaagttccgtccgaaggagcttacgacatcatcctcccacgggccaccgccaacagccaggtgatgggcagtgccaactcgaccctgcgggctgaagacatgtactcggcccagagccaccaggcggccacaccgccgaaagacggcaagaactctcaggtctttagaaacccctacgtgtgggactgagtcagcggtggcgaggagaggcggtcggatttggggagggccctgaggacctggccccgggcaagggactctccaggctcctcctccccctggcaggcccagcaacatgtgccccagatgtggaagggcctccctctctgccagtgtttgggtgggtgtcatgggtgtccccacccactcctcagtgtttgtggagtcgaggagccaaccccagcctcctgccaggatcacctcggcggtcacactccagccaaatagtgttctcggggtggtggctgggcagcgcctatgtttctctggagattcctgcaacctcaagagacttcccaggcgctcaggcctggatcttgctcctctgtgaggaacaagggtgcctaataaatacatttctgctttattaaaaaaaaaac

SEQ ID NO: 19179 - DNA, 354 bp, Homo sapiens
  misc_feature (109)..(109): n is a, c, g, or t
ctgaagtcctataaaaggaagccagggtgtgacattttgagcgagtcatttccaatagccgtggatcagttgacacccacatttccttgtgtgcctgatccggtttttntgtccccacccactcctcagtgtttgtggagtcgaggagccaaccccagcctcctgccaggatcacctcggcggtcacactccagccaaatagtgttctcggggtggtggctgggcagcgcctatgtttctctggagattcctgcaacctcaagagacttcccaggcgctcaggcctggatcttgctcctctgtgaggaacaagggtgcctaataaatacatttctgctttattaaaaaaaaaac

SEQ ID NO: 19180 - DNA, 1868 bp, Homo sapiens
  misc_feature (16)..(16): n is a, c, g, or t
  misc_feature (19)..(19): n is a, c, g, or t
  misc_feature (23)..(23): n is a, c, g, or t
  misc_feature (29)..(29): n is a, c, g, or t
  misc_feature (98)..(98): n is a, c, g, or t
atgcggcattttgttnggntacnaccatnatgaaaccccggttgtgttttaaaaaaccagtgacgcccgaatacggatgaagtacgagtcggtcactnagggacccaaccagagcctggcctgggagccaggatggccatccacaaagccttggtgatgtgcctgggactgcctctcttcctgttcccaggggcctgggcccagggccatgtcccacccggctgcagccaaggcctcaaccccctgtactacaacctgtgtgaccgctctggggcgtggggcatcgtcctggaggccgtggctggggcgggcattgtcaccacgtttgtgctcaccatcatcctggtggccagcctcccctttgtgcaggacaccaagaaacggagcctgctggggacccaggtattcttccttctggggaccctgggcctcttctgcctcgtgtttgcctgtgtggtgaagcccgacttctccacctgtgcctctcggcgcttcctctttggggttctgttcgccatctgcttctcttgtctggcggctcacgtctttgccctcaacttcctggcccggaagaaccacgggccccggggctgggtgatcttcactgtggctctgctgctgaccctggtagaggtcatcatcaatacagagtggctgatcatcaccctggttcggggcagtggcgagggcggccctcagggcaacagcagcgcaggctgggccgtggcctccccctgtgccatcgccaacatggactttgtcatggcactcatctacgtcatgctgctgctgctgggtgccttcctgggggcctggcccgccctgtgtggccgctacaagcgctggcgtaagcatggggtctttgtgctcctcaccacagccacctccgttgccatatgggtggtgtggatcgtcatgtatacttacggcaacaagcagcacaacagtcccacctgggatgaccccacgctggccatcgccctcgccgccaatgcctgggccttcgtcctcttctacgtcatccccgaggtctcccaggtgaccaagtccagcccagagcaaagctaccagggggacatgtaccccacccggggcgtgggctatgagaccatcctgaaagagcagaagggtcagagcatgttcgtggagaacaaggccttttccatggatgagccggttgcagctaagaggccggtgtcaccatacagcgggtacaatgggcagctgctgaccagtgtgtaccagcccactgagatggccctgatgcacaaagttccgtccgaaggagcttacgacatcatcctcccacgggccaccgccaacagccaggtgatgggcagtgccaactcgaccctgcgggctgaagacatgtactcggcccagagccaccaggcggccacaccgccgaaagacggcaagaactctcaggtctttagaaacccctacgtgtgggactgagtcagcggtggcgaggagaggcggtcggatttggggagggccctgaggacctggccccgggcaagggactctccaggctcctcctccccctggcaggcccagcaacatgtgccccagatgtggaagggcctccctctctgccagtgtttgggtgggtgtcatgggtgtccccacccactcctcagtgtttgtggagtcgaggagccaaccccagcctcctgccaggatcacctcggcggtcacactccagccaaatagtgttctcggggtggtggctgggcagcgcctatgtttctctggagattcctgcaacctcaagagacttcccaggcgctcaggcctggatcttgctcctctgtgaggaacaagggtgcctaataaatacatttctgctttattaaaaaaaaaac

SEQ ID NO: 19181 - DNA, 1204 bp, Homo sapiens
tctgaaaacaagttttatttaaataagggtttaaatacattacacataacattaaaactgaaggggaaaaaaaaaccaaaaaccagtttgttacttcacatggcattgggcagctgctgctattaagttgcaagctcttcctgggggcctggcccgccctgtgtggccgctacaagcgctggcgtaagcatggggtctttgtgctcctcaccacagccacctccgttgccatatgggtggtgtggatcgtcatgtatacttacggcaacaagcagcacaacagtcccacctgggatgaccccacgctggccatcgccctcgccgccaatgcctgggccttcgtcctcttctacgtcatccccgaggtctcccaggtgaccaagtccagcccagagcaaagctaccagggggacatgtaccccacccggggcgtgggctatgagaccatcctgaaagagcagaagggtcagagcatgttcgtggagaacaaggccttttccatggatgagccggttgcagctaagaggccggtgtcaccatacagcgggtacaatgggcagctgctgaccagtgtgtaccagcccactgagatggccctgatgcacaaagttccgtccgaaggagcttacgacatcatcctcccacgggccaccgccaacagccaggtgatgggcagtgccaactcgaccctgcgggctgaagacatgtactcggcccagagccaccaggcggccacaccgccgaaagacggcaagaactctcaggtctttagaaacccctacgtgtgggactgagtcagcggtggcgaggagaggcggtcggatttggggagggccctgaggacctggccccgggcaagggactctccaggctcctcctccccctggcaggcccagcaacatgtgccccagatgtggaagggcctccctctctgccagtgtttgggtgggtgtcatgggtgtccccacccactcctcagtgtttgtggagtcgaggagccaaccccagcctcctgccaggatcacctcggcggtcacactccagccaaatagtgttctcggggtggtggctgggcagcgcctatgtttctctggagattcctgcaacctcaagagacttcccaggcgctcaggcctggatcttgctcctctgtgaggaacaagggtgcctaataaatacatttctgctttattaaaaaaaaaac

SEQ ID NO: 19182 - DNA, 1878 bp, Homo sapiens
  misc_feature (29)..(29): n is a, c, g, or t
  misc_feature (1546)..(1546): n is a, c, g, or t
  misc_feature (1549)..(1549): n is a, c, g, or t
  misc_feature (1570)..(1570): n is a, c, g, or t
aaagcaggctggtacggtctgaggtgtangatctcaccagccggaaagtacgagtcggctcagcctggagggacccaaccagagcctggcctgggagccaggatggccatccacaaagccttggtgatgtgcctgggactgcctctcttcctgttcccaggggcctgggcccagggccatgtcccacccggctgcagccaaggcctcaaccccctgtactacaacctgtgtgaccgctctggggcgtggggcatcgtcctggaggccgtggctggggcgggcattgtcaccacgtttgtgctcaccatcatcctggtggccagcctcccctttgtgcaggacaccaagaaacggagcctgctggggacccaggtattcttccttctggggaccctgggcctcttctgcctcgtgtttgcctgtgtggtgaagcccgacttctccacctgtgcctctcggcgcttcctctttggggttctgttcgccatctgcttctcttgtctggcggctcacgtctttgccctcaacttcctggcccggaagaaccacgggccccggggctgggtgatcttcactgtggctctgctgctgaccctggtagaggtcatcatcaatacagagtggctgatcatcaccctggttcggggcagtggcgagggcggccctcagggcaacagcagcgcaggctgggccgtggcctccccctgtgccatcgccaacatggactttgtcatggcactcatctacgtcatgctgctgctgctgggtgccttcctgggggcctggcccgccctgtgtggccgctacaagcgctggcgtaagcatggggtctttgtgctcctcaccacagccacctccgttgccatatgggtggtgtggatcgtcatgtatacttacggcaacaagcagcacaacagtcccacctgggatgaccccacgctggccatcgccctcgccgccaatgcctgggccttcgtcctcttctacgtcatccccgaggtctcccaggtgaccaagtccagcccagagcaaagctaccagggggacatgtaccccacccggggcgtgggctatgagaccatcctgaaagagcagaagggtcagagcatgttcgtggagaacaaggccttttccatggatgagccggttgcagctaagaggccggtgtcaccatacagcgggtacaatgggcagctgctgaccagtgtgtaccagcccactgagatggccctgatgcacaaagttccgtccgaaggagcttacgacatcatcctcccacgggccaccgccaacagccaggtgatgggcagtgccaactcgaccctgcgggctgaagacatgtactcggcccagagccaccaggcggccacaccgccgaaagacggcaagaactctcaggtctttagaaacccctacgtgtgggactgagtcagcggtggcgaggagaggcggtcggatttggggagggccctgaggacctggccccgggcaagggactctccaggctcctcctccccctggcaggcccagcaacaagggggggggnccnccccccaaaaaggccccaaanaaacctgtgccccagatgtggaagggcctccctctctgccagtgtttgggtgggtgtcatgggtgtccccacccactcctcagtgtttgtggagtcgaggagccaaccccagcctcctgccaggatcacctcggcggtcacactccagccaaatagtgttctcggggtggtggctgggcagcgcctatgtttctctggagattcctgcaacctcaagagacttcccaggcgctcaggcctggatcttgctcctctgtgaggaacaagggtgcctaataaatacatttctgctttattaaaaaaaaaac

SEQ ID NO: 19183 - DNA, 1734 bp, Homo sapiens
  misc_feature (29)..(29): n is a, c, g, or t
aaagcaggctggtacggtctgaggtgtangatctcaccagccggaaagtacgagtcggctcagcctggagggacccaaccagagcctggcctgggagccaggatggccatccacaaagccttggtgatgtgcctgggactgcctctcttcctgttcccaggggcctgggcccagggccatgtcccacccggctgcagccaaggcctcaaccccctgtactacaacctgtgtgaccgctctggggcgtggggcatcgtcctggaggccgtggctggggcgggcattgtcaccacgtttgtgctcaccatcatcctggtggccagcctcccctttgtgcaggacaccaagaaacggagcctgctggggacccaggtattcttccttctggggaccctgggcctcttctgcctcgtgtttgcctgtgtggtgaagcccgacttctccacctgtgcctctcggcgcttcctctttggggttctgttcgccatctgcttctcttgtctggcggctcacgtctttgccctcaacttcctggcccggaagaaccacgggccccggggctgggtgatcttcactgtggctctgctgctgaccctggtagaggtcatcatcaatacagagtggctgatcatcaccctggttcggggcagtggcgagggcggccctcagggcaacagcagcgcaggctgggccgtggcctccccctgtgccatcgccaacatggactttgtcatggcactcatctacgtcatgctgctgctgctgggtgccttcctgggggcctggcccgccctgtgtggccgctacaagcgctggcgtaagcatggggtctttgtgctcctcaccacagccacctccgttgccatatgggtggtgtggatcgtcatgtatacttacggcaacaagcagcacaacagtcccacctgggatgaccccacgctggccatcgccctcgccgccaatgcctgggccttcgtcctcttctacgtcatccccgaggtctcccaggtgaccaagtccagcccagagcaaagctaccagggggacatgtaccccacccggggcgtgggctatgagaccatcctgaaagagcagaagggtcagagcatgttcgtggagaacaaggccttttccatggatgagccggttgcagctaagaggccggtgtcaccatacagcgggtacaatgggcagctgctgaccagtgtgtaccagcccactgagatggccctgatgcacaaagttccgtccgaaggagcttacgacatcatcctcccacgggccaccgccaacagccaggtgatgggcagtgccaactcgaccctgcgggctgaagacatgtactcggcccagagccaccaggcggccacaccgccgaaagacggcaagaactctcaggtctttagaaacccctacgtgtgggactgagtcagcggtggcgaggagaggcggtcggatttggggagggccctgaggacctggccccgggcaagggactctccaggctcctcctccccctggcaggcccagcaacacagcctcctgccaggatcacctcggcggtcacactccagccaaatagtgttctcggggtggtggctgggcagcgcctatgtttctctggagattcctgcaacctcaagagacttcccaggcgctcaggcctggatcttgctcctctgtgaggaacaagggtgcctaataaatacatttctgctttattaaaaaaaaaac

SEQ ID NO: 19184 - DNA, 1682 bp, Homo sapiens
  misc_feature (29)..(29): n is a, c, g, or t
aaagcaggctggtacggtctgaggtgtangatctcaccagccggaaagtacgagtcggctcagcctggagggacccaaccagagcctggcctgggagccaggatggccatccacaaagccttggtgatgtgcctgggactgcctctcttcctgttcccaggggcctgggcccagggccatgtcccacccggctgcagccaaggcctcaaccccctgtactacaacctgtgtgaccgctctggggcgtggggcatcgtcctggaggccgtggctggggcgggcattgtcaccacgtttgtgctcaccatcatcctggtggccagcctcccctttgtgcaggacaccaagaaacggagcctgctggggacccaggtattcttccttctggggaccctgggcctcttctgcctcgtgtttgcctgtgtggtgaagcccgacttctccacctgtgcctctcggcgcttcctctttggggttctgttcgccatctgcttctcttgtctggcggctcacgtctttgccctcaacttcctggcccggaagaaccacgggccccggggctgggtgatcttcactgtggctctgctgctgaccctggtagaggtcatcatcaatacagagtggctgatcatcaccctggttcggggcagtggcgagggcggccctcagggcaacagcagcgcaggctgggccgtggcctccccctgtgccatcgccaacatggactttgtcatggcactcatctacgtcatgctgctgctgctgggtgccttcctgggggcctggcccgccctgtgtggccgctacaagcgctggcgtaagcatggggtctttgtgctcctcaccacagccacctccgttgccatatgggtggtgtggatcgtcatgtatacttacggcaacaagcagcacaacagtcccacctgggatgaccccacgctggccatcgccctcgccgccaatgcctgggccttcgtcctcttctacgtcatccccgaggtctcccaggtgaccaagtccagcccagagcaaagctaccagggggacatgtaccccacccggggcgtgggctatgagaccatcctgaaagagcagaagggtcagagcatgttcgtggagaacaaggccttttccatggatgagccggttgcagctaagaggccggtgtcaccatacagcgggtacaatgggcagctgctgaccagtgtgtaccagcccactgagatggccctgatgcacaaagttccgtccgaaggagcttacgacatcatcctcccacgggccaccgccaacagccaggtgatgggcagtgccaactcgaccctgcgggctgaagacatgtactcggcccagagccaccaggcggccacaccgccgaaagacggcaagaactctcaggtctttagaaacccctacgtgtgggactgagtcagcggtggcgaggagaggcggtcggatttggggagggccctgaggacctggccagcctcctgccaggatcacctcggcggtcacactccagccaaatagtgttctcggggtggtggctgggcagcgcctatgtttctctggagattcctgcaacctcaagagacttcccaggcgctcaggcctggatcttgctcctctgtgaggaacaagggtgcctaataaatacatttctgctttattaaaaaaaaaac

SEQ ID NO: 19185 - DNA, 743 bp, Homo sapiens
ccggagccagacgtccgctgtgccgtcctcacagcaaggcctgctccgaggccccgggctaagaggccggtgtcaccatacagcgggtacaatgggcagctgctgaccagtgtgtaccagcccactgagatggccctgatgcacaaagttccgtccgaaggagcttacgacatcatcctcccacgggccaccgccaacagccaggtgatgggcagtgccaactcgaccctgcgggctgaagacatgtactcggcccagagccaccaggcggccacaccgccgaaagacggcaagaactctcaggtctttagaaacccctacgtgtgggactgagtcagcggtggcgaggagaggcggtcggatttggggagggccctgaggacctggccccgggcaagggactctccaggctcctcctccccctggcaggcccagcaacatgtgccccagatgtggaagggcctccctctctgccagtgtttgggtgggtgtcatgggtgtccccacccactcctcagtgtttgtggagtcgaggagccaaccccagcctcctgccaggatcacctcggcggtcacactccagccaaatagtgttctcggggtggtggctgggcagcgcctatgtttctctggagattcctgcaacctcaagagacttcccaggcgctcaggcctggatcttgctcctctgtgaggaacaagggtgcctaataaatacatttctgctttattaaaaaaaaaac

SEQ ID NO: 19186 - DNA, 358 bp, Homo sapiens
  misc_feature (46)..(46): n is a, c, g, or t
ggcctgccagggggaggaggagcctggagagtcccttgcccggggncaggtcctctgtgccccagatgtggaagggcctccctctctgccagtgtttgggtgggtgtcatgggtgtccccacccactcctcagtgtttgtggagtcgaggagccaaccccagcctcctgccaggatcacctcggcggtcacactccagccaaatagtgttctcggggtggtggctgggcagcgcctatgtttctctggagattcctgcaacctcaagagacttcccaggcgctcaggcctggatcttgctcctctgtgaggaacaagggtgcctaataaatacatttctgctttattaaaaaaaaaac

SEQ ID NO: 19187 - DNA, 301 bp, Homo sapiens
ggactgggagagaccgataggagtggaggcaggaaggctgtcagtcgggccatcgtctttccctataggctcttgagtgtgtgggatgggaggaaggcaagtgctctgtggtatcgggcaggtggggaacctccctgaagagtgccctggtcacagcacccttgaagacagccattggccatgggtcagtgttgagtttggttggccctgtgacacgctggagctctctttccagtgcggtatcctttgccctggtgggtggagggggtctcaggcttgtgtgtggatgatgctggagcga

SEQ ID NO: 19188 - DNA, 1838 bp, Homo sapiens
  misc_feature (29)..(29): n is a, c, g, or t
aaagcaggctggtacggtctgaggtgtangatctcaccagccggaaagtacgagtcggctcagcctggagggacccaaccagagcctggcctgggagccaggatggccatccacaaagccttggtgatgtgcctgggactgcctctcttcctgttcccaggggcctgggcccagggccatgtcccacccggctgcagccaaggcctcaaccccctgtactacaacctgtgtgaccgctctggggcgtggggcatcgtcctggaggccgtggctggggcgggcattgtcaccacgtttgtgctcaccatcatcctggtggccagcctcccctttgtgcaggacaccaagaaacggagcctgctggggacccaggtattcttccttctggggaccctgggcctcttctgcctcgtgtttgcctgtgtggtgaagcccgacttctccacctgtgcctctcggcgcttcctctttggggttctgttcgccatctgcttctcttgtctggcggctcacgtctttgccctcaacttcctggcccggaagaaccacgggccccggggctgggtgatcttcactgtggctctgctgctgaccctggtagaggtcatcatcaatacagagtggctgatcatcaccctggttcggggcagtggcgagggcggccctcagggcaacagcagcgcaggctgggccgtggcctccccctgtgccatcgccaacatggactttgtcatggcactcatctacgtcatgctgctgctgctgggtgccttcctgggggcctggcccgccctgtgtggccgctacaagcgctggcgtaagcatggggtctttgtgctcctcaccacagccacctccgttgccatatgggtggtgtggatcgtcatgtatacttacggcaacaagcagcacaacagtcccacctgggatgaccccacgctggccatcgccctcgccgccaatgcctgggccttcgtcctcttctacgtcatccccgaggtctcccaggtgaccaagtccagcccagagcaaagctaccagggggacatgtaccccacccggggcgtgggctatgagaccatcctgaaagagcagaagggtcagagcatgttcgtggagaacaaggccttttccatggatgagccggttgcagctaagaggccggtgtcaccatacagcgggtacaatgggcagctgctgaccagtgtgtaccagcccactgagatggccctgatgcacaaagttccgtccgaaggagcttacgacatcatcctcccacgggccaccgccaacagccaggtgatgggcagtgccaactcgaccctgcgggctgaagacatgtactcggcccagagccaccaggcggccacaccgccgaaagacggcaagaactctcaggtctttagaaacccctacgtgtgggactgagtcagcggtggcgaggagaggcggtcggatttggggagggccctgaggacctggccccgggcaagggactctccaggctcctcctccccctggcaggcccagcaacatgtgccccagatgtggaagggcctccctctctgccagtgtttgggtgggtgtcatgggtgtccccacccactcctcagtgtttgtggagtcgaggagccaaccccagcctcctgccaggatcacctcggcggtcacactccagccaaatagtgttctcggggtggtggctgggcagcgcctatgtttctctggagattcctgcaacctcaagagacttcccaggcgctcaggcctggatcttgctcctctgtgaggaacaagggtgcctaataaatacatttctgctttattaaaaaaaaaac

SEQ ID NO: 19189 - DNA, 2904 bp, Homo sapiens
cagggccctggccaggcccaacaacctctccctcctctgtgcgcctcagcccctacgggcctctggcgcgggctaactaggcctcgctgcgggcccccaggactgcgcaccccaccccccgcgaggccagcagccccgggggaaggcggccggaaaatctcttgtttatcgggctggataagtaccagcctggattcgcttcccaatttctgcggtccagcttcagcagattcctggggccggaggggaaagggtggcaacccacagatccaccccggaacagggagtggggggtggggctggtgggaacctgacctcctggaaaggacggactcggagtcagagccaacgtgtcccggagcgcagaggcccagggggtcgcgctaaacactgtacctcggggaacaaaaccgtgaaggctaattaggacaagtcggagcagggaacggggacgccgggaggggagagcgcgctccgagttgggcagaacctggaacggtcacaggaaacccgggcgcggggtagtcgggccgagggggacctttgcccacggtccagagtggtctggactcggcccacgcgtgagaggagcgcttggtgacgatcccacgtacgcttggtgactggtggaggtcccagagaaggaccgtgcgtgcaaaaggcgaacctcggtgtgcggtgtgtccacgtgtgcaagctggggaggggagggggcgcagaaggcgtgacaaagacggactctgtcttgagtgtgcgcctcgctccggcccgctcccagcgaactgtgcctgaagtgtgtctcacgggagggccaggacgaaggtgacaaaggctaggtgtcccccacggagacgcgccaaggtagccccgcgcgtgtccgtaggcgcgctctctggaagacgcggtggggggtgcgcagggctgcaccctcacaccaattgccccggcgaaggccgagcccagaaagtgagtgcgcgtgagtgtgcgcgcgcccgcatgcgggggcgtggcagtcaacagcaacaacccacacgccggcagggccagaaactcccatctccctcaccagccggaaagtacgagtcggctcagcctggagggacccaaccagagcctggcctgggagccaggatggccatccacaaagccttggtgatgtgcctgggactgcctctcttcctgttcccagagcaaagctaccagggggacatgtaccccacccggggcgtgggctatgagaccatcctgaaagagcagaagggtcagagcatgttcgtggagaacaaggccttttccatggatgagccggttgcagctaagaggccggtgtcaccatacagcgggtacaatgggcagctgctgaccagtgtgtaccagcccactgagatggccctgatgcacaaagttccgtccgaaggagcttacgacatcatcctcccacgggccaccgccaacagccaggtgatgggcagtgccaactcgaccctgcgggctgaagacatgtactcggcccagagccaccaggcggccacaccgccgaaagacggcaagaactctcaggtaagcgaactgacccagagaggccaggccaacaccaaccaggttttcctaagactctgacgtccagcagcctctctccgtggcccaccctgggctcagtccccacaaagtaaaacgagatggtagaagccctcttcccgggactgcacggcaatcctgatcctcattcctctgtacccaggctggaccgggcccagcacctttcccatccttgtcattggagctgggaggggccggaggccaccaacctgaagcagtggaccgagtgggcccccgtgaagccctgagtgtgtgactggagcgcctagggccacctccctttcctgcccagcccatcttcctggtccccaggtggctgcagctacaaggagctgtccgcgggcccccaggctgcctccaactcccctcttgacacgcccccctccccccaaatcatagtccctgtgtccccaagctgtggttcttcagattgccttcttcccctctgtgaacaacaggcctcagtgccccgtcttgactctggaccttcctggccctgccatcttggtgtctggcactggcttgtcccaccctctgcctagatggatctcctccatgagtctttggagccaagccagggcagaagttggcccttgcccttctcaccagggcctcctgccaccacctggactgtggaaggccactgagatgggggcagagctcagcccgaggcttgggcacactgcttctctccacggcctgtgggtcctggatctgagcccttggggtgtttcactcaagagccactgagccgtccccatcttccacaaagcagtttccacaagcaagccagggccagccctgcctgcactctgcccgcagtgcccctcaacgtctgggatgaggatgagcctgctgagatgagggcagctctctccatccagcagtacctcatggagtgctcactaaggagttaggaatggcaggccacgctggcatctggggttcaaggtggctcctgtggcaggaacaggtgtccatgaccctgattacctggatctcacaggttctgggaatgcaataggggcctgctgtggctattccaacatctctggtcagggcctggaagtaccttaggacacatggggttggggtcaggactgcattctcagggaccagtggagagccctggaccagatgaactggagtctaggcctctctcgtgactgggacttgtgggacgtgggaggcctgtgagatccaggactaaagattatgctgtttcctaatgggcagatatgtaagtaggtaagtgggatcctcaggtaagcgggatccagaactaaagactgtgctatttcctga

SEQ ID NO: 19190 - DNA, 2867 bp, Homo sapiens
cagggccctggccaggcccaacaacctctccctcctctgtgcgcctcagcccctacgggcctctggcgcgggctaactaggcctcgctgcgggcccccaggactgcgcaccccaccccccgcgaggccagcagccccgggggaaggcggccggaaaatctcttgtttatcgggctggataagtaccagcctggattcgcttcccaatttctgcggtccagcttcagcagattcctggggccggaggggaaagggtggcaacccacagatccaccccggaacagggagtggggggtggggctggtgggaacctgacctcctggaaaggacggactcggagtcagagccaacgtgtcccggagcgcagaggcccagggggtcgcgctaaacactgtacctcggggaacaaaaccgtgaaggctaattaggacaagtcggagcagggaacggggacgccgggaggggagagcgcgctccgagttgggcagaacctggaacggtcacaggaaacccgggcgcggggtagtcgggccgagggggacctttgcccacggtccagagtggtctggactcggcccacgcgtgagaggagcgcttggtgacgatcccacgtacgcttggtgactggtggaggtcccagagaaggaccgtgcgtgcaaaaggcgaacctcggtgtgcggtgtgtccacgtgtgcaagctggggaggggagggggcgcagaaggcgtgacaaagacggactctgtcttgagtgtgcgcctcgctccggcccgctcccagcgaactgtgcctgaagtgtgtctcacgggagggccaggacgaaggtgacaaaggctaggtgtcccccacggagacgcgccaaggtagccccgcgcgtgtccgtaggcgcgctctctggaagacgcggtggggggtgcgcagggctgcaccctcacaccaattgccccggcgaaggccgagcccagaaagtgagtgcgcgtgagtgtgcgcgcgcccgcatgcgggggcgtggcagtcaacagcaacaacccacacgccggcagggccagaaactcccatctccctcaccagccggaaagtacgagtcggctcagcctggagggacccaaccagagcctggcctgggagccaggatggccatccacaaagccttggtgatgtgcctgggactgcctctcttcctgttcccaggggcctgggcccagggccatgtcccacccggctgcagccaaggcctcaaccccctgtactacaacctgtgtgaccgctctggggcgtggggcatcgtcctggaggccgtggctggggcgggcattgtcaccacgtttgtgctcaccatcatcctggtggccagcctcccctttgtgcaggacaccaagaaacggagcctgctggggacccaggtattcttccttctggggaccctgggcctcttctgcctcgtgtttgcctgtgtggtgaagcccgacttctccacctgtgcctctcggcgcttcctctttggggttctgttcgccatctgcttctcttgtctggcggctcacgtctttgccctcaacttcctggcccggaagaaccacgggccccggggctgggtgatcttcactgtggctctgctgctgaccctggtagaggtcatcatcaatacagagtggctgatcatcaccctggttcggggcagtggcgagggcggccctcagggcaacagcagcgcaggctgggccgtggcctccccctgtgccatcgccaacatggactttgtcatggcactcatctacgtcatgctgctgctgctgggtgccttcctgggggcctggcccgccctgtgtggccgctacaagcgctggcgtaagcatggggtctttgtgctcctcaccacagccacctccgttgccatatgggtggtgtggatcgtcatgtatacttacggcaacaagcagcacaacagtcccacctgggatgaccccacgctggccatcgccctcgccgccaatgcctgggccttcgtcctcttctacgtcatccccgaggtctcccaggtgaccaagtccagcccagagcaaagctaccagggggacatgtaccccacccggggcgtgggctatgagaccatcctgaaagagcagaagggtcagagcatgttcgtggagaacaaggccttttccatggatgagccggttgcagctaagaggccggtgtcaccatacagcgggtacaatgggcagctgctgaccagtgtgtaccagcccactgagatggccctgatgcacaaagttccgtccgaaggagcttacgacatcatcctcccacgggccaccgccaacagccaggtgatgggcagtgccaactcgaccctgcgggctgaagacatgtactcggcccagagccaccaggcggccacaccgccgaaagacggcaagaactctcaggtctttagaaacccctacgtgtgggactgagtcagcggtggcgaggagaggcggtcggatttggggagggccctgaggacctggccccgggcaagggactctccaggctcctcctccccctggcaggcccagcaacatgtgccccagatgtggaagggcctccctctctgccagtgtttgggtgggtgtcatgggtgtccccacccactcctcagtgtttgtggagtcgaggagccaaccccagcctcctgccaggatcacctcggcggtcacactccagccaaatagtgttctcggggtggtggctgggcagcgcctatgtttctctggagattcctgcaacctcaagagacttcccaggcgctcaggcctggatcttgctcctctgtgaggaacaagggtgcctaataaatacatttctgctttattaaaaaaaaaac

SEQ ID NO: 19191 - DNA, 2742 bp, Homo sapiens
  misc_feature (29)..(29): n is a, c, g, or t
aaagcaggctggtacggtctgaggtgtangatctcaccagccggaaagtacgagtcggctcagcctggagggacccaaccagagcctggcctgggagccaggatggccatccacaaagccttggtgatgtgcctgggactgcctctcttcctgttcccaggggcctgggcccagggccatgtcccacccggctgcagccaaggcctcaaccccctgtactacaacctgtgtgaccgctctggggcgtggggcatcgtcctggaggccgtggctggggcgggcattgtcaccacgtttgtgctcaccatcatcctggtggccagcctcccctttgtgcaggacaccaagaaacggagcctgctggggacccaggtattcttccttctggggaccctgggcctcttctgcctcgtgtttgcctgtgtggtgaagcccgacttctccacctgtgcctctcggcgcttcctctttggggttctgttcgccatctgcttctcttgtctggcggctcacgtctttgccctcaacttcctggcccggaagaaccacgggccccggggctgggtgatcttcactgtggctctgctgctgaccctggtagaggtcatcatcaatacagagtggctgatcatcaccctggttcggggcagtggcgagggcggccctcagggcaacagcagcgcaggctgggccgtggcctccccctgtgccatcgccaacatggactttgtcatggcactcatctacgtcatgctgctgctgctgggtgccttcctgggggcctggcccgccctgtgtggccgctacaagcgctggcgtaagcatggggtctttgtgctcctcaccacagccacctccgttgccatatgggtggtgtggatcgtcatgtatacttacggcaacaagcagcacaacagtcccacctgggatgaccccacgctggccatcgccctcgccgccaatgcctgggccttcgtcctcttctacgtcatccccgaggtctcccaggtgaccaagtccagcccagagcaaagctaccagggggacatgtaccccacccggggcgtgggctatgagaccatcctgaaagagcagaagggtcagagcatgttcgtggagaacaaggccttttccatggatgagccggttgcagctaagaggccggtgtcaccatacagcgggtacaatgggcagctgctgaccagtgtgtaccagcccactgagatggccctgatgcacaaagttccgtccgaaggagcttacgacatcatcctcccacgggccaccgccaacagccaggtgatgggcagtgccaactcgaccctgcgggctgaagacatgtactcggcccagagccaccaggcggccacaccgccgaaagacggcaagaactctcaggtaagcgaactgacccagagaggccaggccaacaccaaccaggttttcctaagactctgacgtccagcagcctctctccgtggcccaccctgggctcagtccccacaaagtaaaacgagatggtagaagccctcttcccgggactgcacggcaatcctgatcctcattcctctgtacccaggctggaccgggcccagcacctttcccatccttgtcattggagctgggaggggccggaggccaccaacctgaagcagtggaccgagtgggcccccgtgaagccctgagtgtgtgactggagcgcctagggccacctccctttcctgcccagcccatcttcctggtccccaggtggctgcagctacaaggagctgtccgcgggcccccaggctgcctccaactcccctcttgacacgcccccctccccccaaatcatagtccctgtgtccccaagctgtggttcttcagattgccttcttcccctctgtgaacaacaggcctcagtgccccgtcttgactctggaccttcctggccctgccatcttggtgtctggcactggcttgtcccaccctctgcctagatggatctcctccatgagtctttggagccaagccagggcagaagttggcccttgcccttctcaccagggcctcctgccaccacctggactgtggaaggccactgagatgggggcagagctcagcccgaggcttgggcacactgcttctctccacggcctgtgggtcctggatctgagcccttggggtgtttcactcaagagccactgagccgtccccatcttccacaaagcagtttccacaagcaagccagggccagccctgcctgcactctgcccgcagtgcccctcaacgtctgggatgaggatgagcctgctgagatgagggcagctctctccatccagcagtacctcatggagtgctcactaaggagttaggaatggcaggccacgctggcatctggggttcaaggtggctcctgtggcaggaacaggtgtccatgaccctgattacctggatctcacaggttctgggaatgcaataggggcctgctgtggctattccaacatctctggtcagggcctggaagtaccttaggacacatggggttggggtcaggactgcattctcagggaccagtggagagccctggaccagatgaactggagtctaggcctctctcgtgactgggacttgtgggacgtgggaggcctgtgagatccaggactaaagattatgctgtttcctaatgggcagatatgtaagtaggtaagtgggatcctcaggtaagcgggatccagaactaaagactgtgctatttcctga

SEQ ID NO: 19192 - DNA, 3136 bp, Homo sapiens
  misc_feature (29)..(29): n is a, c, g, or t
aaagcaggctggtacggtctgaggtgtangatctcaccagccggaaagtacgagtcggctcagcctggagggacccaaccagagcctggcctgggagccaggatggccatccacaaagccttggtgatgtgcctgggactgcctctcttcctgttcccaggggcctgggcccagggccatgtcccacccggctgcagccaaggcctcaaccccctgtactacaacctgtgtgaccgctctggggcgtggggcatcgtcctggaggccgtggctggggcgggcattgtcaccacgtttgtgctcaccatcatcctggtggccagcctcccctttgtgcaggacaccaagaaacggagcctgctggggacccaggtattcttccttctggggaccctgggcctcttctgcctcgtgtttgcctgtgtggtgaagcccgacttctccacctgtgcctctcggcgcttcctctttggggttctgttcgccatctgcttctcttgtctggcggctcacgtctttgccctcaacttcctggcccggaagaaccacgggccccggggctgggtgatcttcactgtggctctgctgctgaccctggtagaggtcatcatcaatacagagtggctgatcatcaccctggttcggggcagtggcgagggcggccctcagggcaacagcagcgcaggctgggccgtggcctccccctgtgccatcgccaacatggactttgtcatggcactcatctacgtcatgctgctgctgctgggtgccttcctgggggcctggcccgccctgtgtggccgctacaagcgctggcgtaagcatggggtctttgtgctcctcaccacagccacctccgttgccatatgggtggtgtggatcgtcatgtatacttacggcaacaagcagcacaacagtcccacctgggatgaccccacgctggccatcgccctcgccgccaatgcctgggccttcgtcctcttctacgtcatccccgaggtctcccaggtgaccaagtccagcccagagcaaagctaccagggggacatgtaccccacccggggcgtgggctatgagaccatcctgaaagagcagaagggtcagagcatgttcgtggagaacaaggccttttccatggatgagccggttgcagctaagaggccggtgtcaccatacagcgggtacaatgggcagctgctgaccagtgtgtaccagcccactgagatggccctgatgcacaaagttccgtccgaaggagcttacgacatcatcctcccacgggccaccgccaacagccaggtgatgggcagtgccaactcgaccctgcgggctgaagacatgtactcggcccagagccaccaggcggccacaccgccgaaagacggcaagaactctcaggtaagcgaactgacccagagaggccaggccaacaccaaccaggttttcctaagactctgacgtccagcagcctctctccgtggcccaccctgggctcagtccccacaaagtaaaacgagatggtagaagccctcttcccgggactgcacggcaatcctgatcctcattcctctgtacccaggctggaccgggcccagcacctttcccatccttgtcattggagctgggaggggccggaggccaccaacctgaagcagtggaccgagtgggcccccgtgaagccctgagtgtgtgactggagcgcctagggccacctccctttcctgcccagcccatcttcctggtccccaggtggctgcagctacaaggagctgtccgcgggcccccaggctgcctccaactcccctcttgacacgcccccctccccccaaatcatagtccctgtgtccccaagctgtggttcttcagattgccttcttcccctctgtgaacaacaggcctcagtgccccgtcttgactctggaccttcctggccctgccatcttggtgtctggcactggcttgtcccaccctctgcctagatggatctcctccatgagtctttggagccaagccagggcagaagttggcccttgcccttctcaccagggcctcctgccaccacctggactgtggaaggccactgagatgggggcagagctcagcccgaggcttgggcacactgcttctctccacggcctgtgggtcctggatctgagcccttggggtgtttcactcaagagccactgagccgtccccatcttccacaaagcagtttccacaagcaagccagggccagccctgcctgcactctgcccgcagtgcccctcaacgtctgggatgaggatgagcctgctgagatgagggcagctctctccatccagcagtacctcatggagtgctcactaaggagttaggaatggcaggccacgctggcatctggggttcaaggtggctcctgtggcaggaacaggtgtccatgaccctgattacctggatctcacaggttctgggaatgcaataggggcctgctgtggctattccaacatctctggtcagggcctggaagtaccttaggacacatggggttggggtcaggactgcattctcagggaccagtggagagccctggaccagatgaactggagtctaggcctctctcgtgactgggacttgtgggacgtgggaggcctgtgagatccaggactaaagattatgctgtttcctaatgggcagatatgtaagtaggtaagtgggatcctcaggtaagcgggatccagaactaaagactgtgctatttcctgatgggcagatgtgttgtttctacctcatcttgggcagcacctggatatgctggcgctggttcatcactggaggagcctcttgtattttgagccctcggacatgctccagagggtcctgacggtcacccagcaaagagggggtacctccatggtgctggcaccaaagacagagatgggcacagctccaggctcgtgaaaatgagctctctataacattgtcttcctgaggtttttcctgcccttatccaaggtgggccctaaagctcagtccccagcccagcagcacctctgggtgccggggtggaggatgacgaccagagcagctctctggagaggtgccctgtagtcagtcccacagctctctggtgctacccccgtccccagcagcctgtgcc

SEQ ID NO: 19193 - DNA, 2143 bp, Homo sapiens
  misc_feature (29)..(29): n is a, c, g, or t
aaagcaggctggtacggtctgaggtgtangatctcaccagccggaaagtacgagtcggctcagcctggagggacccaaccagagcctggcctgggagccaggatggccatccacaaagccttggtgatgtgcctgggactgcctctcttcctgttcccaggggcctgggcccagggccatgtcccacccggctgcagccaaggcctcaaccccctgtactacaacctgtgtgaccgctctggggcgtggggcatcgtcctggaggccgtggctggggcgggcattgtcaccacgtttgtgctcaccatcatcctggtggccagcctcccctttgtgcaggacaccaagaaacggagcctgctggggacccaggtattcttccttctggggaccctgggcctcttctgcctcgtgtttgcctgtgtggtgaagcccgacttctccacctgtgcctctcggcgcttcctctttggggttctgttcgccatctgcttctcttgtctggcggctcacgtctttgccctcaacttcctggcccggaagaaccacgggccccggggctgggtgatcttcactgtggctctgctgctgaccctggtagaggtcatcatcaatacagagtggctgatcatcaccctggttcggggcagtggcgagggcggccctcagggcaacagcagcgcaggctgggccgtggcctccccctgtgccatcgccaacatggactttgtcatggcactcatctacgtcatgctgctgctgctgggtgccttcctgggggcctggcccgccctgtgtggccgctacaagcgctggcgtaagcatggggtctttgtgctcctcaccacagccacctccgttgccatatgggtggtgtggatcgtcatgtatacttacggcaacaagcagcacaacagtcccacctgggatgaccccacgctggccatcgccctcgccgccaatgcctgggccttcgtcctcttctacgtcatccccgaggtctcccaggtgaccaagtccagcccagagcaaagctaccagggggacatgtaccccacccggggcgtgggctatgagaccatcctgaaagagcagaagggtcagagcatgttcgtggagaacaaggccttttccatggatgagccggttgcagctaagaggccggtgtcaccatacagcgggtacaatgggcagctgctgaccagtgtgtaccagcccactgagatggccctgatgcacaaagttccgtccgaaggagcttacgacatcatcctcccacgggccaccgccaacagccaggtgatgggcagtgccaactcgaccctgcgggctgaagacatgtactcggcccagagccaccaggcggccacaccgccgaaagacggcaagaactctcaggtaagcgaactgacccagagaggccaggccaacaccaaccaggttttcctaagactctgacgtccagcagcctctctccgtggcccaccctgggctcagtccccacaaagtaaaacgagatggtagaagccctcttcccgggactgcacggcaatcctgatcctcattcctctgtacccaggctggaccgggcccagcacctttcccatccttgtcattggagctgggaggggccggaggccaccaacctgaagcagtggaccgagtgggcccccgtgaagccctgagtgtgtgactggagcgcctagggccacctccctttcctgcccagcccatcttcctggtccccaggtggctgcagctacaaggagctgtccgcgggcccccaggctgcctccaactcccctcttgacacgcccccctccccccaaatcatagtccctgtgtccccaagctgtggttcttcagattgccttcttcccctctgtgaacaacaggcctcagtgccccgtcttgactctggaccttcctggccctgccatcttggtgtctggcactggcttgtcccaccctctgcctagatggatctcctccatgagtctttggagccaagccagggcagaagttggccctgtgagatccaggactaaagattatgctgtttcctaatgggcagatatgtaagtaggtaagtgggatcctcaggtaagcgggatccagaactaaagactgtgctatttcctga

SEQ ID NO: 19194 - DNA, 651 bp, Homo sapiens
aggctcacttacaggcagctttggaggcaggcactgagatggcctgttgcacaaagttccgtccgaaggagcttacgacatcatcctcccacgggccaccgccaacagccaggtgatgggcagtgccaactcgaccctgcgggctgaagacatgtactcggcccagagccaccaggcggccacaccgccgaaagacggcaagaactctcaggtctttagaaacccctacgtgtgggactgagtcagcggtggcgaggagaggcggtcggatttggggagggccctgaggacctggccccgggcaagggactctccaggctcctcctccccctggcaggcccagcaacatgtgccccagatgtggaagggcctccctctctgccagtgtttgggtgggtgtcatgggtgtccccacccactcctcagtgtttgtggagtcgaggagccaaccccagcctcctgccaggatcacctcggcggtcacactccagccaaatagtgttctcggggtggtggctgggcagcgcctatgtttctctggagattcctgcaacctcaagagacttcccaggcgctcaggcctggatcttgctcctctgtgaggaacaagggtgcctaataaatacatttctgctttattaaaaaaaaaac

SEQ ID NO: 19195 - DNA, 755 bp, Homo sapiens
tcaaccactctacacgctgtatatatacaatttattccgaacctcgattatcggggaaatatactccttgaggccccaagaatttgcgaccctcagattaaatacccaggaatactcctttcatcaaacaagggggatcgggtgggacacctccctcagcctcctgagtagctggaactacaggtgtgtgccaccacacccagctaattttttgtatttttagtagagacagggtttcaccatgttggtcaggctagtcttgaattcctgacctcaaatgatctaacggcctcggcctcccaaagtgcagggattacaggtgtgagccaccctgcccagcctactttttctttttaaagaatttattttaattgggtttcgtaaatgcagggatacaaaagctattggatcttgagatagctttgtattttgtagagaatcatcccaggagcacattccctcactgagggttccagccacctcttccgcctcattatactttgcttagcaccgagaagtctggcatcgtttctgttggaatgaaaagattggcagagctgccctggacaacagcactgcaaaacactgtggcagaaggtttggtctacataccaaggcagccaaagtattaattgcattctctgtgatcacaaaataaggcgctgaattattctcttcatgttttaagaatgacaggcttttgctctgccagctccaagcatagtgcatcacatggaaaggagatgctagatttg

SEQ ID NO: 19196 - DNA, 714 bp, Homo sapiens
ccctgcgggccctgcctcccacccaccccatcaccagctttccacttggaggccccctgtgccctgcagcctcagggtaggccgtgggtcaccaggctggagagggcccctgccttggccaggggtgcgaggtgacccggctgcattgctgggtgggagctgctgtctgttgttcaggggcctggcccccgccctcccccccgaccccgacctcgcaaagcgcactcccgggcagggtgtggtctggaaggcggggctggcggggacatgggtgttcctgcatctcctagcgcagttcctgctggtgggtggaagggtgcctggtttaggcggggtcccaggagggggtgaggggtgacacccttggggagggggcctgcaaagggcactgcctgtggccacgtggtgtctgtgggaattggtcctggggactttgatgggtgtttgcggccccagttgccgccctgctccctcttccagggctcctggcttgggccccccgacccccctgctcagctcgggaaaatccccgtgcggctccagccccgggtcacgctcaggagcgatgagaggggcgccctggccacgcttcaggaaagcctgtgtctgcgcgcggggcaaggggctccacgacaaaaggacaagatttgacttaaattaagtttttcccttgaggatattttcattttctttaaaagaatataattttcttct

SEQ ID NO: 19197 - DNA, 1247 bp, Homo sapiens
ccctgcgggccctgcctcccacccaccccatcaccagctttccacttggaggccccctgtgccctgcagcctcagggtaggccgtgggtcaccaggctggagagggcccctgccttggccaggggtgcgaggtgacccggctgcattgctgggtgggagctgctgtctgttgttcaggggcctggcccccgccctcccccccgaccccgacctcgcaaagcgcactcccgggcagggtgtggtctggaaggcggggctggcggggacatgggtgttcctgcatctcctagcgcagttcctgctggtgggtggaagggtgcctggtttaggcggggtcccaggagggggtgaggggtgacacccttggggagggggcctgcaaagggcactgcctgtggccacgtggtgtctgtgggaattggtcctggggactttgatgggtgtttgcggccccagttgccgccctgctccctcttccagggctcctggcttgggccccccgacccccctgctcagctcgggaaaatccccgtgcggctccagccccgggtcacgctcaggagcgatgagaggggcgccctggccacgcttcaggaaagcctgtgtctgcgcgcggggcaaggggctccacgacaaaaggacaagatttgacttaaattaagtttttcccttgaggatattttcattttctttaaaagaatataattttcttctaagatcttggaccagccttgttatttttaaagcaaatgccggcaaactcaaaaaaaaaaaaaaaaaaaaaaaaaaaaaaaaaaaaaaaaaaaaaaaaaaaaaaaaaaaaacaaaaaaaagaggggggggcgcgccctcaaataaaatacccccgcgggggggcgcccaaaatattgggccgaccccgcagtttttttaaaaaaggggtgccccccaataagaggccgttataataacaacgagacatcaggcgcgcatatattaaacacactgttctaccatgggaaaaactgtgtacagcggcggaccatcttgtgaaagaacaccccacacttctggggcggggggagaaacaatatggggggaaccaacacctccccgaaagaaatatattaacgcctccagaagggcaaaataacaacgttgaagagcttaatcagtggttaaaacacacacggtaataatactctggcgccgccgaagacaatattgtgcatcacgaaaataatatatcagagaaacaatttttacag

SEQ ID NO: 19198 - DNA, 1222 bp, Homo sapiens
agcgcaaggtgtggtgagaggagggagcggttaggggaacaataacgagggagagggatgggtgaggagaagaggagtcatgaagcgaatgagaaggaaggataggagagaagaagaaagggggacgggaagaggaagtgatgatgagggagtaggagaccgtgtgagtgagcggaagaaatgtgttggagggatgaaggccacgtgtggagcgactaagacattgggagggtgttaaggaggcaggaggacatgatggggaggagtagagaggggttgagagaggaaagaccagagagggaagaaagtcagtggtctgacgggacaggcaaggtaaagagggtggggataggtaagaggaatggagaatagtgatagagcgagtaaacgaaatgcgcacatgtgaaaaaggagagagatggggtggtggaaggtagcacgagagaagacaagatgggacgaaggttggggaagaggaaccccctgctcagctcgggaaaatccccgtgcggctccagccccgggtcacgctcaggagcgatgagaggggcgccctggccacgcttcaggaaagcctgtgtctgcgcgcggggcaaggggctccacgacaaaaggacaagatttgacttaaattaagtttttcccttgaggatattttcattttctttaaaagaatataattttcttctaagatcttggaccagccttgttatttttaaagcaaatgccggcaaactcaaaaaaaaaaaaaaaaaaaaaaaaaaaaaaaaaaaaaaaaaaaaaaaaaaaaaaaaaaaaacaaaaaaaagaggggggggcgcgccctcaaataaaatacccccgcgggggggcgcccaaaatattgggccgaccccgcagtttttttaaaaaaggggtgccccccaataagaggccgttataataacaacgagacatcaggcgcgcatatattaaacacactgttctaccatgggaaaaactgtgtacagcggcggaccatcttgtgaaagaacaccccacacttctggggcggggggagaaacaatatggggggaaccaacacctccccgaaagaaatatattaacgcctccagaagggcaaaataacaacgttgaagagcttaatcagtggttaaaacacacacggtaataatactctggcgccgccgaagacaatattgtgcatcacgaaaataatatatcagagaaacaatttttacag

SEQ ID NO: 19199 - DNA, 315 bp, Homo sapiens
tgtgatcattcctctttgtagcctcaaccgcctggctcaagtggtcctcccatctcagcatgtagctgggactacaggcatgcatgtgccaccatgcctggctaatttttaattttttctgtaaaggcaggctatccctgttcgggctgctcaggctggtctggttttttttgctcagtctggtcttgaactcccagactcaagcgatccaccttggcttcccaaagtgctgggagtacaggtgtgagccactatgcctggtgtgcttgtcaatcttgatgaaattgagagtttttagcactttcacctagcaaa

SEQ ID NO: 19200 - DNA, 652 bp, Homo sapiens
cctgtttgctttaagtactaggggtagaaaactaaccagaaagcatgcatctataaggttagagactgtgtctacctttttcactcctctatacacagcactaagcagaatgcctggcacacagaaagttcaaaaacacttgcaaggtagccctgtcacacaatggatagccttctgaacttccagaaaatacttgcagaattaagtgaatgaatgaatgagcatatcaggaagccagcttaagaagaggctctactctatggtatagcccctgagctggagggcccaattttgtcttaagctcccaaacattacatgaaaccagtttacaccacaacttgctatgtacccatttactctaacataccaccaattagattatgtaccccataataagtagacaagtttttttaaaaataattttagcattctgattatgcccagggaactgtttcttaatgtccaacattttgtcttgctcaaatcactttatctttgagctgggcaaaggcactgttgttatagattgtatataatgaagaaaatgtttacttgcctattagaaacaagactgggaaagaatctaaacatacttcttttctaacaaaaattactttttgaaatgctgaaatgcttttaggaaaaaaaaaaa

SEQ ID NO: 19201 - DNA, 331 bp, Homo sapiens
atgagccactgtgcccagcctcatatggattttcaaaagaacaggggccaggcgtgatggctcacgcctgtaatcccagcactttgggaggccaaggcaggtggatcacctgaggtcaggagttcaagaccagcctggccaacgtggtgaaacctggtctctactaaacaatacaaaaaaaatttagcgaggcatggtggcatgtgcctttccttccagctccaattacatggaaggctgagtcaggagaaccgcttgaacctgtgaggcagaagttgcagtgaaccaatattgagccactgcactctagtctgggcaacagagcgagact

SEQ ID NO: 19202 - DNA, 267 bp, Homo sapiens
ctcttaactacagaagtcctccctatgtttcaagatattatagcatttcattgtgcttaaaaaactagtagcaaataggaagtaacatttgccaaataaaatccataaaaataaagcatcctttacaataaagaaactcttgtcaattatttagactttttaagggcattttgaactcctcaaatacaaatttcacgttcataattgtatcatcaaaatcctatgtggcaaccaaaagctcactagtaggcaggacaccgaattatt

SEQ ID NO: 19203 - DNA, 421 bp, Homo sapiens
ttctcttccccaactttttcttctagtggaaagtgttttgagtggtgatatcagaattcataaacctgggaaagttatgaaatgtgtgtgctggtagttagctttgatagtatatttaatactatatttttgatacttgcgtggataactggacttatctgtgaacatggggtacctacccatcatatataacatcggaaatgagcagtagtgctgctcttagagctggacagggggtatcctggtctaggccctgcgatacatgtgtcttctccagactgctgtctcccctcaggtaaggagtcactgaagccaaggggatgtacccacccagattttgcaacatctcttcctacaacattctgaccctggtttatctgcctacaaaggcctctccaccgagccctatgcagtctcattg

SEQ ID NO: 19204 - DNA, 255 bp, Homo sapiens
tggacaacaaaagatgacaaagggatcgtgctctttataatacattgtgcagttatatacagtttaccactatcccccgacgggtttttcacagaggatacactgtagagtacatacaaaaagctcacctaaagtccacttcaataggaaaacttgccacttaaaaacaatttttatacagagagatgaaagtaaaactttcttctactcatgagaggctaatgaaagtaatgtttagattgtgcgtggtggctt

SEQ ID NO: 19205 - DNA, 469 bp, Homo sapiens
aagccattgctctaaatctctatgctgcacaagatacagctgagtaaagattagtaacaacaaaaaaaaacaacaaaaaaagacaagtcccagggaaggttcctgtgagtctttatgatccactggccataaattagagagaggcaatgaagactaaatgcggagagatccagtttgcttcctagtcttagtacattgccatctaggcatgagtagtctccttgtctccgttgtctgagaatgctatcctctggctctgaggtccagagccactaagagagaatgctgacttgatgtcagaaaatcaagacaaggtctagtttaattatggaacatgaaacaaaaactttactcctcttttgaagtaaaaatgcaaatctgttccgttttagagtgggatttccctcctttgttatatggcttttaaattactcatgttctttacaaatcaaataaataaaagataaaa

SEQ ID NO: 19206 - DNA, 249 bp, Homo sapiens
atttaaatggtgatttttggcaacttgctggaggctgagtgtgtaagaagagtaagaaactcttgaaagccacagtctctagggtaccccacaacttgcataggttttaacaccaggaaccccgccaggttctcaccgtgaagagccagggaagatcctctttggccctttcagggcaaagggaaaagtaatcattgttcaatatcctcaggccgttctccattaataaaggccaacgcaccagagaag

SEQ ID NO: 19207 - DNA, 867 bp, Homo sapiens
gtttcaagtaaatgtctttcgtccttttaatttggtgtgataagaaatattgcctttggtgtaatcagaattatgtagcatgatgcttcttcttggtgctgttatttttactgcagtaaatatttattttagttggcattgttgagttacctcatttgtgagcacagctagtaaagctatggttaaattttattgcttttactcttagaatcactttctcagctagtttaccttggagagacaactttacgttttccaccaaattaaagaagctgagaaaattgggtggaatttttttctttttttttctgtttaaaatgtggttactttgtagtactttggcgaactcactaatgtatgtatgaaagcacacgcttatcaaatggaaaataaaatcaaaacaatgaactccagtatgtttagtaataaagaaaacaaaaaaaaaaacctgtcattttttccaatgcaattaaatacaaagagaccactaatattacatttatctaattcatgtcttctcggcaatatgaaccattcagatgttcctccacctcttttgagagggatgtatgctgtcagactttaccaatgggatacacagttggggttttggaaataattttgaatctccttgcagggtagcctgctaaaagacagggttgtagaaccacttccgagggccttctaaacttaaaaaagaaaaacacctgtagctgtcagcactactttcagcaaacagtccacatcgttatgtgtcatttaactgctttctgcttgtcagcaggagtctttgtttcacacctaagagttgtcacatcagaaatcagaataaaggcctaaggtctctattcccacggggcagtaaca

SEQ ID NO: 19208 - DNA, 270 bp, Homo sapiens
ctctgtttcaaattatgttgttgatcttgttagaaagatagaatatgttctttgtttatgaaaataaataagagactgcctatggataatttttagctgaacccaaagccagacattgctctcaaatgttttcatatacttttatcattaacacagttttggaatctgaatacttaactaagaaatctgattgtgatatctttccaaatatttaatttgtattgctttttgacaaacttttgtatatggttcctgtggacatgaataaag

SEQ ID NO: 19209 - DNA, 485 bp, Homo sapiens
ttgttgggagtaagggatggtttgaggaatttagggtgtaccataatgtggagaccaggtcttatttgacagttatgccaaagaacaaacagttcctgcagctctcatgttgtattcaccacaaattcaggaagtggctgaagaaggggattacatgcctgcacaaatctttagtgctatcgagagtgtcaagctttgaaaccctttgaatacttctgaagagcaagcgcccactgatgctgaggtcaacaaaatcagagaagctgacatttccattttttgccaatacttcaggtgacctcataatgaaacccttgctgctctacagaaaattgtgcccaaaccctctcaggggaaataaatgagccaagtttccagtgtactagcaagcaaacagaaaagcccagatgaatcttcctctccttaagggatggtttgaacagtactttcttgtggatgttcaagactacttaaaagaaaaaaaa

SEQ ID NO: 19210 - DNA, 283 bp, Homo sapiens
ctataacaagcaacaaaaaacaaaataggcaaaagactcacatagatgtttttccaaacacttacaaatggccaacaagcatatgaaaagacacttaacatcactatcattaggaaatgcaaatcaaaaccacaacgaggctgggtgcggtggctcacgccggtaatcccagcactttgggagaccaaggcaggcggatcacctgaggtcaggagttcaagaccagcctggccaacatggtgaaaccccattctactaaaaatacaaaaattagccagccgtg

SEQ ID NO: 19211 - DNA, 350 bp, Homo sapiens
aactctttctttagaacatgtagaaagactatcctttagttatccagtgtggaaacagtcctgaaatccaaactgatactgcgatcctgtgccaggttattactgtgacaattacttaatattctctgtgctcacgatatcactccttccagaagatctttagggaaaacttagttcagtttctaggaggtttttgctcagccgaagatcactgtgtgaataataatgcaggcaacatgctcacctttggagggggaacaaggttaatggtcaaaccccgtgagtatctctgctgaatccataatgaatgctctaatttcaaaaggaagccgtagcactgagctctgttt

SEQ ID NO: 19212 - DNA, 224 bp, Homo sapiens
gttagaaaacacctctagattctgggaacttgaaacatgtaaccaccctggctggccagaggggcatcaccttgctctcatctttttactcctttaatgctgacctctgccaaattgaatgatatattttcacatcctgacaaaaggaactgaccatagctgatagagccccacacctccttaaagaaaatgttttgtgaaagctaagagatgctacttggggt

SEQ ID NO: 19213 - DNA, 575 bp, Homo sapiens
atttataaacaatgagagaatgagagtctaactggttttctttgagatggactgtttcagcccatggatattaacatttattttagacaggtgttatgcactggtgttgatcttttctgtggtgctattatttaagatagcttgaagcattattgtgaatgtgttgttatatgtattcatttagttgatgctgttgtttgtagtaacataaaacatcaataaggatagtagccaaattgtgccagttagccttcattttctggcattataatgaaactatttaaacgtttgtgattctgtagtatgttaacaaaacatactccgttaataaatttaaaactacattttatagttccatttatcttgcttcgtattacagtttatacatatactaccataaattttctatgatttggttatgaaaaacacagtttatattccaaattttaatatcattttcatatatattcatattctcgtaaacttttaacctgatgaaatatatgcatatttttcctaaagttttaacataaagccacatttttttatattaaatttaagaaaaattttaagca

SEQ ID NO: 19214 - DNA, 404 bp, Homo sapiens
aggctcacctctacaatatcttagctaattattgctatcaaatattaaaccaccgaagatcctcaaataaggtcttttcaatgtcctttacttataacatcgataaaaaaaaaaacacaaaaaacttgattccaggctggggccactgcctgtactgagtttgcatgttgtctcatgtctgcatgggttttgagtacaccagcttttctcccacatctcaaagctgtgcatgttaggtgaattggcatgtctacatggtcctagtctgaatgaatgaatgaatatgtatgtatgaatgcaccccgcgctgggatggcgtactggccagagctggttcacacctggcaccctgagctgccaaggtaggctctggcaaccagcaaccttgaactggaataactggg

SEQ ID NO: 19215 - DNA, 541 bp, Homo sapiens
taggagcaaattacatcaagagatggaattaatgagatttacataaagtcctatcatctgagatgaagttatctagttaaatagtttgctttagggattgaaaagaaaaaatactatctggtgcagggaaatctgttttgggggaccctggttagaaaattcattattgcccccaaatgcattactagtactggagcagacttggatccttttctaccccagagcaatgcttgtcagatgcctgatgggtcataatgttactgaggagcaggccagggtagtcgcccatttttaaaataaaaatacctgttttgttttgttttgttttgtttgtttgtttgtttcttttgacacggagttttgctcttgctgcccagtctggagtgcaatggcaagatctcggctcaccgcaatctctgcctcctgaattcaaatggttcccctgccggctgggcgcggtgaacctgggaggcggagcttgcagtgagccgagattgcgccactgcaatcccgcctgggctaaagagcgggactccgtctc

SEQ ID NO: 19216 - DNA, 1818 bp, Homo sapiens
cttctttctttcttttgacagagtcttgctttgtcacccaggctggaatgcaatggctcgatctcggctcactgcaacctctgcctcccgggttcaagcgattctcttgcctcagcctcccaagtagctgggactacagatgcatgctaccacactcggctaattttttgtatttttagtagagacggggtttcaccgtgttagccaggatggtcttaaactcctgacttcgtgatccgcccacctcggcttcccaaagtgcagggattacaggcgtgagccactgcacctgtccttctgtgtgtatgttatgtttgaaaacaaagtttaaaaaagggaactgctctggttgaagccctgggaggggcagggagatggaaggcaaggagcccatccacagctctgtccttctcctgcaggcagcccttgagggctccttagagtattagcttgaaatccttcatctgtcccaacagagctctgagaaggtcagtgacttgcccaaggttctgcagagccagcactagaactcaggtctcctgactcccaggccagggccctggaggctagtcctttcctgaagggctggtgtcacgagtaaggacaaggggtggctaggcagcctccttcctgatctcagctcccttaacatgagtcttgggaggagggccaagactctggtatgaatgatgcttttctcatcctggagcaacttcctttctgggaattgggtgtctccttctgggcaaagacaataaaattcatccaaagggccagaggagcagggttcctccggcccccacccagatgggcatcacgtggctcccaagttagcagtccaggaaaattccagcccttgcatacttggcctcacacacccatctgctcactcaccctggcacattcagcccccctaacccaccttgaacattgaccaccacacactccctggcacgctcttctcaccctcaacttctgccacctctccctgggcaatactgccagcctttccctaatctcagagctgcagccctgccctgtcactcacctcaaacctgccatgtccctggggctactgaaattccaggcagtgggtgaagaggacgaggaggatgaggagggggagagcctggactctgtgaaggcactgacagccaagctgcagctgcagactcggcggccctcatatctggagtggacagcccaggtccagagccaggcctggcgcagggcccaagccaaacctggaccagggggacctggggacatctgtggtttcgactcaatggactccgcccttgagtggctccgacgggagctgcgggagatgcaggcgcaggacaggcagctggcagggcagctgctgcggctgcgggcccagctgcaccgactgaagatggaccaagcctgtcacctgcaccaggagctgctggatgaggccgagctggagctggagctggagcccggggccggcctagccctggccccgctgctgcggcacctgggcctcacgcgcatgaacatcagcgcccggcgcttcaccctctgctgaggaacacctgtgccccccgactccccgccccctctcccaatgccgcttcccctgcctgcctgggaagaggaaagggaggggtgccccagaggcaccagctcctggcgggggaggaggaacattcaggtttctgagagctgaattccaagagtgcaaaaccccagcatcctgtttcctctgctgacccagctgggagggggaggaggaggagctcacaccctcaaactcctcaataaacgctttctctggttcccaaaaaaaactct

SEQ ID NO: 19217 - DNA, 975 bp, Homo sapiens
aacgaaagatgtacgagcgtcggcactcggttttgtatttcaatgcacgggacggcgttttaattgtatatactgtgccgttggctttacaaattcacacactccctggcacgctcttctcaccctcaacttctgccacctctccctgggcaatactgccagcctttccctaatctcagagctgcagccctgccctgtcactcacctcaaacctgccatgtccctggggctactgaaattccaggcagtgggtgaagaggacgaggaggatgaggagggggagagcctggactctgtgaaggcactgacagccaagctgcagctgcagactcggcggccctcatatctggagtggacagcccaggtccagagccaggcctggcgcagggcccaagccaaacctggaccagggggacctggggacatctgtggtttcgactcaatggactccgcccttgagtggctccgacgggagctgcgggagatgcaggcgcaggacaggcagctggcagggcagctgctgcggctgcgggcccagctgcaccgactgaagatggaccaagcctgtcacctgcaccaggagctgctggatgaggccgagctggagctggagctggagcccggggccggcctagccctggccccgctgctgcggcacctgggcctcacgcgcatgaacatcagcgcccggcgcttcaccctctgctgaggaacacctgtgccccccgactccccgccccctctcccaatgccgcttcccctgcctgcctgggaagaggaaagggaggggtgccccagaggcaccagctcctggcgggggaggaggaacattcaggtttctgagagctgaattccaagagtgcaaaaccccagcatcctgtttcctctgctgacccagctgggagggggaggaggaggagctcacaccctcaaactcctcaataaacgctttctctggttcccaaaaaaaactct

SEQ ID NO: 19218 - DNA, 473 bp, Homo sapiens
agggaccctgtgcaggcctaggcctactatcttgttcttcccctgggcacccgtaggaaatagtcacatataatactcagcaaactatccgtttcttaaaacactaaaaccccagtgatttcaattaagtgggaataaaggtcagaatgaaaacagtgagaaaaaattttttaatccagttgtattgtacaactataaaccatgtattgtccttagtacaggttctctggagacctattctttgaataaggatgacaatgtattatttcaacctgaaacgggctttcaatcccaggaaatcttttttgctcctcactaatttgctccccaccaagtctactgccaactcctcacactgtcctcaagctatacacccctccccttctccccagtcccaacgattctcctttagatgatgtcatttctcaaggccaagaaaatgacacttcctcaattttgctcatcttactcat

SEQ ID NO: 19219 - DNA, 573 bp, Homo sapiens
acagcataaactattgtgtctttgctattgtgaagagtgctgcaatgaacaaaaatgtgcatgtatctttataataaaatggtttatattcctttgggtatatacccagtaatgggattgctgggacaaatagtatttctagttctagatctttgagaaatagtcacatataatactcagcaaactatccgtttcttaaaacactaaaaccccagtgatttcaattaagtgggaataaaggtcagaatgaaaacagtgagaaaaaattttttaatccagttgtattgtacaactataaaccatgtattgtccttagtacaggttctctggagacctattctttgaataaggatgacaatgtattatttcaacctgaaacgggctttcaatcccaggaaatcttttttgctcctcactaatttgctccccaccaagtctactgccaactcctcacactgtcctcaagctatacacccctccccttctccccagtcccaacgattctcctttagatgatgtcatttctcaaggccaagaaaatgacacttcctcaattttgctcatcttactcat

SEQ ID NO: 19220 - DNA, 3393 bp, Homo sapiens
cgcccgggggaggctccagttggctctacgaccgccgttgccgctgccagagagggccaggcagggcagggacgcgcagcatcggggcgggcgtggggccggagaaaagggtgtcggggccacacacgcaccctcgctgcagtccagctcctcccgaagctcgcacgcccagagcgcacggagcgggggactgcccgcccagacgcccgcccgccaacccgcccacgagccggggccaaagcctgggagcctgcgaggggaggaggcccaggggggcggggtggggggcgggggtgggtgccgcgctgccgcggagctgctactcggcgcgttttgcatgaagatggcggctcccaccgccaacaaggcagcctccctgggctgtaacaacaagcctgcgttcccggagctggatttcaggtcgggagctcgggtggaggaattgaacaaactcatccaagaatttacgaagcacgaccagcgggaatacgacgaccagagagcgctggagattcacacagccaaggatttcatcttttccatgctgggaatggtgcaaaagctggaccaaaagcttccagtggctaatgaatacctgttgctctctggaggtgtccgggaaggcgtggtggacctggacttagatgagcttaatgtctatgcccggggtactgactatgatatggactttaccctcttggtgccagccctcaagctgcatgaccgtaatcagcctgtgacactcgacatgcgccactcagccttgtgccactcttggctgagccttcggctctttgatgaggggacaatcagtaaatggaaagactgctgcaccattgtagatcacatcaatggtgccaccaactacttcttctcacctaccaaagtggctgactggttctatgactctatcagcattgtcctatcagaaatacagaagaaaccccagcgagggatgccaaaggtagaaaaggtggaaaaaaatgggaccatcatctccatcattctgggtgtagggagtagtcgcatgttgtatgatattgtccctgtggtatctttcaaaggttggcctgcagtggcccagagctggctcatggagaaccacttttgggatgggaagattactgaggaagaggtcatcagtgggttttacttggtgcctgcttgctcctacaagggtaagaaggacaatgaatggcggctgtcctttgccaggagcgaggtgcagttgaagaagtgcatctccagcagcctcatgcaggcctatcaggcctgcaaagccatcatcattaaactgctgtcccggcccaaggctattagcccctatcacctgcggagcatgatgctctgggcctgcgacagacttcctgccaactacttggctcaagaagactatgcagcccactttttgctgggcctcatcgatgacctgcaacactgtctggtcaacaagatgtgccccaattatttcatccctcagtgcaacatgctggaacatctgtctgaggagacagtcatgcttcacgcccggaagctgtcctctgtgcgctcagacccggcagagcacttgcgcaccgccattgagcatgtcaaggcagccaaccggctgacactggagctccagaggcgaggtagcaccaccagcatcccctctccacagtctgacggaggggaccccaaccagcctgatgaccgtttggcaaaaaaactgcagcagctagtgactgagaacccgggaaagtcaatctctgtctttatcaatcctgacgatgtcacaaggccccatttcagaattgatgacaaatttttctgagtgttagctgacttttttttttcctgattcttaaactctgataatgtgtcgtgtggtttgtgatgctatctttctgttttttacatatccagcctagattggatttgttaagaacaaattttaagtttcctggttctgcaggatggtgcaggctctgaaacagtatattactatttcatattctgcctctgatttcgttgtttactttttgtagttattgtcatgctctttagtttgttggagttttttttctttttaaggagatcttaagccatagatgaaaatgcccatgaatcctcttgcttttttctgtttcatacttggtgcaaatttgttcatgggtatggggaaacaaatctctttctgatgcttaacgattctatcctattatttttattattttgtttttgtcttttttcttatgagctttcaccactactgatatttgagaatcatatgaacctgggaactacttggcatgttagctggatttatttattttggccagtgaccagagtagtttccccccttttccaccaaacaatgtaaactttgaaagtgataatactacaaattgtgttttggagcaacttcattgaatgtaattgtcctcaaatcagagaacactgggtggtttgaagggtgtctttgacagttttccaagcagaattaaggtttccaaatgttaattttagcatatgtaattatttgaagccttatttaaatcctattaaagaacataccattataattattatttgcactaatctttgccattgtcagaattgcaaagtgtgtttcaatataaattaacaaccactctcgaaattctatcattttttcattttgcccatttctatcagtgaaatgattctttgcatttgcttagttctccttcagttgtggggtcctgctttgccctctttgatattcctggttcctgtcttactgagagaagttgttaaagctttatacatgttgaccccatctaaagctggggaaaatatacacttgatgaagtaggtgtctttgtatttatttcttttggggtcatagaggtaagcttttttgtaaaatctctactcttcctgagagttttgagaaaaactggcaggaagaacttataatccccaaatagaagataccacgtctgttcaaaagcaggtattgctatagagcagcacccaggaaatatctgtgggtggcagccttggtatagaggtgtcctgttcttcatgagtgaagttacttgcctgattaggtgctggaaggtattggctccctgttttggtgtggactcatggcaagctggtgtttaagaggtcaggaggcctgctgatctttcaaaggacacccatgatgtctactcatagaaagggcaagtaacgtgttcattttggtcttgaatgtccaaactcaagggttggattttggccaattgaaatcagacatatgcgatcttgggtttttgcatggaaattaatgtaatgcttataaatgaaaaatgaaaacatttcaaccatctaagtcaaacacaaaaataataaaaaaagaaacatactggccttgaaattttgttg

SEQ ID NO: 19221 - DNA, 446 bp, Homo sapiens
agcgatttctcatgagacctggttgtttgaaaatgtgtagcacctccctgccccttcactctctttccccttctctggccacgtaagatgtgcctgcttccctttttcttacaccatgattgtaagtttcctgaggcctccgcagccattcttcttgtacagcccttgaccatgagtcaattaaattcttttctttataaattgtctagtctcgggcagttctttatagcagcagaagaatgacctgatatatatggttcactccattatgggttccaccaatttttttctgttatgtgggttagcaacatgcttatgtattttttttctgcattttaacaaacttttttcattaattcaattaaaagcattgaattggtatattgtctaaagtttaaggcatttttaatctccttttttgcaataaattcagttttatacctgga

SEQ ID NO: 19222 - DNA, 236 bp, Homo sapiens
tggttttcataggggactattttgagatggacttctaaaactgtgtgtaattttaagagtaattagaggtaatctcaacgaataaaacatctcacaaaagatgaatcaaaatcacacctgcctcgccacaccagtcatgggctcctggaaggcagggattcttttggattatcctgacactcctactacccagaaaatatctgacacaatgtaggcatctggttaaaatgtgctaa

SEQ ID NO: 19223 - DNA, 360 bp, Homo sapiens
aacagacaatataagaaataaaaatttctaaaaaactaattatttagaaagatgaaaaaatataaccatgaatttctatcaatacaaaggtaagaactaataaataagagttattaggcttaaaattagtgtggcagaatttaaaatgagtaaaatatttggaaggtaacattaagaaaatcttctccaaaacggaaccaaaaaacccacaataaaacaaatgtatggaaataagaataataaaattatcaaacctagatatcaaacattcaactaatacaatttctaagaaaaaagaacagagaaaacataggagaggaaactattaaagaaacagcaaagcgaatattccggaactga

SEQ ID NO: 19224 - DNA, 227 bp, Homo sapiens
tctctgcacattacccagcttccccgccatgttaaaaagacaacagggaggactacaaaattccctatttaacctggcaaaggctgtaaggggctctgggccggataatgcccttgaatcctaaagtctttcttaattcctctcttgagccaaaatttggagcattgccatttcgtatcccattcagaatgtttttgtagtgaatataaacttattttcctgttaac

SEQ ID NO: 19225 - DNA, 164 bp, Homo sapiens
taaaggaatatgggatacattaaaaagttcattcgaaaaggttatataacaggaggagctttttccctcagaggtaaaaacattgtttgtcttaaagaattcagttatttatgagactttattattctctgatgatgccagatacagttaggtaacttccttgt

SEQ ID NO: 19226 - DNA, 730 bp, Homo sapiens
tggtagagacgaggccttgctatgttgcccaggctggtcttcaactcctgggctcaagtgatctgcccaccctgcctgagcctcccaaagtgctgggattacaggtgtgagccactgtgcccactatactttttatttttttatttttatttttttttcaaatatttttcatccatggatgcagtttcacatctatggagggctgactagcattcaagagcttttggtttaaaagatcaaaacatcccagcagtgttgatcagtgacaattctattaccatataaggtttcccaaatccttacccagcttagttctcttgggaagctcttaattgttcctattttctaggaagttatcaaagataacaatctcatatggaattaccaaccccctgtgtaagaatgagattttcattacctcactggtgaatcagaaaaagtatctcactattacattggtttccattctgagtcataggcctaaagtattaataaaaaagcctagagtttgaataaactgcactatcatgagcttaccaaaatcaatgacttaggatttcctgtcttttatttaaagctttaccaagttaaatgtggaatggaaactggtgacactttgcccaggaatgtcagggaggttaacttatgtctcaatttttttcatgcacagtcccaggagctactaccatgcattattttattattaccatggagctatcaccaggcatta

SEQ ID NO: 19227 - DNA, 463 bp, Homo sapiens
tggtagagacgaggccttgctatgttgcccaggctggtcttcaactcctgggctcaagtgatctgcccaccctgcctgagcctcccaaagtgctgggattacaggtgtgagccactgtgcccactatactttttatttttttatttttatttttttttcaaatatttttcatccatggatgcagtttcacatctatggagggctgactagcattcaagagcttttggtttaaaagatcaaaacatcccagcagtgttgatcagtgacaattctattaccatataaggtttcccaaatccttacccagcttagttctcttgggaagctcttaattgttcctattttctaggaagttatcaaagataacaatctcatatggaattaccaaccccctgtgtaagaatgagaggctgagaaggcggcggctgaggagaaggcggccggcgtgaggagaaagcggccc

SEQ ID NO: 19228 - DNA, 183 bp, Homo sapiens
gtagaactaagttttttatgtgagtactttgccctactgtctatatgatgacatcttttttgagcagctaaattttaaattgtatatactttattttgtgaatccttgttgaatgtgctaaaggtttctttgtgtagttcttccatgctatgcgaatattttagtaaaagtagttgattttta

SEQ ID NO: 19229 - DNA, 456 bp, Homo sapiens
cctactaaagttagatgggtagagccatggtgatacttcatttaccacctctgtaatctaagaacagaagctatcacatgtctatgacatgtcagacactgctagcatgttcttacaagggaggttattattctcatttccagagaagcatccagtcctcaggactaagtactcttaatgtctgttggtttatctgttctttgaatagatcttttgtccatgcatgattttacattgtcatgttaactaccggtttactgagttatgaagatcttccaaatgttgacacatttcattgttcaatatccagaagccgccataattaatatcagcatcaatctctgtggaaaagtcttggagtgctctcagtcaagtacaagcttcccaaaattctaattttcacttgaaatcttagatattgttgttgacaataaacgctgtcagttgtttgccttg

SEQ ID NO: 19230 - DNA, 769 bp, Homo sapiens
ggcttctagttgcagtaggagggacgaattgagagcaagggtttaaggactaaatgcagggtgcagtacagtgtcagtgtcagtgtgcagtgctcaggaaatatttgttgaaggggaagagtatgcttcttcagtccaaggtggaagcatgaaggaaactgtaagcacattgatctagaccacagtttcaggtacagaggggagcgttaactaaagctcagagcggggaaagcacagggtgcttacaaaatggcaaatgctgtcatttaggccagaatcctactcacactgctgctgtatatcctcttcatctgtgtttaggattttgaaatgcatttttgttggattattgccccactagaaaaaacagttcagatctgttgcagtttcacatttgaaactactttcattctggaatccttatccttagaccttcctaataatttctgtggtcacactggacctgatctcttcctgtgctaaacaaaagcacacaatcacaaaactgtgtaggcataaatgagaggcatatgggagtggtgtaaaaggaactggaagagtcttaatatgcctgggtgggcgagctaaactaatagctcccagcagtttttctgaatcagacattgtggagccaggagtctagcatttggaattccactgcctgtgcaaagggtctgtcttttatcctccaaaccaccatttgttaactggttaatgacccagtggacccgttgacaacaaaggagggaaagctggtaaagatcaagtt

SEQ ID NO: 19231 - DNA, 159 bp, Homo sapiens
tacatggcaaaccaatccaagagatggtgaccgatgggtccataaagactctggctggcaatgctgtcagcttccttcagctgagcgtcagttagttaccctggtagtctcaaatgtctccttgtgtctggagacaacatagggcctggccctgaggac

SEQ ID NO: 19232 - DNA, 271 bp, Homo sapiens
gaagtctgttgaaatgatctgaacccttcaaaaaatattggtaattcattgtggctatatttatttttattagtttctctatgttgcctgttttattgactttccacagcaaaccaccacccccaccagcaccaccaaataccgttgtattttgattccttatgttctttattagcaggcttacttctctcttcatagaactatgcctttgccccactgctccatttcagagcattcggggctattcctggtaagaagccagcattagtta

SEQ ID NO: 19233 - DNA, 524 bp, Homo sapiens
gggctttagtgttttggctgcatctgacctcattgaaggaatttcttgggagtcgggggtgtttgagtatatgtgtgtgtgtgtaactatcatgtgggttttaaaaatccttttttacagtggtatccacaaaatacttctctgcttataaatgttattgtagaaatctttattctgtgtaggtagcctatttaattgggttccactgaacctcatgggacttttaaaagaagggctatttaaggaattcacttggtagtactttgctttagcttttaaatggcttgattttaaaggagaaattctatttattaatgaaagtgtcacccttttggtgctaagcaggagaattcacaattaaagcagtgtgtatagaattatgatattcagaatcctgcatcttttaatgtgacaaatttttgaatcctgtgacttttgctttttaatgcattatatgattgtgtttggaagcttttactgttcttttcagaaatacggctgctttgcttgggtctcttcgagcc

SEQ ID NO: 19234 - DNA, 909 bp, Homo sapiens
aacttgttcttcaaaagccctatttggggagaagtgtgctccttctctaaaaccgctgggtggcgctagtgcgaccaaaatcttctcccccgctatgaaaagaaaacctgaccaccaacaaaacaaaaaagacgaaacaaaaatggcgacaataaaaacaacatgccccccccggattacagggaaaaccagttacagggaggactaccacctattaaaagtatttttctggaaacagctggcgattaccctccaaaagtttaattaccattattgaaaacgcgtattggaactgccttggataatcttgggaagagggaaagaaaataaagccccaaggtaaaaaatacttttaagacgtggacagaaaaatataggatcacgtaatattttgatggtaactgacttatttagatttatgtattcacaagtttacctctgagtttatttgcataccatagtttactgggtgttcctatttaaatctatttgttctcatattttcaaattgagtcatacttgctgattaaaataaacttaaggacatcattattccttattaaattaccagaggagtgctttttaatatgcctaggttttgtatgtttaaaatactgtacctaatgcattcccacatcgctattgataaggattttcgcttgttgatgattttaaaaggagctcagaggtcttccagagatttaattctgacgcagtcatctcgaccccaccattcaattaagacccctagcgaaagtactttcttacatgttaaagctgagaattaggaaatacaatagcattaagagaaaataagtagaatttgattttcgaattttaaattattcaagactactcacggaatctcaaagccaggcgttgaaatcatcggcagcaacatcagcatgt

SEQ ID NO: 19235 - DNA, 479 bp, Homo sapiens
gaaagagcctcccagctcttagagtttgattttcgcaactcagttcacatcttcttcttactccaggttcccagctccttgagccttgcccgtgaaggggttggagtcaggatgggaagccttgagctgccttgacctgctccatctctgactcagggatgtgccctgcttgtcacagcatgggtgtgctgggccttggggcatcttttcaggcagagagcaagacgttggcattgtggaaagctgtacctccaaacagcagcccattcacagactacagaggaagaaaagaccacacttgctacagtaacaatgcaattcagtaccagggaataacttaacatgaaacatgtcaaatctatgtaaacaactggaaggcactcctaaaaaatacaaaaaagaatttgaaaaaaaaaatcatgttctaaattagggaagtttgaggttctaaatatatcaattcttcctaagttaattta

SEQ ID NO: 19236 - DNA, 922 bp, Homo sapiens
gtccatcttgctgctgtccactttgggttccatcttgggctccatcttgctctcacgattaaaagcttctttcctgctttccccattccgaccatcatttgcaccccggttctccccatgccggcctgcgcttcctccatgtctgttctccccgtgccgatggccatcagtatgacggctgctgctttctggatggcggtatccatctccatggcgaccaccatctccgtgacgtggactatcgctatgccgattgccagtctctccgtgactgtgacggctgctgccccggttctcagtatatctctctcttttcccgttgctgcccccagtcccttctcggctgttattccctgaagctgtgttgttgactccttgggctccggcagacgggtaggtcacaggggcaccactgatgttgccagtattgccaaagcctgggatgcccttggcggcactggtgacggggctgtcaggactgttatggccctgttgtgctgagttagttggaacagaattcaagctccctgcactagccacctgccccactgcttcttcgcttctctcttggaaagtccagtctctcctcggcttgcaatggaccccaactgctcctgcgccgctggtgtctcctgcacctgcgctggttcctgcaagtgcaaagagtgcaaatgcacctcctgcaagaagagctgctgctcctgctgccccgtgggctgtagcaagtgtgcccagggctgtgtttgcaaaggggcgtcagagaagtgcagctgctgcgactgatgccaggacaacctttctcccagatgtaaacagagagacatgtacaaacctggattttttttttataccaccttgacccatttgctacattccttttcctgtgaaatatgtgagtgataattaaacactttagacctga

SEQ ID NO: 19237 - DNA, 652 bp, Homo sapiens
ggaagggcgggcaggagggcagggaagccgctcacccaggcacaaagcgcctcccgcttgagcggactccaaagggacggtccgcggtgtgcagcgagctgcgctcaggggaccttgcgcccggcccttctgctgcacacagcccacccaggacctcccgcagcgctgacaggcggggcgggtgcaaagacggggcggggtctctgcgcccggcccctcccctgactatcaaagcagcggccggctgttggggtccaccacgccttccacctgccccactgcttcttcgcttctctcttggaaagtccagtctctcctcggcttgcaatggaccccaactgctcctgcgccgctggtgtctcctgcacctgcgctggttcctgcaagtgcaaagagtgcaaatgcacctcctgcaagaagagctgctgctcctgctgccccgtgggctgtagcaagtgtgcccagggctgtgtttgcaaaggggcgtcagagaagtgcagctgctgcgactgatgccaggacaacctttctcccagatgtaaacagagagacatgtacaaacctggattttttttttataccaccttgacccatttgctacattccttttcctgtgaaatatgtgagtgataattaaacactttagacctga

SEQ ID NO: 19238 - DNA, 477 bp, Homo sapiens
gcggccgcctactactactaaattcgcggccgcgtcgacacccacctgccccactgcttcttcgcttctctcttggaaagtccagtctctcctcggcttgcaatggaccccaactgctcctgcgccgctggtgtctcctgcacctgcgctggttcctgcaagtgcaaagagtgcaaatgcacctcctgcaagaagagctgctgctcctgctgccccgtgggctgtagcaagtgtgcccagggctgtgtttgcaaaggggcgtcagagaagtgcagctgctgcgactgatgccaggacaacctttctcccagatgtaaacagagagacatgtacaaacctggattttttttttataccaccttgacccatttgctacattccttttcctgtgaaatatgtgagtgataattaaacactttagacctgaaaaaaaaaaagtcgacgcggccgcgaatttagtagtagtaggcggccgct

SEQ ID NO: 19239 - DNA, 2089 bp, Homo sapiens
ggaagggcgggcaggagggcagggaagccgctcacccaggcacaaagcgcctcccgcttgagcggactccaaagggacggtccgcggtgtgcagcgagctgcgctcaggggaccttgcgcccggcccttctgctgcacacagcccacccaggacctcccgcagcgctgacaggcggggcgggtgcaaagacggggcggggtctctgcgcccggcccctcccctgactatcaaagcagcggccggctgttggggtccaccacgccttccacctgccccactgcttcttcgcttctctcttggaaagtccagtctctcctcggcttgcaatggaccccaactgctcctgcgccgctggtaaggaacgccgggttccgtgcctggggatgctcgattcccagacaccatagagagtgttcctgggtttgagaaggtcgtattttgagatctcaactgtaggggactccttgacttagtccagtgctttcctcttggccaagatcctgagagcatttccttcctctctgtgcctctgtgtcagcgttgagggtactgaggctcaaggctgtcctgctccacgtcatgcggtttgtcccagggctgttggctgagccccagtgctctgaccaggctttgagcagcaggattagataggaggcaggggacattgcctcttcggggttcaggacagaaagtcgaagtcgccgtcttcccaggctgtgcctggagcctgggactttccctttggagtgcaaacaggaggctgcttggccttcccagcatgaagggagaggacatggggcttctcttcctctgctctgagtgggaaaggagctctgagggctggccccgcacagaggagggggcaatggagactcattaactcactgctgtacctcctgcaggtcactcgccgctcactggctttttttttctctttctcgcaggtgtctcctgcacctgcgctggttcctgcaagtgcaaagagtgcaaatgcacctcctgcaagaagagtgagtgtgaggccatctccatggtctggggctgtggctaaggttgggatggaacccaaggctggccctgagtgcatgcttctggggaactggccttcctttgtccccgtaggttgtcactgcctttctagtcttctgccctgtgcaagggcgcctgggcagctttctcataggaagacccaccccagatatttcccagttgtctcctgacaaagccataccctcctgaactgagggtcctttgtggctggaggctctgttgggggcctctgttggggagggaggtccctgggcaagttggctgtgacctctcatgctcctcttcttccccaggctgctgctcctgctgccccgtgggctgtagcaagtgtgcccagggctgtgtttgcaaaggggcgtcagagaagtgcagctgctgcgactgatgccaggacaacctttctcccagatgtaaacagagagacatgtacaaacctggattttttttttataccaccttgacccatttgctacattccttttcctgtgaaatatggcagcaaagtgactggagatgtggaggaaagcgtcatctcagcaacgcagagtcatgagaaggactgggtgcagatgaaggatgttgagtgtgctgatgcagtggtgatggcatattctgcagttggaaggtgtgttgctgttcaagaaggagagaggagtcaccctggtgactggtagttaggccaacagtaggttccactggctactggttcgagaattgctatctgatgttcaatcacagaggaagaggagttaagtggcccaggagtcaggaccatgcttgcccgcaggtgccctttgtgaagagggcatttcagaaggcagcgtgggtcatgtgcaagtttgggtgtcacataaccagattcacagcccacttcacaccttcctggctgtgtagctggcacaagtcacttaacctctctgtgcctccatttcctcacttgtagaaagcagattataaatatatgtagggattaaatgtgatagtgccctggtacctggctcgggcttaataaacagtgctgttataatcatttgtcca

SEQ ID NO: 19240 - DNA, 1242 bp, Homo sapiens
ggaagggcgggcaggagggcagggaagccgctcacccaggcacaaagcgcctcccgcttgagcggactccaaagggacggtccgcggtgtgcagcgagctgcgctcaggggaccttgcgcccggcccttctgctgcacacagcccacccaggacctcccgcagcgctgacaggcggggcgggtgcaaagacggggcggggtctctgcgcccggcccctcccctgactatcaaagcagcggccggctgttggggtccaccacgccttccacctgccccactgcttcttcgcttctctcttggaaagtccagtctctcctcggcttgcaatggaccccaactgctcctgcgccgctggtaaggaacgccgggttccgtgcctggggatgctcgattcccagacaccatagagagtgttcctgggtttgagaaggtcgtattttgagatctcaactgtaggggactccttgacttagtccagtgctttcctcttggccaagatcctgagagcatttccttcctctctgtgcctctgtgtcagcgttgagggtactgaggctcaaggctgtcctgctccacgtcatgcggtttgtcccagggctgttggctgagccccagtgctctgaccaggctttgagcagcaggattagataggaggcaggggacattgcctcttcggggttcaggacagaaagtcgaagtcgccgtcttcccaggctgtgcctggagcctgggactttccctttggagtgcaaacaggaggctgcttggccttcccagcatgaagggagaggacatggggcttctcttcctctgctctgagtgggaaaggagctctgagggctggccccgcacagaggagggggcaatggagactcattaactcactgctgtacctcctgcaggtcactcgccgctcactggctttttttttctctttctcgcaggtgtctcctgcacctgcgctggttcctgcaagtgcaaagagtgcaaatgcacctcctgcaagaagagctgctgctcctgctgccccgtgggctgtagcaagtgtgcccagggctgtgtttgcaaaggggcgtcagagaagtgcagctgctgcgactgatgccaggacaacctttctcccagatgtaaacagagagacatgtacaaacctggattttttttttataccaccttgacccatttgctacattccttttcctgtgaaatatgtgagtgataattaaacactttagacctga

SEQ ID NO: 19241 - DNA, 964 bp, Homo sapiens
gtccatcttgctgctgtccactttgggttccatcttgggctccatcttgctctcacgattaaaagcttctttcctgctttccccattccgaccatcatttgcaccccggttctccccatgccggcctgcgcttcctccatgtctgttctccccgtgccgatggccatcagtatgacggctgctgctttctggatggcggtatccatctccatggcgaccaccatctccgtgacgtggactatcgctatgccgattgccagtctctccgtgactgtgacggctgctgccccggttctcagtatatctctctcttttcccgttgctgcccccagtcccttctcggctgttattccctgaagctgtgttgttgactccttgggctccggcagacgggtaggtcacaggggcaccactgatgttgccagtattgccaaagcctgggatgcccttggcggcactggtgacggggctgtcaggactgttatggccctgttgtgctgagttagttggaacagaattcaagctccctgcactagccacctgccccactgcttcttcgcttctctcttggaaagtccagtctctcctcggcttgcaatggaccccaactgctcctgcgccgctggtgtctcctgcacctgcgctggttcctgcaagtgcaaagagtgcaaatgcacctcctgcaagaagagtgagtgtgaggccatctccatggtctggggctgtggctaaggctgctgctcctgctgccccgtgggctgtagcaagtgtgcccagggctgtgtttgcaaaggggcgtcagagaagtgcagctgctgcgactgatgccaggacaacctttctcccagatgtaaacagagagacatgtacaaacctggattttttttttataccaccttgacccatttgctacattccttttcctgtgaaatatgtgagtgataattaaacactttagacctga

SEQ ID NO: 19242 - DNA, 427 bp, Homo sapiens
gcggccgcctactactactaaattcgcggccgcgtcgacacccacctgccccactgcttcttcgcttctctcttggaaagtccagtctctcctcggcttgcaatggaccccaactgctcctgcgccgctggtgtctcctgcacctgcgctggttcctgcaagtgcaaagagtgcaaatgcacctcctgcaagaagagctgctgctcctgctgccccgtgggctgtagcaagtgtgcccagggctgtgtttgcaaaggggcgtcagagaagtgcagctgctgcgactgatgccaggacaacctttctcccagatgtaaacagagagacatgtacaaacctggattttttttttataccaccttgacccatttgctacattccttttcctgtgaaatatgtgagtgataattaaacactttagacctga

SEQ ID NO: 19243 - DNA, 849 bp, Homo sapiens
ggaagggcgggcaggagggcagggaagccgctcacccaggcacaaagcgcctcccgcttgagcggactccaaagggacggtccgcggtgtgcagcgagctgcgctcaggggaccttgcgcccggcccttctgctgcacacagcccacccaggacctcccgcagcgctgacaggcggggcgggtgcaaagacggggcggggtctctgcgcccggcccctcccctgactatcaaagcagcggccggctgttggggtccaccacgccttccacctgccccactgcttcttcgcttctctcttggaaagtccagtctctcctcggcttgcaatggaccccaactgctcctgcgccgctggtgtctcctgcacctgcgctggttcctgcaagtgcaaagagtgcaaatgcacctcctgcaagaagagctgctgctcctgctgccccgtgggctgtagcaagtgtgcccagggctgtgtttgcaaaggggcgtcagagaagtgcagctgctgcgactgatgccaggacaacctttctcccagatgtaaacagagagacatgtacaaacctggattttttttttataccaccttgacccatttgctacattccttttcctgtgaaatatgtgagtgataattaaacactttagacctgaaaaaaaaaaaaaaaaaaaaaaaaaaaaacaatgtgtgtgtgcggcgcgcccatgcggcccctggaagaagagtctttcgaaagaaccacactgcgtggggagccccgggggcccccggtaggtgttcgcgtggaccacggtggcccaacaggcgggttcccagaggaaaaaccgcggggccaggaaccaagggccgg

SEQ ID NO: 19244 - DNA, 2052 bp, Homo sapiens
ggaagggcgggcaggagggcagggaagccgctcacccaggcacaaagcgcctcccgcttgagcggactccaaagggacggtccgcggtgtgcagcgagctgcgctcaggggaccttgcgcccggcccttctgctgcacacagcccacccaggacctcccgcagcgctgacaggcggggcgggtgcaaagacggggcggggtctctgcgcccggcccctcccctgactatcaaagcagcggccggctgttggggtccaccacgccttccacctgccccactgcttcttcgcttctctcttggaaagtccagtctctcctcggcttgcaatggaccccaactgctcctgcgccgctggtaaggaacgccgggttccgtgcctggggatgctcgattcccagacaccatagagagtgttcctgggtttgagaaggtcgtattttgagatctcaactgtaggggactccttgacttagtccagtgctttcctcttggccaagatcctgagagcatttccttcctctctgtgcctctgtgtcagcgttgagggtactgaggctcaaggctgtcctgctccacgtcatgcggtttgtcccagggctgttggctgagccccagtgctctgaccaggctttgagcagcaggattagataggaggcaggggacattgcctcttcggggttcaggacagaaagtcgaagtcgccgtcttcccaggctgtgcctggagcctgggactttccctttggagtgcaaacaggaggctgcttggccttcccagcatgaagggagaggacatggggcttctcttcctctgctctgagtgggaaaggagctctgagggctggccccgcacagaggagggggcaatggagactcattaactcactgctgtacctcctgcaggtcactcgccgctcactggctttttttttctctttctcgcaggtgtctcctgcacctgcgctggttcctgcaagtgcaaagagtgcaaatgcacctcctgcaagaagagtgagtgtgaggccatctccatggtctggggctgtggctaaggttgggatggaacccaaggctggccctgagtgcatgcttctggggaactggccttcctttgtccccgtaggttgtcactgcctttctagtcttctgccctgtgcaagggcgcctgggcagctttctcataggaagacccaccccagatatttcccagttgtctcctgacaaagccataccctcctgaactgagggtcctttgtggctggaggctctgttgggggcctctgttggggagggaggtccctgggcaagttggctgtgacctctcatgctcctcttcttccccaggctgctgctcctgctgccccgtgggctgtagcaagtgtgcccagggctgtgtttgcaaaggggcgtcagagaagtgcagctgctgcgactgatgccaggacaacctttctcccagatgtaaacagagagacatgtacaaacctggattttttttttataccaccttgacccatttgctacattccttttcctgtgaaatatgtgagtgataattaaacactttagacctgagattctgacttcagtttcccttatgtgcttcagaaatcagagactggggtgggggatcgaactagggttgcagactcctgggctctaaatggaaatctgagtccctaacaatcagagtgcattaaggcaagccaggctgcctcactgtgcttcctcttctgtagaatggaataacacttcatcaggtcattggtggggatccagaatacaggatcaccttcattctcaaatgtggcacagaaacttctcaatgcctcctgttccttctctgatttctctgcccaacttcaattcctctttggatttcaggttagaaagtgactacacggaatggaatcaaaccccttagttatttgaattctacaccgggcttctcaaactccagggtgaaggaggggtttttaattcctatccattccacatctaaaccttggtaaatgaaataatactaatgatggaagtcatgaaattaaattc

SEQ ID NO: 19245 - DNA, 291 bp, Homo sapiens
agggagccacttctttaccgctagctcctgcaggatctgtgggatcctgcaggtgctggtttgcctcctgagccctgtcctaaggacactctgcacatcgcctcctggtgagtgagctgggggacttcttctggatacatctgaatcacttcattcgcacctcaaggctctctgggaggaaagctggtgcaggaactagtgtcttaggattatgagggaggacgtggaggcagaggtgaggacggagctaaagccaagctgcagggagcctttgggcaggaagcggagctt

SEQ ID NO: 19246 - DNA, 505 bp, Homo sapiens
tgctcccttactgccagtttcctatttattagatgacacatttcaacaaaaaactcagattaaaaaatggtcaacatttgctgtgactatggctagaaagaaggaataaataggataccaggataaacaagaatttccctagcttctcattcactctctcataacctcccacccaaaagtctatcttaaatatagtttcagagtatggagaggactgaggaatgcagaatgaaatgacaggttaatattagaaatgccattgtgggagactctcaggaatgatttcaaccttcacctgcagtttcacttaaatcacaccaggtatagaatcattgtgactcagtggtttatgcaacaatctggaaactcaggacctgtaagctttggccatgtgtctgacatttgttttccacaagtaagctaatcatgttcactcactgtgcttcatttagcttttatctattaatgaagaaaatgatatgaaattacttcccagggttgtaaa

SEQ ID NO: 19247 - DNA, 416 bp, Homo sapiens
cctgtttctggcgtggccttccctgggagcgagttagggacacggaagctcacccgcttctgaatgggtccactcctggggatttccgcggccttccctgggagcgggttagggacacggaagctcacccccttctgaatgggtccactcctggggatttccgcggccttccctgggagcgggttagggacatggaagctcaccctcttctgaatgggtccactcctggggatttccacggcctttcctgggagcaggttagggacatggaagctcacgcccttctgaatgggtccactcccggggatttccatggccttccctggatgatccactcctggggattttccgcagctctccagatgacgtgcacgcacactaaacacccagaagttagggaggcactgatccagtga

SEQ ID NO: 19248 - DNA, 1712 bp, Homo sapiens
aggttcggggcggggcgcgctacccgcagtccccggagctcggctaactcggcgcccagtgcacggccgcaccatggggtcccgccacttcgaggggatttatgaccacgtggggcacttcggcagattccagagagtcctctatttcatatgtgccttccagaacatctcttgtggtattcactacttggcttctgtgttcatgggagtcacccctcatcatgtctgcaggcccccaggcaatgtgagtcaggttgttttccataatcactctaattggagtttggaggacaccggggccctgttgtcttcaggccagaaagattatgttacggtgcagttgcagaatggtgagatctgggagctctcaaggtgtagcaggaataagagggagaacacatcgagtttgggctatgaatacactggcagtaagaaagagtttccttgtgtggatggctacatatatgaccagaacacatggaaaagcactgcggtgacccagtggaacctggtctgtgaccgaaaatggcttgcaatgctgatccagcccctatttatgtttggagtcctactgggatcggtgacttttggctacttttctgacagggtaaaatcaaatatttaggattgttgtatcagtgtagggtttattttcctatctggttttcttgggacacaaggaattatgtttaaaacttgtcatttttatacttcctatctaaatacctacctctttgctgatccattatttagggatgtataatgataaggataggctctgaagacagtatacctagatccaaatcctggttctaccacttattaactgtggaccccaggcaaattgcctaacttacctgtgtttcagaatctttgtctataggctggtgataaaaaataatatcacttacttcaaaggattattgcaaaattaatacagaaaaaaagtaccctggacatataatcactcaatagatacggtttattactttgaatattttcttctctttaaatagacttgctttttaataggagtagcctgatcctaagcagtatatctgtaaaattatgggcttgatataacagccccttttagtctttttgtgctgctgtaacaaaataccacagactgggtaattcacaaacaatagaaatttatttcccatagttctggcggctgggaagcccaagataaggtgccaacaggattgctgactgggaaggctgttgtttgctttcaagatggtgccttattgctgcatcctttggatgggataaatgcagtgtcctcacatggaagaagggatggaagggcaggagagtgctcccttcaaccttgagcacttttctaagggtgctaagggctctactgtcatgactttatcacctcccaaggccatccctcttaatagtgttgcactggagattaagtttcaacatgaattttggagggaatactatcattcaaagcataacctggccatatatttttaaaaatttacattaaaatgaatatgtaattcttaaaataaagcaaagtttatctctgtatgaacatggaccataccaaagcacagagatgaacttatttggtctccatagttgtggattttacagtcatatggtgggcactgaggacctaaagacaatagcttagatcagaaatccctgcccttgaggtataccagtctaatggggctgataaacatgtc

SEQ ID NO: 19249 - DNA, 479 bp, Homo sapiens
tgaaaacagttaggaaattctattctccgaagggttcgttcctttcttgatgtgtcacttatcattatttttaattccttctagttgtttgttgggactatggccctcctgagtggagtgttaacactaaagcttccagaaacccttgggaaacggctagcaactacttgggaggaggctgcaaaactggagtcagagaatgaaagcaagtcaagcaaattacttctcacaactaataatagtgggctggaaaaaacggaagcgattacccccagggattctggtcttggtgaataaatgtgccatgcctgctgtctagcacctgaaatattatttaccctaatgcctttgtattagaggaatcttattctcatctcccatatgttgtttgtatgtctttttaataaattttgtaagaaaattttaaagcaaatatgttataaaagaaataaaaactaagatgaaaattctcagtttta

SEQ ID NO: 19250 - DNA, 679 bp, Homo sapiens
gcagactttaatttttaatgtgacctgcatttttaaaagcaaacgccttggcgctagtctaaaaggctgccttttatgtgtcaaaatctggaaaataaagaaatcacaccgaactgtataggaaattatatggatccctgccccataaagtagcaatttgttttcactgcctttgtttagcttcccccaaattccgtagattctggttgattgaaacctgttttcattcattcattccctatcatttactgaaccctgatagtgtactgattattggggcagggacagggttgactaagacagtccctgcttggcatgtcctgacccagggctcagttacttgtcttctccacaagattctggggtctggaaagatggggtaagtgtcttttttctttctgaccacagctcctaggacagcacttctcacaactaataatagtgggctggaaaaaacggaagcgattacccccagggattctggtcttggtgaataaatgtgccatgcctgctgtctagcacctgaaatattatttaccctaatgcctttgtattagaggaatcttattctcatctcccatatgttgtttgtatgtctttttaataaattttgtaagaaaattttaaagcaaatatgttataaaagaaataaaaactaagatgaaaattctcagtttta

SEQ ID NO: 19251 - DNA, 1989 bp, Homo sapiens
aggttcggggcggggcgcgctacccgcagtccccggagctcggctaactcggcgcccagtgcacggccgcaccatggggtcccgccacttcgaggggatttatgaccacgtggggcacttcggcagattccagagagtcctctatttcatatgtgccttccagaacatctcttgtggtattcactacttggcttctgtgttcatgggagtcacccctcatcatgtctgcaggcccccaggcaatgtgagtcaggttgttttccataatcactctaattggagtttggaggacaccggggccctgttgtcttcaggccagaaagattatgttacggtgcagttgcagaatggtgagatctgggagctctcaaggtgtagcaggaataagagggagaacacatcgagtttgggctatgaatacactggcagtaagaaagagtttccttgtgtggatggctacatatatgaccagaacacatggaaaagcactgcggtgacccagtggaacctggtctgtgaccgaaaatggcttgcaatgctgatccagcccctatttatgtttggagtcctactgggatcggtgacttttggctacttttctgacaggctaggacgccgggtggtcttgtgggccacaagcagtagcatgtttttgtttggaatagcagcggcgtttgcagttgattattacaccttcatggctgctcgcttttttcttgccatggttgcaagtggctatcttgtggtggggtttgtctatgtgatggaattcattggcatgaagtctcggacatgggcgtctgtccatttgcattccttttttgcagttggaaccctgctggtggctttgacaggatacttggtcaggacctggtggctttaccagatgatcctctccacagtgactgtcccctttatcctgtgctgttgggtgctcccagagacacctttttggcttctctcagagggacgatatgaagaagcacaaaaaatagttgacatcatggccaagtggaacagggcaagctcctgtaaactgtcagaacttttatcactggacctacaaggtcctgttagtaatagccccactgaagttcagaagcacaacctatcatatctgttttataactggagcattacgaaaaggacacttaccgtttggctaatctggttcactggaagtttgggattctactcgttttccttgaattctgttaacttaggaggcaatgaatacttaaacctcttcctcctgggtgtagtggaaattcccgcctacaccttcgtgtgcatcgccatggacaaggtcgggaggagaacagtcctggcctactctcttttctgcagtgcactggcctgtggtgtcgttatggtgatcccccagaaacattatattttgggtgtggtgacagctatggttggaaaatttgccatcggggcagcatttggcctcatttatctttatacagctgagctgtatccaaccattgtaagatcgctggctgtgggaagcggcagcatggtgtgtcgcctggccagcatcctggcgccgttctctgtggacctcagcagcatttggatcttcataccacagttgtttgttgggactatggccctcctgagtggagtgttaacactaaagcttccagaaacccttgggaaacggctagcaactacttgggaggaggctgcaaaactggagtcagagaatgaaagcaagtcaagcaaattacttctcacaactaataatagtgggctggaaaaaacggaagcgattacccccagggattctggtcttggtgaataaatgtgccatgcctgctgtctagcacctgaaatattatttaccctaatgcctttgtattagaggaatcttattctcatctcccatatgttgtttgtatgtctttttaataaattttgtaagaaaattttaaagcaaatatgttataaaagaaataaaaactaagatgaaaattctcagtttta

SEQ ID NO: 19252 - DNA, 1633 bp, Homo sapiens
ttctcgcgcggcgctcgcgatccgaaaacatctccacttcctcctcaccccgcgcagtcgggacacgggcgtccagacgccggccccgagctgggcttctcctctaggcctctggcagcgggacctggcatgattccagagagtcctctatttcatatgtgccttccagaacatctcttgtggtattcactacttggcttctgtgttcatgggagtcacccctcatcatgtctgcaggcccccaggcaatgctaggacgccgggtggtcttgtgggccacaagcagtagcatgtttttgtttggaatagcagcggcgtttgcagttgattattacaccttcatggctgctcgcttttttcttgccatggttgcaagtggctatcttgtggtggggtttgtctatgtgatggaattcattggcatgaagtctcggacatgggcgtctgtccatttgcattccttttttgcagttggaaccctgctggtggctttgacaggatacttggtcaggacctggtggctttaccagatgatcctctccacagtgactgtcccctttatcctgtgctgttgggtgctcccagagacacctttttggcttctctcagagggacgatatgaagaagcacaaaaaatagttgacatcatggccaagtggaacagggcaagctcctgtaaactgtcagaacttttatcactggacctacaaggtcctgttagtaatagccccactgaagttcagaagcacaacctatcatatctgttttataactggagcattacgaaaaggacacttaccgtttggctaatctggttcactggaagtttgggattctactcgttttccttgaattctgttaacttaggaggcaatgaatacttaaacctcttcctcctgggtgtagtggaaattcccgcctacaccttcgtgtgcatcgccatggacaaggtcgggaggagaacagtcctggcctactctcttttctgcagtgcactggcctgtggtgtcgttatggtgatcccccagaaacattatattttgggtgtggtgacagctatggttggaaaatttgccatcggggcagcatttggcctcatttatctttatacagctgagctgtatccaaccattgtaagatcgctggctgtgggaagcggcagcatggtgtgtcgcctggccagcatcctggcgccgttctctgtggacctcagcagcatttggatcttcataccacagttgtttgttgggactatggccctcctgagtggagtgttaacactaaagcttccagaaacccttgggaaacggctagcaactacttgggaggaggctgcaaaactggagtcagagaatgaaagcaagtcaagcaaattacttctcacaactaataatagtgggctggaaaaaacggaagcgattacccccagggattctggtcttggtgaataaatgtgccatgcctgctgtctagcacctgaaatattatttaccctaatgcctttgtattagaggaatcttattctcatctcccatatgttgtttgtatgtctttttaataaattttgtaagaaaattttaaagcaaatatgttataaaagaaataaaaactaagatgaaaattctcagtttta

SEQ ID NO: 19253 - DNA, 1941 bp, Homo sapiens
aggttcggggcggggcgcgctacccgcagtccccggagctcggctaactcggcgcccagtgcacggccgcaccatggggtcccgccacttcgaggggatttatgaccacgtggggcacttcggcagattccagagagtcctctatttcatatgtgccttccagaacatctcttgtggtattcactacttggcttctgtgttcatgggagtcacccctcatcatgtctgcaggcccccaggcaatgtgagtcaggttgttttccataatcactctaattggagtttggaggacaccggggccctgttgtcttcaggccagaaagattatgttacggtgcagttgcagaatggtgagatctgggagctctcaaggtgtagcaggaataagagggagaacacatcgagtttgggctatgaatacactggcagtaagaaagagtttccttgtgtggatggctacatatatgaccagaacacatggaaaagcactgcggtgacccagtggaacctggtctgtgaccgaaaatggcttgcaatgctgatccagcccctatttatgtttggagtcctactgggatcggtgacttttggctacttttctgacaggctaggacgccgggtggtcttgtgggccacaagcagtagcatgtttttgtttggaatagcagcggcgtttgcagttgattattacaccttcatggctgctcgcttttttcttgccatggttgcaagtggctatcttgtggtggggtttgtctatgtgatggaattcattggcatgaagtctcggacatgggcgtctgtccatttgcattccttttttgcagttggaaccctgctggtggctttgacaggatacttggtcaggacctggtggctttaccagatgatcctctccacagtgactgtcccctttatcctgtgctgttgggtgctcccagagacacctttttggcttctctcagagggacgatatgaagaagcacaaaaaatagttgacatcatggccaagtggaacagggcaagctcctgtaaactgtcagaacttttatcactggacctacaaggtcctgttagtaatagccccactgaagttcagaagcacaacctatcatatctgttttataactggagcattacgaaaaggacacttaccgtttggctaatctggttcactggaagtttgggattctactcgttttccttgaattctgttaacttaggaggcaatgaatacttaaacctcttcctcctgggtgtagtggaaattcccgcctacaccttcgtgtgcatcgccatggacaaggtcgggaggagaacagtcctggcctactctcttttctgcagtgcactggcctgtggtgtcgttatggtgatcccccagaaacattatattttgggtgtggtgacagctatggttggaaaatttgccatcggggcagcatttggcctcatttatctttatacagctgagctgtatccaaccattgtaagatcgctggctgtgggaagcggcagcatggtgtgtcgcctggccagcatcctggcgccgttctctgtggacctcagcagcatttggatcttcataccacagttgtttgttgggactatggccctcctgagtggagtgttaacactaaagcttccagaaacccttgggaaacggctagcaactacttgggaggagtcagagaatgaaagcaagtcaagcaaattacttctcacaactaataatagtgggctggaaaaaacggaagcgattaccttggtgaataaatgtgccatgcctgctgtctagcacctgaaatattatttaccctaatgcctttgtattagaggaatcttattgtttgtatgtctttttaataaattttgtaagaaaattttaaagcaaatatgttataaaagaaataaaaactaagatgaaaattctcagtttta

SEQ ID NO: 19254 - DNA, 870 bp, Homo sapiens
gcagactttaatttttaatgtgacctgcatttttaaaagcaaacgccttggcgctagtctaaaaggctgccttttatgtgtcaaaatctggaaaataaagaaatcacaccgaactgtataggaaattatatggatccctgccccataaagtagcaatttgttttcactgcctttgtttagcttcccccaaattccgtagattctggttgattgaaacctgttttcattcattcattccctatcatttactgaaccctgatagtgtactgattattggggcagggacagggttgactaagacagtccctgcttggcatgtcctgacccagggctcagttacttgtcttctccacaagattctggggtctggaaagatggggtaagtgtcttttttctttctgaccacagctcctaggacagcaccttcaggagtaatgatgcaggcagtagctggcaattaaggaggcgctccatgttgtttgttgggactatggccctcctgagtggagtgttaacactaaagcttccagaaacccttgggaaacggctagcaactacttgggaggaggctgcaaaactggagtcagagaatgaaagcaagtcaagcaaattacttctcacaactaataatagtgggctggaaaaaacggaagcgattacccccagggattctggtcttggtgaataaatgtgccatgcctgctgtctagcacctgaaatattatttaccctaatgcctttgtattagaggaatcttattctcatctcccatatgttgtttgtatgtctttttaataaattttgtaagaaaattttaaagcaaatatgttataaaagaaataaaaactaagatgaaaattctcagtttta

SEQ ID NO: 19255 - DNA, 297 bp, Homo sapiens
ccatggacaaggtcgggaggagaacagtcctggcctactctcttttctgcagtgcactggcctgtggtgtcgttatggtgatcccccaggtgagttatcttctgttttttataagacagttatactgtgacagtttgatgggaagaatttagcttattacagttaagtatgaaggtcaattcagagtatgatttgggcagagtatataatatttaaaaatctgttttctttaaaacattctttttctgttatataagtaatatatgttcattttagaaaatttgaagagaaaaatgt

SEQ ID NO: 19256 - DNA, 768 bp, Homo sapiens
ttctcgcgcggcgctcgcgatccgaaaacatctccacttcctcctcaccccgcgcagtcgggacacgggcgtccagacgccggccccgagctgggcttctcctctaggcctctggcagcgggacctggcatggtgagcagaggcgctgggctcgctcggagtgcgcctgttgccgggcaggagggacctgattccagagagtcctctatttcatatgtgccttccagaacatctcttgtggtattcactacttggcttctgtgttcatgggagtcacccctcatcatgtctgcaggcccccaggcaatgtgagtcaggttgttttccataatcactctaattggagtttggaggacaccggggccctgttgtcttcaggccagaaagattatgttacggtgcagttgcagaatggtgagatctgggagctctcaaggtgtagcaggaataagagggagaacacatcgagtttgggctatgaatacactggcagtaagaaagagtttccttgtgtggatggctacatatatgaccagaacacatggaaaagcactgcggtgacccagtggaacctggtctgtgaccgaaaatggcttgcaatgctgatccagcccctatttatgtttggagtcctactgggatcggtgacttttggctacttttctgacagcaggctaggacgccggagtggacttgtgggccaccaagcaggaggcaatgattcaggtacggaaataccaccggcggctggcccccgactcatcaccc

SEQ ID NO: 19257 - DNA, 1995 bp, Homo sapiens
ttctcgcgcggcgctcgcgatccgaaaacatctccacttcctcctcaccccgcgcagtcgggacacgggcgtccagacgccggccccgagctgggcttctcctctaggcctctggcagcgggacctggcatgattccagagagtcctctatttcatatgtgccttccagaacatctcttgtggtattcactacttggcttctgtgttcatgggagtcacccctcatcatgtctgcaggcccccaggcaatgtgagtcaggttgttttccataatcactctaattggagtttggaggacaccggggccctgttgtcttcaggccagaaagattatgttacggtgcagttgcagaatggtgagatctgggagctctcaaggtgtagcaggaataagagggagaacacatcgagtttgggctatgaatacactggcagtaagaaagagtttccttgtgtggatggctacatatatgaccagaacacatggaaaagcactgcggtgacccagtggaacctggtctgtgaccgaaaatggcttgcaatgctgatccagcccctatttatgtttggagtcctactgggatcggtgacttttggctacttttctgacaggctaggacgccgggtggtcttgtgggccacaagcagtagcatgtttttgtttggaatagcagcggcgtttgcagttgattattacaccttcatggctgctcgcttttttcttgccatggttgcaagtggctatcttgtggtggggtttgtctatgtgatggaattcattggcatgaagtctcggacatgggcgtctgtccatttgcattccttttttgcagttggaaccctgctggtggctttgacaggatacttggtcaggacctggtggctttaccagatgatcctctccacagtgactgtcccctttatcctgtgctgttgggtgctcccagagacacctttttggcttctctcagagggacgatatgaagaagcacaaaaaatagttgacatcatggccaagtggaacagggcaagctcctgtaaactgtcagaacttttatcactggacctacaaggtcctgttagtaatagccccactgaagttcagaagcacaacctatcatatctgttttataactggagcattacgaaaaggacacttaccgtttggctaatctggttcactggaagtttgggattctactcgttttccttgaattctgttaacttaggaggcaatgaatacttaaacctcttcctcctgggtgtagtggaaattcccgcctacaccttcgtgtgcatcgccatggacaaggtcgggaggagaacagtcctggcctactctcttttctgcagtgcactggcctgtggtgtcgttatggtgatcccccagaaacattatattttgggtgtggtgacagctatggttggaaaatttgccatcggggcagcatttggcctcatttatctttatacagctgagctgtatccaaccattgtaagatcgctggctgtgggaagcggcagcatggtgtgtcgcctggccagcatcctggcgccgttctctgtggacctcagcagcatttggatcttcataccacagttgtttgttgggactatggccctcctgagtggagtgttaacactaaagcttccagaaacccttgggaaacggctagcaactacttgggaggaggctgcaaaactggagtcagagaatgaaagcaagtcaagcaaattacttctcacaactaataatagtgggctggaaaaaacggaagcgattacccccagggattctggtcttggtgaataaatgtgccatgcctgctgtctagcacctgaaatattatttaccctaatgcctttgtattagaggaatcttattctcatctcccatatgttgtttgtatgtctttttaataaattttgtaagaaaattttaaagcaaatatgttataaaagaaataaaaactaagatgaaaattctcagtttta

SEQ ID NO: 19258 - DNA, 2836 bp, Homo sapiens
gggcctcgcgggaccggaagtgccggatggggaccaagatggcggaccttgattcgcctccgaagctgtcaggggtgcagcagccgtctgagggggtgggaggtggccgctgctccgaaatctccgctgagctcattcgctccctgacagagctgcaggagctggaggctgtatacgaacggctctgcggcgaggagaaagtggtggagagagagctggatgctcttttggaacagcaaaacaccattgaaagtaagatggtcactctccaccgaatgggtcctaatctgcagctgattgagggagatgcaaagcagctggctggaatgatcacctttacctgcaacctggctgagaatgtgtccagcaaagttcgtcagcttgacctggccaagaaccgcctctatcaggccattcagagagctgatgacatcttggacctgaagttctgcatggatggagttcagactgctttgaggagtgaagattatgagcaggctgcagcacatattcatcgctacttgtgcctggacaagtcggtcattgagctcagccgacagggcaaagaggggagcatgattgatgccaacctgaaattgctgcaggaagctgagcaacgtctcaaagccattgtggcagagaagtttgccattgccaccaaggaaggtgatctgccccaggtggagcgcttcttcaagatcttcccactgctgggtttgcatgaggagggattaagaaagttctcggagtacctttgcaagcaggtggccagtaaagctgaggagaatctgctcatggtgctggggacagacatgagtgatcggagagctgcagtcatctttgcagatacacttactcttctgtttgaagggattgcccgcattgtggagacccaccagccaatagtggagacctattatgggccagggagactctataccctgatcaaatatctgcaggtggaatgtgacagacaggtggagaaggtggtagacaagttcatcaagcaaagggactaccaccagcagttccggcatgttcagaacaacctgatgagaaattctacaacagaaaaaatcgaaccaagagaactggaccccatcctgactgaggtcaccctgatgaatgcccgcagtgagctatacttacgcttcctcaagaagaggattagctctgattttgaggtgggagactccatggcctcagaggaagtaaagcaagagcaccagaagtgtctggacaaactcctcaataactgccttttgagctgtaccatgcaggagctaattggcttatatgttaccatggaggagtacttcatgagggagactgtcaataaggctgtggctctggacacctatgagaagggccagctgacatccagcatggtggatgatgtcttctacattgttaagaagtgcattgggcgggctctgtccagctccagcattgactgtctctgtgccatgatcaacctcgccaccacagagctggagtctgacttcagggatgttctgtgtaataagctgcggatgggctttcctgccaccaccttccaggacatccagcgcggggtgacaagtgccgtgaacatcatgcacagcagcctccagcaaggcaaatttgacacaaaaggcatcgagagtactgacgaggcgaagatgtccttcctggtgactctgaacaacgtggaagtctgcagtgaaaacatctccactctgaagaagacactggagagtgactgcaccaagctcttcagccagggcattggaggggagcaggcccaggccaagtttgacagctgcctttctgacttggccgccgtgtccaacaaattccgagacctcttgcaggaagggctgacggagctcaacagcacagccatcaagccacaggtgcagccttggatcaacagctttttctccgtctcccacaacatcgaggaggaagaattcaatgactatgaggccaacgacccttgggtacaacagttcatccttaacctggagcagcaaatggcagagttcaaggccagcctgtccccggtcatctacgacagcctaaccggcctcatgactagccttgttgccgtcgagttggagaaagtggtgctgaaatccacctttaaccggctgggtggtctgcagtttgacaaggagctgaggtcgctcattgcctaccttaccacggtgaccacctggaccatccgagacaagtttgcccggctctcccagatggccaccatcctcaatctggagcgggtgaccgagatcctcgattactggggacccaattccggcccattgacgtggcgcctcacccctgctgaagtgcgccaggtgctggccctgcggatagacttccgcagtgaagatatcaagaggctgcgcctgtagctgcctggatgagcacacctggctcatcacacttgcaggcctgttccctaaggggccccagccaaggagctgagcgaggctgtcgggcttgggggagatctgacagcccagacctttctacggctggcagcagagaaacaaagtctggacccactccatgctctgccctcagacctggccaggtgatgctctgggggcagcatctccccaccgagagaagcgggctcctaatgaggtgggaaagccacggcaggcagcgagcagcccaggccagctttctgcatggatggtcagtctcttgccctcaaacactacagcaaacaagctacccctgccagtcctagacaacttgggtacatctggggacctagcagttaggcttgactttgaggagaggctgtgatgtttatgatccctgaataaagctactccttggagag

SEQ ID NO: 19259 - DNA, 2757 bp, Homo sapiens
acgctgtcggacgcgccgagcttgtcttccctgatacctgggcgatctgcagcctctcctccctagacccccgttgatttccctgatccatgatcaccagtttctccacgggagtaaaaaagtggtggagagagagctggatgctcttttggaacagcaaaacaccattgaaagtaagatggtcactctccaccgaatgggtcctaatctgcagctgattgagggagatgcaaagcagctggctggaatgatcacctttacctgcaacctggctgagaatgtgtccagcaaagttcgtcagcttgacctggccaagaaccgcctctatcaggccattcagagagctgatgacatcttggacctgaagttctgcatggatggagttcagactgctttgaggagtgaagattatgagcaggctgcagcacatattcatcgctacttgtgcctggacaagtcggtcattgagctcagccgacagggcaaagaggggagcatgattgatgccaacctgaaattgctgcaggaagctgagcaacgtctcaaagccattgtggcagagaagtttgccattgccaccaaggaaggtgatctgccccaggtggagcgcttcttcaagatcttcccactgctgggtttgcatgaggagggattaagaaagttctcggagtacctttgcaagcaggtggccagtaaagctgaggagaatctgctcatggtgctggggacagacatgagtgatcggagagctgcagtcatctttgcagatacacttactcttctgtttgaagggattgcccgcattgtggagacccaccagccaatagtggagacctattatgggccagggagactctataccctgatcaaatatctgcaggtggaatgtgacagacaggtggagaaggtggtagacaagttcatcaagcaaagggactaccaccagcagttccggcatgttcagaacaacctgatgagaaattctacaacagaaaaaatcgaaccaagagaactggaccccatcctgactgaggtcaccctgatgaatgcccgcagtgagctatacttacgcttcctcaagaagaggattagctctgattttgaggtgggagactccatggcctcagaggaagtaaagcaagagcaccagaagtgtctggacaaactcctcaataactgccttttgagctgtaccatgcaggagctaattggcttatatgttaccatggaggagtacttcatgagggagactgtcaataaggctgtggctctggacacctatgagaagggccagctgacatccagcatggtggatgatgtcttctacattgttaagaagtgcattgggcgggctctgtccagctccagcattgactgtctctgtgccatgatcaacctcgccaccacagagctggagtctgacttcagggatgttctgtgtaataagctgcggatgggctttcctgccaccaccttccaggacatccagcgcggggtgacaagtgccgtgaacatcatgcacagcagcctccagcaaggcaaatttgacacaaaaggcatcgagagtactgacgaggcgaagatgtccttcctggtgactctgaacaacgtggaagtctgcagtgaaaacatctccactctgaagaagacactggagagtgactgcaccaagctcttcagccagggcattggaggggagcaggcccaggccaagtttgacagctgcctttctgacttggccgccgtgtccaacaaattccgagacctcttgcaggaagggctgacggagctcaacagcacagccatcaagccacaggtgcagccttggatcaacagctttttctccgtctcccacaacatcgaggaggaagaattcaatgactatgaggccaacgacccttgggtacaacagttcatccttaacctggagcagcaaatggcagagttcaaggccagcctgtccccggtcatctacgacagcctaaccggcctcatgactagccttgttgccgtcgagttggagaaagtggtgctgaaatccacctttaaccggctgggtggtctgcagtttgacaaggagctgaggtcgctcattgcctaccttaccacggtgaccacctggaccatccgagacaagtttgcccggctctcccagatggccaccatcctcaatctggagcgggtgaccgagatcctcgattactggggacccaattccggcccattgacgtggcgcctcacccctgctgaagtgcgccaggtgctggccctgcggatagacttccgcagtgaagatatcaagaggctgcgcctgtagctgcctggatgagcacacctggctcatcacacttgcaggcctgttccctaaggggccccagccaaggagctgagcgaggctgtcgggcttgggggagatctgacagcccagacctttctacggctggcagcagagaaacaaagtctggacccactccatgctctgccctcagacctggccaggtgatgctctgggggcagcatctccccaccgagagaagcgggctcctaatgaggtgggaaagccacggcaggcagcgagcagcccaggccagctttctgcatggatggtcagtctcttgccctcaaacactacagcaaacaagctacccctgccagtcctagacaacttgggtacatctggggacctagcagttaggcttgactttgaggagaggctgtgatgtttatgatccctgaataaagctactccttggagag

SEQ ID NO: 19260 - DNA, 1927 bp, Homo sapiens
gggcctcgcgggaccggaagtgccggatggggaccaagatggcggaccttgattcgcctccgaagctgtcaggggtgcagcagccgtctgagggggtgggaggtggccgctgctccgaaatctccgctgagctcattcgctccctgacagagctgcaggagctggaggctgtatacgaacggctctgcggcgaggagaaagtggtggagagagagctggatgctcttttggaacagcaaaacaccattgaaagtaagatggtcactctccaccgaatgggtcctaatctgcagctgattgagggagatgcaaagcagctggctggaatgatcacctttacctgcaacctggctgagaatgtgtccagcaaagttcgtcagcttgacctggccaagaaccgcctctatcaggccattcagagagctgatgacatcttggacctgaagttctgcatggatggagttcagactgctttgaggagtgaagattatgagcaggctgcagcacatattcatcgctacttgtgcctggacaagtcggtcattgagctcagccgacagggcaaagaggggagcatgattgatgccaacctgaaattgctgcaggaagctgagcaacgtctcaaagccattgtggcagagaagtttgccattgccaccaaggaaggtgatctgccccaggtggagcgcttcttcaagatcttcccactgctgggtttgcatgaggagggattaagaaagttctcggagtacctttgcaagcaggtggccagtaaagctgaggagaatctgctcatggtgctggggacagacatgagtgatcggagagctgcagtcatctttgcagatacacttactcttctgtttgaagggattgcccgcattgtggagacccaccagccaatagtggagacctattatgggccagggagactctataccctgatcaaatatctgcaggtggaatgtgacagacaggtggagaaggtggtagacaagttcatcaagcaaagggactaccaccagcagttccggcatgttcagaacaacctgatgagaaattctacaacagaaaaaatcgaaccaagagaactggaccccatcctgactgaggtcaccctgatgaatgcccgcagtgagctatacttacgcttcctcaagaagaggattagctctgattttgaggtgggagactccatggcctcagaggaagtaaagcaagagcaccagaagtgtctggacaaactcctcaataactgccttttgagctgtaccatgcaggagctaattggcttatatgttaccatggaggagtacttcatgagggagactgtcaataaggctgtggctctggacacctatgagaagggccagctgacatccagcatggtggatgatgtcttctacattgttaagaagtgcattgggcgggctctgtccagctccagcattgactgtctctgtgccatgatcaacctcgccaccacagagctggagtctgacttcagggatgttctgtgtaataagctgcggatgggctttcctgccaccaccttccaggacatccagcgcggggtgacaagtgccgtgaacatcatgcacagcagcctccagcaaggcaaatttgacacaaaaggcatcgagagtactgacgaggcgaagatgtccttcctggtgactctgaacaacgtggaagtctgcagtgaaaacatctccactctgaagaagacactggagagtgactgcaccaagctcttcagccagggcattggaggggagcaggcccaggccaagtttgacagctgcctttctgacttggccgccgtgtccaacaaattccgagacctcttgcaggaagggctgacggagctcaacagcacagccatcaccacagtcaccatgataatggcagggatcctctagacacc

SEQ ID NO: 19261 - DNA, 2508 bp, Homo sapiens
gggcctcgcgggaccggaagtgccggatggggaccaagatggcggaccttgattcgcctccgaagctgtcaggggtgcagcagccgtctgagggggtgggaggtggccgctgctccgaaatctccgctgagctcattcgctccctgacagagctgcaggagctggaggctgtatacgaacggctctgcggcgaggagaaagtggtggagagagagctggatgctcttttggaacagcaaaacaccattgaaagtaagatggtcactctccaccgaatgggtcctaatctgcagctgattgagggagatgcaaagcagctggctggaatgatcacctttacctgcaacctggctgagaatgtgtccagcaaagttcgtcagcttgacctggccaagaaccgcctctatcaggccattcagagagctgatgacatcttggacctgaagttctgcatggatggagttcagactgctttgaggagtgaagattatgagcaggctgcagcacatattcatcgctacttgtgcctggacaagtcggtcattgagctcagccgacagggcaaagaggggagcatgattgatgccaacctgaaattgctgcaggaagctgagcaacgtctcaaagccattgtggcagagaagtttgccattgccaccaaggaaggtgatctgccccaggtggagcgcttcttcaagatcttcccactgctgggtttgcatgaggagggattaagaaagttctcggagtacctttgcaagcaggtggccagtaaagctgaggagaatctgctcatggtgctggggacagacatgagtgatcggagagctgcagtcatctttgcagatacacttactcttctgtttgaagggattgcccgcattgtggagacccaccagccaatagtggagacctattatgggccagggagactctataccctgatcaaatatctgcaggtggaatgtgacagacaggtggagaaggtggtagacaagttcatcaagcaaagggactaccaccagcagttccggcatgttcagaacaacctgatgagaaattctacaacagaaaaaatcgaaccaagagaactggaccccatcctgactgaggtcaccctgatgaatgcccgcagtgagctatacttacgcttcctcaagaagaggattagctctgattttgaggtgggagactccatggcctcagaggaagtaaagcaagagcaccagaagtgtctggacaaactcctcaataactgccttttgagctgtaccatgcaggagctaattggcttatatgttaccatggaggagtacttcatgagggagactgtcaataaggctgtggctctggacacctatgagaagggccagctgacatccagcatggtggatgatgtcttctacattgttaagaagtgcattgggcgggctctgtccagctccagcattgactgtctctgtgccatgatcaacctcgccaccacagagctggagtctgacttcagggatgttctgtgtaataagctgcggatgggctttcctgccaccaccttccaggacatccagcgcggggtgacaagtgccgtgaacatcatgcacagcagcctccagcaaggcaaatttgacacaaaaggcatcgagagtactgacgaggcgaagatgtccttcctggtgactctgaacaacgtggaagtctgcagtgaaaacatctccactctgaagaagacactggaggtacgagggaaattgcctatcagtggtcagcagccatcttttcccatgttgagatagagccctatacaaacatcatggtgaagacacttatcttggtgacattgagccacacttgaggggattctttggtgactgacatgatagcaaggcatccttggaccagggagaaaagctcaggagttggaagatcagaattcaaattagatcttccaggcaaggcacggtggcacattcctgtaatcccagcactttcggaggccaaggcgggtggatcacttgaggtcaggagttcgagaccagcctggccaacatggcgaaaccccatctctactaaaaatacaaaaattagctgggcatggtggcagacacctgtaatcccagctgcttgggaaactgaggcaggagaatcacttgaacccgggaggcagaggttgcagtgagctgagatcgtgccactgcactccagcctgggcgacagagcagactctatctcaaaataacacacaaattagatcttccagcacatagttggcgtgtgaccttggacaagtcccttagccctctgagcctcagtcctctcatctacgaaatgagatgcatagctccatccagccctagcttgtgtttcttgggtagcctaatgaaaaaacaggattgaggccaagtggctcatacctgtaagcttaacattttgggaggccaaggcaggaggattacttgaggccaggagtttgagaccagcctgggcaatgtggtgagacctcatctctac

SEQ ID NO: 19262 - DNA, 2236 bp, Homo sapiens
  misc_feature (164)..(164): n is a, c, g, or t
  misc_feature (224)..(225): n is a, c, g, or t
actcgcagggagctcactactcgcagggagctcactactcgcaggagctcacttctgtgtaataagctgcggatgggctttcctgccaccaccttccaggacatccagcgcggggtgacaagtgccgtgaacatcatgcacagcagcctccagcaaggcaaatntgacacaaaaggcatcgagagtactgacgaggcgaagatgtccttcctggtgactctgannaacgtggaagtctgcagtgaaaacatctccactctgaagaagacactggagagtgactgcaccaagctcttcagccaatagtggagacctattatgggccagggagactctataccctgatcaaatatctgcaggtggaatgtgacagacaggtggagaaggtggtagacaagttcatcaagcaaagggactaccaccagcagttccggcatgttcagaacaacctgatgagaaattctacaacagaaaaaatcgaaccaagagaactggaccccatcctgactgaggtcaccctgatgaatgcccgcagtgagctatacttacgcttcctcaagaagaggattagctctgattttgaggtgggagactccatggcctcagaggaagtaaagcaagagcaccagaagtgtctggacaaactcctcaataactgccttttgagctgtaccatgcaggagctaattggcttatatgttaccatggaggagtacttcatgagggagactgtcaataaggctgtggctctggacacctatgagaagggccagctgacatccagcatggtggatgatgtcttctacattgttaagaagtgcattgggcgggctctgtccagctccagcattgactgtctctgtgccatgatcaacctcgccaccacagagctggagtctgacttcagggatgttctgtgtaataagctgcggatgggctttcctgccaccaccttccaggacatccagcgcggggtgacaagtgccgtgaacatcatgcacagcagcctccagcaaggcaaatttgacacaaaaggcatcgagagtactgacgaggcgaagatgtccttcctggtgactctgaacaacgtggaagtctgcagtgaaaacatctccactctgaagaagacactggagagtgactgcaccaagctcttcagccagggcattggaggggagcaggcccaggccaagtttgacagctgcctttctgacttggccgccgtgtccaacaaattccgagacctcttgcaggaagggctgacggagctcaacagcacagccatcaagccacaggtgcagccttggatcaacagctttttctccgtctcccacaacatcgaggaggaagaattcaatgactatgaggccaacgacccttgggtacaacagttcatccttaacctggagcagcaaatggcagagttcaaggccagcctgtccccggtcatctacgacagcctaaccggcctcatgactagccttgttgccgtcgagttggagaaagtggtgctgaaatccacctttaaccggctgggtggtctgcagtttgacaaggagctgaggtcgctcattgcctaccttaccacggtgaccacctggaccatccgagacaagtttgcccggctctcccagatggccaccatcctcaatctggagcgggtgaccgagatcctcgattactggggacccaattccggcccattgacgtggcgcctcacccctgctgaagtgcgccaggtgctggccctgcggatagacttccgcagtgaagatatcaagaggctgcgcctgtagctgcctggatgagcacacctggctcatcacacttgcaggcctgttccctaaggggccccagccaaggagctgagcgaggctgtcgggcttgggggagatctgacagcccagacctttctacggctggcagcagagaaacaaagtctggacccactccatgctctgccctcagacctggccaggtgatgctctgggggcagcatctccccaccgagagaagcgggctcctaatgaggtgggaaagccacggcaggcagcgagcagcccaggccagctttctgcatggatggtcagtctcttgccctcaaacactacagcaaacaagctacccctgccagtcctagacaacttgggtacatctggggacctagcagttaggcttgactttgaggagaggctgtgatgtttatgatccctgaataaagctactccttggagag

SEQ ID NO: 19263 - DNA, 2260 bp, Homo sapiens
gcgggcggatcacgaggtcaggagatcgagaccatcctcgctaatacagtgaaaccccgtctctactaaaaatacaaaaaattagccgggcatggtggtgggcacctgtagtcccagctactcaggaggctgaggcaggagaaatggcgtgaacccaggaggcggagcttgcagggagctgagatcgagccactgcactccagcctgggcaacagagcaagactccatctcaaaaaaaaaagtaaagaaaagaagacacatctcccaaccttttatttaggtctggcagaattttagggagtgaatgatttaggtgaagcaggtaaatggaaaatgtgattgacagctatctctgattctaattgggccagcagagctaggagggccatctggcagagcttttccttatgggcccagtggggagggggaatttgggactctctttgccctgtagctcttgtgtctaaggtaatccattgtcgtcctattccttctgctccatgtgtctcagagaactggaccccatcctgactgaggtcaccctgatgaatgcccgcagtgagctatacttacgcttcctcaagaagaggattagctctgattttgaggtgggagactccatggcctcagaggaagtaaagcaagagcaccagaagtgtctggacaaactcctcaataactgccttttgagctgtaccatgcaggagctaattggcttatatgttaccatggaggagtacttcatgagggagactgtcaataaggctgtggctctggacacctatgagaagggccagctgacatccagcatggtggatgatgtcttctacattgttaagaagtgcattgggcgggctctgtccagctccagcattgactgtctctgtgccatgatcaacctcgccaccacagagctggagtctgacttcagggatgttctgtgtaataagctgcggatgggctttcctgccaccaccttccaggacatccagcgcggggtgacaagtgccgtgaacatcatgcacagcagcctccagcaaggcaaatttgacacaaaaggcatcgagagtactgacgaggcgaagatgtccttcctggtgactctgaacaacgtggaagtctgcagtgaaaacatctccactctgaagaagacactggagagtgactgcaccaagctcttcagccagggcattggaggggagcaggcccaggccaagtttgacagctgcctttctgacttggccgccgtgtccaacaaattccgagacctcttgcaggaagggctgacggagctcaacagcacagccatcaagccacaggtgcagccttggatcaacagctttttctccgtctcccacaacatcgaggaggaagaattcaatgactatgaggccaacgacccttgggtacaacagttcatccttaacctggagcagcaaatggcagagttcaaggccagcctgtccccggtcatctacgacagcctaaccggcctcatgactagccttgttgccgtcgagttggagaaagtggtgctgaaatccacctttaaccggctgggtggtctgcagtttgacaaggagctgaggtcgctcattgcctaccttaccacggtgaccacctggaccatccgagacaagtttgcccggctctcccagatggccaccatcctcaatctggagcgggtgaccgagatcctcgattactggggacccaattccggcccattgacgtggcgcctcacccctgctgaagtgcgccaggtgctggccctgcggatagacttccgcagtgaagatatcaagaggctgcgcctgtagctgcctggatgagcacacctggctcatcacacttgcaggcctgttccctaaggggccccagccaaggagctgagcgaggctgtcgggcttgggggagatctgacagcccagacctttctacggctggcagcagagaaacaaagtctggacccactccatgctctgccctcagacctggccaggtgatgctctgggggcagcatctccccaccgagagaagcgggctcctaatgaggtgggaaagccacggcaggcagcgagcagcccaggccagctttctgcatggatggtcagtctcttgccctcaaacactacagcaaacaagctacccctgccagtcctagacaacttgggtacatctggggacctagcagttaggcttgactttgaggagaggctgtgatgtttatgatccctgaataaagctactccttggagag

SEQ ID NO: 19264 - DNA, 2447 bp, Homo sapiens
acactggcctgcatcttgcccattgacagcttactttggacttgaggtgttgtcgagatgatgatggcctcagttcaagaccaaaacggaaataaaaagagcttcctgaaaagaacacagcagaagtagtaaaccagttctctatcacaaaatgtgcaacagtgccctctaatgatataatgacaattctatttcttgaggtcctattaagtgtccaagtaattgtctccaatttccccttcattcctaagatgttaaagataacgtttgctttttcagaactttgttttttccttcttttgagcagagaaagtaaaagtacgacatagaaataggagtggcctcatacaattgtatttctagaactccagactaggagactataaacagtagtctattggaacaccattagcatgacttttaagcacagtaatagaggtgagtattattagcatccaacccaaaaacaaatctttggcctgtcatcctgaaagcccactgctggcttgaagggaaggtaaacctggtaaacaaactaaatctaaatgttcttgtatgccaaaagtttggagtgaccagcaagaggccaatagatgtgggggtggggaagaatattctcattcctgtggtatgttgcagttccggcatgttcagaacaacctgatgagaaattctacaacagaaaaaatcgaaccaagagaactggaccccatcctgactgaggtcaccctgatgaatgcccgcagtgagctatacttacgcttcctcaagaagaggattagctctgattttgaggtgggagactccatggcctcagaggaagtaaagcaagagcaccagaagtgtctggacaaactcctcaataactgccttttgagctgtaccatgcaggagctaattggcttatatgttaccatggaggagtacttcatgagggagactgtcaataaggctgtggctctggacacctatgagaagggccagctgacatccagcatggtggatgatgtcttctacattgttaagaagtgcattgggcgggctctgtccagctccagcattgactgtctctgtgccatgatcaacctcgccaccacagagctggagtctgacttcagggatgttctgtgtaataagctgcggatgggctttcctgccaccaccttccaggacatccagcgcggggtgacaagtgccgtgaacatcatgcacagcagcctccagcaaggcaaatttgacacaaaaggcatcgagagtactgacgaggcgaagatgtccttcctggtgactctgaacaacgtggaagtctgcagtgaaaacatctccactctgaagaagacactggagagtgactgcaccaagctcttcagccagggcattggaggggagcaggcccaggccaagtttgacagctgcctttctgacttggccgccgtgtccaacaaattccgagacctcttgcaggaagggctgacggagctcaacagcacagccatcaagccacaggtgcagccttggatcaacagctttttctccgtctcccacaacatcgaggaggaagaattcaatgactatgaggccaacgacccttgggtacaacagttcatccttaacctggagcagcaaatggcagagttcaaggccagcctgtccccggtcatctacgacagcctaaccggcctcatgactagccttgttgccgtcgagttggagaaagtggtgctgaaatccacctttaaccggctgggtggtctgcagtttgacaaggagctgaggtcgctcattgcctaccttaccacggtgaccacctggaccatccgagacaagtttgcccggctctcccagatggccaccatcctcaatctggagcgggtgaccgagatcctcgattactggggacccaattccggcccattgacgtggcgcctcacccctgctgaagtgcgccaggtgctggccctgcggatagacttccgcagtgaagatatcaagaggctgcgcctgtagctgcctggatgagcacacctggctcatcacacttgcaggcctgttccctaaggggccccagccaaggagctgagcgaggctgtcgggcttgggggagatctgacagcccagacctttctacggctggcagcagagaaacaaagtctggacccactccatgctctgccctcagacctggccaggtgatgctctgggggcagcatctccccaccgagagaagcgggctcctaatgaggtgggaaagccacggcaggcagcgagcagcccaggccagctttctgcatggatggtcagtctcttgccctcaaacactacagcaaacaagctacccctgccagtcctagacaacttgggtacatctggggacctagcagttaggcttgactttgaggagaggctgtgatgtttatgatccctgaataaagctactccttggagag

SEQ ID NO: 19265 - DNA, 1673 bp, Homo sapiens
ttgtggtctttgctctttatttgtctttgctttacctcctcagaggaaataaagcatgagcaccagaagtgtctggacaaactcctcaataactgccttttgagctgtaccatgcaggagctaattggcttatatgttaccatggaggagtacttcatgagggagactgtcaataaggctgtggctctggacacctatgagaagggccagctgacatccagcatggtggatgatgtcttctacattgttaagaagtgcattgggcgggctctgtccagctccagcattgactgtctctgtgccatgatcaacctcgccaccacagagctggagtctgacttcagggatgttctgtgtaataagctgcggatgggctttcctgccaccaccttccaggacatccagcgcggggtgacaagtgccgtgaacatcatgcacagcagcctccagcaaggcaaatttgacacaaaaggcatcgagagtactgacgaggcgaagatgtccttcctggtgactctgaacaacgtggaagtctgcagtgaaaacatctccactctgaagaagacactggagagtgactgcaccaagctcttcagccagggcattggaggggagcaggcccaggccaagtttgacagctgcctttctgacttggccgccgtgtccaacaaattccgagacctcttgcaggaagggctgacggagctcaacagcacagccatcaagccacaggtgcagccttggatcaacagctttttctccgtctcccacaacatcgaggaggaagaattcaatgactatgaggccaacgacccttgggtacaacagttcatccttaacctggagcagcaaatggcagagttcaaggccagcctgtccccggtcatctacgacagcctaaccggcctcatgactagccttgttgccgtcgagttggagaaagtggtgctgaaatccacctttaaccggctgggtggtctgcagtttgacaaggagctgaggtcgctcattgcctaccttaccacggtgaccacctggaccatccgagacaagtttgcccggctctcccagatggccaccatcctcaatctggagcgggtgaccgagatcctcgattactggggacccaattccggcccattgacgtggcgcctcacccctgctgaagtgcgccaggtgctggccctgcggatagacttccgcagtgaagatatcaagaggctgcgcctgtagctgcctggatgagcacacctggctcatcacacttgcaggcctgttccctaaggggccccagccaaggagctgagcgaggctgtcgggcttgggggagatctgacagcccagacctttctacggctggcagcagagaaacaaagtctggacccactccatgctctgccctcagacctggccaggtgatgctctgggggcagcatctccccaccgagagaagcgggctcctaatgaggtgggaaagccacggcaggcagcgagcagcccaggccagctttctgcatggatggtcagtctcttgccctcaaacactacagcaaacaagctacccctgccagtcctagacaacttgggtacatctggggacctagcagttaggcttgactttgaggagaggctgtgatgtttatgatccctgaataaagctactccttggagag

SEQ ID NO: 19266 - DNA, 1549 bp, Homo sapiens
tagctagtagagccgggtcaaatcggccgagggagggcgactgtccatataaggctgtggctctggacacctatgagaagggccagctgacatccagcatggtggatgatgtcttctacattgttaagaagtgcattgggcgggctctgtccagctccagcattgactgtctctgtgccatgatcaacctcgccaccacagagctggagtctgacttcagggatgttctgtgtaataagctgcggatgggctttcctgccaccaccttccaggacatccagcgcggggtgacaagtgccgtgaacatcatgcacagcagcctccagcaaggcaaatttgacacaaaaggcatcgagagtactgacgaggcgaagatgtccttcctggtgactctgaacaacgtggaagtctgcagtgaaaacatctccactctgaagaagacactggagagtgactgcaccaagctcttcagccagggcattggaggggagcaggcccaggccaagtttgacagctgcctttctgacttggccgccgtgtccaacaaattccgagacctcttgcaggaagggctgacggagctcaacagcacagccatcaagccacaggtgcagccttggatcaacagctttttctccgtctcccacaacatcgaggaggaagaattcaatgactatgaggccaacgacccttgggtacaacagttcatccttaacctggagcagcaaatggcagagttcaaggccagcctgtccccggtcatctacgacagcctaaccggcctcatgactagccttgttgccgtcgagttggagaaagtggtgctgaaatccacctttaaccggctgggtggtctgcagtttgacaaggagctgaggtcgctcattgcctaccttaccacggtgaccacctggaccatccgagacaagtttgcccggctctcccagatggccaccatcctcaatctggagcgggtgaccgagatcctcgattactggggacccaattccggcccattgacgtggcgcctcacccctgctgaagtgcgccaggtgctggccctgcggatagacttccgcagtgaagatatcaagaggctgcgcctgtagctgcctggatgagcacacctggctcatcacacttgcaggcctgttccctaaggggccccagccaaggagctgagcgaggctgtcgggcttgggggagatctgacagcccagacctttctacggctggcagcagagaaacaaagtctggacccactccatgctctgccctcagacctggccaggtgatgctctgggggcagcatctccccaccgagagaagcgggctcctaatgaggtgggaaagccacggcaggcagcgagcagcccaggccagctttctgcatggatggtcagtctcttgccctcaaacactacagcaaacaagctacccctgccagtcctagacaacttgggtacatctggggacctagcagttaggcttgactttgaggagaggctgtgatgtttatgatccctgaataaagctactccttggagag

SEQ ID NO: 19267 - DNA, 375 bp, Homo sapiens
gctcctgtgatagcctgggctggccatcctaggcttgttcctgggcaaagtcttgcttgctagagaaatatcatcccctgagaatgaggatagctttaggatatgtgcacactgttcctaattcctacccatttgagcaactctaagacaaggagtgatcctttgttgtgacacaaacaatcccaaggaattttgttgctctctttaggccaaagattgtgtgtaataaatttctggagaaaacacactgttaaggctgggcatggagctcatgcctgtgatcccagcactttgggaggccaaggctggaggattgcttgagcccaggagttcaagaccagcctaagcaatatagtgagaccccctatgtctaca

SEQ ID NO: 19268 - DNA, 653 bp, Homo sapiens
atcctcaaggccagccccactcctgctgaccccccttctctgcaaccctgcgcggacactccggttggctctccatcctccactgcctcactcagcggttacctaacctctccaggtgtttgtcccggctcgcgccttactcattcctccaggtccctctccagtcaccagcgacgcttgtcagttctcactaaatatcccgggccgaacaaagtaaactggacccgataaagcacctccaaggagtaaaaggagcagagcctcacactcgacacggaatcccgtcgtggttccaacaacccgagccaccccagggccgggccctggatggacttgtgcacagagctccccccacgagcgcgtgggaccctggggtgcccgcggccttccacgccggcagaacagcagggctcgatggtgggggatgttcggagcgaccagaagccgcgccgcgccacccggccggcctccgagctgtttgcgatttcctctcggggctcctcgtcctcctccccctcaggccgccctcgcacggccgcccgcctccacgggcttcacccctgcccatcttcccgcacacggggccgggcgaccctcccacctcagcccgggatcgcgaacggctagcgggtgtcgccaggcggggaaacgcc

SEQ ID NO: 19269 - DNA, 380 bp, Homo sapiens
caggcaggcacatagggtccagagggaagaaaatcaagatgtcctccaattccatcctagatattgtaactgaacctaggtttgattgctcaaccctcaaaagccagacacaagagatgagggttggtgggaggaaaagcaggcttattcagagagccggcaaaactgagatggggaactcgtgctctaacgtaccatcttaaggcctggggtggtggctcatgcctgtaatcccagcactttaggaggctgaagtgggtggatcacttgaagtcaggagttcaagaccagcctggccaacatggtgaaaccccgtctttactaagaatacaaaaattagccaggcatggttgggcgtggtggctcatgcctgtaatccc

SEQ ID NO: 19270 - DNA, 408 bp, Homo sapiens
agaagtgcagttaagagatgggggccccttcttctactcagcccccacttgtggaacttgatcaggtatgccgagaatactaggacccagatcactcttgccttgggtattaagacagtggtttcactgtcttttgctgctaggagaggcaagctgagaggaccccaggctgctgtcctcccccgctctccatccaccaaactctcagttcctagagtgggagcgtcactcagagaagtttgctgttgtccccaaccccagctccagagccctaactctgagatttttacctgtggagaaaaacaaaccataaaacagctcctaatttcttcccaaaggaactgacttcatttgcaacagggagtgaagaagttcaaacctgattgtactctcaagaacagtagaggg

SEQ ID NO: 19271 - DNA, 454 bp, Homo sapiens
tgtggtgacactgctaattggtggtctagctgggattggaacccaagtctgtgtgaataccatgtccctaccctttaaaaaagcaaattttattttattttctattacacaagtaaggcatattatctaaaattgagaaaatactgataagtaaaaaaataaaaattatccataaattctgccattcagatataagagctacaatcacattggtatgtctttccagactttttttccgcatgtatatatttgtaaccagcttttctgcttaacgatatatcataaatgtctttctgcatctataaacgtatttctgtatcatttaaaaagactgcatagtatttcattttatgaatgaactgtttatttaactgatcttccgttgctaaatatttaggttatatctagctttttactaatattaaaaatgctgcagtaagcatccttgtagttt

SEQ ID NO: 19272 - DNA, 846 bp, Homo sapiens
ggggttgaggactggccttttctagggctaagcgtagtatactctaaaacagggtaataagcaaggggataaatgattggtgtttccagtacatggctcaaaataacatgttaattataaagttaaatagcctaataagcctttaggtaaaagccaaatattagaaagccatctaaatttcttaaagtcttgtgtttccaacatatttcgatttttaatagaggttcttaaaataaactccacatagcactattattttattttgtcagaaactattagcatgccaaaccatttttcactcttaaaataaaaattctgactaacatctcaacattcttctttacagattgtgaatctcctgactattattggtaattcaatgggcctagttaatgcttacagccacaagtttataaagtattgtaccatgacagaaaaggccaaaatcatgagtatgaaaatatcatctatgggagaattaacttcaaaagaatttgaagctattctaaatagattcagaaactattttagacatattgtgaatatggccattgagaagcgtattggtattttcaacgttgtaagtcttgattatcaatcagaatgcttactgtatattgacaacgtcatacatatgagccacaccctcatacaatctgtaattgaaaaaaagaacaaaaatttattggaagtaagtattttgaaaattcttattgtgtaagaatgtttcagattagtaaattttaaatttaaaatatgtacttagagaatatatgatatcatgtcacatgcagagtatgataaaggtgaaaaaatgaagatatacataaatattatactcagaaa

SEQ ID NO: 19273 - DNA, 1330 bp, Homo sapiens
  misc_feature (1322)..(1328): n is a, c, g, or t
attctctcacacctggttcagccactcaggaaatctgtatcagggcactgataggcgttatctcccatcttttctctttcagtaaagaatatcccgtggtccccaggagcaccgtgaggcaaaaagtggcctccaaccacagtcctttcagcagcgagtctcgagctctctccacctcatccaatttggggtcccaataccagtgtgagaatggtgtttccggcccctcccaggacctcctgcctccacccaacccatacccactgccccaggagcatagccaaatttaccattgtaccaagaggaaagaggaagaatgttccaccacagaccatccctataagaagccctacatggagacatcacccagtgaagaagattccttctaccgctctagctatccacagcagcagggcctgggtgcctcctacaggacagagtcggcacagcggcaagcttgcatgtatgccagctctgcgccccccagcgagcctgtgcccagcctagaggacatcagctgcaacacgtggccaagcatgccttcctacagcagctgcaccgtcaccaccgtgcagcccatggacaggctaccctaccagcacttctccgctcacttcacctcggggcccctggtccctcggctggctggcatggccaaccatggctccccacagctgggagagggaatgttccagcaccagacctccgtggcccaccagcctgtggtcaggcagtgtgggcctcagactggcctgcagtcccctggcacccttcagccccctgagttcctctactctcatggcgtgccaaggactctatcccctcatcagtaccactctgtgcacggagttggcatggtgccagagtggagcgacaatagctaaagtgaggcctgcttcacaacagacatttcctagagaaagagagagagagaggagaaagagagagaaggagagagacagtagccaagagaaccccacagacaagatttttcatttcacccaatgttcacatctgcactcaaggtcgctggatgctgatctaatcagtagcttgaaaccacaattttaaaaatgtgactttcttgttttgtctcaaaacttaaaaaaacaaacacaaaaagatgagtcccaccccccactaccaccacacccatcaaccagccacattcacgctactccccagatctcttcccccattccttcttttgggctctagaaagtcttgcctcattgagtgtttttactagtgcgtagttggagtctgtccctgtcttggtgttaatgttgacattgttatataataaatgataatatatttannnnnnnaa

SEQ ID NO: 19274 - DNA, 3993 bp, Homo sapiens
  misc_feature (3985)..(3991): n is a, c, g, or t
agttttgtcatcatttctattgttataattcttattcattttcccagccccgtccacacttctatttttcactacccccacgccccacaagttgccaccgggtcaggtggggacatatccggagagaaatagaaagggatgcattttaaagcgagttctcttttgagaggaaaacaatgggtagttttggaagtgtctttcttaaaaacggaaggagaaggtgaagaaaaaaattatcaacagcaatgggcccctttggtttgggttttgactttttaaagaggaacctctgctgtcctgttgcagtattaaaatcagggcaggaattttgcaaaatgagaaaaataaacttcgggagaaaacccagctgggagcagcttcgggaaagcgacagttctccgaaaggaggaagggaggatgcgcgctgtagccggctccggagtttactgcccgaacgattggggaaaagaacgaggattctcaaatctagttgcgatctctcgtctctcctttattctgttcgtggtgcgggcttcggagcgtctgggaaagccagtctgtgaagctggacttgcagaatcctttgaatgccggtccaggtggctgcagggcccgcagtccgggatgccggagaaaggaaccacaaggaaaagacgctacgctcggagtttccccttttccttgcagccccggcggggcctaggcctcggtttccggcccacctcggctcagaggtcaagtaggaactcatctcgtcgacccttccggaaggcccgacgctctccggctctgtgctgggcaggcctagctcttctctcggcgccaccaggggcgtctacgcggtacgttttgcaactcaacctagtgggtttccagcggtgcgcaaaagtttgcgagcatccaccactgcgctgcttagaaattgtgcccattgatcagactaaaaataatagtcgtcgtgattacaaaacaaaatagagtgcctcgtgcctcggcgggccctggtacaataattattctctacagaaaccacctctctccactcccacccctactccaccacccactcgcaccccgcccctgccgggccactctgggacgaattgcattcttggacctttctctccgcaaggcacattacggagaactccctctgtctcgtgtcccctccacgacaacccagtaattatttctatgcaagtctgcaagagggcactgagttatcgcatcccaagcctaaccagctagagcggcgcctcggtattcatttgcccagagctcctccgcgggggatttaaaaataataataataataataaggatcccatgccttatgcaagagacctcagtcccccggaacaactcgatttccttccaatagaggtctgaggtggactcccacctcccttcgtgaagagttccctcctctcccccttcctaagaaagtcgatcttggctctatttgtgtcttatgttcatcaccctcattcctccggagaaagccgggttggtttatgtctttatttattcccggggccaagacgtccggaacctgtggctgcgcagacccggcactgataggcgaagacggagagaaatttacctcccgccgctgccccccagccaaacgtgacagcgcgcgggccggttgcgtgactcgtgacgtctccaagtcctataggtgcagcggctggtgagatagtcgctatcgcctggttgcctctttattttactggggtatgcctggtaataaacagtaatatttaatttgtcggagaccacaaaccaaccttgagctgggaggtacgtgctcttcttgacagacgttggaagaagacctggcctaaagaggtctcttttggtggtccttttcaaagtcttcacctgagccctgctctccagcgaggcgcactcctggcttttgcgctccaaagaagaggtgggatagttggagagcagaaccttgcgcgggcacaggcctgggcgcaccatggccgacgcagacgagggctttggcctggcgcacacgcctctggagcctgacgcaaaagacctgccctgcgattcgaaacccgagagcgcgctcggggcccccagcaagtccccgtcgtccccgcaggccgccttcacccagcagggcatggagggaatcaaagtgtttctccatgaaagagaactgtggctaaaattccacgaagtgggcacggaaatgatcataaccaaggctggaaggcggatgtttcccagttacaaagtgaaggtgacgggccttaatcccaaaacgaagtacattcttctcatggacattgtacctgccgacgatcacagatacaaattcgcagataataaatggtctgtgacgggcaaagctgagcccgccatgcctggccgcctgtacgtgcacccagactcccccgccaccggggcgcattggatgaggcagctcgtctccttccagaaactcaagctcaccaacaaccacctggacccatttgggcatattattctaaattccatgcacaaataccagcctagattacacatcgtgaaagcggatgaaaataatggatttggctcaaaaaatacagcgttctgcactcacgtctttcctgagactgcgtttatagcagtgacttcctaccagaaccacaagatcacgcaattaaagattgagaataatccctttgccaaaggatttcggggcagtgatgacatggagctgcacagaatgtcaagaatgcaaagtaaagaatatcccgtggtccccaggagcaccgtgaggcaaaaagtggcctccaaccacagtcctttcagcagcgagtctcgagctctctccacctcatccaatttggggtcccaataccagtgtgagaatggtgtttccggcccctcccaggacctcctgcctccacccaacccatacccactgccccaggagcatagccaaatttaccattgtaccaagaggaaagaggaagaatgttccaccacagaccatccctataagaagccctacatggagacatcacccagtgaagaagattccttctaccgctctagctatccacagcagcagggcctgggtgcctcctacaggacagagtcggcacagcggcaagcttgcatgtatgccagctctgcgccccccagcgagcctgtgcccagcctagaggacatcagctgcaacacgtggccaagcatgccttcctacagcagctgcaccgtcaccaccgtgcagcccatggacaggctaccctaccagcacttctccgctcacttcacctcggggcccctggtccctcggctggctggcatggccaaccatggctccccacagctgggagagggaatgttccagcaccagacctccgtggcccaccagcctgtggtcaggcagtgtgggcctcagactggcctgcagtcccctggcacccttcagccccctgagttcctctactctcatggcgtgccaaggactctatcccctcatcagtaccactctgtgcacggagttggcatggtgccagagtggagcgacaatagctaaagtgaggcctgcttcacaacagacatttcctagagaaagagagagagagaggagaaagagagagaaggagagagacagtagccaagagaaccccacagacaagatttttcatttcacccaatgttcacatctgcactcaaggtcgctggatgctgatctaatcagtagcttgaaaccacaattttaaaaatgtgactttcttgttttgtctcaaaacttaaaaaaacaaacacaaaaagatgagtcccaccccccactaccaccacacccatcaaccagccacattcacgctactccccagatctcttcccccattccttcttttgggctctagaaagtcttgcctcattgagtgtttttactagtgcgtagttggagtctgtccctgtcttggtgttaatgttgacattgttatataataaatgataatatatttannnnnnnaa

SEQ ID NO: 19275 - DNA, 3810 bp, Homo sapiens
  misc_feature (3802)..(3808): n is a, c, g, or t
agttttgtcatcatttctattgttataattcttattcattttcccagccccgtccacacttctatttttcactacccccacgccccacaagttgccaccgggtcaggtggggacatatccggagagaaatagaaagggatgcattttaaagcgagttctcttttgagaggaaaacaatgggtagttttggaagtgtctttcttaaaaacggaaggagaaggtgaagaaaaaaattatcaacagcaatgggcccctttggtttgggttttgactttttaaagaggaacctctgctgtcctgttgcagtattaaaatcagggcaggaattttgcaaaatgagaaaaataaacttcgggagaaaacccagctgggagcagcttcgggaaagcgacagttctccgaaaggaggaagggaggatgcgcgctgtagccggctccggagtttactgcccgaacgattggggaaaagaacgaggattctcaaatctagttgcgatctctcgtctctcctttattctgttcgtggtgcgggcttcggagcgtctgggaaagccagtctgtgaagctggacttgcagaatcctttgaatgccggtccaggtggctgcagggcccgcagtccgggatgccggagaaaggaaccacaaggaaaagacgctacgctcggagtttccccttttccttgcagccccggcggggcctaggcctcggtttccggcccacctcggctcagaggtcaagtaggaactcatctcgtcgacccttccggaaggcccgacgctctccggctctgtgctgggcaggcctagctcttctctcggcgccaccaggggcgtctacgcggtacgttttgcaactcaacctagtgggtttccagcggtgcgcaaaagtttgcgagcatccaccactgcgctgcttagaaattgtgcccattgatcagactaaaaataatagtcgtcgtgattacaaaacaaaatagagtgcctcgtgcctcggcgggccctggtacaataattattctctacagaaaccacctctctccactcccacccctactccaccacccactcgcaccccgcccctgccgggccactctgggacgaattgcattcttggacctttctctccgcaaggcacattacggagaactccctctgtctcgtgtcccctccacgacaacccagtaattatttctatgcaagtctgcaagagggcactgagttatcgcatcccaagcctaaccagctagagcggcgcctcggtattcatttgcccagagctcctccgcgggggatttaaaaataataataataataataaggatcccatgccttatgcaagagacctcagtcccccggaacaactcgatttccttccaatagaggtctgaggtggactcccacctcccttcgtgaagagttccctcctctcccccttcctaagaaagtcgatcttggctctatttgtgtcttatgttcatcaccctcattcctccggagaaagccgggttggtttatgtctttatttattcccggggccaagacgtccggaacctgtggctgcgcagacccggcactgataggcgaagacggagagaaatttacctcccgccgctgccccccagccaaacgtgacagcgcgcgggccggttgcgtgactcgtgacgtctccaagtcctataggtgcagcggctggtgagatagtcgctatcgcctggttgcctctttattttactggggtatgcctggtaataaacagtaatatttaatttgtcggagaccacaaaccaaccttgagctgggaggtacgtgctcttcttgacagacgttggaagaagacctggcctaaagaggtctcttttggtggtccttttcaaagtcttcacctgagccctgctctccagcgaggcgcactcctggcttttgcgctccaaagaagaggtgggatagttggagggcatggagggaatcaaagtgtttctccatgaaagagaactgtggctaaaattccacgaagtgggcacggaaatgatcataaccaaggctggaaggcggatgtttcccagttacaaagtgaaggtgacgggccttaatcccaaaacgaagtacattcttctcatggacattgtacctgccgacgatcacagatacaaattcgcagataataaatggtctgtgacgggcaaagctgagcccgccatgcctggccgcctgtacgtgcacccagactcccccgccaccggggcgcattggatgaggcagctcgtctccttccagaaactcaagctcaccaacaaccacctggacccatttgggcatattattctaaattccatgcacaaataccagcctagattacacatcgtgaaagcggatgaaaataatggatttggctcaaaaaatacagcgttctgcactcacgtctttcctgagactgcgtttatagcagtgacttcctaccagaaccacaagatcacgcaattaaagattgagaataatccctttgccaaaggatttcggggcagtgatgacatggagctgcacagaatgtcaagaatgcaaagtaaagaatatcccgtggtccccaggagcaccgtgaggcaaaaagtggcctccaaccacagtcctttcagcagcgagtctcgagctctctccacctcatccaatttggggtcccaataccagtgtgagaatggtgtttccggcccctcccaggacctcctgcctccacccaacccatacccactgccccaggagcatagccaaatttaccattgtaccaagaggaaagaggaagaatgttccaccacagaccatccctataagaagccctacatggagacatcacccagtgaagaagattccttctaccgctctagctatccacagcagcagggcctgggtgcctcctacaggacagagtcggcacagcggcaagcttgcatgtatgccagctctgcgccccccagcgagcctgtgcccagcctagaggacatcagctgcaacacgtggccaagcatgccttcctacagcagctgcaccgtcaccaccgtgcagcccatggacaggctaccctaccagcacttctccgctcacttcacctcggggcccctggtccctcggctggctggcatggccaaccatggctccccacagctgggagagggaatgttccagcaccagacctccgtggcccaccagcctgtggtcaggcagtgtgggcctcagactggcctgcagtcccctggcacccttcagccccctgagttcctctactctcatggcgtgccaaggactctatcccctcatcagtaccactctgtgcacggagttggcatggtgccagagtggagcgacaatagctaaagtgaggcctgcttcacaacagacatttcctagagaaagagagagagagaggagaaagagagagaaggagagagacagtagccaagagaaccccacagacaagatttttcatttcacccaatgttcacatctgcactcaaggtcgctggatgctgatctaatcagtagcttgaaaccacaattttaaaaatgtgactttcttgttttgtctcaaaacttaaaaaaacaaacacaaaaagatgagtcccaccccccactaccaccacacccatcaaccagccacattcacgctactccccagatctcttcccccattccttcttttgggctctagaaagtcttgcctcattgagtgtttttactagtgcgtagttggagtctgtccctgtcttggtgttaatgttgacattgttatataataaatgataatatatttannnnnnnaa

SEQ ID NO: 19276 - DNA, 3422 bp, Homo sapiens
  misc_feature (3414)..(3420): n is a, c, g, or t
agttttgtcatcatttctattgttataattcttattcattttcccagccccgtccacacttctatttttcactacccccacgccccacaagttgccaccgggtcaggtggggacatatccggagagaaatagaaagggatgcattttaaagcgagttctcttttgagaggaaaacaatgggtagttttggaagtgtctttcttaaaaacggaaggagaaggtgaagaaaaaaattatcaacagcaatgggcccctttggtttgggttttgactttttaaagaggaacctctgctgtcctgttgcagtattaaaatcagggcaggaattttgcaaaatgagaaaaataaacttcgggagaaaacccagctgggagcagcttcgggaaagcgacagttctccgaaaggaggaagggaggatgcgcgctgtagccggctccggagtttactgcccgaacgattggggaaaagaacgaggattctcaaatctagttgcgatctctcgtctctcctttattctgttcgtggtgcgggcttcggagcgtctgggaaagccagtctgtgaagctggacttgcagaatcctttgaatgccggtccaggtggctgcagggcccgcagtccgggatgccggagaaaggaaccacaaggaaaagacgctacgctcggagtttccccttttccttgcagccccggcggggcctaggcctcggtttccggcccacctcggctcagaggtcaagtaggaactcatctcgtcgacccttccggaaggcccgacgctctccggctctgtgctgggcaggcctagctcttctctcggcgccaccaggggcgtctacgcggtacgttttgcaactcaacctagtgggtttccagcggtgcgcaaaagtttgcgagcatccaccactgcgcctcattcctccggagaaagccgggttggtttatgtctttatttattcccggggccaagacgtccggaacctgtggctgcgcagacccggcactgataggcgaagacggagagaaatttacctcccgccgctgccccccagccaaacgtgacagcgcgcgggccggttgcgtgactcgtgacgtctccaagtcctataggtgcagcggctggtgagatagtcgctatcgcctggttgcctctttattttactggggtatgcctggtaataaacagtaatatttaatttgtcggagaccacaaaccaaccttgagctgggaggtacgtgctcttcttgacagacgttggaagaagacctggcctaaagaggtctcttttggtggtccttttcaaagtcttcacctgagccctgctctccagcgaggcgcactcctggcttttgcgctccaaagaagaggtgggatagttggagagcagaaccttgcgcgggcacaggcctgggcgcaccatggccgacgcagacgagggctttggcctggcgcacacgcctctggagcctgacgcaaaagacctgccctgcgattcgaaacccgagagcgcgctcggggcccccagcaagtccccgtcgtccccgcaggccgccttcacccagcagggcatggagggaatcaaagtgtttctccatgaaagagaactgtggctaaaattccacgaagtgggcacggaaatgatcataaccaaggctggaaggcggatgtttcccagttacaaagtgaaggtgacgggccttaatcccaaaacgaagtacattcttctcatggacattgtacctgccgacgatcacagatacaaattcgcagataataaatggtctgtgacgggcaaagctgagcccgccatgcctggccgcctgtacgtgcacccagactcccccgccaccggggcgcattggatgaggcagctcgtctccttccagaaactcaagctcaccaacaaccacctggacccatttgggcatattattctaaattccatgcacaaataccagcctagattacacatcgtgaaagcggatgaaaataatggatttggctcaaaaaatacagcgttctgcactcacgtctttcctgagactgcgtttatagcagtgacttcctaccagaaccacaagatcacgcaattaaagattgagaataatccctttgccaaaggatttcggggcagtgatgacatggagctgcacagaatgtcaagaatgcaaagtaaagaatatcccgtggtccccaggagcaccgtgaggcaaaaagtggcctccaaccacagtcctttcagcagcgagtctcgagctctctccacctcatccaatttggggtcccaataccagtgtgagaatggtgtttccggcccctcccaggacctcctgcctccacccaacccatacccactgccccaggagcatagccaaatttaccattgtaccaagaggaaagaggaagaatgttccaccacagaccatccctataagaagccctacatggagacatcacccagtgaagaagattccttctaccgctctagctatccacagcagcagggcctgggtgcctcctacaggacagagtcggcacagcggcaagcttgcatgtatgccagctctgcgccccccagcgagcctgtgcccagcctagaggacatcagctgcaacacgtggccaagcatgccttcctacagcagctgcaccgtcaccaccgtgcagcccatggacaggctaccctaccagcacttctccgctcacttcacctcggggcccctggtccctcggctggctggcatggccaaccatggctccccacagctgggagagggaatgttccagcaccagacctccgtggcccaccagcctgtggtcaggcagtgtgggcctcagactggcctgcagtcccctggcacccttcagccccctgagttcctctactctcatggcgtgccaaggactctatcccctcatcagtaccactctgtgcacggagttggcatggtgccagagtggagcgacaatagctaaagtgaggcctgcttcacaacagacatttcctagagaaagagagagagagaggagaaagagagagaaggagagagacagtagccaagagaaccccacagacaagatttttcatttcacccaatgttcacatctgcactcaaggtcgctggatgctgatctaatcagtagcttgaaaccacaattttaaaaatgtgactttcttgttttgtctcaaaacttaaaaaaacaaacacaaaaagatgagtcccaccccccactaccaccacacccatcaaccagccacattcacgctactccccagatctcttcccccattccttcttttgggctctagaaagtcttgcctcattgagtgtttttactagtgcgtagttggagtctgtccctgtcttggtgttaatgttgacattgttatataataaatgataatatatttannnnnnnaa

SEQ ID NO: 19277 - DNA, 2498 bp, Homo sapiens
  misc_feature (2490)..(2496): n is a, c, g, or t
atttcagagagagagagagagggagagagagtgagagagactgactcttacctcgaatccgggaactttaatcctgaaagctgcgctcagaaaggacttcgaccattcactgggcttccaactttccctccctgggggtgtaaaggaggagcggggcactgagattatatggttgccggtgctcttggaggctattttgtgttctttggcgcttgccaactgggaagtatttagggagagcaagcgcacagcagaggaggtgtgtgttggaggtgggcagtcgccgcggaggctccagcggtaggtgcgccctagtaggcagcagtagccgctattctgggtaagcagtaaaccccgcataaaccccggagccaccatgcctgctcccccgcctcaccgccggcttccctgctaggagcagcagaggatgtggtgaatgcaccggcttcaccgaacgagagcagaaccttgcgcgggcacaggcctgggcgcaccatggccgacgcagacgagggctttggcctggcgcacacgcctctggagcctgacgcaaaagacctgccctgcgattcgaaacccgagagcgcgctcggggcccccagcaagtccccgtcgtccccgcaggccgccttcacccagcagggcatggagggaatcaaagtgtttctccatgaaagagaactgtggctaaaattccacgaagtgggcacggaaatgatcataaccaaggctggaaggcggatgtttcccagttacaaagtgaaggtgacgggccttaatcccaaaacgaagtacattcttctcatggacattgtacctgccgacgatcacagatacaaattcgcagataataaatggtctgtgacgggcaaagctgagcccgccatgcctggccgcctgtacgtgcacccagactcccccgccaccggggcgcattggatgaggcagctcgtctccttccagaaactcaagctcaccaacaaccacctggacccatttgggcatattattctaaattccatgcacaaataccagcctagattacacatcgtgaaagcggatgaaaataatggatttggctcaaaaaatacagcgttctgcactcacgtctttcctgagactgcgtttatagcagtgacttcctaccagaaccacaagatcacgcaattaaagattgagaataatccctttgccaaaggatttcggggcagtgatgacatggagctgcacagaatgtcaagaatgcaaagtaaagaatatcccgtggtccccaggagcaccgtgaggcaaaaagtggcctccaaccacagtcctttcagcagcgagtctcgagctctctccacctcatccaatttggggtcccaataccagtgtgagaatggtgtttccggcccctcccaggacctcctgcctccacccaacccatacccactgccccaggagcatagccaaatttaccattgtaccaagaggaaagaggaagaatgttccaccacagaccatccctataagaagccctacatggagacatcacccagtgaagaagattccttctaccgctctagctatccacagcagcagggcctgggtgcctcctacaggacagagtcggcacagcggcaagcttgcatgtatgccagctctgcgccccccagcgagcctgtgcccagcctagaggacatcagctgcaacacgtggccaagcatgccttcctacagcagctgcaccgtcaccaccgtgcagcccatggacaggctaccctaccagcacttctccgctcacttcacctcggggcccctggtccctcggctggctggcatggccaaccatggctccccacagctgggagagggaatgttccagcaccagacctccgtggcccaccagcctgtggtcaggcagtgtgggcctcagactggcctgcagtcccctggcacccttcagccccctgagttcctctactctcatggcgtgccaaggactctatcccctcatcagtaccactctgtgcacggagttggcatggtgccagagtggagcgacaatagctaaagtgaggcctgcttcacaacagacatttcctagagaaagagagagagagaggagaaagagagagaaggagagagacagtagccaagagaaccccacagacaagatttttcatttcacccaatgttcacatctgcactcaaggtcgctggatgctgatctaatcagtagcttgaaaccacaattttaaaaatgtgactttcttgttttgtctcaaaacttaaaaaaacaaacacaaaaagatgagtcccaccccccactaccaccacacccatcaaccagccacattcacgctactccccagatctcttcccccattccttcttttgggctctagaaagtcttgcctcattgagtgtttttactagtgcgtagttggagtctgtccctgtcttggtgttaatgttgacattgttatataataaatgataatatatttannnnnnnaa

SEQ ID NO: 19278 - DNA, 2905 bp, Homo sapiens
  misc_feature (2905)..(2905): n is a, c, g, or t
agttttgtcatcatttctattgttataattcttattcattttcccagccccgtccacacttctatttttcactacccccacgccccacaagttgccaccgggtcaggtggggacatatccggagagaaatagaaagggatgcattttaaagcgagttctcttttgagaggaaaacaatgggtagttttggaagtgtctttcttaaaaacggaaggagaaggtgaagaaaaaaattatcaacagcaatgggcccctttggtttgggttttgactttttaaagaggaacctctgctgtcctgttgcagtattaaaatcagggcaggaattttgcaaaatgagaaaaataaacttcgggagaaaacccagctgggagcagcttcgggaaagcgacagttctccgaaaggaggaagggaggatgcgcgctgtagccggctccggagtttactgcccgaacgattggggaaaagaacgaggattctcaaatctagttgcgatctctcgtctctcctttattctgttcgtggtgcgggcttcggagcgtctgggaaagccagtctgtgaagctggacttgcagaatcctttgaatgccggtccaggtggctgcagggcccgcagtccgggatgccggagaaaggaaccacaaggaaaagacgctacgctcggagtttccccttttccttgcagccccggcggggcctaggcctcggtttccggcccacctcggctcagaggtcaagtaggaactcatctcgtcgacccttccggaaggcccgacgctctccggctctgtgctgggcaggcctagctcttctctcggcgccaccaggggcgtctacgcggtacgttttgcaactcaacctagtgggtttccagcggtgcgcaaaagtttgcgagcatccaccactgcgctgcttagaaattgtgcccattgatcagactaaaaataatagtcgtcgtgattacaaaacaaaatagagtgcctcgtgcctcggcgggccctggtacaataattattctctacagaaaccacctctctccactcccacccctactccaccacccactcgcaccccgcccctgccgggccactctgggacgaattgcattcttggacctttctctccgcaaggcacattacggagaactccctctgtctcgtgtcccctccacgacaacccagtaattatttctatgcaagtctgcaagagggcactgagttatcgcatcccaagcctaaccagctagagcggcgcctcggtattcatttgcccagagctcctccgcgggggatttaaaaataataataataataataaggatcccatgccttatgcaagagacctcagtcccccggaacaactcgatttccttccaatagaggtctgaggtggactcccacctcccttcgtgaagagttccctcctctcccccttcctaagaaagtcgatcttggctctatttgtgtcttatgttcatcaccctcattcctccggagaaagccgggttggtttatgtctttatttattcccggggccaagacgtccggaacctgtggctgcgcagacccggcactgataggcgaagacggagagaaatttacctcccgccgctgccccccagccaaacgtgacagcgcgcgggccggttgcgtgactcgtgacgtctccaagtcctataggtgcagcggctggtgagatagtcgctatcgcctggttgcctctttattttactggggtatgcctggtaataaacagtaatatttaatttgtcggagaccacaaaccaaccttgagctgggaggtacgtgctcttcttgacagacgttggaagaagacctggcctaaagaggtctcttttggtggtccttttcaaagtcttcacctgagccctgctctccagcgaggcgcactcctggcttttgcgctccaaagaagaggtgggatagttggaggtgagtttcaccctggaggactgaggggggaaataggtttctctttgcacttggccctccttggcttttcaccccgtcttagtcttgctgaatcttctcttgctgtgctgctgcttctcatgaacgaaataagaatggcttcgtgtgtcacctggcaagaatggattctctcgaaaggtttgaaaatccctattttgcttggtggcccagaccatctgtgctcaatgagctaagcaaatctggctgggctattacctgggagagtccagatttttcctctctggaggggcctgaagattatttatgggaattaattttatccccaaatctctgagaacttaaagggattgggaaggtctttctggatttccctttccctctactggagatgtagcggttcagccttcttccgatgccatgtttgtttttcgtgtcttcggcctagggtcgccttgccagcaagcctaaaggcctccaagctgacttggagggtgagggtgttttcacaaataaatacatcgcctgggcaaagggaaaatatctgtttgcaaacaaacctggaaggtggagtgagcaccatagcaaaggagggctggctttctccccggttgccccacattcagggttggagattctccactttggcattttgcagcaatggcctggcctgggattttagcagagcagtcacagagggttacacagctgctgacctcggggcatttctcctccctccatccctttctccagaccttgacttgcaggcccaagtctcttatcagaaccctagaaaaatcagtatgatgggggtacaggaggtaaggatgggaaacagaacaggactcctgacatttactccaagcaccaatattcggtgtcccaatctgggtctgctcagactgagacctactgactgtgtttgtgcttttattgacctcttcaactcacccn

SEQ ID NO: 19279 - DNA, 3040 bp, Homo sapiens
agttttgtcatcatttctattgttataattcttattcattttcccagccccgtccacacttctatttttcactacccccacgccccacaagttgccaccgggtcaggtggggacatatccggagagaaatagaaagggatgcattttaaagcgagttctcttttgagaggaaaacaatgggtagttttggaagtgtctttcttaaaaacggaaggagaaggtgaagaaaaaaattatcaacagcaatgggcccctttggtttgggttttgactttttaaagaggaacctctgctgtcctgttgcagtattaaaatcagggcaggaattttgcaaaatgagaaaaataaacttcgggagaaaacccagctgggagcagcttcgggaaagcgacagttctccgaaaggaggaagggaggatgcgcgctgtagccggctccggagtttactgcccgaacgattggggaaaagaacgaggattctcaaatctagttgcgatctctcgtctctcctttattctgttcgtggtgcgggcttcggagcgtctgggaaagccagtctgtgaagctggacttgcagaatcctttgaatgccggtccaggtggctgcagggcccgcagtccgggatgccggagaaaggaaccacaaggaaaagacgctacgctcggagtttccccttttccttgcagccccggcggggcctaggcctcggtttccggcccacctcggctcagaggtcaagtaggaactcatctcgtcgacccttccggaaggcccgacgctctccggctctgtgctgggcaggcctagctcttctctcggcgccaccaggggcgtctacgcggtacgttttgcaactcaacctagtgggtttccagcggtgcgcaaaagtttgcgagcatccaccactgcgctgcttagaaattgtgcccattgatcagactaaaaataatagtcgtcgtgattacaaaacaaaatagagtgcctcgtgcctcggcgggccctggtacaataattattctctacagaaaccacctctctccactcccacccctactccaccacccactcgcaccccgcccctgccgggccactctgggacgaattgcattcttggacctttctctccgcaaggcacattacggagaactccctctgtctcgtgtcccctccacgacaacccagtaattatttctatgcaagtctgcaagagggcactgagttatcgcatcccaagcctaaccagctagagcggcgcctcggtattcatttgcccagagctcctccgcgggggatttaaaaataataataataataataaggatcccatgccttatgcaagagacctcagtcccccggaacaactcgatttccttccaatagaggtctgaggtggactcccacctcccttcgtgaagagttccctcctctcccccttcctaagaaagtcgatcttggctctatttgtgtcttatgttcatcaccctcattcctccggagaaagccgggttggtttatgtctttatttattcccggggccaagacgtccggaacctgtggctgcgcagacccggcactgataggcgaagacggagagaaatttacctcccgccgctgccccccagccaaacgtgacagcgcgcgggccggttgcgtgactcgtgacgtctccaagtcctataggtgcagcggctggtgagatagtcgctatcgcctggttgcctctttattttactggggtatgcctggtaataaacagtaatatttaatttgtcggagaccacaaaccaaccttgagctgggaggtacgtgctcttcttgacagacgttggaagaagacctggcctaaagaggtctcttttggtggtccttttcaaagtcttcacctgagccctgctctccagcgaggcgcactcctggcttttgcgctccaaagaagaggtgggatagttggagagcagaaccttgcgcgggcacaggcctgggcgcaccatggccgacgcagacgagggctttggcctggcgcacacgcctctggagcctgacgcaaaagacctgccctgcgattcgaaacccgagagcgcgctcggggcccccagcaagtccccgtcgtccccgcaggccgccttcacccagcagggcatggagggaatcaaagtgtttctccatgaaagagaactgtggctaaaattccacgaagtgggcacggaaatgatcataaccaaggctggaaggcggatgtttcccagttacaaagtgaaggtgacgggccttaatcccaaaacgaagtacattcttctcatggacattgtacctgccgacgatcacagatacaaattcgcagataataaatggtctgtgacgggcaaagctgagcccgccatgcctggccgcctgtacgtgcacccagactcccccgccaccggggcgcattggatgaggcagctcgtctccttccagaaactcaagctcaccaacaaccacctggacccatttgggcatattattctaaattccatgcacaaataccagcctagattacacatcgtgaaagcggatgaaaataatggatttggctcaaaaaatacagcgttctgcactcacgtctttcctgagactgcgtttatagcagtgacttcctaccagaaccacaagatcacgcaattaaagattgagaataatccctttgccaaaggatttcggggcagtgatgacatggagctgcacagaatgtcaagaatgcaaagtaaagaatatcccgtggtccccaggagcaccgtgaggcaaaaagtggcctccaaccacagtcctttcagcagcgagtctcgagctctctccacctcatccaatttggggtcccaataccagtgtgagaatggtgtttccggcccctcccaggacctcctgcctccacccaacccatacccactgccccaggagcatagccaaatttaccattgtaccaagaggaaaggtgagtgtgatcacccctggtcaatttgctttctttcttaccttttcctttccttgggttgggggtga

SEQ ID NO: 19280 - DNA, 324 bp, Homo sapiens
acaatttttgttcctttccctgagttcctgctgctctgaaagataggaacttccactctcttaataattagtggcttacctctccatggctccttctggtggagggaggaggagggatttctctgattggtgagatggcaagagtctggtaccccctgggctctgtgttgggagtgggctgtgtgtaaaaagtcacttgcacatgtggcctctcttgggttctatgagcttgatttgaggggagggagacctctgttctctttgaggctgaatggaaaagtttctgttgtgggatgctaatcaggtctagacctggaggcaact

SEQ ID NO: 19281 - DNA, 1331 bp, Homo sapiens
tgtgcataagccacagataaagaatgtcttatcaaataattccacctttccctaacaatggttatcatttatttggcatagtgcaagattctgtttccatctttcctagttctcacaacatttattatcaagtagatattatttttctcattttacagatgaggaaactaaaacttagaaagcatcctgcaagagcagagccagttagctatctgcaaagccctttgctccaccaatgtcacattgcctagtcctttcgttttatgaagtctcatcttaagacatgataagtggaggaggatagggaaagacatttttcttaatttgcacaagagggaagtgaggttctaaagaacaaagcaagtcttagctcactcagctagtcagcagagcttggtgtttggggaccactatggcttatcccttttttatacccatccctttaggcccagctctgaaatcccacatacacctaaagtaaactaggctcctggatggggcagatgtacatatagttttcaatcatgggaatgatgacttttatttcaaggttgctcatgggatggtggggatgttgaggagggtggtgtcactggcagccacatgtgccttcagtcctaccatctgcatgtacaccagccaaattccaactggcacctcctgcctccacttgcctgagggttttctgtggccaccatggcacattttgccacttacatagcaggtttggaatgctggcgagttgcacctttcaggtgcaatcctcaaccgatgactactaagaacttggtgtataaacacccagacccctcactcttggaagcatacattctaccccatgttgcagagtttccccagcagaatgaagctcaactcatacatcaaaataatgggctttgtgagggatgaattcttgctgtcttttttccccttgtctcacttttcctacttcccttttggtgtttccccaaataaacctttgggaaacacttcctaaataaactctttgcattcaaatttcatctcattgcccacttttcgggagaacccaacctaagtcacctgaatataccctacatcaatactttccaaacctggctaatgatcagacagattgagaaagtctttgaaaaatataagtatgaatgcgttacccagatctactaaactaagatctctggaggttgggttcatgcctctgtcttttctgttaatctcccttcttctgaagatttagtgattagtcaggataccaacactgacccataaagcatcctgcactagaaattttttctggaacattgcacttggcaaaactttgctgccattaa

SEQ ID NO: 19282 - DNA, 453 bp, Homo sapiens
aaagtttggaggcagtggaaaattacataagatttagaaggattaaatctgtgactacacatattaaaattggcctgagtcttagtcttttgccctaatagctataggagtcatatcaaaagggaaaactggaataaactgttaaaaagattattttcaagggggttatgaggttgctcgccccattccatgatcttagacatcttgtagggacggtcaaccactgataataccagctcctattacacatctcttttaggtgttcttcaagctaatcaaccacaagtcaaggtcacctttcagacattccataccaccatgtcctcaactcttgtgttgcctgcaaggaccaatccagatcaggtgataaaaaaaaaatttgtcctcaaataaatttattattattaattatttcacatattaataaatgtaaaatttgattaataaagagta

SEQ ID NO: 19283 - DNA, 490 bp, Homo sapiens
catagtaatttctatttgatagaagctactgactaacttattacggcactggattagttctctttgattttttttttcttttgttagaagccctgtgtgtgtgtgtgtgtgcgtgtgcgcgcgtatgtgtgtgttgaggtgccagaaataagtactttaatactttttctcttggatggaaataattaacagctttgttagtctgaaaattttctacaaaggtgtcatggggcagtgcatggataatggttatggagaatatttcacttttgagtgggttttgtcagaggatgctgaaaagaaatacaaactgatgtgtgtgttttatcttgatgctgctaggatgctgttgttataatctgaccaacctgattttgtaagccttaaattgcttaaaaggcaattcctgtgaagaacaacactgccaaggatgctgtttcctaccgcccatatcacatcattggtgtgtgtgcaaacagcacaacaatcc

SEQ ID NO: 19284 - DNA, 576 bp, Homo sapiens
tcagctctgtgctgaggaggagagggttccgtggaatcttccactggccagctgggtagtgaggtgtgctgccagcctcagagggctggcgaggtggatgtggtttgaagaaaggccctacgggccttgtttcttaaagatgaggtgggtggccgcccaggctcaggtcagcggacacaggtgccaccgccaacatgcttgacttgggaagacacagcctctcctggcaccctccaccgctctccctggacctctgccctcagccccaggctgcctgagcccacaaagccctcagagcctgcaggccgtgttgcgactgcagggcaggggtggaagggggcttctgagtgctgtggagtggctcccacccccaccccggggtcagaggcacccagggccacatctgtctgtggtgctgtagccgcacttagtccctagacttgccagttttccactttgcaacttggtgaataccatttggaattcatagaaattgtatttggcttccatttggacggtagaaacaggaaatttgcagaatgctacaggaacttgctggctgtcctaggggtagct

SEQ ID NO: 19285 - DNA, 372 bp, Homo sapiens
gctgtcacacgtgactactgaatcactggaccgctgtttatgagacctaagaccctcagccccaggctgcctgagcccacaaagccctcagagcctgcaggccgtgttgcgactgcagggcaggggtggaagggggcttctgagtgctgtggagtggctcccacccccaccccggggtcagaggcacccagggccacatctgtctgtggtgctgtagccgcacttagtccctagacttgccagttttccactttgcaacttggtgaataccatttggaattcatagaaattgtatttggcttccatttggacggtagaaacaggaaatttgcagaatgctacaggaacttgctggctgtcctaggggtagct

SEQ ID NO: 19286 - DNA, 405 bp, Homo sapiens
ctgctcccattttcccgacacgttcaacgggggcagcttttgtacttttaaataacccattctatttcggtagaccttttctcccttcttttctaacagctcagtttccatacaagactcacagtgaactcaccattcccgagtggaaaggagtgactggttgtataaatatgtctgtctccacttggtctttgcctgaccgggctttgtgggggtctgttgattctttcagcttcactgccttccctgcagacccgacctggagtcctttgttgccctaaatatttttctcaaagatcttttattaactttttcttttctgctcttgtttttcttcctcttacctactttaccatgtggtcctgtggcaagagtgagaaagaaaaatacattctagtggtgtga

SEQ ID NO: 19287 - DNA, 461 bp, Homo sapiens
ggtggctgccatagtgaacttcatcacagcccatggcaacttcaaggctctgatctccatccacagctactctcagatgcttatgtacccttacggccgattgctggagcccgtttcaaatcagagggagttgatgtggccagtgggatcaccgtcgactgggcctatgacagtggcatcaagtacgccttcagctttgagctccgggacactgggcagtatggcttcctgctgccggccacacagatcatccccacggcccaggagacgtggatggcgcttcggaccatcatggagcacaccctgaatcacccctactagcagcacgactgagggcaggaggctccatccttctccccaaggtctgtggctcctcccgaaacccaagttatgcatccccatccccatgccctcatcccgacctcttagaaaataaatacaagtttgaacaggcaaaaaag

SEQ ID NO: 19288 - DNA, 446 bp, Homo sapiens
cctgcctttcaccccgccaatgtcatcttgcagtacgatcttgccaaggatgcggtggaggccttgtataaggtccatgggatcgagtacatttttggcagcatcagcaccaccctctatgtggccagtgggatcaccgtcgactgggcctatgacagtggcatcaagtacgccttcagctttgagctccgggacactgggcagtatggcttcctgctgccggccacacagatcatccccacggcccaggagacgtggatggcgcttcggaccatcatggagcacaccctgaatcacccctactagcagcacgactgagggcaggaggctccatccttctccccaaggtctgtggctcctcccgaaacccaagttatgcatccccatccccatgccctcatcccgacctcttagaaaataaatacaagtttgaacaggcaaaaaag

SEQ ID NO: 19289 - DNA, 397 bp, Homo sapiens
agtccatcagacctggaatcttctgcatcggcgtggatctcaacaggaactggaagtcgggttttggagatgtggccagtgggatcaccgtcgactgggcctatgacagtggcatcaagtacgccttcagctttgagctccgggacactgggcagtatggcttcctgctgccggccacacagatcatccccacggcccaggagacgtggatggcgcttcggaccatcatggagcacaccctgaatcacccctactagcagcacgactgagggcaggaggctccatccttctccccaaggtctgtggctcctcccgaaacccaagttatgcatccccatccccatgccctcatcccgacctcttagaaaataaatacaagtttgaacaggcaaaaaag

SEQ ID NO: 19290 - DNA, 268 bp, Homo sapiens
ccaaaatagtagtggtgtgaggtgtctgttgacaagtctcttctgggaaagcagatggaagtttgggaaatgagacattcaggcccctgtatctcagtgctccccttaccccgactttgagcaaggtactttgttagctgcatcaagaccaatctggctcaatatctcttcttcctcaaggattcacttggctgtttgggttgacgactcaggacaggtggtcacagagagactctttacggccttttctaagtagaataaagattca

SEQ ID NO: 19291 - DNA, 520 bp, Homo sapiens
aaggagaatcacttgagcccaggagtttgaggctgcagtgagctatgatcatgccgctgcactccagcacaatgattaatatcatgaactcagacccaatctgtgtgtgtttatatcctccaggctctgccacttatcagccgtgtgacattgggcaaatgccttcacctctctaagcctcgattgtttgaggattaaatatacttgtaatacatataaagcccttagtatagtggctgataaatgcttagtaagtattagctaatatttatggaaagaaaaccagatgtcaaaagtttaaaagatggagagaatgctgagatgtgtcagatgcacctaagagttccaataagctaaggacttattcattagatttggcaacatggaagccattgttgaccttgatgagaggaacttcaacaaagtggaggggcagaagccagataataatagattgattggtgaatagacggtaaagaaaatggcagcaacaggtaggactaactttttcaagaagctt

SEQ ID NO: 19292 - DNA, 418 bp, Homo sapiens
aggagtgccgtggtgcagtcacagctcactgcaacctcaacctttagggctcaatcagtcctcccacctcagcctctcaagtatccgggcctataggcatgcaccactgtgcctggctaagtttttgtattttttgtagagaggggattttgccatgttgcccagagtagtctcaaactcctggcctcaggtgatctgcctgcctcagcctcccaaagtgttgggattacaggcgtgagccactgcacctggccatttttgtttgttttacattttaaaaattgacgtataattcatgtaccataaaatttatcctgttcaagtgtacaatttagtgcattttactatatctaaaatgttgagcaactatcaccatggtctaattccagaacgttttcatcacccccaaaagaaacct

SEQ ID NO: 19293 - DNA, 243 bp, Homo sapiens
tacaactctaagatagttgaaataggaactttcttatttagttgcatcatgaggaaatttgagatgatgttatctgccaagcgcagatctctccaaaggatttcttctagccttaattatccacctcacaggacaaacctttgccattccccatctactttttctttcggctcctcaattcctgacacaacaaagttgtacatatttcccacactcttggtttagcagagttcttttatcagt

SEQ ID NO: 19294 - DNA, 1528 bp, Homo sapiens
ctaactatggatggaaaatatttgaaaaaaataattacatctatactaaacatgtgcagacatttttggtcattattgtctaaacaatacagcttaacaactgttttcatagtatttccattatattaggtattataagtctagagatgacttaaagtatatgagaggctgtccataggttattatgcaaacactacgccattttctatcagggatttgaacatttgcagattttggtatccataggatgtcctggaaccagtcccccactggtactgagggacagctatacttaaagactaatatatatgctctgttttcctttagagtacttgactctacacatttcctatagctttgaagacttgtcttccttgaagcagactaaaagggggacagatgggaggatgggaagaaccacacttccataatcttagaattattccttccttgctatgctgacaaagtgagaaaacaaatataaattatcttaaagcccagcatttaagacacaagttggtaattacctaggcttgaaactttctaatttcactggttttttcgtttgcttgctctttatttttctctggcttaaaatcagtggttagggtgaatagcacaggtcttgggggtggtatctatttctctaggtcacaaatttttttttaaactatttcaaggcaacttatttctagttttcagtagtaaattgtttaaatttcaagaaaaatggtacagtgaagttagatttgaacaatttaagaaaagctaaagaatatgtagtttaaaatcttagagaaggcttaaagatgggattatgtctgagaatctgcagttacccagaaaaaggatttaaattgcatcaagagaagtttaggttaggcatttgaattgattttattgtaggagaggtcatagactgaatatttttaagaataaaggtaaatcggatggttgccgggtctgtgtggatagaagtagacatgggagacttttcattttgttctgtactaagaaaaattcttctgccttgggatcctgtcgatctgtgaccttatccccaaccctgtgctctctgaaacatgtgctgtgtccactcagggttaaatggattaagggcggtgcaagatgtgctttgttaaacagatgcttgaaggcagcatgctcgttaagagtcatcaccactccctcatcttaagtacccagggacacaaacactgcggaaggccgcagggtcctctgcctaggaaaaccagagacctttgttcacttgtttatctactgaccttccctccactattgtcctatgaccctgccaaatccccctctgcgagaaacacccaagaatgatcaattaaaaaaaaaaaaaaaaaaaaaagaataaaggtagataatggtctgccttgatttcgcttagtctttcctgaaaatgtaaccatgaccctttgagagacctttcaagtcttatttttctatgagtaaatttgaagtatttcagatggcatgcttgataaggaacttaatgaag

SEQ ID NO: 19295 - DNA, 851 bp, Homo sapiens
atccaaaacacataccttaacaaatgtctatatatcaatagattatctagacaccgctttaaatgtgcagctatcacttaaaatcaactgatgggttcaaaataatgtaagaatctcaagatggcatacaaatgcgccctgaatgatgagagtacatggtactttttataggaagatgtcactatcaacacaaagcatattttttattatttatttatttttagacagagtctcgctctgtcacccaggctggagtgcaatctccgcctcccgtgttcaagcgattctcctgcctcagcctccggagtagctgggactacaggcgcacaccaccacacccagctaatttttgtacttttagtagagacagggtttcgtcatgttggccaggatggtcttgatctcctgacctcgtgatctgcccatcttggcatcccaaagtgctgcgattacaggcatgagccaccgcgcccgtctgaaagcatattcttttaaggttttgttattgtttttccatgtagcactgacagatttgtactaattctttgcttctctggttgctagatagctttagaattgtcagctgaggctcttgaagagcaaaactaaactaccttagttggcttagatagggaaataatctgacttttaggattatttgcagtataaatgatttcaaacactaaaggttgacaaagaagcatttatagttcactgagaaggctatcttatttcagattccaggtaagcagaatcacttaaatttaaaagagcacgctctgtgttgatatgcaaaactttgttaaagtatacgttttgatctttaattcatttattagttacaaatgtta

SEQ ID NO: 19296 - DNA, 366 bp, Homo sapiens
tcataataaaagatgacacttagaactggatcacttggccctttctcttcttatctcctcccagttcaaaatgcttgcatcttttaatagccagcattctcttagatctgcagttgggctcaacgcactcaagccttagcacaatcttctttgtagttttagcctttttccggaaaatcggcttagtttgcccaccatagccactctgcttcctgtcataacgccgctttccctgggcgtacagagaatccttgcccttcttgtactgtgtcactttatggggttggtgcttgccacacttcttacagaaagtccggcgggttttagggacgttaaccatgcttggtgagcgctatcggtcgacgg

SEQ ID NO: 19297 - DNA, 511 bp, Homo sapiens
gcctggccaacatggtgaaactctgtctctacagaagtacaaaaattagtcgggcgtggtggcaggcgcctgtaatcccagctgcttgggaggctaacctgggagaatctctcgaacctgggaggcagaggttgcagtgagctgagatcacaccattgcactgcagcctgggcaacaagagcgaaactccatctcaaaaaaaaaaacaaacaaataataaaataataataataataataaaaaagagggtgggagtggaccaaggcctaatggcatggaatttgcaaactttatcttcctagttttctctggggagccttcctccatcaccagggcccagcagggcctcagatggcggggggtggggcgggggctacacatatccctcatggccaagatgctaggaagcccctgagctggggcaacagcctctggtcacagtcatgagggaggctgggtgcagtagcgcttatctcgcctgaccttgtggagactgaccactccctccttc

SEQ ID NO: 19298 - DNA, 380 bp, Homo sapiens
tgtgtgggttaaattagttcattaaaatgtttataactattcctgacacagagctaagagctttatgagtgttagattttatcattactatattttcccatgattttaagtcatattttaaacgttagtctaatgaaaaggcagtgttgatttaaaaaaaaaatgtctaagcatagcttctaacttttattcaacaaggcaaaatgccaatgaaagctttcagtagaattccatatgttgtggaatatacagttttaccaactgtggggaaaatatcacagttttaggtgcttgaacctttgattgccagtttcccatgattaaagatagacatctaaatttttaatttatatttattttgttagaagcaatagtgaggg

SEQ ID NO: 19299 - DNA, 531 bp, Homo sapiens
acccaatacaaagtcatgatcccatcctcaatgcctagacctcagccaaagttcagattcagatcccagtgacagaggaggagtccatatccctaggaggaataccctgcaaccccgtggaagtaaatgctggcacaattccctcagtccttcagcaaaggaacctatagccatttactcaggagattgtacactggcgaaaggaaagatgcagaactggtcagattattgacactgagtgagagctgacattgatgcccagatgcccacagcactatcatgtctcccatcacagtggggcttacggaggtcagggagtaaacctggacacattacggcccacaatggaactactggatccatagacccagccctggttatcttccaattccctgagtgcataattaacactgatgcactgttaagtggagtcacccccacactgggtccctagtctgtggagtcaggactctcattgtgctgaaagccaaagggaaacctctgacgctgcccacatcctggcaaaaaaaa

SEQ ID NO: 19300 - DNA, 464 bp, Homo sapiens
ggtgagttgtctgtttgtcctataaggttcagaaaggtaaaagggcaaggtcattaattggctagagggcaacaaagaaggtagttatccctgtgtggtcaagaaaaagtggctcaggttatcttgctcgggagagaaaatgttcattcagctccagtccttttggtaaaagcccactctcagtgtatgagtgttcctttgcctaatcatgtagactataacatgttttcccctatatgactccatcgattaatcattgcagtattatccccacttcataaatgggcaaagaggaggatgaagccgagtagttcttccaaaatcaagtagcatgtaagatgtaggagcaaaactcaaatccagagacttctgcttccagccaagatggaataacagggactagatttacctccccacctaaaacaattttaaaaactggacatacatatgaaacaatggttttc

SEQ ID NO: 19301 - DNA, 287 bp, Homo sapiens
ggaaattctccaagagcaaaaataaacattccaaatggcagacactagtggatgactaattaaaagccatgagggcagttgccatgatctaaaataccagtccagacgcctgacattctctggtggatttacaggattatctttgctcttgagagattaataagaaatggaatgggattcacaaacgctaaggcatgccaggttttctgaggctccagccagctatataatatggcccattcttatgcatattttttaactgatgggcaaattacgtgaaggaaaat

SEQ ID NO: 19302 - DNA, 693 bp, Homo sapiens
gatttttttccagtattatctttagtacagaatcttttcctctctaagggcctgagaccctctcttaggaatagaagtacagttttcttccccactccttttgtccagaaggaaaacctggttttacatcagaaacttgaggtactttgaaaatttgccagctgccttgaaggagagagggcttgagtgtattttgggggaagaatgaggggacaacagggcagggagaagggacagagctagaggaaggacaggcctgtgccacccaggccagggtaaggggagcagagaccttttggttcctggtttgtgacacaggaagggagggaactggggaggacaggtcatgatcagtgtttcctgattaaaaattttttatttttatttttaattatcatgggcacagagtaggtgtatatatttgtggggtacatgagatgttttgatacagacatgcaatgtgaaaaagcacatcatggagactggggcacccatcccctcaagcatttatcctttgtgtcacaaacaatccgattatattgttttagttatttttaaatatgcaattaaattgttattgactatagtcacccttctgtgctgctgctctactgtggcctcaaagatcataaatgctgtgggtgctggcaagatactgaaataaattaattctgtatttctaaaaaaaaatca

SEQ ID NO: 19303 - DNA, 451 bp, Homo sapiens
gcctttaatgtttcccgtcccgctttgacaccaataatttcaacccaccctaacatatctgcagcgatgccagacgagatgcctattctctaaagtgtatggaaaatggacaccggtaagtcaatgtcacccaggatccgtacaactgcagtaagagggacggttaattcacagcttccagctcttggcgccagagtccgatgcactcctgcagataacggtcatttccattccgggagaacctcttcgaaaaacaacccggatgagactatctggcaaattgcagcccttggcgggcttttcaaatagagcgttgaccaatcaaagaagggggacgttacaggcactgaaagaataacccggccgcgcgcgatggctcacgcctgatatcccaacattttgggaggccgagatgggtggatcacgaagtcaggagttcgagactagcctg

SEQ ID NO: 19304 - DNA, 293 bp, Homo sapiens
acaatgagaatgaattttcctattccatcaagatttctatgtggccatctcttcaggacataggtatcagctactgttttaaatttaggaaatgcacacacatatgcaaccaaccacataatgtttccaaagcaatatattgagattgatacaaatacacatttttcaagaatcctggactaatcccacactactctgagccgcctttactttttaagcctctttatttctattatatgactgtgaactaagtagatttaacttttgtatgcttttaaaatcagttatatttt

SEQ ID NO: 19305 - DNA, 428 bp, Homo sapiens
tgatgattctttattcacctgattacttcttggagaattaagagaaaacaagtgaaggtagatggtgagtttatcaccagcagtagttggaactaattctagtacttaatcatgtcttaactaaggtcctacaaatgtagacagctattatgaatattgatattttattcataaatcaggccaggcacagtggctcatgcctgtaatcccagcacttttgggaattcagagctggacagattgcttgagcccaggagttcaagatcagcctgggcaacatgacaaaactctgtgcctgaggtcccagctacataggaggctgagaatcacctgagcccaggaggttgaggctgcagtgagccgtgattgtgccactgcactctagcctgactgaaagagtaagactttgtctcaaattttcatctctc

SEQ ID NO: 19306 - DNA, 489 bp, Homo sapiens
cccagctgtccagctcctgtaccacccagtggccatcagaagaaagtcctgctgcctgtgaactcccatctccctctccccaaccctacaggagatgttctggagacccacatgcgggggtgtcaaactcctatcccttaagcagcagatctgaggcccaaagtgcaccagagaagccacaaacagccccgtggccagccagcacctgcagtcactggtccacgttcctctcattcagacaaggccttttctgtattttgtttgaagctgttcaaaaaagagcatgtgaaaccacttttaaaatccctccctccctttcctgcccaacgcacctttttttccctcccctgactgttccatcgcttaaaaatggcttaaccaatttgggttatttttagaaaaatgctggtatgttggctgacaacctatattctaagtttcaacctgatatggaaaagacagagtttataaacccctaggagaaaaaaa

SEQ ID NO: 19307 - DNA, 427 bp, Homo sapiens
caggccagctaaatgtccgtaattatagaagggaagattggacaataaccagcagtcctatgtgggtttggagccttgataaatacattgcatatttttattcatggactctgatctctccttctctctctctctctcacacactccttgtccttcttacctgctttccttctgcatagaactaatctcttaaagctcctcaactcacttttgatcgttagaggttagaacctctaacgtttgatcgtttcttggttaaaaccaagaaataggaggacagaaagccaagcagtcctttccatatctttcttgagatctgggaaaacaaaaattgttctttttttttaactgagtctatgtgttaatttcactgaggtaatgggatggttctggaattctgagtctacagacccttgataaagttgag

SEQ ID NO: 19308 - DNA, 405 bp, Homo sapiens
ctttaagaactgttaacactcacggcaagggtccgcggcttcattcttcgtcagtgagaccaagaacccaccaattgtggacacactatctttgtcctcgggcaagccctcttatagtgacaagttcgaggtgctaactttcactcatggctatgcccttaagaagattcatccaggaatcattacacaaacacaccacaagagttttcatgcttcaaacatgaagggagttgtgagtggttaggaatgaactacatgcagtgaaagatcccagaagaaagggtcatttgaatgatgcaacctaaacctaaccctggctagagcctatcatagaacctcagaacactgttttcataagcacttattgacagctagatgatccaggatttgggaaagggtgacaaa

SEQ ID NO: 19309 - DNA, 614 bp, Homo sapiens
gcactccagcctgggagggagaacgagactccatctcaaaaaaaaaaaaaaaacaaccagttggaggtactaagctctgggactgggccagtgtgatggctccacacctgtaatctcaacactttgggaggctgaggtaggaggatcacaagtccagaagttcgagaccagcctgggggagcatagcaagaccctgtctctacacaaaatacaaaaattagcctcgtgtggtggcacacacctgtagccccagctacttggtagactgaggcaggaggatcccttgagcccaggagttcaaggctgcagtgagccaggatagtgcacacggcctgagcaagagcaagaccctgtttcagaaaaaacaactctgggactggagtgctttagacagatgggagaccaagaatcaagttttctggaggtgtttttcgttagattgtaacattagacattttattaaaaatgaaacaagtttgatgtgtgtgcgtatctgaatgtttttatctttgaggtaggataatggcagtgtgccttctgaatagcttctgtaaataacccttcttttctacagtggttaatacaaataactgcccataacactcattttaatc

SEQ ID NO: 19310 - DNA, 433 bp, Homo sapiens
aacaatctgatctctctctcttttccccacatttcccccttttctattcgacaaaaccgccattgtcatcatggcccgttctcgatggtcgctggatgttttattttccagagaaccaaaccttagcactgtgcacgccacacctgagggcggattatcccaggccagcccaagtcagggcagggctggaaactaggggcttgttgcccagcgaaccgccacaacagagagcggactcgatcctgcgctccggccgggctgacctgcctgcgtccagcccccgcgccctgggcctgcctgggtctggatctgtgtccgagtctgggtctggatctgggtccgagtctgggtctggccctgcgctcagggcccgcggaggagactatggaccccgccgggcgcgcccggggccaaggggccacggcaggggggc

SEQ ID NO: 19311 - DNA, 409 bp, Homo sapiens
tctggaaatacctgatggaggccagtggaaaagagtttgcaagttcatgtgcctgtggctccgacctattctaacttgatatgctagcccacttggccttcaagaatctgttaaaattttagctgctttctttttacccccttgtatgacagcatcctatttcagctatgctgtaacaaagatgaaactccttatgtgtcctgtctgtccttggaggtatatgtcacggtttggaattcagtttactaggttgccttatgatcacaaatctttgatggactccagaaaagtatgattttgtagatcagcagtcctctgagcctttttggcaccgaggaccagtttcacagaagacagttttttccaggagagctggagagggtttggggatgaaactgttccacaagga

SEQ ID NO: 19312 - DNA, 470 bp, Homo sapiens
ggagccagcggtgacagtgtgaaggtctgtgtggtcctgttcagccctgctcaagtttctgtgtatctctcttatcatttgccacccccctctattctgaggtccttcccctgcctggggtgcagtggctgggctgaaccctaggaagagtttttccagatgtcatctaccttcttcatgggataagtgaggagggggaaggaaagcaggtattcccagtggcaggcaatgccttggctctgcgttttcctctctcctgcagaggtgctgatggttggaaaagcttcccagcggcctgcaaggcctgcacgtaggcagtctccagtgctcattagaacagcctcactcagttcatctcattcgatccctaaaactgtgggatggaaggaggacaaagaaaactgagtcctcttgtctccattcttggtccactccattccatcctcaacactatcctcatagtgatttaa

SEQ ID NO: 19313 - DNA, 299 bp, Homo sapiens
ggttatatggtaactttgtttaacttttgtttgtgttgttttgttttgtttttgagacggactccctctgttgcccaggctgacgttcagtggaggttgcagtgagccgagattgtgccactgcgctccagcctgggcaacagagtgaaactctgtttcgaaagaaagaaaagaaatgactaggacagcaggagtaaaaccccaaggcattaggtctccgtagctaaggtggatcccactcatgcaattcatcaacctttgtctgaaaaaaaagaaagaaaatctgattttgttaagct

SEQ ID NO: 19314 - DNA, 358 bp, Homo sapiens
tctttaatggttggaagcaaaggcatcaaattagtcagaaaaggaaggaagggaatgggcagattaggagagaatggctaaagtcactatcttatctccaaaggcagctgtccttgttcctcactatgtctcatttaaccagtctgaagttcaaatccattcttcttgtacagtagtccccccttatccatgggggataagttcgaagacccctgtggatgcctgaaacctcagatattaccaaatcctttatgttctatgtttttttgatctagatggctactaagttactaacaggcatgtagtgtagacagtgtggatatgctggacaaagggatgattcaagtcctggatggac

SEQ ID NO: 19315 - DNA, 256 bp, Homo sapiens
agtgtgttcttaaagtacatactgccaagaactctctctgttgcttctcctggcactttcctaagaagtgtattccaaaaaatagttccacaggtgtctcatagaaaagggttcaatgtccaagttttgggaaatgctaggttaagacataactcgttcatatcaaacttcttatgatgtttgttatacatccccaggaggaaaggacatggtacacatattcattggcccacagaccctttgctttatatccttt

SEQ ID NO: 19316 - DNA, 448 bp, Homo sapiens
tacaactgcctaatggaaattcccacctggatattccattggctccccaaactcagcaatgtccaaatctgcttttcctttcatagcgcccaactcatttattgatgctatgctgctaatcaagtaaactaaaatctgaagtcatcttgcctctcccttcccactccttgccaccagctcccacctacccctctgctgcttaaatgtgcccatgccccaccactactactgttttacattacacattcctttccctcccaacaggtgcttgtcccgcctgcaacccatttcttacaatgctaatgagtcatttatcagagcagtaatgagttcaggcgagtgatatatcagagcattaatgagttcaggtgacttactaaaaaacagtggttccccactgcctagccaggaagagctagtacagcattcaagacttttcatgatccaa

SEQ ID NO: 19317 - DNA, 91 bp, Homo sapiens
caattgcgggaatatgaagcctttggtcaatatttacttcgcttcctggccaacacatctccctaagaacaacacatgagatttgtggagc

SEQ ID NO: 19318 - DNA, 1604 bp, Homo sapiens
gtagctgggactacaggcgcccgccactacgcctggctaattttttgtatttttaatagagacggggtttcaccgttttagccgggatggtctcgatctcctgacctcgtgatccgcccgcctcggcctcccaaagtgctgggattacaggcgtgagccactgcgcccggcccccaatttcttaatatccttgccaactgttgttattttctgatttttgtttgttaagtaatagctatcctagtaggtgtggggtagtatctcattgtggttcaaatctttttttaactttaaaattctttcaatgcaaagactatatcaaatagacatttaaataattttttgaccgagattttgtttatggttcctctctttctccttttctccaaatataagtagcggccaatttagtcatgggaaagataacaactaatttctttattctgtaatttattgtaaatatatcaggttcaatttgtgtaaatactttgtattttccttagtcctatatgtgttaatcttataatggaatgaacttattcatatatttatttgaaaactaatgtgcaaagtattgtcttaagtgcagagggtacgataatagtaaacaagaaaaacgaagactgctgttacgtgaagtgttctagttggggagacacattaaacagatacaatttcaggtggtaataaggtgatgaagaaaaataaaaataaagcagaggagaggtggtttgtgcaggtgctactgtaggtaagctagttttggagagcttccctgaggagctaagatttgaccagagactcaatgatatgaagatggaaactatttgaagatctgggaagaaacattccagatagagcatacacttagtagaaaggcctttatcaaggaataaatttgtggttttcaaggaacagtaaaatgtatatttataaaccatagggaaaccacctaaaatttttttagagaaaaatatataattaggtagcaaataacagagataaaattgagtaatttaagaaattatttaatcaggaaaaagaaaaaaggaacagcaagtaagtggatcagatagaaaatttggaagattatagattttattccaaccatatcaataattatattaaatgtattttaaatataccaattataagattggataaaaagttaaaacatatctgtaagaaatttgctttaaatacaaagatcttgttaggttaaaagtaaaagaatgcgccagcaatgaataactagagaaggaaattaagaaaaaaagtccattcacagtagcttccaaaagaataaaatgcataagaataaatttaaccaagaaggtaaagacttgtactctgaaaacttgtactctgaaaaaaaggatgtttactcatttgtcaaaataaagaagatataaataagtgaaaatctatctcgtatttgtatattggaagtcttaatgttaagatgtcagtactacccaaaatcacctacagattcaatcctatcaaacctatcaaaattcccatggacttttgcagaaatgcaaaagctgatcttaaaattcacatggaattgcaagtggccttgaatagccaaacaatcttga

SEQ ID NO: 19319 - DNA, 325 bp, Homo sapiens
ggtggctcttacctgtaatcccagctctttgggaggctgaggtgggaggattacttgaggccaggagttcaagaccagcctgggctacatagcaggatccaatctctaattaaattttaatataaaacattattttaaaaaaggaaaacaattctcccccccaaaaaaatctctgggcccatatgatttcactggagaattctgtctatcaaatgttgacgaatgagttaacaccaattctacacaatctcttccagaaaatggaagaggagaacgcacttcctgatcaattttataaagctcgtattacctagataccaaacct

SEQ ID NO: 19320 - DNA, 428 bp, Homo sapiens
tggggacctagctggcttcatttagctttacctcttaaatggtataacataaacatcttgtcaggggaatgggttgtgattcaccaagagttgccatatacattgtatttcaaatgctaagtttcagaacaacaaatacaacaaaatctgaataagcattgatctgcctttgaaaatactttgtgatttatacaacgccttgaggttagctttccaaatattgattcttgatggatagaaaaagaccagaagatggaaagttaaattgacttgagtctttctaaaccttttgacacaccctagaagttgctcttttgaataaataaatcccagataggaatgtatttctcatctagctttttctcttgatgtcaagtgtcagagaaataattctagcttttagaggttggtggttgtttagaaactgg

SEQ ID NO: 19321 - DNA, 563 bp, Homo sapiens
ctttatgtctgatcgcttattatccagtttctcttactggctctgagatataggtatatgccctctaggagtctaactgtgacactcttctctttctgtgatttctcctattacatgaagcagtttaaagtatagccacccctgttaaaggaagaacagataggttcaataaacacacacacatattctctagatgagatcacttaacattatttttcctcatttctttactccaagcctactttttgttatcctttctcccaaatgaaatttagactcagaggaactgatgttaagctggcagttccttggtagtactccttgcaaatgatggtcttccactcccttgttctgattccaccaagaatctcagaagagttaggacaagtatattgtaaatggtcataatcctaagatttagtaatttatcttttcactcattcttaatttagatggtatctaataaaagctaacacttcttgggcacttactgtgtgctaaataagtcaatacacatgaaggatgtagctgttctgagcccttcacatgtatttattcatctc

SEQ ID NO: 19322 - DNA, 704 bp, Homo sapiens
agaaaaagagcaagaaacttgaaagtagggaagagaaaaaagaaaaggagcaagagggaatagccagctctcaaaagagtctccaataggaaagcaaaatctgtatctagccagtaccaacatgtgaagaaagagtgagcatagcaaaattgagaaaggttgcttgaaaaccaaacaaaaaaccaaatacctgtaatcctagcactttgggagggtgaggtgggtggattgcctgcactcaggagttcaagaccagctgggcaacatggtgaaaccttgtctctactaaaatccaaaaaaaaaaaaaaaaattagccaggcatgggctgggctgggctgttttccaggctggtctcaaattcctgggcttaagtgatcctcccacttcagcctcacagtgttgggattacagtcacgagccactgtacccaaccatatgtcattctttagacacactgcttactaaatttctctttttaaaggatatactgaatttccggttgagccaacttaacagctaattttctattttagctttaaaacattgataagcaacatgaagcaatctagaacttaacctttaagtggctttattaaagcaatccagctatgaaaattatgcagaaatgattatctacaatcttaccagcacataagaaattcttcctctattctgaaataccatcttctcacaatatactttg

SEQ ID NO: 19323 - DNA, 394 bp, Homo sapiens
ggaggggttgctcccgagtccgtggcaggaaccagaggctggtctcaaattcctgggcttaagtgatcctcccacttcagcctcacagtgttgggattacagtcacgagccactgtacccaaccatatgtcattctttagacacactgcttactaaatttctctttttaaaggatatactgaatttccggttgagccaacttaacagctaattttctattttagctttaaaacattgataagcaacatgaagcaatctagaacttaacctttaagtggctttattaaagcaatccagctatgaaaattatgcagaaatgattatctacaatcttaccagcacataagaaattcttcctctattctgaaataccatcttctcacaatatactttg

SEQ ID NO: 19324 - DNA, 398 bp, Homo sapiens
tcacccagtctgctggcccctttggctcctaagaatctgggctctgctacccacctccggagacacaagcccacgtatctactttcacttgctcatccttgctctacctcaacgtggggccctgacaccacgttatcaaacatgcagcccccacacccctcgtctgcccgcccccagatcttccctctgtgctccctgccaccccagcagctgttgatttcagaacccttgccttcgccctgctggccctctcctccctgcccttcttcctgcccttcctctgaaaagaggcatttcgggaaggcttgctttttctccatgtctcccagtttgtatagttaaattgtccagttgtatagttaaatatttgatcttattaaaaacatttgtctgcaaaa

SEQ ID NO: 19325 - DNA, 371 bp, Homo sapiens
caccccccaccccaggctgcccaccccctccagagaccagccagcccaccgccaacctctacccaaggttaatgctgggggtgggcaggcaggtgggcagggaaggagctgaagatgagaaggcagaagtgggaagagggtgacagctccagggtgcctgctcaagctccaggcctgggctgggccctccagccaggtggggcctggatgcctgggtctggggagggcagtgtagctcagagggtccagggcttggggggcctctcagacagtctgggtttcactctccagggaagacagaagcctctgtgtgtgcaagcgctgacctcatcggcaaccgagtcaccccacccctcctggtccttttaaga

SEQ ID NO: 19326 - DNA, 387 bp, Homo sapiens
aacatgatagagattttattggaagaaactaaagataaaccaacagttatcacactagtttcactgctatgctctttcaaaatatatctggcatgattattatttttattatatatgaaggaaaaggaaatcaacataacatgtatgttatataattatttttgaggacttgatttgtaaatctcagtaaataaccaagaatggaacctattacttaatctgtatgaaatgttttatctacttacccctctcttaacccaagacagcttttcaatcaagctgcttgaggaccatttattatgaaattttgcatgcttatcacctaatactactggcttggcactagtaggcactcaataaatatttgtttaatccattaacctttat

SEQ ID NO: 19327 - DNA, 480 bp, Homo sapiens
gcagccctcagttcccctcatggctctctctttcacttccctccatgacaccacctcatcgagttgaagatgttattgatgagtgcagtgggtgtatagtgtcctcccaaaattcatgtccacccagaaattcagaatgcaaccttatctggaaatagaatctttgcaaatgtgattagttaagatgaaatcatactgagttaggatgaacctgaaatccaatcactggtgtccttgtaagaggaaaggtcacaaagagacagaggagatacacagaggagcccatgtaatgatgggtacggagactgacgtggcacaactataagccaaggaatgccagggaaggccagctagcagaagctagggaaaaacacagagggattctcccctggagcctttggagggagtgtggccctgctgacaccttggttctggacttctggcccccagaactgtgagaaaataaatttcttttgcttg

SEQ ID NO: 19328 - DNA, 1636 bp, Homo sapiens
aatattgaaaaaaattttacttcaaatgcataaaatgatgcttctgattcagctggtgcgacatttatttcacatttgagttcagctgctcctgatgtctctttcctgaaaatttcaatactaagagctcgagaaaccctgtatttggggaagcttatccttcaccatcaactttgggggtaggggtcagagggaacaagggtggaaaggccgcgctgaatggggccgaagctccgcccctcagcgataagtccagattcctgcggccgacgtggtcctccgagggagcagcagagccgccgaggctggcgagtcccaggggaaggatgttctagccggagtctactcgatggtagggcaggaagccgccttgtctctgggcgcggccatgttggaggctccgggcccgagtgatggctgcgagctcagcaaccccagcgccagcagagtcagctgtgccgggcagatgctggaagtgcagccaggattgtatttcggtggggccgcggccgtcgcggagccagatcacctgagggaagcgggcatcacggccgtgctaacagtggactcggaggagcccagcttcaaggcggggcctggggtcgaggatctatggcgcctcttcgtgccagcgctggacaaacccgagacggacctactcagccatctggaccggtgcgtggccttcatcggtcaggcccgcgctgagggccgtgcggtgttggtgcactgtcatgcaggagtcagtcgaagtgtggccataataactgcttttctcatgaagactgaccaacttccctttgaaaaagcctatgaaaagctccagattctcaaaccagaggctaagatgaatgaggggtttgagtggcaactgaaattataccaggcaatgggatacgaagtggatacctctagtgcaatttataagcaatatcgtttacaaaaggttacagagaagtatccagaattgcagaatttacctcaagaactctttgctgttgacccaactaccgtttcacaaggattgaaagatgaggttctctacaagtgtagaaagtgcaggcgatcattatttcgaagttctagtattctggatcaccgtgaaggaagtggacctatagcctttgcccacaagagaatgacaccatcttccatgcttaccacagggaggcaagctcaatgtacatcttatttcattgaacctgtacagtggatggaatctgctttgttgggagtgatggatggacagcttctttgcccaaaatgcagtgccaagttgggttccttcaactggtatggtgaacagtgctcttgtggtaggtggataacacctgcttttcaaatacataagaatagagtggatgaaatgaaaatattgcctgttttgggatcacaaacaggaaaaatatgaacatgatattttatagcttgggaagaaacttgcagatgatatgtgctgcctttgcttcttatcattcatggcagattgtttgtgctttcaacatttcatttgaaatgggagaagataaaatcacttgatgtaacctggaaactatgctttacatggcaatcaaagccttttgatcatgtacattttatttgatattaaaatcttttataaccagaaaaaaaaaat

SEQ ID NO: 19329 - DNA, 649 bp, Homo sapiens
gacaaatgcaaattctcaactcttgtgttccaacacgtttccaggatgaagataggtcttacagtgtaaaaggcagcgatcattatttcgaagttctagtattctggatcaccgtgaaggaagtggacctatagcctttgcccacaagagaatgacaccatcttccatgcttaccacagggaggcaagctcaatgtacatcttatttcattgaacctgtacagtggatggaatctgctttgttgggagtgatggatggacagcttctttgcccaaaatgcagtgccaagttgggttccttcaactggtatggtgaacagtgctcttgtggtaggtggataacacctgcttttcaaatacataagaatagagtggatgaaatgaaaatattgcctgttttgggatcacaaacaggaaaaatatgaacatgatattttatagcttgggaagaaacttgcagatgatatgtgctgcctttgcttcttatcattcatggcagattgtttgtgctttcaacatttcatttgaaatgggagaagataaaatcacttgatgtaacctggaaactatgctttacatggcaatcaaagccttttgatcatgtacattttatttgatattaaaatcttttataaccagaaaaaaaaaat

SEQ ID NO: 19330 - DNA, 1149 bp, Homo sapiens
aatattgaaaaaaattttacttcaaatgcataaaatgatgcttctgattcagctggtgcgacatttatttcacatttgagttcagctgctcctgatgtctctttcctgaaaatttcaatactaagagctcgagaaaccctgtatttggggaagcttatccttcaccatcaactttgggggtaggggtcagagggaacaagggtggaaaggccgcgctgaatggggccgaagctccgcccctcagcgataagtccagattcctgcggccgacgtggtcctccgagggagcagcagagccgccgaggctggcgagtcccaggggaaggatgttctagccggagtctactcgatggtagggcaggaagccgccttgtctctgggcgcggccatgttggaggctccgggcccgagtgatggctgcgagctcagcaaccccagcgccagcagagtcagctgtgccgggcagatgctggaagtgcagccaggattgtatttcggtggggccgcggccgtcgcggagccagatcacctgagggaagcgggcatcacggccgtgctaacagtggactcggaggagcccagcttcaaggcggggcctggggtcgaggatctatggcgcctcttcgtgccagcgctggacaaacccgagacggacctactcagccatctggaccggtgcgtggccttcatcggtcaggcccgcgctgagggccgtgcggtgttggtgcactgtcatgcaggagtcagtcgaagtgtggccataataactgcttttctcatgaagactgaccaacttccttcaactggtatggtgaacagtgctcttgtggtaggtggataacacctgcttttcaaatacataagaatagagtggatgaaatgaaaatattgcctgttttgggatcacaaacaggaaaaatatgaacatgatattttatagcttgggaagaaacttgcagatgatatgtgctgcctttgcttcttatcattcatggcagattgtttgtgctttcaacatttcatttgaaatgggagaagataaaatcacttgatgtaacctggaaactatgctttacatggcaatcaaagccttttgatcatgtacattttatttgatattaaaatcttttataaccagaaaaaaaaaat

SEQ ID NO: 19331 - DNA, 631 bp, Homo sapiens
ggatatttacataataaaatttgttagtttttttatttatggcttctgaatttcttttttttgagacggagtcttgctctgttgcccaggctggagtgcagtggtgtgatcttggctcactgcaacctccgccttctgggttcaaatattctcctgcttcagcctcccaggtagctgtgattacaggcatccgccaccatgcccaactaatttttgtgtttttagtagagacggggtttcaccatgttgaccaggctggtctcaaactcctgacctcaggtgatctgcccgccttggcctcccaaagtgctgggaattacaggtatgagccaccacactcagcctgcttctgagttttatgtctagttttctatagctcaagattaaaaataaaaactcttaccttataccatgcataaatcaaagagctaaacataaaaattaatgctataactaactacattagaagaaaatgcagttgccttattaggcttttttgatttacctattttcctggaatatcagtttgtctttaaatagctaagaatctgacttatatgctgtcgggctagtcggggctgtcgggctagtcggggctgtcgggctagtcggggctgtcgggctagtcggg

SEQ ID NO: 19332 - DNA, 1825 bp, Homo sapiens
aatattgaaaaaaattttacttcaaatgcataaaatgatgcttctgattcagctggtgcgacatttatttcacatttgagttcagctgctcctgatgtctctttcctgaaaatttcaatactaagagctcgagaaaccctgtatttggggaagcttatccttcaccatcaactttgggggtaggggtcagagggaacaagggtggaaaggccgcgctgaatggggccgaagctccgcccctcagcgataagtccagattcctgcggccgacgtggtcctccgagggagcagcagagccgccgaggctggcgagtcccaggggaaggatgttctagccggagtctactcgatggtagggcaggaagccgccttgtctctgggcgcggccatgttggaggctccgggcccgagtgatggctgcgagctcagcaaccccagcgccagcagagtcagctgtgccgggcagatgctggaagtgcagccaggattgtatttcggtggggccgcggccgtcgcggagccagatcacctgagggaagcgggcatcacggccgtgctaacagtggactcggaggagcccagcttcaaggcggggcctggggtcgaggatctatggcgcctcttcgtgccagcgctggacaaacccgagacggacctactcagccatctggaccgggtcttgctctgtcacccaggctacagtgtagtagcgtaattacggctcactgcagtctcaacctcccaggctcaagtgaacctcctgcctcggcctccagagtagctgggactacagaccccaccacatccggctaattttttgtagaggtggggtctcactttgttgcccaggctggtctccaactcttggactcaaccaatcctctcacctcgcctcccaaagtgctgggatttcaggcgtagtcatgcaggagtcagtcgaagtgtggccataataactgcttttctcatgaagactgaccaacttccctttgaaaaagcctatgaaaagctccagattctcaaaccagaggctaagatgaatgaggggtttgagtggcaactgaaattataccaggcaatgggatacgaagtggatacctctagtgcaatttataagcaatatcgtttacaaaaggttacagagaagtatccagaattgcagaatttacctcaagaactctttgctgttgacccaactaccgtttcacaaggattgaaagatgaggttctctacaagtgtagaaagtgcaggcgatcattatttcgaagttctagtattctggatcaccgtgaaggaagtggacctatagcctttgcccacaagagaatgacaccatcttccatgcttaccacagggaggcaagctcaatgtacatcttatttcattgaacctgtacagtggatggaatctgctttgttgggagtgatggatggacagcttctttgcccaaaatgcagtgccaagttgggttccttcaactggtatggtgaacagtgctcttgtggtaggtggataacacctgcttttcaaatacataagaatagagtggatgaaatgaaaatattgcctgttttgggatcacaaacaggaaaaatatgaacatgatattttatagcttgggaagaaacttgcagatgatatgtgctgcctttgcttcttatcattcatggcagattgtttgtgctttcaacatttcatttgaaatgggagaagataaaatcacttgatgtaacctggaaactatgctttacatggcaatcaaagccttttgatcatgtacattttatttgatattaaaatcttttataaccagaaaaaaaaaat

SEQ ID NO: 19333 - DNA, 2638 bp, Homo sapiens
aatattgaaaaaaattttacttcaaatgcataaaatgatgcttctgattcagctggtgcgacatttatttcacatttgagttcagctgctcctgatgtctctttcctgaaaatttcaatactaagagctcgagaaaccctgtatttggggaagcttatccttcaccatcaactttgggggtaggggtcagagggaacaagggtggaaaggccgcgctgaatggggccgaagctccgcccctcagcgataagtccagattcctgcggccgacgtggtcctccgagggagcagcagagccgccgaggctggcgagtcccaggggaaggatgttctagccggagtctactcgatggtagggcaggaagccgccttgtctctgggcgcggccatgttggaggctccgggcccgagtgatggctgcgagctcagcaaccccagcgccagcagagtcagctgtgccgggcagatgctggaagtgcagccaggattgtatttcggtggggccgcggccgtcgcggagccagatcacctgagggaagcgggcatcacggccgtgctaacagtggactcggaggagcccagcttcaaggcggggcctggggtcgaggatctatggcgcctcttcgtgccagcgctggacaaacccgagacggacctactcagccatctggaccggtgcgtggccttcatcggtcaggcccgcgctgagggccgtgcggtgttggtgcactgtcatgcaggagtcagtcgaagtgtggccataataactgcttttctcatgaagactgaccaacttccctttgaaaaagcctatgaaaagctccagattctcaaaccagaggctaagatgaatgaggggtttgagtggcaactgaaattataccaggcaatgggatacgaagtggatacctctagtgcaatttataagcaatatcgtttacaaaaggttacagagaagtatccagaattgcagaatttacctcaagaactctttgctgttgacccaactaccgtttcacaaggattgaaagatgaggttctctacaagtgtagaaagtgcaggcgatcattatttcgaagttctagtattctggatcaccgtgaaggaagtggacctatagcctttgcccacaagagaatgacaccatcttccatgcttaccacagggaggcaagctcaatgtacatcttatttcattgaacctgtacagtggatggaatctgctttgttgggagtgatggatggacaggtgagaacacattttattttctacaattttattttatgatctatattttattccttcttgcattttaagctctattttaactagtgttttgctccatttcttaatttctttatttctgaagattatatctttctagtgtagataagactatcaaaaataaaatatttttcaaaaaccagctgatccaacatagtgaactacttctggttgagagccctggtctaagttaataaatttcctttaaggctatttatatttttttcaaatataagactaacatttatttttaaactaattagaatatattggctgggcactcttgcctcattagctcatgcccaaagtgctgggaattacaggtatgagccaccacactcagcctgcttctgagttttatgtctagttttctatagctcaagattaaaaataaaaactcttaccttataccatgcataaatcaaagagctaaacataaaaattaatgctataactaactacattagaagaaaatgcagttgccttattaggcttttttgatttacctattttcctggaatatcagtttgtctttaaatagctaagaatctgacttatatgctgtcaatacacacagttagtaatacagcatgaaaatcctaacatgcttttctatactttagccgtgatcattttcatttgaagtcctaaattacaaactgatttaaaagctatatatatatatatatatatatatatatgccacatccatgaaaccttccttaatcaaatctcaagcttcacttttctcccttcaagctccctgaatacaacattcttcctatgagataattgtagtctactatctattacagtaaatttccaatgcattttatctcactgattagattataaactcaacgtggggatcgtgtcttgtttttatatccaagcttgattgccaaagataatgatttgttttgtataaaagtgaatgaataaagtaacacatttgctttatttcagcttctttgcccaaaatgcagtgccaagttgggttccttcaactggtatggtgaacagtgctcttgtggtaggtggataacacctgcttttcaaatacataagaatagagtggatgaaatgaaaatattgcctgttttgggatcacaaacaggaaaaatatgaacatgatattttatagcttgggaagaaacttgcagatgatatgtgctgcctttgcttcttatcattcatggcagattgtttgtgctttcaacatttcatttgaaatgggagaagataaaatcacttgatgtaacctggaaactatgctttacatggcaatcaaagccttttgatcatgtacattttatttgatattaaaatcttttataaccagaaaaaaaaaat

SEQ ID NO: 19334 - DNA, 1708 bp, Homo sapiens
aatattgaaaaaaattttacttcaaatgcataaaatgatgcttctgattcagctggtgcgacatttatttcacatttgagttcagctgctcctgatgtctctttcctgaaaatttcaatactaagagctcgagaaaccctgtatttggggaagcttatccttcaccatcaactttgggggtaggggtcagagggaacaagggtggaaaggccgcgctgaatggggccgaagctccgcccctcagcgataagtccagattcctgcggccgacgtggtcctccgagggagcagcagagccgccgaggctggcgagtcccaggggaaggatgttctagccggagtctactcgatggtagggcaggaagccgccttgtctctgggcgcggccatgttggaggctccgggcccgagtgatggctgcgagctcagcaaccccagcgccagcagagtcagctgtgccgggcagatgctggaagtgcagccaggattgtatttcggtggggccgcggccgtcgcggagccagatcacctgagggaagcgggcatcacggccgtgctaacagtggactcggaggagcccagcttcaaggcggggcctggggtcgaggatctatggcgcctcttcgtgccagcgctggacaaacccgagacggacctactcagccatctggaccggtgcgtggccttcatcggtcaggcccgcgctgagggccgtgcggtgttggtgcactgtcatgcaggagtcagtcgaagtgtggccataataactgcttttctcatgaagactgaccaacttccctttgaaaaagcctatgaaaagctccagattctcaaaccagaggctaagatgaatgaggggtttgagtggcaactgaaattataccaggcaatgggatacgaagtggatacctctagtgcaatttataagcaatatcgtttacaaaaggttacagagaagtatccagaattgcagaatttacctcaagaactctttgctgttgacccaactaccgtttcacaaggattgaaagatgaggttctctacaagtgtagaaagtgcaggcgatcattatttcgaagttctagtattctggatcaccgtgaaggaagtggacctatagcctttgcccacaagagaatgacaccatcttccatgcttaccacagggaggcaagctcaatgtacatcttatttcattgaacctgtacagtggatggaatctgctttgttgggagtgatggatggacaggtgagaacacattttattttctacaattttattttatgatctatattttattccttcttgcattttaagctctattttaactagtgttttgctccatttcttaatttctttatttctgaagattatatctttctagtgtagataagactatcaaaaataaaatatttttcaaaaaccagctgatccaacatagtgaactacttctggttgagagccctggtctaagttaataaatttcctttaaggctatttatatttttttcaaatataagactaacatttatttttaaactaattagaatatattggctgggcactcttgcctcattagctcatgcctgtaatctgagcactttgggaggctgaggcgggaggatcacttgagcccagggtttcgagaccagcttgggcaatatagtgagacctcatctctataaaagaaagtaaaaaatttttaat

SEQ ID NO: 19335 - DNA, 1352 bp, Homo sapiens
ggatatttacataataaaatttgttagtttttttatttatggcttctgaatttcttttttttgagacggagtcttgctctgttgcccaggctggagtgcagtggtgtgatcttggctcactgcaacctccgccttctgggttcaaatattctcctgcttcagcctcccaggtagctgtgattacaggcatccgccaccatgcccaactaatttttgtgtttttagtagagacggggtttcaccatgttgaccaggctggtctcaaactcctgacctcaggtgatctgcccgccttggcctcccaaagtgctgggaattacaggtatgagccaccacactcagcctgcttctgagttttatgtctagttttctatagctcaagattaaaaataaaaactcttaccttataccatgcataaatcaaagagctaaacataaaaattaatgctataactaactacattagaagaaaatgcagttgccttattaggcttttttgatttacctattttcctggaatatcagtttgtctttaaatagctaagaatctgacttatatgctgtcaatacacacagttagtaatacagcatgaaaatcctaacatgcttttctatactttagccgtgatcattttcatttgaagtcctaaattacaaactgatttaaaagctatatatatatatatatatatatatatatgccacatccatgaaaccttccttaatcaaatctcaagcttcacttttctcccttcaagctccctgaatacaacattcttcctatgagataattgtagtctactatctattacagtaaatttccaatgcattttatctcactgattagattataaactcaacgtggggatcgtgtcttgtttttatatccaagcttgattgccaaagataatgatttgttttgtataaaagtgaatgaataaagtaacacatttgctttatttcagcttctttgcccaaaatgcagtgccaagttgggttccttcaactggtatggtgaacagtgctcttgtggtaggtggataacacctgcttttcaaatacataagaatagagtggatgaaatgaaaatattgcctgttttgggatcacaaacaggaaaaatatgaacatgatattttatagcttgggaagaaacttgcagatgatatgtgctgcctttgcttcttatcattcatggcagattgtttgtgctttcaacatttcatttgaaatgggagaagataaaatcacttgatgtaacctggaaactatgctttacatggcaatcaaagccttttgatcatgtacattttatttgatattaaaatcttttataaccagaaaaaaaaaat

SEQ ID NO: 19336 - DNA, 317 bp, Homo sapiens
gatcacctgagggaagcgggcatcacggccgtgctaacagtggactcggaggagcccagcttcaaggcggggcctggggtcgaggatctatggcgcctcttcgtgccagcgctggacaaacccgagacggacctactcagccatctggaccggtgcgtggccttcatcggtcaggcccgcgctgagggccgtgcggtgttggtgcactggtgagtggccgggtcagtgggtgacgtgccccgccaagcttccagccggcccccgtcgccccttaccttccgaggccgtcgggaggacaagagcgcggtcatgccgcg

SEQ ID NO: 19337 - DNA, 493 bp, Homo sapiens
agcttttgtataaaattgggtgagcttattaaggtgaactcactttctgattcatgtatagtgcaatattctggcagtacctggttgaagtgaaaagacctaaagtcctgtctcctttaatacaaaattcattttaaaaatgtcccagtagagggctgagcacagagggctaaggttttaacaaaggcttgtttaattgaaatgaggacataaactccaagaggtagcggaggagagaagttagggaatctgctgaccccctcctctcagttcttggctgctgcccgagttcatctttcttcagttcgtccagccctgcaacaaaagagcgcttcagttcagcagagcagcgtagagcttgcacgcatgctgagcaggagggctgtcgagagaaaccgtgtagtaaatacagaacgctcattgaaatgccaagtgtcactactttggcatttaattatctgacttgctggcagctggaagtagggaagcaagc

SEQ ID NO: 19338 - DNA, 431 bp, Homo sapiens
tgtccctgacctcctcacggttcactcagctttacacaaagctcaaaccccaccgagagaggcctcacatcatgccattacactcaaaactgaaagaggctacctcaggacagctgcctctgcccttctgagtaaactgtagggacatcactattcagaaatgcaaagcattcttcccctgaaagtcagatccgtgccaagctgtcattctggaagcttgcacaggttaggggacttggcattcaaagctcaaatgaacttggcttcaaagtcacccaatttctgagaagacaaacatgaactctacatcctggatgggtctgcagagtccaaaatgaaggccgtcaaccacaagccaattcattcagtagtgtagttaggtccaggattagccaaattgtcagcaatgattcagtaaaagtcatgataag

SEQ ID NO: 19339 - DNA, 471 bp, Homo sapiens
cgaatcacccacaaggaaggaaatgaaaaggttacaccaagaattgtcgatattataaatccctgtagtctcgcagcctctctaaatgttttgatagcagaatttgatggattgtaaatcagagcaggcttatcttaaacatttgatagtgccttatttatttatgtatgtgacacataaaaccagaattgattgtttcttctttctgtcttagcaagatttttttttctgctttcagaaacacatcactcttctctaagccctggttttccgtgtttgtgggcgtgtaggtgtgtgtgcttgtacatggtggcagctgttacgattctttccacacggagaaagaatactttgcctgggagaagattataacatcaggaattaacagaaaaaataagaaagccgctatgcttcaaaatatgtcttaatcttattgctttaaaaaaaaataaaacaagattattgctcaga

SEQ ID NO: 19340 - DNA, 472 bp, Homo sapiens
gaaataaagtgcctaataaatgcaaatgtgcttacatcttttggcccagctcctacctcccggcagcctctccaggcccagaactttctccagtcagcctctacagaccaagctcatgactcacaatggcctatttaggcccataccctacgtcacggcagcctccgcagatgaggctactgcctcacaacagcctccacaggcacagctccatcgttacaatggcctctttagacccagctcctgcctcccagccttctctccaggccctgaacattctcagtaagttcaggtagctgggactgtaggtatacatgatgatacttggctaatttttaaattgttttgtagacacggggtctcactttgttggccaggctggtgtcaaactaatggcctcaagtgacccttccacccctgcctcccatcctcgaggcatgtgccaccacaaggagcacttgttcaattttct

SEQ ID NO: 19341 - DNA, 186 bp, Homo sapiens
aacaacatgggacagttaagcttttcttgctttagtttcttgacgtggtttaaagcagaagattgaagcatacaaatgaatgtaccaaattttcctcatcctgtttttaattgtaagaatttttcattcactattaaacttggtgtaaagatttcaccttcatttttatcaactgaacacacagta

SEQ ID NO: 19342 - DNA, 326 bp, Homo sapiens
gggacatagttaatgtgaagatcacagaagcaccatctttggtgttttctaaccattgggtcttcacattatggataatgatcaaacactccagcctcttgttgtatcagagcctagacagaaggaactcaaagtctgagacctcctgctcttgcttatctttttccctacttaggcataggactgcaatactcttctttgatgtgggaagggataaacagatgcttggagaccaatgcaatccttcgtaaatgtctatgatgctataaactggcgacaggatccaaacctttgttgtttttatggtagtggagggagatgtgttt

SEQ ID NO: 19343 - DNA, 415 bp, Homo sapiens
gtcatatatatatatatatatatatatatatatgccagagatgaacaagcattagaaaattaaatgcacacaggtcatgtcagtgctatgtataatgtggtatactaagtatagatgttcaacagtgtgggatctaggctggaacaagactcctagtcttaagcaattctttctaggttcagtctctggaaataatgccttggatcaaatgtgtgagaaaatcaatgggttttaaagactattctatgtcaactataacatttaatttggggatttctgtcccttataatgtctacctcattttggatggaatccttgaggcctggtttatttttcttttcctttctacacatcgctgctcagagtgatgaatggagttgtgttttgaataaaatatctatgcatccttttgtga

SEQ ID NO: 19344 - DNA, 2134 bp, Homo sapiens
atcaagtaattctcaactttttagtctttctcctctcttcaaatcatgtgactttttaaatggaagtttttcattgattaaaatattttagcacctaaaagctagccttaaaaacagctgtaaaagaaaaacatcaggaaattagatatgactagcccagttaattaaaagacgggctcaaaccttgttttattctttttcatcttggatgaagattgaagggaaaataactcaagtgcataatatttattttcaatttttaatgagactttatcctcatcacaacattaatactgtacatagtatgccaaaatatccattaatttgtctagaatagtacaagactttttaaagcaattgtcctcacagagaccacatgtaatatactgaaatatgttcatttttaatggctttgttaacatcaaagaaatgctgcctaaatttgatttcagatgaggaaggagaaagtaaagtgtgcatagtaaggctgtaggtgaagagttgtgagataaatagttcactcagttgtacaaagcacaactagaactttttgttgggaggcttacatacatcttgaatattcttaatgtaataatgttgactattaagttggctacacagtcactgtatgtactaggaactggtttccttgacattctagaatcaatggctaggagaggcattaatctttgaggggctgaacatatcatgaagctgagtcagtatggaaaattttcaaataaacagggtgctgaagttccatctgtctcatctgcttatgataagttcttattgattagtgaatgtagcttaagcctttgtatgtgtcctcagggggcagaccgactttaagagggaccagataacgtttgaatggagggattatatttcaggtgttttagcttgaaatttattttttaaaaaaagaaaaatttaaaaaatatataaataaaatagaacaaagccggtgatgcaagttgatattataaacaggcagttttagcacagaaagaaaatactgacctgtctgcattctggtacggtgggtgcaggtcccagctgggtatgacatgatacatttttaattattctcaccagcaagtaaaaggaaaatgaacagtcttttggaattgtctttgaaaaggatcaaagagtaggaaattcacatttgacctaacattacttgcctatagaagtatggcatttccaagcttttgtctgaggagcatctcagagaagtgagagtaaatctgagttagcttaaaaattggtagggaggaagaaaatctctgcaaataatgattttatgtttgttggccaagtgaaatgatctatcattgtgtttgggaggttttattttcttatgtttttaaaattggtaaatgctttatagatgtatttttatccaagtgccactccaatttgtgtatgtaataaaattatttatattaaaagtgggaaataattgtcaacattttttttgagtatagatttattaggggtggcaaagaagagtgctagttagcagttttccatgtaaagttgtccttgactgatttgtccacatgtcagttgtaactcccccactccctgcaaaaggaattatttctaacccagatgtatcacttgaaactttttagaagcaaaataatcagggaagttcctagaaaggtgtttggctttttggtttttgagggttggggtaaagaagacttcccccacaactgtcagcacaaaacagggtattgatttttaactctgatgtttctattggagttgaatactaaataaataactataatgagggaaatacatttctaataaaattccctacattctagaaacatccctgttttaatttttttatctaaatctttttgtgctttatgtgtaaagaaaaaaatgtactgagttacaatgcattttattaacactatgtacataatagctgctttgtgttcagaatggtagcagttgctttgtatattaaagtgatccttgtgaatttgtgaaatattgtcataaagtgctttttcttactgtaatctttgtggtatcaactgtcataatgctctttttacacaaacatttatgtgcagtcacataaacatgcttttaaaaactcaaaaagtct

SEQ ID NO: 19345 - DNA, 1568 bp, Homo sapiens
atcaagtaattctcaactttttagtctttctcctctcttcaaatcatgtgactttttaaatggaagtttttcattgattaaaatattttagcacctaaaagctagccttaaaaacagctgtaaaagaaaaacatcaggaaattagatatgactagcccagttaattaaaagacgggctcaaaccttgttttattctttttcatcttggatgaagattgaagggaaaataactcaagtgcataatatttattttcaatttttaatgagactttatcctcatcacaacattaatactgtacatagtatgccaaaatatccattaatttgtctagaatagtacaagactttttaaagcaattgtcctcacagagaccacatgtaatatactgaaatatgttcatttttaatggctttgttaacatcaaagaaatgctgcctaaatttgatttcagatgaggaaggagaaagtaaagtgtgcatagtaaggctgtaggtgaagagttgtgagataaatagttcactcagttgtacaaagcacaactagaactttttgttgggaggcttacatacatcttgaatattcttaatgtaataatgttgactattaagttggctacacagtcactgtatgtactaggaactggtttccttgacattctagaatcaatggctaggagaggcattaatctttgaggggctgaacatatcatgaagctgagtcagtatggaaaattttcaaataaacagggtgctgaagttccatctgtctcatctgcttatgataagttcttattgattagtgaatgtagcttaagcctttgtatgtgtcctcagggggcagaccgactttaagagggaccagataacgtttgaatggagggattatatttcaggtgttttagcttgaaatttattttttaaaaaaagaaaaatttaaaaaatatataaataaaatagaacaaagccggtgatgcaagttgatattataaacaggcagttttagcacagaaagaaaatactgacctgtctgcattctggtacggtgggtgcaggtcccagctgggtatgacatgatacatttttaattattctcaccagcaagtaaaaggaaaatgaacagtcttttggaattgtctttgaaaaggatcaaagagtaggaaattcacatttgacctaacattacttgcctatagaagtatggcatttccaagcttttgtctgaggagcatctcagagaagtgagagtaaatctgagttagcttaaaaattggtagggaggaagaaaatctctgcaaataatgattttatgtttgttggccaagtgaaatgatctatcattgtgtttgggaggttttattttcttatgtttttaaaattggtaaatgctttatagatgtatttttatccaagtgccactccaatttgtgtatgtaataaaattatttatattaaaagtgggaaataattgtcaacattttttttgagtatagatttattaggggtggcaaagcgaatggattgttaaaactctgcatgtcaccatttattggctgtttggacacacctct

SEQ ID NO: 19346 - DNA, 2012 bp, Homo sapiens
atcaagtaattctcaactttttagtctttctcctctcttcaaatcatgtgactttttaaatggaagtttttcattgattaaaatattttagcacctaaaagctagccttaaaaacagctgtaaaagaaaaacatcaggaaattagatatgactagcccagttaattaaaagacgggctcaaaccttgttttattctttttcatcttggatgaagattgaagggaaaataactcaagtgcataatatttattttcaatttttaatgagactttatcctcatcacaacattaatactgtacatagtatgccaaaatatccattaatttgtctagaatagtacaagactttttaaagcaattgtcctcacagagaccacatgtaatatactgaaatatgttcatttttaatggctttgttaacatcaaagaaatgctgcctaaatttgatttcagatgaggaaggagaaagtaaagtgtgcatagtaaggctgtaggtgaagagttgtgagataaatagttcactcagttgtacaaagcacaactagaactttttgttgggaggcttacatacatcttgaatattcttaatgtaataatgttgactattaagttggctacacagtcactgtatgtactaggaactggtttccttgacattctagaatcaatggctaggagaggcattaatctttgaggggctgaacatatcatgaagctgagtcagtatggaaaattttcaaataaacagggtgctgaagttccatctgtctcatctgcttatgataagttcttattgattagtgaatgtagcttaagcctttgtatgtgtcctcagggggcagaccgactttaagagggaccagataacgtttgaatggagggattatatttcaggtgttttagcttgaaatttattttttaaaaaaagaaaaatttaaaaaatatataaataaaatagaacaaagccggtgatgcaagttgatattataaacaggcagttttagcacagaaagaaaatactgacctgtctgcattctggtacggtgggtgcaggtcccagctgggtatgacatgatacatttttaattattctcaccagcaagtaaaaggaaaatgaacagtcttttggaattgtctttgaaaaggatcaaagagtaggaaattcacatttgacctaacattacttgcctatagaagtatggcatttccaagcttttgtctgaggagcatctcagagaagtgagagtaaatctgagttagcttaaaaattggtagggaggaagaaaatctctgcaaataatgattttatgtttgttggccaagtgaaatgatctatcattgtgtttgggaggttttattttcttatgtttttaaaattggtaaatgctttatagatgtatttttatccaagtgccactccaatttgtgtatgtaataaaattatttatattaaaagtgggaaataattgtcaacattttttttgagtatagatttattaggggtggcaaagaagagtgctagttagcagttttccatgtaaagttgtccttgactgatttgtccacatgtcagttgtaactcccccactccctgcaaaaggaattatttctaacccagatgtatcacttgaaactttttagaagcaaaataatcagggaagttcctagaaaggtgtttggctttttggtttttgagggttggggtaaagaagacttcccccacaactgtcagcacaaaacagggtattgatttttaactctgatgtttctattggagttgaatactaaataaataactataatgagggaaatacatttctaataaaattccctacattctagaaacatccctgttttaatttttttatctaaatctttttgtgctttatgtgtaaagaaaaaaatgtactgagttacaatgcattttattaacactatgtacataatagctgctttgtgttcagaatggtagcagttgctttgtatattaaagtgatccttgtgaatttgtga

SEQ ID NO: 19347 - DNA, 394 bp, Homo sapiens
accccgtctctactaataatacaaaaaattagccgggcatggtggcgcacgcctgtaatcccagctactcgggaggccgaggcaagagaattgcttgaacttgggaggtggaggttgcagtgagctgagatggcaccgctgtactccagcctgagtgacagagtgaaactgtgtctcaaaaaataaataaatgttacttgtcattcctgtcattcttcttactactgctgctgctagtggctattaccatttctactactatcccagagctgcccatggcactaaagctacacggtaaatgatcaaggagaagagtggtgcaaagataggagggcgagaaaaagctgtgagttgtttattttaagtatcttatttgataacttccctaacatta

SEQ ID NO: 19348 - DNA, 501 bp, Homo sapiens
cagttcagataaagattagagggttgattcaggtatcttattcctgaaatagtgatgtagcatgtggtacccaagaaaatatgcaacacttgtggaaaagggcatattgtgagctacgcttttaactttttattagacagatggaatgctctccaatattgattagctagatgaaaatgagaacagtttactacatggcacatttctaagttcagcattttgaatctgaatagtaacatgactgaattgaaagtgatggagccctgcagttagggacacgatgtctaatcttaggcattttatcttcaacattgtcccagttctcttgtgtagggaaaaggaaaaggcacagcatgacctcttccaaggacctcaaacctggccagtttagttggttataacatggtgacgatgaaaacagcatggtaaattcaggcctcctggagggccatgaacctgtctacatgtctgtttctctgtgttgatcagtggctgacagtt

SEQ ID NO: 19349 - DNA, 192 bp, Homo sapiens
gtgtcttcccacagattacttgttagctgcaagggaaaaagtagtaatttttcattggaaaagttggacaacaccttggctgggtgatcaaaattagcataaccaagctggggcagatagactttttgtgcctttagatgtgatatccagagaagaaaatatcacttttgtagttttctgagaatgcagaaa

SEQ ID NO: 19350 - DNA, 429 bp, Homo sapiens
acctttcctttcacccccaccattaaaaaaagaaaaacaaaacaaaacagagggaaatgtgatttaatggagtttaaaagggtagaggtatttcttcaggtcagtgacaggacattcacctccaaatctggaaagacgagttcaaaagcaagcagtgacttacctcataatgaattaattgtgtgcctgaactatgatccaaaaggccaggtgggcagacctttatgcactgatgagtagcctctctgtggcccagaacaaaaaatgcaaccctgatggctaacatgtggttttctgctgtattgcatttacagagatctatggtgtaattcattctcgataggtgaggagacagcggaatttagactaagactgtcagcaaattaatatcctagctttttagcactaaatgtttccacccaaactgga

SEQ ID NO: 19351 - DNA, 2261 bp, Homo sapiens
gtccttcggtgtctgggtgtggtgagtagaggtgtgtgtcacaaagtacagaccattgtgtgtgacaaagcccatcgtgtgtctgtgtgtgtctttatccacgtggatggacgtctctttcttgctctgccccaagacacaccctagcccctccttattctcaaaagggggagctggggagcctccccctaccctggggcctcccctgcccctccccgccctgcctggccgtcaccactccccagagggcacagggctctgctgtgcctcagagcaaaagtcccagagccagcagagcaggctgacgacctgcaagccacagtggctgccctgtgcgtgctgcgaggtgggggaccctgggcaggaagctggctgagccccaagaccccgggggccatgggcggggatctggtgcttggcctgggggccttgagacgccgaaagcgcttgctggagcaggagaagtctctggccggctgggcactggtgctggcaggaactggcattggactcatggtgctgcatgcagagatgctgtggttcggggggtgctcgtgggcgctctacctgttcctggttaaatgcacgatcagcatttccaccttcttactcctctgcctcatcgtggcctttcatgccaaagaggtccagctgttcatgaccgacaacgggctgcgggactggcgcgtggcgctgaccgggcggcaggcggcgcagatcgtgctggagctggtggtgtgtgggctgcacccggcgcccgtgcggggcccgccgtgcgtgcaggatttaggggcgccgctgacctccccgcagccctggccgggattcctgggccaaggggaagcgctgctgtccctggccatgctgctgcgtctctacctggtgccccgcgccgtgctcctgcgcagcggcgtcctgctcaacgcttcctaccgcagcatcggcgctctcaatcaagtccgcttccgccactggttcgtggccaagctttacatgaacacgcaccctggccgcctgctgctcggcctcacgcttggcctctggctgaccaccgcctgggtgctgtccgtggccgagaggcaggctgttaatgccactgggcacctttcagacacactttggctgatccccatcacattcctgaccatcggctatggtgacgtggtgccgggcaccatgtggggcaagatcgtctgcctgtgcactggagtcatgggtgtctgctgcacagccctgctggtggccgtggtggcccggaagctggagtttaacaaggcagagaagcacgtgcacaacttcatgatggatatccagtataccaaagagatgaaggagtccgctgcccgagtgctacaagaagcctggatgttctacaaacatactcgcaggaaggagtctcatgctgcccgcaggcatcagcgcaagctgctggccgccatcaacgcgttccgccaggtgcggctgaaacaccggaagctccgggaacaagtgaactccatggtggacatctccaagatgcacatgatcctgtatgacctgcagcagaatctgagcagctcacaccgggccctggagaaacagattgacacgctggcggggaagctggatgccctgactgagctgcttagcactgccctggggccgaggcagcttccagaacccagccagcagtccaagtagctggacccacgaggaggaaccaggctactttccccagtactgaggtggtggacatcgtctctgccactcctgacccagccctgaacaaagcacctcaagtgcaaggaccaaagggggccctggcttggagtgggttggcttgctgatggctgctggaggggacgctggctaaagtgggtaggccttggcccacctgaggccccaggtgggaacatggtcacccccactctgcataccctcatcaaaaacactctcactatgctgctatggacgacctccagctctcagttacaagtgcaggcgactggaggcaggactcctgggtccctgggaaagagggtactaggggcccggatccaggattctgggaggcttcagttaccgctggccgagctgaagaactgggtatgaggctggggcggggctggaggtggcgccccctggtgggacaacaaagaggacaccatttttccagagctgcagagagcacctggtggggaggaagaagtgtaactcaccagcctctgctcttatctttgtaataaatgttaaagccagaagttgccatttctctctaaaca

SEQ ID NO: 19352 - DNA, 388 bp, Homo sapiens
  misc_feature (29)..(29): n is a, c, g, or t
  misc_feature (40)..(40): n is a, c, g, or t
  misc_feature (73)..(73): n is a, c, g, or t
tcttccttcagccaatctgaaggacccgnagacagatggnactgtccaacccattcccggggtctcatggaanctgggcaccctccagctctcagttacaagtgcaggcgactggaggcaggactcctgggtccctgggaaagagggtactaggggcccggatccaggattctgggaggcttcagttaccgctggccgagctgaagaactgggtatgaggctggggcggggctggaggtggcgccccctggtgggacaacaaagaggacaccatttttccagagctgcagagagcacctggtggggaggaagaagtgtaactcaccagcctctgctcttatctttgtaataaatgttaaagccagaagttgccatttctctctaaaca

SEQ ID NO: 19353 - DNA, 2711 bp, Homo sapiens
gtccttcggtgtctgggtgtggtgagtagaggtgtgtgtcacaaagtacagaccattgtgtgtgacaaagcccatcgtgtgtctgtgtgtgtctttatccacgtggatggacgtctctttcttgctctgccccaagacacaccctagcccctccttattctcaaaagggggagctggggagcctccccctaccctggggcctcccctgcccctccccgccctgcctggccgtcaccactccccagagggcacagggctctgctgtgcctcagagcaaaagtcccagagccagcagagcaggctgacgacctgcaagccacagtggctgccctgtgcgtgctgcgaggtgggggaccctgggcaggaagctggctgagccccaagaccccgggggccatgggcggggatctggtgcttggcctgggggccttgagacgccgaaagcgcttgctggagcaggagaagtctctggccggctgggcactggtgctggcaggaactggcattggactcatggtgctgcatgcagagatgctgtggttcggggggtgctcgtgggcgctctacctgttcctggttaaatgcacgatcagcatttccaccttcttactcctctgcctcatcgtggcctttcatgccaaagaggtccagctgttcatgaccgacaacgggctgcgggactggcgcgtggcgctgaccgggcggcaggcggcgcagatcgtgctggagctggtggtgtgtgggctgcacccggcgcccgtgcggggcccgccgtgcgtgcaggatttaggggcgccgctgacctccccgcagccctggccgggattcctgggccaaggggaagcgctgctgtccctggccatgctgctgcgtctctacctggtgccccgcgccgtgctcctgcgcagcggcgtcctgctcaacgcttcctaccgcagcatcggcgctctcaatcaagtccgcttccgccactggttcgtggccaagctttacatgaacacgcaccctggccgcctgctgctcggcctcacgcttggcctctggctgaccaccgcctgggtgctgtccgtggccgagaggcaggctgttaatgccactgggcacctttcagacacactttggctgatccccatcacattcctgaccatcggctatggtgacgtggtgccgggcaccatgtggggcaagatcgtctgcctgtgcactggagtcatgggtgtctgctgcacagccctgctggtggccgtggtggcccggaagctggagtttaacaaggcagagaagcacgtgcacaacttcatgatggatatccagtataccaaagagatgaaggagtccgctgcccgagtgctacaagaagcctggatgttctacaaacatactcgcaggaaggagtctcatgctgcccgcaggcatcagcgcaagctgctggccgccatcaacgcgttccgccaggtgcggctgaaacaccggaagctccgggaacaagtgaactccatggtggacatctccaagatgcacatgatcctgtatgacctgcagcagaatctgagcagctcacaccgggccctggagaaacagattgacacgctggcggggaagctggatgccctgactgagctgcttagcactgccctggggccgaggcagcttccagaacccagccagcagtccaagtagctggtgagggggctgggacttgggcaggaaggcatcctggaggaagggttcctgtggccagcaccctatgtggctaagggggcgggggatggctgggagacaaggccgccttttctcatcagctctggcactgtctggaggaaaggactcagttcggggctggactggcagtgaaggaagatggtgtaccctctccccttcactgacccttgatggccttctccctctttgcttggtctctctctctctctctgcctgtcctgggcacattgtctggctgtccatccaatgtctctgtctaaatgccctcctgccccctggcctcggggcccggaaacacctgccccctgtctcccacttctgcccaccggtttctgtctgcacctcggtgtgtcccactctcactctccctcttcctggcctgcctctccatcagtctctctgtctctccaggacccacgaggaggaaccaggctactttccccagtactgaggtggtggacatcgtctctgccactcctgacccagccctgaacaaagcacctcaagtgcaaggaccaaagggggccctggcttggagtgggttggcttgctgatggctgctggaggggacgctggctaaagtgggtaggccttggcccacctgaggccccaggtgggaacatggtcacccccactctgcataccctcatcaaaaacactctcactatgctgctatggacgacctccagctctcagttacaagtgcaggcgactggaggcaggactcctgggtccctgggaaagagggtactaggggcccggatccaggattctgggaggcttcagttaccgctggccgagctgaagaactgggtatgaggctggggcggggctggaggtggcgccccctggtgggacaacaaagaggacaccatttttccagagctgcagagagcacctggtggggaggaagaagtgtaactcaccagcctctgctcttatctttgtaataaatgttaaagccagaagttgccatttctctctaaaca

SEQ ID NO: 19354 - DNA, 2460 bp, Homo sapiens
gtccttcggtgtctgggtgtggtgagtagaggtgtgtgtcacaaagtacagaccattgtgtgtgacaaagcccatcgtgtgtctgtgtgtgtctttatccacgtggatggacgtctctttcttgctctgccccaagacacaccctagcccctccttattctcaaaagggggagctggggagcctccccctaccctggggcctcccctgcccctccccgccctgcctggccgtcaccactccccagagggcacagggctctgctgtgcctcagagcaaaagtcccagagccagcagagcaggctgacgacctgcaagccacagtggctgccctgtgcgtgctgcgaggtgggggaccctgggcaggaagctggctgagccccaagaccccgggggccatgggcggggatctggtgcttggcctgggggccttgagacgccgaaagcgcttgctggagcaggagaagtctctggccggctgggcactggtgctggcaggaactggcattggactcatggtgctgcatgcagagatgctgtggttcggggggtgctcgtgggcgctctacctgttcctggttaaatgcacgatcagcatttccaccttcttactcctctgcctcatcgtggcctttcatgccaaagaggtccagctgttcatgaccgacaacgggctgcgggactggcgcgtggcgctgaccgggcggcaggcggcgcagatcgtgctggagctggtggtgtgtgggctgcacccggcgcccgtgcggggcccgccgtgcgtgcaggatttaggggcgccgctgacctccccgcagccctggccgggattcctgggccaaggggaagcgctgctgtccctggccatgctgctgcgtctctacctggtgccccgcgccgtgctcctgcgcagcggcgtcctgctcaacgcttcctaccgcagcatcggcgctctcaatcaagtccgcttccgccactggttcgtggccaagctttacatgaacacgcaccctggccgcctgctgctcggcctcacgcttggcctctggctgaccaccgcctgggtgctgtccgtggccgagaggcaggctgttaatgccactgggcacctttcagacacactttggctgatccccatcacattcctgaccatcggctatggtgacgtggtgccgggcaccatgtggggcaagatcgtctgcctgtgcactggagtcatgggtgtctgctgcacagccctgctggtggccgtggtggcccggaagctggagtttaacaaggcagagaagcacgtgcacaacttcatgatggatatccagtataccaaagagatgaaggagtccgctgcccgagtgctacaagaagcctggatgttctacaaacatactcgcaggaaggagtctcatgctgcccgcaggcatcagcgcaagctgctggccgccatcaacgcgttccgccaggtgcggctgaaacaccggaagctccgggaacaagtgaactccatggtggacatctccaagatgcacatgatcctgtatgacctgcagcagaatctgagcagctcacaccgggccctggagaaacagattgacacgctggcggggaagctggatgccctgactgagctgcttagcactgccctggggccgaggcagcttccagaacccagccagcagtccaagtagctggtgagggggctgggacttgggcaggaaggcatcctggaggaagggttcctgtggccagcacccctggcctcggggcccggaaacacctgccccctgtctcccacttctgcccaccggtttctgtctgcacctcggtgtgtcccactctcactctccctcttcctggcctgcctctccatcagtctctctgtctctccaggacccacgaggaggaaccaggctactttccccagtactgaggtggtggacatcgtctctgccactcctgacccagccctgaacaaagcacctcaagtgcaaggaccaaagggggccctggcttggagtgggttggcttgctgatggctgctggaggggacgctggctaaagtgggtaggccttggcccacctgaggccccaggtgggaacatggtcacccccactctgcataccctcatcaaaaacactctcactatgctgctatggacgacctccagctctcagttacaagtgcaggcgactggaggcaggactcctgggtccctgggaaagagggtactaggggcccggatccaggattctgggaggcttcagttaccgctggccgagctgaagaactgggtatgaggctggggcggggctggaggtggcgccccctggtgggacaacaaagaggacaccatttttccagagctgcagagagcacctggtggggaggaagaagtgtaactcaccagcctctgctcttatctttgtaataaatgttaaagccagaagttgccatttctctctaaaca

SEQ ID NO: 19355 - DNA, 1896 bp, Homo sapiens
cgcactgggcccagatgatggttttgagacttctccagaaccgacacatcaagagggactgatttgcaggggaaggaggctaggaaaattgggaatcaaaaaaaaaaaatggtggttttgaaggaaaggtggagggccaggcggagggagacctgggatctcacaccgctttttccgtcccccctgacagtgggcgctctacctgttcctggttaaatgcacgatcagcatttccaccttcttactcctctgcctcatcgtggcctttcatgccaaagaggtccagctgttcatgaccgacaacgggctgcgggactggcgcgtggcgctgaccgggcggcaggcggcgcagatcgtgctggagctggtggtgtgtgggctgcacccggcgcccgtgcggggcccgccgtgcgtgcaggatttaggggcgccgctgacctccccgcagccctggccgggattcctgggccaaggggaagcgctgctgtccctggccatgctgctgcgtctctacctggtgccccgcgccgtgctcctgcgcagcggcgtcctgctcaacgcttcctaccgcagcatcggcgctctcaatcaagtccgcttccgccactggttcgtggccaagctttacatgaacacgcaccctggccgcctgctgctcggcctcacgcttggcctctggctgaccaccgcctgggtgctgtccgtggccgagaggcaggctgttaatgccactgggcacctttcagacacactttggctgatccccatcacattcctgaccatcggctatggtgacgtggtgccgggcaccatgtggggcaagatcgtctgcctgtgcactggagtcatgggtgtctgctgcacagccctgctggtggccgtggtggcccggaagctggagtttaacaaggcagagaagcacgtgcacaacttcatgatggatatccagtataccaaagagatgaaggagtccgctgcccgagtgctacaagaagcctggatgttctacaaacatactcgcaggaaggagtctcatgctgcccgcaggcatcagcgcaagctgctggccgccatcaacgcgttccgccaggtgcggctgaaacaccggaagctccgggaacaagtgaactccatggtggacatctccaagatgcacatgatcctgtatgacctgcagcagaatctgagcagctcacaccgggccctggagaaacagattgacacgctggcggggaagctggatgccctgactgagctgcttagcactgccctggggccgaggcagcttccagaacccagccagcagtccaagtagctggacccacgaggaggaaccaggctactttccccagtactgaggtggtggacatcgtctctgccactcctgacccagccctgaacaaagcacctcaagtgcaaggaccaaagggggccctggcttggagtgggttggcttgctgatggctgctggaggggacgctggctaaagtgggtaggccttggcccacctgaggccccaggtgggaacatggtcacccccactctgcataccctcatcaaaaacactctcactatgctgctatggacgacctccagctctcagttacaagtgcaggcgactggaggcaggactcctgggtccctgggaaagagggtactaggggcccggatccaggattctgggaggcttcagttaccgctggccgagctgaagaactgggtatgaggctggggcggggctggaggtggcgccccctggtgggacaacaaagaggacaccatttttccagagctgcagagagcacctggtggggaggaagaagtgtaactcaccagcctctgctcttatctttgtaataaatgttaaagccagaagttgccatttctctctaaaca

SEQ ID NO: 19356 - DNA, 1705 bp, Homo sapiens
gtccttcggtgtctgggtgtggtgagtagaggtgtgtgtcacaaagtacagaccattgtgtgtgacaaagcccatcgtgtgtctgtgtgtgtctttatccacgtggatggacgtctctttcttgctctgccccaagacacaccctagcccctccttattctcaaaagggggagctggggagcctccccctaccctggggcctcccctgcccctccccgccctgcctggccgtcaccactccccagagggcacagggctctgctgtgcctcagagcaaaagtcccagagccagcagagcaggctgacgacctgcaagccacagtggctgccctgtgcgtgctgcgaggtgggggaccctgggcaggaagctggctgagccccaagaccccgggggccatgggcggggatctggtgcttggcctgggggccttgagacgccgaaagcgcttgctggagcaggagaagtctctggccggctgggcactggtgctggcaggaactggcattggactcatggtgctgcatgcagagatgctgtggttcggggggtgctcgacacactttggctgatccccatcacattcctgaccatcggctatggtgacgtggtgccgggcaccatgtggggcaagatcgtctgcctgtgcactggagtcatgggtgtctgctgcacagccctgctggtggccgtggtggcccggaagctggagtttaacaaggcagagaagcacgtgcacaacttcatgatggatatccagtataccaaagagatgaaggagtccgctgcccgagtgctacaagaagcctggatgttctacaaacatactcgcaggaaggagtctcatgctgcccgcaggcatcagcgcaagctgctggccgccatcaacgcgttccgccaggtgcggctgaaacaccggaagctccgggaacaagtgaactccatggtggacatctccaagatgcacatgatcctgtatgacctgcagcagaatctgagcagctcacaccgggccctggagaaacagattgacacgctggcggggaagctggatgccctgactgagctgcttagcactgccctggggccgaggcagcttccagaacccagccagcagtccaagtagctggacccacgaggaggaaccaggctactttccccagtactgaggtggtggacatcgtctctgccactcctgacccagccctgaacaaagcacctcaagtgcaaggaccaaagggggccctggcttggagtgggttggcttgctgatggctgctggaggggacgctggctaaagtgggtaggccttggcccacctgaggccccaggtgggaacatggtcacccccactctgcataccctcatcaaaaacactctcactatgctgctatggacgacctccagctctcagttacaagtgcaggcgactggaggcaggactcctgggtccctgggaaagagggtactaggggcccggatccaggattctgggaggcttcagttaccgctggccgagctgaagaactgggtatgaggctggggcggggctggaggtggcgccccctggtgggacaacaaagaggacaccatttttccagagctgcagagagcacctggtggggaggaagaagtgtaactcaccagcctctgctcttatctttgtaataaatgttaaagccagaagttgccatttctctctaaaca

SEQ ID NO: 19357 - DNA, 909 bp, Homo sapiens
ctagaggatcttaactgcatctgtgcctcctcgcaggaaggagtctcatgctgcccgcaggcatcagcgcaagctgctggccgccatcaacgcgttccgccaggtgcggctgaaacaccggaagctccgggaacaagtgaactccatggtggacatctccaagatgcacatgatcctgtatgacctgcagcagaatctgagcagctcacaccgggccctggagaaacagattgacacgctggcggggaagctggatgccctgactgagctgcttagcactgccctggggccgaggcagcttccagaacccagccagcagtccaagtagctggacccacgaggaggaaccaggctactttccccagtactgaggtggtggacatcgtctctgccactcctgacccagccctgaacaaagcacctcaagtgcaaggaccaaagggggccctggcttggagtgggttggcttgctgatggctgctggaggggacgctggctaaagtgggtaggccttggcccacctgaggccccaggtgggaacatggtcacccccactctgcataccctcatcaaaaacactctcactatgctgctatggacgacctccagctctcagttacaagtgcaggcgactggaggcaggactcctgggtccctgggaaagagggtactaggggcccggatccaggattctgggaggcttcagttaccgctggccgagctgaagaactgggtatgaggctggggcggggctggaggtggcgccccctggtgggacaacaaagaggacaccatttttccagagctgcagagagcacctggtggggaggaagaagtgtaactcaccagcctctgctcttatctttgtaataaatgttaaagccagaagttgccatttctctctaaaca

SEQ ID NO: 19358 - DNA, 473 bp, Homo sapiens
taggggaccggtgtggaagtggagagtggtcagaggagtagattttgtataggccaggttgtgacctgtagtgactagaacccttgtgatgtagtgtgaggagaagtggcagcccccactctgcataccctcatcaaaaacactctcactatgctgctatggacgacctccagctctcagttacaagtgcaggcgactggaggcaggactcctgggtccctgggaaagagggtactaggggcccggatccaggattctgggaggcttcagttaccgctggccgagctgaagaactgggtatgaggctggggcggggctggaggtggcgccccctggtgggacaacaaagaggacaccatttttccagagctgcagagagcacctggtggggaggaagaagtgtaactcaccagcctctgctcttatctttgtaataaatgttaaagccagaagttgccatttctctctaaaca

SEQ ID NO: 19359 - DNA, 283 bp, Homo sapiens
caccctgggcaacatggtgaaaccctgtctctactaaaatacaaaaaattagccagacatggtggcatgcgcctgtagtctcagctactcaggaggccgaggcatgagaatcgtttgagctcaggaggcagaggttgcagtgagccaagatcacaccaccacactccagcttgggctacagagtgagactatgtctcaaaaaaaaaaagaacctctgttaaaggattccttttaatccttttcagaaccagtatttatgttttttttttaacactgaatttga

SEQ ID NO: 19360 - DNA, 417 bp, Homo sapiens
acgcctggattcaagagctcctgtcccctcagcctaccaaagtgctggtattaaaggtgagatccactatgcctggccacatatatacaacttataaataaaaataaccttatatacaaggttaaatgcaaatatcccacagtgaaggccgggcttcagcataaggaggaagtcctgcctgaaaaaggctgcggcttggaacattttaccctgttgtcatctggctacgagttggctcacatcttctctcattcagaacctgaaggggtggggcctggggccgtattatccaatcactagtgctggggtaaaaactgtcttaaaactattcttttaatgcttagcaatactaatttttagtgagaaacttaagattacttaatttaacataaccagactttaagattttaaattact

SEQ ID NO: 19361 - DNA, 825 bp, Homo sapiens
aagtgcacaggctcaggagcacattccgtcgcccacccccgggggacccagctatggaagtgtctcaacccttcctggccccctacgtgcacccggcttcatccttggcccccagggacggcggcccttcacctgcagacctcagcctcaccctgtataaagctctgtcttcctctgctgctacaagaacccactgcagatgcagcatcagccaggatgcttccacatccccccgcgggacctggggacctgggtgaatgatgaacacgcggaagctcacgtagcttgctgtgccgtgagtagtaagccctttgtctccgcctccggggtctcatgtcttcttccagggtccacgaaacaggaacgagttgttagcttgcaagagttaaaatcaaatcccccacactcgtgtattgggaggatgaaaacctagatgtggaattgctcagccaaagcacgggcgtttgtaatttcaatagttgttcccaaacctcccagcattagggttagagtccctcatcagttcctcctccccacgccccagcacatagtgtatttcagatattggtgattttaatttgcattcttgtatcataagtgaggtttaagagcgatttgcatttccttttctgtgaaccgtgtttacgccttttgctcatttttctagtagattgtttatgttttgtgcctcttgatttgtaagaacttggaaactagggaaattaatttttgaatgggtttcaaatactttaccccagttttgattttacatatagtgttctttgccatgcagaaaaaattaaatttgtatgagttgaaaaaaaa

SEQ ID NO: 19362 - DNA, 452 bp, Homo sapiens
aaaccaccagtattaaattttaaaaagaattattgtatgtaaatctttagctttcttttttgtgtgtcataaagacacggtccctctatgttgcccaggctggtctcgaactcttggcctctagtgatcctcccaccttgacctcccaaagtgccagggttacaggtgttgagccaccacacttgaccaatatctaacagttcttaaattaatgcatcattgtagaattgaatgttaaggctacactccactctatcagtctttttattgccacctaaaaatttcatttttgtttaatcttgctttggattttggttagtaaacttctagggatgtagtttcacattgataacctgttaacttgggagctatggagtatggaggtgtagtgaggaagtctggaaggggagtggaaacccctaggcagggattttctggaggggccagatggt

SEQ ID NO: 19363 - DNA, 525 bp, Homo sapiens
  misc_feature (461)..(461): n is a, c, g, or t
  misc_feature (476)..(476): n is a, c, g, or t
  misc_feature (494)..(494): n is a, c, g, or t
  misc_feature (522)..(522): n is a, c, g, or t
catctacggctcaacattttttgtagccacaggcttccacggacttcacgtcattattggctcaactttcctcactatcagcttcatcccccaacaggcatcaccccgctaaatcccctagaagtcccactcctaaacacatccgtattactcgcatcaggagtatcaatcacctgagctcaccatagtctaatagaaaacaaccgaaaccaaataattcaagcactgcttattacaattttactgggtctctattttaccctcctacaagcctcagagtacttcgagtctcccttcaccatttccgacggcatctacggctcaacattttttgtagccacaggcttccacggacttcacgtcattattggctcaactttcctcactatctgcttcatccgccaaactaatatttcactttacatccaaacatcactttggcttcgaagccgccgcctganactggcattttgtanatgtggtttgactatttntgtatgtctccatctattgatgagggtntta

SEQ ID NO: 19364 - DNA, 385 bp, Homo sapiens
ccaaaaaggcataatcaaactttacttcctctctttcttcttcccactcatcctaaccctactcctaatcacataacctattcccccgagcaatctcaattacaatatatacaccaacaaacaatgttcaaccagtaactactactaatcaacgcccataatcatacaaagcccccgcaccaataggatcctcccgaatcaaccctgacccctctccttcataaattattcagcttcctacactattaaagtttaccacaaccaccaccccatcatacacttccactccacaaccctcctcatactaggcctactaaccaacacactaaccatataccaatgatggcgcgatgtaacacgagaaagcacataccaaggccaccac

SEQ ID NO: 19365 - DNA, 399 bp, Homo sapiens
  misc_feature (330)..(330): n is a, c, g, or t
  misc_feature (334)..(334): n is a, c, g, or t
  misc_feature (338)..(338): n is a, c, g, or t
  misc_feature (354)..(354): n is a, c, g, or t
  misc_feature (359)..(359): n is a, c, g, or t
  misc_feature (390)..(391): n is a, c, g, or t
catctacggctcaacattttttgtagccacaggcttccacggacttcacgtcattattggctcaactttcctcactatcagcttcatcccccaacaggcatcaccccgctaaatcccctagaagtcccactcctaaacacatccgtattactcgcatcaggagtatcaatcacctgagctcaccatagtctaatagaaaacaaccgaaaccaaataattcaagcactgcttattacaattttactgggtctctattttaccctcctacaagcctcagagtacttcgagtctcccttcaccatttccgacggcatctacgtttcgacatancaangtanacacaggcttcccacngactncacgtcattaatggccctactcgagggtacnnagctcgag

SEQ ID NO: 19366 - DNA, 353 bp, Homo sapiens
gttaagaaatgtggataaagcttgtaagttagaaatggcaagataatcagctatatgaagaatctcagctgggtgttttggctcaggcctgtaatcccagcactttgggaggctgaggtgggtggcttacaaggtcaggagttcaagaccaccctggacaatatggtgaaaccctgtctctactaaaaatacaaaaattacccaagcatagtggtgggtgcctgtagtcccagctgcttgggaggctgaggcaggagaattcgttaaacctgggaggcataggttgcagtgagccgagattgcaccactgcactccagcctggtgacagagcgagactccgtctcaaaaaaaa

SEQ ID NO: 19367 - DNA, 1181 bp, Homo sapiens
tgccaatgtgttcctggttgcgtttagcccagacgccctgcggccgctttgcctgaccaaagtctgtgggcgtggaacaggccctgggttctcctactgggaagaatgaagttcaggtactccatgtgatatatggttccacaatcctcagcgtgttaactgaagccttgttgagtttaacaaagctgccattgaagatctggggaaagtgaagaagttgcaacagagttttgggctcacaccattgatacatttgatccttaaggcccaccccgcctcactcccaccctcttctacttaattcaggatgtgaatagcacatgccttccatcttcagacaaacactgaggcctggacaatgacctgcattaggtagatagaatctactgaaagctaaaagccttttcctgtgtcttagcagcacggaagccacgcctccttccccccaatgtttgtgcaaaccctagagaagaggagacagcccctatgatgtgtgaggttgaatttcctgccctcaacccatcaaatcaggcagaatgagggctcagtcagaactacaactacaaaagagaaaaattttaatgtgacttttcttgtctgctcagatttttgggttaaggttcatgccagctacattctttgcataataaaatataaatagagtataaattgttctagttagagaaaacagcaaaacagtgctctcccaagggccctaataaatcactttacagaaacgtggatgtgtgttggatttacaggatttctatgccaagcagagaagtacgtgaaaacaggaaagcaaaatgcataagttgcaataatagttttgtggtttagctgaataatgtcctatatcaacagaggataatgattttagtttttcagttgccccaagatcatttccattactgatgaggcttgaaatgtctgtgaagaagagtcattgcaattgatttatttgtctggcaaactttttgtcagcaaattcaccactacctcaaaaatctcactagctactctatgcttaagacattggaagcataagccacaatgaaaactaactcttagcattagaattctaagaagcagtaatgtatttatgattttatgttaaaaatctcccagatgtcagcatttaaatcacaattcagtaatataagtaatttgaaattagaaag

SEQ ID NO: 19368 - DNA, 1427 bp, Homo sapiens
aaagtaagggactattatgatctgtaccccaccccgacgcacgccaagcggctttttccccatttgtggccaaatttcccggcatggggaaggagccttaggggaagcacccgggacctccttggcttcttctgggagtctagtttcacctatttcgtttcgccaacaggcgagacgggcaagacttcgggctcagctgccaccatcagtactgacctgtccatggctaaagccttttccacacacaaccaaagttggctgcagtttagctaccgcgttttagccttcccgctctccggaagcaagcccttcgacccggaagcagtctgtccctaaaacagacccacagaaaaggggttcaggtactccatgtgatatatggttccacaatcctcagcgtgttaactgaagccttgttgagtttaacaaagctgccattgaagatctggggaaagtgaagaagttgcaacagagttttgggctcacaccattgatacatttgatccttaaggcccaccccgcctcactcccaccctcttctacttaattcaggatgtgaatagcacatgccttccatcttcagacaaacactgaggcctggacaatgacctgcattaggtagatagaatctactgaaagctaaaagccttttcctgtgtcttagcagcacggaagccacgcctccttccccccaatgtttgtgcaaaccctagagaagaggagacagcccctatgatgtgtgaggttgaatttcctgccctcaacccatcaaatcaggcagaatgagggctcagtcagaactacaactacaaaagagaaaaattttaatgtgacttttcttgtctgctcagatttttgggttaaggttcatgccagctacattctttgcataataaaatataaatagagtataaattgttctagttagagaaaacagcaaaacagtgctctcccaagggccctaataaatcactttacagaaacgtggatgtgtgttggatttacaggatttctatgccaagcagagaagtacgtgaaaacaggaaagcaaaatgcataagttgcaataatagttttgtggtttagctgaataatgtcctatatcaacagaggataatgattttagtttttcagttgccccaagatcatttccattactgatgaggcttgaaatgtctgtgaagaagagtcattgcaattgatttatttgtctggcaaactttttgtcagcaaattcaccactacctcaaaaatctcactagctactctatgcttaagacattggaagcataagccacaatgaaaactaactcttagcattagaattctaagaagcagtaatgtatttatgattttatgttaaaaatctcccagatgtcagcatttaaatcacaattcagtaatataagtaatttgaaattagaaag

SEQ ID NO: 19369 - DNA, 342 bp, Homo sapiens
gcaaacctcagtgctgggattataggcatgagccactgtacctggctaaatgttgtttttttgatattcaatttttgtttatagaattttcatttgttttgctcttatacttttcatctttttatgtttattgaccaattaaatatcatttgggtaagcacctatttaagtgtcttaacaatttttctattgagtactctgggtttttgttttgtttttcttactgatttgtagaattctttatgtattctgaattgcagataccttccttctgtactaatgcttatctttttagccctgtaatattgtgttttcataaacatacttatcaatcttttcctt

SEQ ID NO: 19370 - DNA, 4193 bp, Homo sapiens
  misc_feature (3)..(3): n is a, c, g, or t
  misc_feature (9)..(9): n is a, c, g, or t
ggnaccatnactctctggagtcgattgccccgagacacatgggccaaggaggggtcagcggcgaattctttcggcctgttggggacccctcgtgtccccacgccagactggacctcccgtatgaacttctcttcgcatcggcggcggcttccgtcacctccgctcccccgatcctattcccagtcgtatgccagcttggagagtcacgtgagagcaagagagtagctttctggttgtcctggtgccctgctcaggcaaactgactgccattctctgaggatggcagctctgtcccccacatttgccacgtccacccaggattccacctgtctccaggactcagaatttcctgtttcttcaaaagaccattcctgtccccagaatttggacctgttcgtgtgcagtggtctggagcctcacacacccagtgttggttcccaggaatcggtgactttccaagatgtcgctgtggactttaccgagaaggagtggcccttgctggattcttctcagagaaaactgtacaaagatgtaatgctggagaactacagcaacctcacttcactggaaattttggcaccaccattttgctgctcctaagtcagacttgtccaccctcagaacactgaagacccaagtgttgagcccaggctactggaaggggttgtcctctgcatggccctccctcaacctgtgtctttcccgtgagtgtagggtatcaggtcggcaaacccagcctcatctcacacttggagcaggaggaggagccgaggacagaggagaggggcgctcaccagggcgcttgtgcagattgggagactccatctaaaaccaagtggtcacttcttatggaagatatttttgggaaggaaacgcccagtggtgtgacgatggaaagagccggtcttggagagaagtccactgaatacgctcacttgttcgaagtctttggcatggaccctcatctcactcagccaatgggaaggcacgctggcaagaggccctatcaccgccgcgactatggggtagcgttcaagggcaggccgcacctcactcagcacatgagcatgtacgacgggagaaaaatgcatgaatgtcatcagtgccaaaaagccttcaccacgagcgcgtccctcacacggcacaggagaatccacaccggggagaagccttacgagtgcagcgactgcgggaaagccttcaacgacccttcagcccttaggagccacgcaagaactcacctcaaagagaagccctttgactgcagtcagtgtggaaatgcattccggaccctctcggccctgaaaatccacatgcgagttcacactggcgagaggccttacaagtgtgatcagtgcgggaaggcttacggccggagctgccacctcatcgcacacaagagaacgcacaccggagagaggccctacgagtgtcacgactgtgggaaagctttccagcacccctcccacctcaaagagcacgtgaggaatcacacgggggagaagccctacgcgtgcacgcagtgcggcaaagccttccgctggaagtccaactttaatttgcacaagaagaaccacatggtggagaagacctacgaatgtaaagaatgcgggaaatcctttggcgatctcgtgtcccggaggaaacacatgaggattcacatcgtcaagaaacccgtggaatgtcggcagtgcgggaagaccttccgaaaccagtccatccttaagactcacatgaactctcacactggagagaaaccatacgggtgcgatctctgcgggaaagctttcagcgcgagttcaaacctcaccgcacacaggaagatacacacgcaagagagacgctacgaatgcgccgcctgcgggaaagtcttcggtgactatttatcccggcggaggcacatgagcgttcaccttgtaaagaaacgagttgagtgtaggcagtgtggcaaggccttcaggaaccagtcaacgctgaagacgcacatgcgaagccacacgggggagaaaccgtacgaatgcgatcactgtgggaaggccttcagcataggctccaacctgaatgtgcacaggcggatccacaccggggagaagccctacgaatgccttgtctgcgggaaagccttcagcgaccactcatccctcaggagccacgtgaaaactcaccggggagagaagctctttgtgtcatccgtgtggaaaaggctccagtgagcgcgcctgctttagagacacaggatgattcagaccggaaacagacctcgtgggtgtaagaggaagcctctgtgagctcgcaccttactgggtgcaaaagaatccacggaacttgggagaagtccagttcctgtaaaaactgggaagacgaggcgttctcatcccataggaggtttgtgagaactcacgccgggggtgaaaatgtacgtctgtagcatggagaagccttcagggtacattcagctcttaacaaacacaggaggacttaatggcagcttggcatttaatgtcaaaatccaagccgtggcatttaatgtcaaaatgacttcagaccacttctagccttctgggcccatgagtaataatgagcacactagggagcatctctgtaaacacagtggctggggaaacccttcctagtctcacttgattcctcatgacggaaatcacactaaagagagaaatcagtgaagtaaggaacgtggaaggtcatgaatgggccgcaaaccacggccagctgcttgtctttgtatggcttgccagctaacaatagtggttccatctttaaggaagaagaatgtttgatggagaaaatttgtggccaatgaagtctgaaatacttcctgtcatctgcccctttccagaaaaacttggccgacccttggtctacagcacgggttctcagtcgggcgacgatttggctgtctaggcgtcatttggcaatgtctagagacatttttggtagttagaatggggggaagatactcctgacttgtaataagaagacatcagagatgctgctaagtcggctccagcacacaggagccccccacaacgaagagttagtgcccccaaacgtcactgttgctgaggttgaaaataatcatgcagtcattcctcaattactgcctgcagcaattcctccatttttatgaatcttgtgagcacttacgctaggagaaatttcttttacaaaacttttaaaatacaattagtgctgataattcctatgtggaaatgattccagccatggtcccctcacttgagcatgtgaatattctcacggagagaagccccagcgagattttccggtgaatacgggattgcacttactctttcatcacggaaacagaccccccgagagaagccccaacgagattttccggtgaatacgggactgcacgtactctctcatcatgaaaacagagccccgttcataaatttttcatctttatttttaaggttatactcctctaaataacccttaagcctcatcaagaaaggtttgtttatagtatttttactatagcttcatccttgataacgtcctaatttccttctggacaacctccttgaccaatggcatattgagatctatgtgacatgaggatatttctcagtaccactttgttactggtacctgatgcacacggattgcgaccagagcatgatgcctccatcaagtggtaatatgtttgcagcctgctgtccagccaagagtgacagatacttctagtgacttccccggtatccactctcatcttcttccaatatcaagagaatccaggttctgtcagattagtaaggtgtgctaatctaaattttaaaaaatctcttacaggttttcttgcagctggtaccatccatgtctcacagccctggccactgacagatcagcagatgtcaccacatgggcttctgagaaagctcttgaatggggatcgttcttaaacatgaattcctccctgtatgttttgttctttgctttacttttcaccttgcaaagagatccagtacctagtattggaagatccaccttaacgaccgtgcatatgaaaaccacagtctaaggaagtgactgcagaaagctcacagcgaccctggcctcccctgtggcctctttgagtgtctgcagcagccctggacttccagacttctatcacatgagaaaaaataaaactgattattggtttaagctgc

SEQ ID NO: 19371 - DNA, 4047 bp, Homo sapiens
  misc_feature (3)..(3): n is a, c, g, or t
  misc_feature (9)..(9): n is a, c, g, or t
ggnaccatnactctctggagtcgattgccccgagacacatgggccaaggaggggtcagcggcgaattctttcggcctgttggggacccctcgtgtccccacgccagactggacctcccgtatgaacttctcttcgcatcggcggcggcttccgtcacctccgctcccccgatcctattcccagtcgtatgccagcttggagagtcacgtgagagcaagagagtagctttctggttgtcctggtgccctgctcaggcaaactgactgccattctctgaggatggcagctctgtcccccacatttgccacgtccacccaggattccacctgtctccaggactcagaatttcctgtttcttcaaaagaccattcctgtccccagaatttggacctgttcgtgtgcagtggtctggagcctcacacacccagtgttggttcccaggaatcggtgactttccaagatgtcgctgtggactttaccgagaaggagtggcccttgctggattcttctcagagaaaactgtacaaagatgtaatgctggagaactacagcaacctcacttcactggggtatcaggtcggcaaacccagcctcatctcacacttggagcaggaggaggagccgaggacagaggagaggggcgctcaccagggcgcttgtgcagattgggagactccatctaaaaccaagtggtcacttcttatggaagatatttttgggaaggaaacgcccagtggtgtgacgatggaaagagccggtcttggagagaagtccactgaatacgctcacttgttcgaagtctttggcatggaccctcatctcactcagccaatgggaaggcacgctggcaagaggccctatcaccgccgcgactatggggtagcgttcaagggcaggccgcacctcactcagcacatgagcatgtacgacgggagaaaaatgcatgaatgtcatcagtgccaaaaagccttcaccacgagcgcgtccctcacacggcacaggagaatccacaccggggagaagccttacgagtgcagcgactgcgggaaagccttcaacgacccttcagcccttaggagccacgcaagaactcacctcaaagagaagccctttgactgcagtcagtgtggaaatgcattccggaccctctcggccctgaaaatccacatgcgagttcacactggcgagaggccttacaagtgtgatcagtgcgggaaggcttacggccggagctgccacctcatcgcacacaagagaacgcacaccggagagaggccctacgagtgtcacgactgtgggaaagctttccagcacccctcccacctcaaagagcacgtgaggaatcacacgggggagaagccctacgcgtgcacgcagtgcggcaaagccttccgctggaagtccaactttaatttgcacaagaagaaccacatggtggagaagacctacgaatgtaaagaatgcgggaaatcctttggcgatctcgtgtcccggaggaaacacatgaggattcacatcgtcaagaaacccgtggaatgtcggcagtgcgggaagaccttccgaaaccagtccatccttaagactcacatgaactctcacactggagagaaaccatacgggtgcgatctctgcgggaaagctttcagcgcgagttcaaacctcaccgcacacaggaagatacacacgcaagagagacgctacgaatgcgccgcctgcgggaaagtcttcggtgactatttatcccggcggaggcacatgagcgttcaccttgtaaagaaacgagttgagtgtaggcagtgtggcaaggccttcaggaaccagtcaacgctgaagacgcacatgcgaagccacacgggggagaaaccgtacgaatgcgatcactgtgggaaggccttcagcataggctccaacctgaatgtgcacaggcggatccacaccggggagaagccctacgaatgccttgtctgcgggaaagccttcagcgaccactcatccctcaggagccacgtgaaaactcaccggggagagaagctctttgtgtcatccgtgtggaaaaggctccagtgagcgcgcctgctttagagacacaggatgattcagaccggaaacagacctcgtgggtgtaagaggaagcctctgtgagctcgcaccttactgggtgcaaaagaatccacggaacttgggagaagtccagttcctgtaaaaactgggaagacgaggcgttctcatcccataggaggtttgtgagaactcacgccgggggtgaaaatgtacgtctgtagcatggagaagccttcagggtacattcagctcttaacaaacacaggaggacttaatggcagcttggcatttaatgtcaaaatccaagccgtggcatttaatgtcaaaatgacttcagaccacttctagccttctgggcccatgagtaataatgagcacactagggagcatctctgtaaacacagtggctggggaaacccttcctagtctcacttgattcctcatgacggaaatcacactaaagagagaaatcagtgaagtaaggaacgtggaaggtcatgaatgggccgcaaaccacggccagctgcttgtctttgtatggcttgccagctaacaatagtggttccatctttaaggaagaagaatgtttgatggagaaaatttgtggccaatgaagtctgaaatacttcctgtcatctgcccctttccagaaaaacttggccgacccttggtctacagcacgggttctcagtcgggcgacgatttggctgtctaggcgtcatttggcaatgtctagagacatttttggtagttagaatggggggaagatactcctgacttgtaataagaagacatcagagatgctgctaagtcggctccagcacacaggagccccccacaacgaagagttagtgcccccaaacgtcactgttgctgaggttgaaaataatcatgcagtcattcctcaattactgcctgcagcaattcctccatttttatgaatcttgtgagcacttacgctaggagaaatttcttttacaaaacttttaaaatacaattagtgctgataattcctatgtggaaatgattccagccatggtcccctcacttgagcatgtgaatattctcacggagagaagccccagcgagattttccggtgaatacgggattgcacttactctttcatcacggaaacagaccccccgagagaagccccaacgagattttccggtgaatacgggactgcacgtactctctcatcatgaaaacagagccccgttcataaatttttcatctttatttttaaggttatactcctctaaataacccttaagcctcatcaagaaaggtttgtttatagtatttttactatagcttcatccttgataacgtcctaatttccttctggacaacctccttgaccaatggcatattgagatctatgtgacatgaggatatttctcagtaccactttgttactggtacctgatgcacacggattgcgaccagagcatgatgcctccatcaagtggtaatatgtttgcagcctgctgtccagccaagagtgacagatacttctagtgacttccccggtatccactctcatcttcttccaatatcaagagaatccaggttctgtcagattagtaaggtgtgctaatctaaattttaaaaaatctcttacaggttttcttgcagctggtaccatccatgtctcacagccctggccactgacagatcagcagatgtcaccacatgggcttctgagaaagctcttgaatggggatcgttcttaaacatgaattcctccctgtatgttttgttctttgctttacttttcaccttgcaaagagatccagtacctagtattggaagatccaccttaacgaccgtgcatatgaaaaccacagtctaaggaagtgactgcagaaagctcacagcgaccctggcctcccctgtggcctctttgagtgtctgcagcagccctggacttccagacttctatcacatgagaaaaaataaaactgattattggtttaagctgc

SEQ ID NO: 19372 - DNA, 4112 bp, Homo sapiens
  misc_feature (3)..(3): n is a, c, g, or t
  misc_feature (9)..(9): n is a, c, g, or t
ggnaccatnactctctggagtcgattgccccgagacacatgggccaaggaggggtcagcggcgaattctttcggcctgttggggacccctcgtgtccccacgccagactggacctcccgtatgaacttctcttcgcatcggcggcggcttccgtcacctccgctcccccgatcctattcccagtcgtatgccagcttggagagtcacgtgagagcaagagagtagctttctggttgtcctggtgccctgctcaggcaaactgactgccattctctgaggatggcagctctgtcccccacatttgccacgtccacccaggattccacctgtctccaggactcagaatttcctgtttcttcaaaagaccattcctgtccccagaatttggacctgttcgtgtgcagtggtctggagcctcacacacccagtgttggttcccaggaatcggtgactttccaagatgtcgctgtggactttaccgagaaggagtggcccttgctggattcttctcagagaaaactgtacaaagatgtaatgctggagaactacagcaacctcacttcactggggtatcaggtcggcaaacccagcctcatctcacacttggagcaggaggaggagccgaggacagaggagaggggcgctcaccagggcgcttgtgcagattgggagactccatctaaaaccaagtggtcacttcttatggaagatatttttgggaaggaaacgcccagtggtgtgacgatggaaagagccggtcttggagagaagtccactgaatacgctcacttgttcgaagtctttggcatggaccctcatctcactcagccaatgggaaggcacgctggcaagaggccctatcaccgccgcgactatggggtagcgttcaagggcaggccgcacctcactcagcacatgagcatgtacgacgggagaaaaatgcatgaatgtcatcagtgccaaaaagccttcaccacgagcgcgtccctcacacggcacaggagaatccacaccggggagaagccttacgagtgcagcgactgcgggaaagccttcaacgacccttcagcccttaggagccacgcaagaactcacctcaaagagaagccctttgactgcagtcagtgtggaaatgcattccggaccctctcggccctgaaaatccacatgcgagttcacactggcgagaggccttacaagtgtgatcagtgcgggaaggcttacggccggagctgccacctcatcgcacacaagagaacgcacaccggagagaggccctacgagtgtcacgactgtgggaaagctttccagcacccctcccacctcaaagagcacgtgaggaatcacacgggggagaagccctacgcgtgcacgcagtgcggcaaagccttccgctggaagtccaactttaatttgcacaagaagaaccacatggtggagaagacctacgaatgtaaagaatgcgggaaatcctttggcgatctcgtgtcccggaggaaacacatgaggattcacatcgtcaagaaacccgtggaatgtcggcagtgcgggaagaccttccgaaaccagtccatccttaagactcacatgaactctcacactggagagaaaccatacgggtgcgatctctgcgggaaagctttcagcgcgagttcaaacctcaccgcacacaggaagatacacacgcaagagagacgctacgaatgcgccgcctgcgggaaagtcttcggtgactatttatcccggcggaggcacatgagcgttcaccttgtaaagaaacgagttgagtgtaggcagtgtggcaaggccttcaggaaccagtcaacgctgaagacgcacatgcgaagccacacgggggagaaaccgtacgaatgcgatcactgtgggaaggccttcagcataggctccaacctgaatgtgcacaggcggatccacaccggggagaagccctacgaatgccttgtctgcgggaaagccttcagcgaccactcatccctcaggagccacgtgaaaactcaccggggagagaagctctttgtgtcatccgtgtggaaaaggctccagtgagcgcgcctgctttagagacacaggatgattcagaccggaaacagacctcgtgggtgtaagaggaagcctctgtgagctcgcaccttactgggtgcaaaagaatccacggaacttgggagaagtccagttcctgtaaaaactgggaagacgaggcgttctcatcccataggaggtttgtgagaactcacgccgggggtgaaaatgtacgtctgtagcatggagaagccttcagggtacattcagctcttaacaaacacaggaggacttaatggcagcttggcatttaatgtcaaaatccaagccgtggcatttaatgtcaaaatgacttcagaccacttctagccttctgggcccatgagtaataatgagcacactagggagcatctctgtaaacacagtggctggggaaacccttcctagtctcacttgattcctcatgacggaaatcacactaaagagagaaatcagtgaagtaaggaacgtggaaggtcatgaatgggccgcaaaccacggccagctgcttgtctttgtatggcttgccagctaacaatagtggttccatctttaaggaagaagaatgtttgatggagaaaatttgtggccaatgaagtctgaaatacttcctgtcatctgcccctttccagaaaaacttggccgacccttggtctacagcacgggttctcagtcgggcgacgatttggctgtctaggcgtcatttggcaatgtctagagacatttttggtagttagaatggggggaagatactcctgacttgtaataagaagacatcagagatgctgctaagtcggctccagcacacaggagccccccacaacgaagagttagtgcccccaaacgtcactgttgctgaggttgaaaataatcatgcagtcattcctcaattactgcctgcagcaattcctccatttttatgaatcttgtgagcacttacgctaggagaaatttcttttacaaaacttttaaaatacaattagtgctgataattcctatgtggaaatgattccagccatggtcccctcacttgagcatgtgaatattctcacggagagaagccccagcgagattttccggtgaatacgggattgcacttactctttcatcacggaaacagaccccccgagagaagccccaacgagattttccggtgaatacgggactgcacgtactctctcatcatgaaaacagagccccgttcataaatttttcatctttatttttaaggttatactcctctaaataacccttaagcctcatcaagaaaggtttgtttatagtatttttactatagcttcatccttgataacgtcctaatttccttctggacaacctccttgaccaatggcatattgagatctatgtgacatgaggatatttctcagtaccactttgttactggtacctgatgcacacggattgcgaccagagcatgatgcctccatcaagtggtaatatgtttgcagcctgctgtccagccaagagtgacagatacttctagtgacttccccggtatccactctcatcttcttccaatatcaagagaatccaggttctgtcagattagtaaggtgtgctaatctaaattttaaaaaatctcttacaggttttcttgcagctggtaccatccatgtctcacagccctggccactgacagatcagcagatgtcaccacatgggcttctgagaaagctcttgaatggggatcgttcttaaacatgaattcctccctgtatgttttgttctttgctttacttttcaccttgcaaagagatccagtacctagtattggaagatccaccttaacgaccgtgcatatgaaaaccacagtctaaggaagtgactgcagaaagctcacagcgaccctggcctcccctgtggcctctttgagtgtctgcagcagccctggacttccagacttctatcacatgagaaaaaataaaactgattattggtttaagctgctatggatatttcattgtttttcttttaaatttatttattttaagatagggtctccctatgttgcc

SEQ ID NO: 19373 - DNA, 4018 bp, Homo sapiens
  misc_feature (3)..(3): n is a, c, g, or t
  misc_feature (9)..(9): n is a, c, g, or t
ggnaccatnactctctggagtcgattgccccgagacacatgggccaaggaggggtcagcggcgaattctttcggcctgttggggacccctcgtgtccccacgccagactggacctcccgtatgaacttctcttcgcatcggcggcggcttccgtcacctccgctcccccgatcctattcccagtcgtatgccagcttggagagtcacgtgagagcaagagagtagctttctggttgtcctggtgccctgctcaggcaaactgactgccattctctgaggatggcagctctgtcccccacatttgccacgtccacccaggattccacctgtctccaggactcagaatttcctgtttcttcaaaagaccattcctgtccccagaatttggacctgttcgtgtgcagtggtctggagcctcacacacccagtgttggttcccaggaatcggtgactttccaagatgtcgctgtggactttaccgagaaggagtggcccttgctggattcttctcagagaaaactgtacaaagatgtaatgctggagaactacagcaacctcacttcactggggtatcaggtcggcaaacccagcctcatctcacacttggagcaggaggaggagccgaggacagaggagaggggcgctcaccagggcgcttgtgcagattgggagactccatctaaaaccaagtggtcacttcttatggaagatatttttgggaaggaaacgcccagtggtgtgacgatggaaagagccggtcttggagagaagtccactgaatacgctcacttgttcgaagtctttggcatggaccctcatctcactcagccaatgggaaggcacgctggcaagaggccctatcaccgccgcgactatggggtagcgttcaagggcaggccgcacctcactcagcacatgagcatgtacgacgggagaaaaatgcatgaatgtcatcagtgccaaaaagccttcaccacgagcgcgtccctcacacggcacaggagaatccacaccggggagaagccttacgagtgcagcgactgcgggaaagccttcaacgacccttcagcccttaggagccacgcaagaactcacctcaaagagaagccctttgactgcagtcagtgtggaaatgcattccggaccctctcggccctgaaaatccacatgcgagttcacactggcgagaggccttacaagtgtgatcagtgcgggaaggcttacggccggagctgccacctcatcgcacacaagagaacgcacaccggagagaggccctacgagtgtcacgactgtgggaaagctttccagcacccctcccacctcaaagagcacgtgaggaatcacacgggggagaagccctacgcgtgcacgcagtgcggcaaagccttccgctggaagtccaactttaatttgcacaagaagaaccacatggtggagaagacctacgaatgtaaagaatgcgggaaatcctttggcgatctcgtgtcccggaggaaacacatgaggattcacatcgtcaagaaacccgtggaatgtcggcagtgcgggaagaccttccgaaaccagtccatccttaagactcacatgaactctcacactggagagaaaccatacgggtgcgatctctgcgggaaagctttcagcgcgagttcaaacctcaccgcacacaggaagatacacacgcaagagagacgctacgaatgcgccgcctgcgggaaagtcttcggtgactatttatcccggcggaggcacatgagcgttcaccttgtaaagaaacgagttgagtgtaggcagtgtggcaaggccttcaggaaccagtcaacgctgaagacgcacatgcgaagccacacgggggagaaaccgtacgaatgcgatcactgtgggaaggccttcagcataggctccaacctgaatgtgcacaggcggatccacaccggggagaagccctacgaatgccttgtctgcgggaaagccttcagcgaccactcatccctcaggagccacgtgaaaactcaccggggagagaagctctttgtgtcatccgtgtggaaaaggctccagtgagcgcgcctgctttagagacacaggatgattcagaccggaaacagacctcgtgggtgtaagaggaagcctctgtgagctcgcaccttactgggtgcaaaagaatccacggaacttgggagaagtccagttcctgtaaaaactgggaagacgaggcgttctcatcccataggaggtttgtgagaactcacgccgggggtgaaaatgtacgtctgtagcatggagaagccttcagggtacattcagctcttaacaaacacaggaggacttaatggcagcttggcatttaatgtcaaaatccaagccgtggcatttaatgtcaaaatgacttcagaccacttctagccttctgggcccatgagtaataatgagcacactagggagcatctctgtaaacacagtggctggggaaacccttcctagtctcacttgattcctcatgacggaaatcacactaaagagagaaatcagtgaagtaaggaacgtggaaggtcatgaatgggccgcaaaccacggccagctgcttgtctttgtatggcttgccagctaacaatagtggttccatctttaaggaagaagaatgtttgatggagaaaatttgtggccaatgaagtctgaaatacttcctgtcatctgcccctttccagaaaaacttggccgacccttggtctacagcacgggttctcagtcgggcgacgatttggctgtctaggcgtcatttggcaatgtctagagacatttttggtagttagaatggggggaagatactcctgacttgtaataagaagacatcagagatgctgctaagtcggctccagcacacaggagccccccacaacgaagagttagtgcccccaaacgtcactgttgctgaggttgaaaataatcatgcagtcattcctcaattactgcctgcagcaattcctccatttttatgaatcttgtgagcacttacgctaggagaaatttcttttacaaaacttatgtggaaatgattccagccatggtcccctcacttgagcatgtgaatattctcacggagagaagccccagcgagattttccggtgaatacgggattgcacttactctttcatcacggaaacagaccccccgagagaagccccaacgagattttccggtgaatacgggactgcacgtactctctcatcatgaaaacagagccccgttcataaatttttcatctttatttttaaggttatactcctctaaataacccttaagcctcatcaagaaaggtttgtttatagtatttttactatagcttcatccttgataacgtcctaatttccttctggacaacctccttgaccaatggcatattgagatctatgtgacatgaggatatttctcagtaccactttgttactggtacctgatgcacacggattgcgaccagagcatgatgcctccatcaagtggtaatatgtttgcagcctgctgtccagccaagagtgacagatacttctagtgacttccccggtatccactctcatcttcttccaatatcaagagaatccaggttctgtcagattagtaaggtgtgctaatctaaattttaaaaaatctcttacaggttttcttgcagctggtaccatccatgtctcacagccctggccactgacagatcagcagatgtcaccacatgggcttctgagaaagctcttgaatggggatcgttcttaaacatgaattcctccctgtatgttttgttctttgctttacttttcaccttgcaaagagatccagtacctagtattggaagatccaccttaacgaccgtgcatatgaaaaccacagtctaaggaagtgactgcagaaagctcacagcgaccctggcctcccctgtggcctctttgagtgtctgcagcagccctggacttccagacttctatcacatgagaaaaaataaaactgattattggtttaagctgc

SEQ ID NO: 19374 - DNA, 3974 bp, Homo sapiens
  misc_feature (3)..(3): n is a, c, g, or t
  misc_feature (9)..(9): n is a, c, g, or t
ggnaccatnactctctggagtcgattgccccgagacacatgggccaaggaggggtcagcggcgaattctttcggcctgttggggacccctcgtgtccccacgccagactggacctcccgtatgaacttctcttcgcatcggcggcggcttccgtcacctccgctcccccgatcctattcccagtcgtatgccagcttggagagtcacgtgagagcaagagagtagctttctggttgtcctggtgccctgctcaggcaaactgactgccattctctgaggatggcagctctgtcccccacatttgccacgtccacccaggattccacctgtctccaggactcagaatttcctgtttcttcaaaagaccattcctgtccccagaatttggacctgttcgtgtgcagtggtctggagcctcacacacccagtgttggttcccaggaatcggtgactttccaagatgtcgctgtggactttaccgagaaggagtggcccttgctggattcttctcagagaaaactgtacaaagatgtaatgctggagaactacagcaacctcacttcactggggtatcaggtcggcaaacccagcctcatctcacacttggagcaggaggaggagccgaggacagaggagaggggcgctcaccagggcgcttgtgcagattgggagactccatctaaaaccaagtggtcacttcttatggaagatatttttgggaaggaaacgcccagtggtgtgacgatggaaagagccggtcttggagagaagtccactgaatacgctcacttgttcgaagtctttggcatggaccctcatctcactcagccaatgggaaggcacgctggcaagaggccctatcaccgccgcgactatggggtagcgttcaagggcaggccgcacctcactcagcacatgagcatgtacgacgggagaaaaatgcatgaatgtcatcagtgccaaaaagccttcaccacgagcgcgtccctcacacggcacaggagaatccacaccggggagaagccttacgagtgcagcgactgcgggaaagccttcaacgacccttcagcccttaggagccacgcaagaactcacctcaaagagaagccctttgactgcagtcagtgtggaaatgcattccggaccctctcggccctgaaaatccacatgcgagttcacactggcgagaggccttacaagtgtgatcagtgcgggaaggcttacggccggagctgccacctcatcgcacacaagagaacgcacaccggagagaggccctacgagtgtcacgactgtgggaaagctttccagcacccctcccacctcaaagagcacgtgaggaatcacacgggggagaagccctacgcgtgcacgcagtgcggcaaagccttccgctggaagtccaactttaatttgcacaagaagaaccacatggtggagaagacctacgaatgtaaagaatgcgggaaatcctttggcgatctcgtgtcccggaggaaacacatgaggattcacatcgtcaagaaacccgtggaatgtcggcagtgcgggaagaccttccgaaaccagtccatccttaagactcacatgaactctcacactggagagaaaccatacgggtgcgatctctgcgggaaagctttcagcgcgagttcaaacctcaccgcacacaggaagatacacacgcaagagagacgctacgaatgcgccgcctgcgggaaagtcttcggtgactatttatcccggcggaggcacatgagcgttcaccttgtaaagaaacgagttgagtgtaggcagtgtggcaaggccttcaggaaccagtcaacgctgaagacgcacatgcgaagccacacgggggagaaaccgtacgaatgcgatcactgtgggaaggccttcagcataggctccaacctgaatgtgcacaggcggatccacaccggggagaagccctacgaatgccttgtctgcgggaaagccttcagcgaccactcatccctcaggagccacgtgaaaactcaccggggagagaagctctttgtgtcatccgtgtggaaaaggctccagtgagcgcgcctgctttagagacacaggatgattcagaccggaaacagacctcgtgggtgtaagaggaagcctctgtgagctcgcaccttactgggtgcaaaagaatccacggaacttgggagaagtccagttcctgtaaaaactgggaagacgaggcgttctcatcccataggaggtttgtgagaactcacgccgggggtgaaaatgtacgtctgtagcatggagaagccttcagggtacattcagctcttaacaaacacaggaggacttaatggcagcttggcatttaatgtcaaaatccaagccgtggcatttaatgtcaaaatgacttcagaccacttctagccttctgggcccatgagtaataatgagcacactagggagcatctctgtaaacacagtggctggggaaacccttcctagtctcacttgattcctcatgacggaaatcacactaaagagagaaatcagtgaagtaaggaacgtggaaggtcatgaatgggccgcaaaccacggccagctgcttgtctttgtatggcttgccagctaacaatagtggttccatctttaaggaagaagaatgtttgatggagaaaatttgtggccaatgaagtctgaaatacttcctgtcatctgcccctttccagaaaaacttggccgacccttggtctacagcacgggttctcagtcgggcgacgatttggctgtctaggcgtcatttggcaatgtctagagacatttttggtagttagaatggggggaagatactcctgacttgtaataagaagacatcagagatgctgctaagtcggctccagcacacaggagccccccacaacgaagagttagtgcccccaaacgtcactgttgctgaggttgaaaataatcatgcagtcattcctcaattactgcctgcagcaattcctccatttttatgaatcttgtgagcacttacgctaggagaaatttcttttacaaaacttttaaaatacaattagtgctgataattcctatgtggaaatgattccagccatggtcccctcacttgagcatgtgaatattctcacggagagaagccccagcgagattttccggtgaatacgggattgcacttacttctctcatcatgaaaacagagccccgttcataaatttttcatctttatttttaaggttatactcctctaaataacccttaagcctcatcaagaaaggtttgtttatagtatttttactatagcttcatccttgataacgtcctaatttccttctggacaacctccttgaccaatggcatattgagatctatgtgacatgaggatatttctcagtaccactttgttactggtacctgatgcacacggattgcgaccagagcatgatgcctccatcaagtggtaatatgtttgcagcctgctgtccagccaagagtgacagatacttctagtgacttccccggtatccactctcatcttcttccaatatcaagagaatccaggttctgtcagattagtaaggtgtgctaatctaaattttaaaaaatctcttacaggttttcttgcagctggtaccatccatgtctcacagccctggccactgacagatcagcagatgtcaccacatgggcttctgagaaagctcttgaatggggatcgttcttaaacatgaattcctccctgtatgttttgttctttgctttacttttcaccttgcaaagagatccagtacctagtattggaagatccaccttaacgaccgtgcatatgaaaaccacagtctaaggaagtgactgcagaaagctcacagcgaccctggcctcccctgtggcctctttgagtgtctgcagcagccctggacttccagacttctatcacatgagaaaaaataaaactgattattggtttaagctgc

SEQ ID NO: 19375 - DNA, 3953 bp, Homo sapiens
  misc_feature (3)..(3): n is a, c, g, or t
  misc_feature (9)..(9): n is a, c, g, or t
ggnaccatnactctctggagtcgattgccccgagacacatgggccaaggaggggtcagcggcgaattctttcggcctgttggggacccctcgtgtccccacgccagactggacctcccgtatgaacttctcttcgcatcggcggcggcttccgtcacctccgctcccccgatcctattcccagtcgtatgccagcttggagagtcacgtgagagcaagagagtagctttctggttgtcctggtgccctgctcaggcaaactgactgccattctctgaggatggcagctctgtcccccacatttgccacgtccacccaggattccacctgtctccaggactcagaatttcctgtttcttcaaaagaccattcctgtccccagaatttggacctgttcgtgtgcagtggtctggagcctcacacacccagtgttggttcccaggaatcggtgactttccaagatgtcgctgtggactttaccgagaaggagtggcccttgctggattcttctcagagaaaactgtacaaagatgtaatgctggagaactacagcaacctcacttcactggggtatcaggtcggcaaacccagcctcatctcacacttggagcaggaggaggagccgaggacagaggagaggggcgctcaccagggcgcttgtgcagattgggagactccatctaaaaccaagtggtcacttcttatggaagatatttttgggaaggaaacgcccagtggtgtgacgatggaaagagccggtcttggagagaagtccactgaatacgctcacttgttcgaagtctttggcatggaccctcatctcactcagccaatgggaaggcacgctggcaagaggccctatcaccgccgcgactatggggtagcgttcaagggcaggccgcacctcactcagcacatgagcatgtacgacgggagaaaaatgcatgaatgtcatcagtgccaaaaagccttcaccacgagcgcgtccctcacacggcacaggagaatccacaccggggagaagccttacgagtgcagcgactgcgggaaagccttcaacgacccttcagcccttaggagccacgcaagaactcacctcaaagagaagccctttgactgcagtcagtgtggaaatgcattccggaccctctcggccctgaaaatccacatgcgagttcacactggcgagaggccttacaagtgtgatcagtgcgggaaggcttacggccggagctgccacctcatcgcacacaagagaacgcacaccggagagaggccctacgagtgtcacgactgtgggaaagctttccagcacccctcccacctcaaagagcacgtgaggaatcacacgggggagaagccctacgcgtgcacgcagtgcggcaaagccttccgctggaagtccaactttaatttgcacaagaagaaccacatggtggagaagacctacgaatgtaaagaatgcgggaaatcctttggcgatctcgtgtcccggaggaaacacatgaggattcacatcgtcaagaaacccgtggaatgtcggcagtgcgggaagaccttccgaaaccagtccatccttaagactcacatgaactctcacactggagagaaaccatacgggtgcgatctctgcgggaaagctttcagcgcgagttcaaacctcaccgcacacaggaagatacacacgcaagagagacgctacgaatgcgccgcctgcgggaaagtcttcggtgactatttatcccggcggaggcacatgagcgttcaccttgtaaagaaacgagttgagtgtaggcagtgtggcaaggccttcaggaaccagtcaacgctgaagacgcacatgcgaagccacacgggggagaaaccgtacgaatgcgatcactgtgggaaggccttcagcataggctccaacctgaatgtgcacaggcggatccacaccggggagaagccctacgaatgccttgtctgcgggaaagccttcagcgaccactcatccctcaggagccacgtgaaaactcaccggggagagaagctctttgtgtcatccgtgtggaaaaggctccagtgagcgcgcctgctttagagacacaggatgattcagaccggaaacagacctcgtgggtgtaagaggaagcctctgtgagctcgcaccttactgggtgcaaaagaatccacggaacttgggagaagtccagttcctgtaaaaactgggaagacgaggcgttctcatcccataggaggtttgtgagaactcacgccgggggtgaaaatgtacgtctgtagcatggagaagccttcagggtacattcagctcttaacaaacacaggaggacttaatggcagcttggcatttaatgtcaaaatccaagccgtggcatttaatgtcaaaatgacttcagaccacttctagccttctgggcccatgagtaataatgagcacactagggagcatctctgtaaacacagtggctggggaaacccttcctagtctcacttgattcctcatgacggaaatcacactaaagagagaaatcagtgaagtaaggaacgtggaaggtcatgaatgggccgcaaaccacggccagctgcttgtctttgtatggcttgccagctaacaatagtggttccatctttaaggaagaagaatgtttgatggagaaaatttgtggccaatgaagtctgaaatacttcctgtcatctgcccctttccagaaaaacttggccgacccttggtctacagcacgggttctcagtcgggcgacgatttggctgtctaggcgtcatttggcaatgtctagagacatttttggtagttagaatggggggaagatactcctgacttgtaataagaagacatcagagatgctgctaagtcggctccagcacacaggagccccccacaacgaagagttagtgcccccaaacgtcactgttgctgaggttgaaaataatcatgcagtcattcctcaattactgcctgcagcaattcctccatttttatgaatcttgtgagcacttacgctaggagaaatttcttttacaaaacttttaaaatacaattagtgctgataattcctatgtggaaatgattccagccatggtcccctcacttgagcatgtgaatattctcacggagagaagccccagcgagattttccggtgaatacgggattgcacttactctttcatcacggaaacagaccccccgagagaagccccaacgagattttccggtgaatacgggactgcacgtactctctcatcatgaaaacagagccccgttcataaatttttcatctttatttttaaggttatactcctctaaataacccttaagcctcatcaagaaaggtttgtttatagtatttttactatagcttcatccttgataacgtcctaatttccttctggacaacctccttgaccaatggcatattgagatctatgtgacatgaggatatttctcagtaccactttgttactggtacctgatgcacacggattgcgaccagagcatgatgcctccatcaagtggtaatatgtttgcagcctgctgtccagccaagagtgacagatacttctagtgacttccccggttttcttgcagctggtaccatccatgtctcacagccctggccactgacagatcagcagatgtcaccacatgggcttctgagaaagctcttgaatggggatcgttcttaaacatgaattcctccctgtatgttttgttctttgctttacttttcaccttgcaaagagatccagtacctagtattggaagatccaccttaacgaccgtgcatatgaaaaccacagtctaaggaagtgactgcagaaagctcacagcgaccctggcctcccctgtggcctctttgagtgtctgcagcagccctggacttccagacttctatcacatgagaaaaaataaaactgattattggtttaagctgc

SEQ ID NO: 19376 - DNA, 3944 bp, Homo sapiens
  misc_feature (3)..(3): n is a, c, g, or t
  misc_feature (9)..(9): n is a, c, g, or t
ggnaccatnactctctggagtcgattgccccgagacacatgggccaaggaggggtcagcggcgaattctttcggcctgttggggacccctcgtgtccccacgccagactggacctcccgtatgaacttctcttcgcatcggcggcggcttccgtcacctccgctcccccgatcctattcccagtcgtatgccagcttggagagtcacgtgagagcaagagagtagctttctggttgtcctggtgccctgctcaggcaaactgactgccattctctgaggatggcagctctgtcccccacatttgccacgtccacccaggattccacctgtctccaggactcagaatttcctgtttcttcaaaagaccattcctgtccccagaatttggacctgttcgtgtgcagtggtctggagcctcacacacccagtgttggttcccaggaatcggtgactttccaagatgtcgctgtggactttaccgagaaggagtggcccttgctggattcttctcagagaaaactgtacaaagatgtaatgctggagaactacagcaacctcacttcactggggtatcaggtcggcaaacccagcctcatctcacacttggagcaggaggaggagccgaggacagaggagaggggcgctcaccagggcgcttgtgcagattgggagactccatctaaaaccaagtggtcacttcttatggaagatatttttgggaaggaaacgcccagtggtgtgacgatggaaagagccggtcttggagagaagtccactgaatacgctcacttgttcgaagtctttggcatggaccctcatctcactcagccaatgggaaggcacgctggcaagaggccctatcaccgccgcgactatggggtagcgttcaagggcaggccgcacctcactcagcacatgagcatgtacgacgggagaaaaatgcatgaatgtcatcagtgccaaaaagccttcaccacgagcgcgtccctcacacggcacaggagaatccacaccggggagaagccttacgagtgcagcgactgcgggaaagccttcaacgacccttcagcccttaggagccacgcaagaactcacctcaaagagaagccctttgactgcagtcagtgtggaaatgcattccggaccctctcggccctgaaaatccacatgcgagttcacactggcgagaggccttacaagtgtgatcagtgcgggaaggcttacggccggagctgccacctcatcgcacacaagagaacgcacaccggagagaggccctacgagtgtcacgactgtgggaaagctttccagcacccctcccacctcaaagagcacgtgaggaatcacacgggggagaagccctacgcgtgcacgcagtgcggcaaagccttccgctggaagtccaactttaatttgcacaagaagaaccacatggtggagaagacctacgaatgtaaagaatgcgggaaatcctttggcgatctcgtgtcccggaggaaacacatgaggattcacatcgtcaagaaacccgtggaatgtcggcagtgcgggaagaccttccgaaaccagtccatccttaagactcacatgaactctcacactggagagaaaccatacgggtgcgatctctgcgggaaagctttcagcgcgagttcaaacctcaccgcacacaggaagatacacacgcaagagagacgctacgaatgcgccgcctgcgggaaagtcttcggtgactatttatcccggcggaggcacatgagcgttcaccttgtaaagaaacgagttgagtgtaggcagtgtggcaaggccttcaggaaccagtcaacgctgaagacgcacatgcgaagccacacgggggagaaaccgtacgaatgcgatcactgtgggaaggccttcagcataggctccaacctgaatgtgcacaggcggatccacaccggggagaagccctacgaatgccttgtctgcgggaaagccttcagcgaccactcatccctcaggagccacgtgaaaactcaccggggagagaagctctttgtgtcatccgtgtggaaaaggctccagtgagcgcgcctgctttagagacacaggatgattcagaccggaaacagacctcgtgggtgtaagaggaagcctctgtgagctcgcaccttactgggtgcaaaagaatccacggaacttgggagaagtccagttcctgtaaaaactgggaagacgaggcgttctcatcccataggaggtttgtgagaactcacgccgggggtgaaaatgtacgtctgtagcatggagaagccttcagggtacattcagctcttaacaaacacaggaggacttaatggcagcttggcatttaatgtcaaaatccaagccgtggcatttaatgtcaaaatgacttcagaccacttctagccttctgggcccatgagtaataatgagcacactagggagcatctctgtaaacacagtggctggggaaacccttcctagtctcacttgattcctcatgacggaaatcacactaaagagagaaatcagtgaagtaaggaacgtggaaggtcatgaatgggccgcaaaccacggccagctgcttgtctttgtatggcttgccagctaacaatagtggttccatctttaaggaagaagaatgtttgatggagaaaatttgtggccaatgaagtctgaaatacttcctgtcatctgcccctttccagaaaaacttggccgacccttggtctacagcacgggttctcagtcgggcgacgatttggctgtctaggcgtcatttggcaatgtctagagacatttttggtagttagaatggggggaagatactcctgacttgtaataagaagacatcagagatgctgctaagtcggctccagcacacaggagccccccacaacgaagagttagtgcccccaaacgtcactgttgctgaggttgaaaataatcatgcagtcattcctcaattactgcctgcagcaattcctccatttttatgaatcttgtgagcacttacgctaggagaaatttcttttacaaaacttttaaaatacaattagtgctgataattcctatgtggaaatgattccagccatggtcccctcacttgagcatgtgaatattctcacggagagaagccccagcgagattttccggtgaatacgggattgcacttactctttcatcacggaaacagaccccccgagagaagccccaacgagattttccggtgaatacgggactgcacgtactctctcatcatgaaaacagagccccgttcataaatttttcatctttatttttaaggttatactcctctaaataacccttaagcctcatcaagaaaggtttgtttatagtatttttactatagcttcatccttgataacgtcctaatttccttctggacaacctccttgaccaatggcatattgagatctatgtgacatgaggatatttctcagtaccactttgttactggtacctgatgcacacggattgcgaccagagcatgatgcctccatcaagtggtaatatgtttgcagcctgctgtccagccaagagtgacagatacttctagtgacttccccggttttcttgcagctggtaccatccatgtctcacagccctggccactgacagatcagcagatgtcaccacatgggcttctgagaaagctcttgaatggggatcgttcttaaacatgaattcctccctgtatgttttgttctttgctttacttttcaccttgcaaagagatccagtacctagtattggaagatccaccttaacgaccgtgcatatgaaaaccacagtctaaggaagtgactgcagaaagctcacagcgaccctggcctcccctgtggcctctttgagtgtctgcagcagccctggacttccagacttctatcacatggccactcaataccgggtaccgagct

SEQ ID NO: 19377 - DNA, 2181 bp, Homo sapiens
aaagaaaaatggctatggatcgaggtcccctaggggttttattttggcacgtaggcacaggccggatcactcggggagaagccctacgaatgccttgtctgcgggaaagccttcagcgaccactcatccctcaggagccacgtgaaaactcaccggggagagaagctctttgtgtcatccgtgtggaaaaggctccagtgagcgcgcctgctttagagacacaggatgattcagaccggaaacagacctcgtgggtgtaagaggaagcctctgtgagctcgcaccttactgggtgcaaaagaatccacggaacttgggagaagtccagttcctgtaaaaactgggaagacgaggcgttctcatcccataggaggtttgtgagaactcacgccgggggtgaaaatgtacgtctgtagcatggagaagccttcagggtacattcagctcttaacaaacacaggaggacttaatggcagcttggcatttaatgtcaaaatccaagccgtggcatttaatgtcaaaatgacttcagaccacttctagccttctgggcccatgagtaataatgagcacactagggagcatctctgtaaacacagtggctggggaaacccttcctagtctcacttgattcctcatgacggaaatcacactaaagagagaaatcagtgaagtaaggaacgtggaaggtcatgaatgggccgcaaaccacggccagctgcttgtctttgtatggcttgccagctaacaatagtggttccatctttaaggaagaagaatgtttgatggagaaaatttgtggccaatgaagtctgaaatacttcctgtcatctgcccctttccagaaaaacttggccgacccttggtctacagcacgggttctcagtcgggcgacgatttggctgtctaggcgtcatttggcaatgtctagagacatttttggtagttagaatggggggaagatactcctgacttgtaataagaagacatcagagatgctgctaagtcggctccagcacacaggagccccccacaacgaagagttagtgcccccaaacgtcactgttgctgaggttgaaaataatcatgcagtcattcctcaattactgcctgcagcaattcctccatttttatgaatcttgtgagcacttacgctaggagaaatttcttttacaaaacttttaaaatacaattagtgctgataattcctatgtggaaatgattccagccatggtcccctcacttgagcatgtgaatattctcacggagagaagccccagcgagattttccggtgaatacgggattgcacttactctttcatcacggaaacagaccccccgagagaagccccaacgagattttccggtgaatacgggactgcacgtactctctcatcatgaaaacagagccccgttcataaatttttcatctttatttttaaggttatactcctctaaataacccttaagcctcatcaagaaaggtttgtttatagtatttttactatagcttcatccttgataacgtcctaatttccttctggacaacctccttgaccaatggcatattgagatctatgtgacatgaggatatttctcagtaccactttgttactggtacctgatgcacacggattgcgaccagagcatgatgcctccatcaagtggtaatatgtttgcagcctgctgtccagccaagagtgacagatacttctagtgacttccccggtatccactctcatcttcttccaatatcaagagaatccaggttctgtcagattagtaaggtgtgctaatctaaattttaaaaaatctcttacaggttttcttgcagctggtaccatccatgtctcacagccctggccactgacagatcagcagatgtcaccacatgggcttctgagaaagctcttgaatggggatcgttcttaaacatgaattcctccctgtatgttttgttctttgctttacttttcaccttgcaaagagatccagtacctagtattggaagatccaccttaacgaccgtgcatatgaaaaccacagtctaaggaagtgactgcagaaagctcacagcgaccctggcctcccctgtggcctctttgagtgtctgcagcagccctggacttccagacttctatcacatgagaaaaaataaaactgattattggtttaagctgc

SEQ ID NO: 19378 - DNA, 2417 bp, Homo sapiens
  misc_feature (3)..(3): n is a, c, g, or t
  misc_feature (9)..(9): n is a, c, g, or t
ggnaccatnactctctggagtcgattgccccgagacacatgggccaaggaggggtcagcggcgaattctttcggcctgttggggacccctcgtgtccccacgccagactggacctcccgtatgaacttctcttcgcatcggcggcggcttccgtcacctccgctcccccgatcctattcccagtcgtatgccagcttggagagtcacgtgagagcaagagagtagctttctggttgtcctggtgccctgctcaggcaaactgactgccattctctgaggatggcagctctgtcccccacatttgccacgtccacccaggattccacctgtctccaggactcagaatttcctgtttcttcaaaagaccattcctgtccccagaatttggacctgttcgtgtgcagtggtctggagcctcacacacccagtgttggttcccaggaatcggtgactttccaagatgtcgctgtggactttaccgagaaggagtggcccttgctggattcttctcagagaaaactgtacaaagatgtaatgctggagaactacagcaacctcacttcactggggtatcaggtcggcaaacccagcctcatctcacacttggagcaggaggaggagccgaggacagaggagaggggcgctcaccagggcgcttgtgcagattgggagactccatctaaaaccaagtggtcacttcttatggaagatatttttgggaaggaaacgcccagtggtgtgacgatggaaagagccggtcttggagagaagtccactgaatacgctcacttgttcgaagtctttggcatggaccctcatctcactcagccaatgggaaggcacgctggcaagaggccctatcaccgccgcgactatggggtagcgttcaagggcaggccgcacctcactcagcacatgagcatgtacgacgggagaaaaatgcatgaatgtcatcagtgccaaaaagccttcaccacgagcgcgtccctcacacggcacaggagaatccacaccggggagaagccttacgagtgcagcgactgcgggaaagccttcaacgacccttcagcccttaggagccacgcaagaactcacctcaaagagaagccctttgactgcagtcagtgtggaaatgcattccggaccctctcggccctgaaaatccacatgcgagttcacactggcgagaggccttacaagtgtgatcagtgcgggaaggcttacggccggagctgccacctcatcgcacacaagagaacgcacaccggagagaggccctacgagtgtcacgactgtgggaaagctttccagcacccctcccacctcaaagagcacgtgaggaatcacacgggggagaagccctacgcgtgcacgcagtgcggcaaagccttccgctggaagtccaactttaatttgcacaagaagaaccacatggtggagaagacctacgaatgtaaagaatgcgggaaatcctttggcgatctcgtgtcccggaggaaacacatgaggattcacatcgtcaagaaacccgtggaatgtcggcagtgcgggaagaccttccgaaaccagtccatccttaagactcacatgaactctcacactggagagaaaccatacgggtgcgatctctgcgggaaagctttcagcgcgagttcaaacctcaccgcacacaggaagatacacacgcaagagagacgctacgaatgcgccgcctgcgggaaagtcttcggtgactatttatcccggcggaggcacatgagcgttcaccttgtaaagaaacgagttgagtgtaggcagtgtggcaaggccttcaggaaccagtcaacgctgaagacgcacatgcgaagccacacgggggagaaaccgtacgaatgcgatcactgtgggaaggccttcagcataggctccaacctgaatgtgcacaggcggatccacaccggggagaagccctacgaatgccttgtctgcgggaaagccttcagcgaccactcatccctcaggagccacgtgaaaactcacctcaaagagaagcccggtgactgcagtcagtgtggaaatgcatccgggacccctctcggcccctgaaaatccacatgcgagttcacactggcgagagcccttacaagtgtgatcagtgcgggaaggcttacggccggagctgccacctcatcgcacacaagaggacgcgccatcgtgcgcttcgcattaggcaataacgcgcggaaatcatgactgcggcgttcgtggtggtggtgatcggcggcctcggcagtttctggggcgtggtactggcagccttgctggtcggcgtggtgcgcggcattaccgtgcagttctatgcgccggcaggtgaagcatcaatgtatctgctgatgttgctggtattgatcttccgtccgcgcgttattgcctaatgc

SEQ ID NO: 19379 - DNA, 1171 bp, Homo sapiens
  misc_feature (3)..(3): n is a, c, g, or t
  misc_feature (9)..(9): n is a, c, g, or t
ggnaccatnactctctggagtcgattgccccgagacacatgggccaaggaggggtcagcggcgaattctttcggcctgttggggacccctcgtgtccccacgccagactggacctcccgtatgaacttctcttcgcatcggcggcggcttccgtcacctccgctcccccgatcctattcccagtcgtatgccagcttggagagtcacgtgagagcaagagagtagctttctggttgtcctggtgccctgctcaggcaaactgactgccattctctgaggatggcagctctgtcccccacatttgccacgtccacccaggattccacctgtctccaggactcagaatttcctgtttcttcaaaagaccattcctgtccccagaatttggacctgttcgtgtgcagtggtctggagcctcacacacccagtgttggttcccaggaatcggtgactttccaagatgtcgctgtggactttaccgagaaggagtggcccttgctggattcttctcagagaaaactgtacaaagatgtaatgctggagaactacagcaacctcacttcactggggtatcaggtcggcaaacccagcctcatctcacacttggagcaggaggaggagccgaggacagaggagaggggcgctcaccagggcgcttgtgcagattgggagactccatctaaaaccaagtggtcacttcttatggaagatatttttgggaaggaaacgcccagtggtgtgacgatggttttcttgcagctggtaccatccatgtctcacagccctggccactgacagatcagcagatgtcaccacatgggcttctgagaaagctcttgaatggggatcgttcttaaacatgaattcctccctgtatgttttgttctttgctttacttttcaccttgcaaagagatccagtacctagtattggaagatccaccttaacgaccgtgcatatgaaaaccacagtctaaggaagtgactgcagaaagctcacagcgaccctggcctcccctgtggcctctttgagtgtctgcagcagccctggacttccagacttctatcacatgagaaaaaataaaactgattattggtttaagctgctatggatatttcattgtttttcttttaaatttatttattttaagatagggtctccctatgttgcc

SEQ ID NO: 19380 - DNA, 710 bp, Homo sapiens
tggagtcgattgccccgagacacatgggccaaggaggggtcagcggcgaattctttcggcctgttggggacccctcgtgtccccacgccagactggacctcccgtatgaacttctcttcgcatcggcggcggcttccgtcacctccgctcccccgatcctattcccagtcgtgtaagccctgctttccttaacccttctccccctcagttccaggggtcacgggaggcctatctggcggtgaggactaagagggtacgagggtcgggggctaaagagctaggcatccagacgaggggtgcgtttagatctcgcgatcagcgatatgaaaagctggggacgcgaaggataaaattggaccattgcagctagtgatgagagaagcattggtcacctgatcctgaaaagccctaagtctctggtgggggcggaaaagcccggctgaagtgaattcaagagtttgggggcagttcaggagattggggggcgtcaggatttggacatcgcgaggagaaatcaccttctttctgcgctgtagtcaattttatctcgtgaatgtcagcacattggtgttcttattagcacttaccttgagtaccttttatatttttaatttaagaccttctggttgcacttttttatttattttaattttagtggactcttgtaaatagcctatatgtatatttactattcagttcaacattttgtt

SEQ ID NO: 19381 - DNA, 397 bp, Homo sapiens
gttcttcccttttgcctcttcttactactctctctctgcagctcattcctctttgctactctttacggtgaattctaatggccctcgcactctcagctcagggagtatactgggtcctgcctggtgtccagctccctgtgctgtggcctggaaactctttcaggccatgagctgttttcaggcaagaggactgtccatctaggccagaggcagaagtctgcaactcttaattatatttcctgtccctggttcttttctcacagtgccttctatttatccagaggaattccagcaccagcgatggtatgcaaacctttagtggcacacgttgactcagatacagcccagattccttggccatgctttccaggtcttccataaaccattctgttctttc

SEQ ID NO: 19382 - DNA, 280 bp, Homo sapiens
tatttgttgagagatgagtgtgatctgttatatggataatttttataaatgtataatgtgtacatgaaaggaatgttgattattaacatttcattttatattccactcctttgtatgtagtttcctccacacatcatttaatctctttcagtaagaatcaattaatatcagtttttcatctgcaaatgtacttattttattcttcaatgtagtttagctggaaaccccatttctaccaaaaatacaaacagattagccgggcatggtgttgtgtacctcc

SEQ ID NO: 19383 - DNA, 638 bp, Homo sapiens
attcaggaactggtgacccaatttgggagaggctaaggatacttttcttatttcctgttggcctttggttgttgtacacttctaacatcttaggtttcttcttttagtttatattgaaaactttaaaagttaacatagtatgtattagaaaattaaactgtaaatatacagttattactgttgtctttttaaataattcttatcctcagtggtatcacttatacttgaatatcttttgcttaacgctggagaaaaactgtgaccagtttttaccaattaaaatcacatctcattacaatttcagtcttgtattaaatttgaggcagtgtgttataatgtaattaattgaagctgttacagtcaaacctgtattcaaagtccagccagtgttttttcttctgtaaaattgtgataatagtcataggcaaattccttattacctggtaaagaaagcttctctttctgaatcctgttttccctaaaaccagaaatataatttttaataatttttttctatagagacagggtctcactctgtcacctaggctggaatacagtgacaggatcataactcattgcagcctcagcctcccaggctaaagtattcttctgcctcagcctcccaagtagctgggacc

SEQ ID NO: 19384 - DNA, 1699 bp, Homo sapiens
taaagtgaggtgatccagtcggtaaacgctttgaaaaagaatagctgtcccctgagcgggcattagtcgcgtgtgaggtcagggcccatcattgcgcgtgttgggagcgccgcgctggtctatgagcgagcgcctcggcttgtggctgggccgggccggggcggggctgtcttcccgcggagcgtgctgggggcgggtcgcgccgggccgggccgctagtgcgcatgggcgggcgtcctcggctctaactgccgccactttccacacgctgggagggccgttacctcagagatacccgtggccggcatgttggttgaaaaagcttcccggaagggagacgaagagaaaggagaggagcagctcgtgatcatccccggtagcgagtacgcggcgaagtaggcggcggcggagggagcgctgatgaagatggatgtgtcagtgagggccgcgggctgctccgacgacctcagctctggggaggccgacgtagacccaaagctcctggagctcaccgctgacgaggagaagtgccgcagcatccgcaggcagtaccggcagctcatgtactgcgtgcggcagaaccgggaggacatcgtgagctcggcgaacaactccttaaccgaggctctggaggaagccaacgtcctctttgatggcgtgagccgaaccagagaagcagccctcgacgcccggtttcttgttatggcttctgatttgggtaaagaaaaggcaaagcagttaaactcagatatgaacttctttaatcagttagcattttgtgactttctgtttctgttcgtgggtctgaattggatggaaggcgatcctgacaagttgagtgattgtgatgatagcatagctctttccttctggaaggcaatagaaaaggaagcaacatcctggatggtaaaagctgagacattccattttgtttttggttcattcaagctagaacgttctgcaccaaagccccgacttgaacaccagaaaaaagttcgcaagatggaagaaaatggcaacatgcctacaaagttgcagaagttggacctgagtagttatccagaagcgacagaaaaaaacgtagaaaggattttgggattgttgcaaacctactttcgaaagtatcctgatactcctgtgtcctattttgagtttgtgattgatccaaactctttttctcgtactgtggagaatatattttatgtttcttttattgtaagagatggttttgcaagaataaggcttgatgaagacaggctgccaatattagagccgatgaatgttaaccagatgggtgagggaaatgattccagttgccatggcaggaaacagggagttatatctttgactttacaggagtggaaaaacattgtggcagcttttgaaatttctgaggctatgattacatactcctcatactaaagatttcttagtatagcatcctttttgtgttttttttctgaagttagatggagagtaaaatgtaaactgaagcacatattgtatctcttgtaaagtgaaaaagtattttcaagaacatcagacattgttttactgtgcagcatatttttcttagtaatttataaggtcatgatcttctgttattaaaacaaattcactggcatatttatgggaacgttttattgaatgccctttaagactattaataaaaacaagttttggataccaaaataaggga

SEQ ID NO: 19385 - DNA, 201 bp, Homo sapiens
atgctggtctagtgactagagtctcctgaattaagcagcctagattctaccctgtcttgactactagctgtatgagcttgagggataccccaaacctctatgaccttggtgtctgcatacactccatgcactggtatttctatatcctagggggtggagtagttgggtgagttatacttcctgaaatattaggctatagct

SEQ ID NO: 19386 - DNA, 450 bp, Homo sapiens
acaaaagtggcaaacaacccatatttccattaactggtgagtggataaagtgtggtatatgcatagatgataatattattatgcaataaaaatgtttattatgcaataaaaaggacgcactgctacagcatggatatgccttgaaaacattagtgaggggagtcagtcacaaaggaacacattgtatgacttcatttataggaaatgtctggaataggcaaattcatagagacaaactagtttcctagactggtgggcagggggatggggaggagttggggaggaatagggagtgactgctaatgggtacagggtttatttggggagtgacgaaaatgttctaaaattgactgtggtgatagctacacaactctcaatatactgaaaactatttgaatgtactctattttttaaaaattatttttgtggtaaaatacataaagtttgcca

SEQ ID NO: 19387 - DNA, 475 bp, Homo sapiens
atcatgaagcattcaaataaagggaagtagagattctgttgagaatataatgaaatatctcttgttcttttgcttttaagaagcttattattagaaaactgggaacactttaacacatggaaaggtatagccatactggaaatgtcccaaggaagtttgtgacaaatgaccaaatctttttcagttttaaatgttttgagatgcaagattatatgtatttaggggaaaggaaaagggggacagtggtagagataaagcaaatggagtggaacgtgagctgggtcagaaaaaaaaaatgagtacaggccatttcaggcattgaacatcggtaggggagcagatgattcaggtgcaaagaaaatcactccagcactttgttctgagaaaaaatccacagtcagtgcagcttggttaaaaacaggaatgttcaaagaggtaccagtcttgtaggaatcaaatgctcatatgtatgaat

SEQ ID NO: 19388 - DNA, 166 bp, Homo sapiens
cttatgctatccaggaaagagcatatatgagaaataactctggtcttggaggctgttattttgttgtgaggagagaaacagatacaagtgagcacttagggctttggggcaaagccatttcttttgatctttcttcccagccagagtcttattggaaagagagaag

SEQ ID NO: 19389 - DNA, 367 bp, Homo sapiens
ttttgagatggagttttgctcttgtctcccaggctggagtgcagtggcgcgatctcggctcactgcaacctccgcctcctgggttcaagcgactctgctgcctcagcctcccttgtagctgggattacaggcacccaccaccatccctggctaattttttgtattttcagtagagacagggtttcaccatgttggacaggctggtcttgaactcctgacctcaggtgatccactcgcctcggcctcccaaagtgctgtgattacaggcatgagacaccatgccccgccagtacatgccttttaattccatagaaataactttagaaccttgaggcactgtgttgttagtactgcagctccttcaagt

SEQ ID NO: 19390 - DNA, 632 bp, Homo sapiens
ttacattagaaattttgctatcaggttcaatttagcaaataaggctaagaaaagtttttgtcttgtctatttgcaagcctgagtgatgtagatatttataagcatggctttataatattttacttaatgggaaaaaaatctatgctaattgtatttccaatccaataaagtgaaatttgtctagcagcagggtgtggccagagtaaatagaccgtaaggaaaacactcacgaaggagtgggaatggtatttctgaaaccccactggacaacaataattattaacaatttatctcaagcttgctcctctcttagtggcatttttttaagtcgtttccttcctagaagtctttgagcctagaaaagccaagttttgtgtttatttctttcacatacattaatgtcttgagtcagatatcactaatttgaaaatgggtttcatcctttttggtgaaaataatttggagttcaaccaggttggtacctgggtacctggtactgtcccctcaggtgtcatatgactaatcatgaaagtcctttggttcacggttcacaaccttttcatagacagatattatgtagcaagttaaccttaaggacacataccttaaaggactgttgagcaaaaaaaaaa

SEQ ID NO: 19391 - DNA, 217 bp, Homo sapiens
tttgaaaccagcctcggcaacatggcaaaactccatctctacaaaaaaaaaaaaaaaaaaaaaaaaaattagctggacatggcagcacatgcctgtggtccccgctacttgggaggctgaggtgaaagcatcaccttagcctggaaggtcgaggttacagagagccaagatcacagcactgtatttcagcctggggggacggagtgaaaccctgcct

SEQ ID NO: 19392 - DNA, 315 bp, Homo sapiens
gctggtgggagtccgtgctccccggggctggccagagatgcaggactgagccccatctttcacccctgccaagcgagccccaggccctcttctcccggccagccggcctcctgtccttgcggcctgagtacactctgatcactgtctctgttccctgtctccctcaaccccgccttctcctgctcctggcttctccggctctcagaggaagcccaggaggaagaggaagttcaagaagaggagaaccgagaccaaactcactgctcctaagatccagagggagaaagtggacttcgatgacatccagaagagcgt

SEQ ID NO: 19393 - DNA, 86 bp, Homo sapiens
cctgggctttgtgactttggttagtgccactaccttcttccctcctttcccccttcaatttggaaataaatttctgtatatgttgc

SEQ ID NO: 19394 - DNA, 434 bp, Homo sapiens
cttgaggggatgcaccagaagcaaggaagtaactgttgacaaagtgagacgggccacaaagtagagcttttcttgacatctgatggcagcacaatagtaagctgcaccgcttctgtggacattgcagatgaacacataaaacctctccctcaaccagatcctgtacgtgacaatgaagaaacacatgctcaagtgctgaaaaatagattagcaaaaaaaagaagtttgacataacccaagacaacatgttcgttaaatttcatagatgcaaaagagagaatgcttctgttgcaaaacatagaagtcttctgcaagcagctgccacgcccatatctcagagccctagtgagttgtagagaagtttcaagagttagagtatttcctctgtacagtaactaaaataataaaagaccacaatttttattcataaaaat

SEQ ID NO: 19395 - DNA, 362 bp, Homo sapiens
cttgaggggatgcaccagaagcaaggaagtaactgttgacaaagtgagacggaatagaagaaaaagatggaaagagtcagaaagaacagaaacattgatattcaaccatttgaaacaagaaagaaactctaagcacagaaggcaaagagaagtttgacataacccaagacaacatgttcgttaaatttcatagatgcaaaagagagaatgcttctgttgcaaaacatagaagtcttctgcaagcagctgccacgcccatatctcagagccctagtgagttgtagagaagtttcaagagttagagtatttcctctgtacagtaactaaaataataaaagaccacaatttttattcataaaaat

SEQ ID NO: 19396 - DNA, 424 bp, Homo sapiens
tgtgagtatgtgtgtgtctgtgtgtgtgcacatcatgtattgtagactctgctgttataagatttagtatttacagcgtcctttgttaaggggacctgactccactttattcaaggtgttctggaattttgaactatcccttgtcagaaaattaggtgacagatcctgactctattgtgttaattcaaagaatatttctgttttccagaatcatcatttttgttcttttttcttgatttgtgcttgacttttttttccttttctactattccgatgatcatataacactttagtatgatgctcattaatttcacttacaggaatggcatggccacatagtctcaaaaaatctatgcaggtcaaaccaacccattctgataactgctctggccctgctggaactacagaaactgcctctttgtct

SEQ ID NO: 19397 - DNA, 436 bp, Homo sapiens
gcctgcaccttatgtgtgtgtgttggtgttaggctggtgaaataatgtcgtgcagctagtaagccttccatccttttgacatactgcatataatattatgatccagatcccaatccagattctaactgtccttcaagtctcaccttttccactaatgcagtgacagtgggaaaatcacagaactcagctcaactggataactgcctcttctcagtaagcctgcggtattgggtcgaacagtaggaaacagacttttgtttcttttaacacagctgaatagtggccagttttctatgactcagcgcactttgcccctggttcggcagatagtcccctgtttgctgttgttggtttatgcaggggctctcagcctggctgcacattacaatcaccctgggagcttttaaacacaacccaccgagccctatgcagtctc

SEQ ID NO: 19398 - DNA, 219 bp, Homo sapiens
cataagttttcacttcttttttctgctagaactattaagttcacagggctcagacagagacttgaggactcttacagttattgattgtgactgcacaagatgagggtaatgtttatttgtcattataaatctggaaagataaaccctgtgctttccctgttaaggggctggataggaatacgtgttcagcaagtcagtaaaaaaaaaaaaaaaaaattg

SEQ ID NO: 19399 - DNA, 436 bp, Homo sapiens
tccacttaggatgtagaatactgcaagaaaatgtcccttccgtcctaacaatgtgaaaaagcaggtacaaaatcataacttttcttgagcccatcagaaagccaaggccacaaggcaaccaaataaaggagagatagtgttaggggagctgagttcatagaaatgaataggagtgagaggaaatagaaggagagatagtgacccatcaactgtttcaactttggcaaagatgtggctgtcttacaagtgggtaagaaaaagacaataaaaatgttaacaaatttgtaaagtccacatgtggcctagcatatcagtttagaatagctgaataggattctagacacgagagtgcgtgcaaaggcaaccttttttgtacaggcctcccctggggttcatggagaaaagtgggaacaggtcaggaaagggagggactgtt

SEQ ID NO: 19400 - DNA, 228 bp, Homo sapiens
tccatattgtagcatgtgtcagaatttcccttcctttaattcttttaaagctgaaaataacattctattttatgtgtatgctacattttgtttctccattcatcccccaatggtcactgggattatcttcacattttgttgctgtgaataacgctgctatgaatatgtgtgcaaatatttgatttttggggtatatacccagaagtggaactgctggatcttacaata

SEQ ID NO: 19401 - DNA, 1748 bp, Homo sapiens
agctttgcgcagtggcagtatcgtagccaatgaggtttatccgaggcgcgattattgctaattgaaaacttttcccaataccccgccatgacgacttgaaatatagtcggcattggcaatttttgacagtctctacggagactgcatgtgctggtgaagctcctggaagtgatggaaggaatggacaaggagacgtttgagttcaagtttgggaaggaactaacattcaccactgtactgagtgaccaacaggtggtggagctgatccctgggggtgcaggcatcgtcgtgggatatggggaccgttctcgtttcatccaactggtccagaaggcacggctagaggagagcaaggagcaggtggcagctatgcaggcaggtctgctgaaggtggtaccacaggctgtgctggacttgctgacctggcaagagttggagaagaaagtgtgtggggatccagaggtcactgtggatgctctgcgcaagctcacccggtttgaggacttcgagccatctgactcgcgggtgcagtatttctgggaggcactgaacaacttcaccaacgaggaccggagccgcttcctgcgctttgtcacgggccgcagtcgcctgccagcacggatctacatctacccagacaagctgggctacgagaccacagacgcgctgcccgagtcttccacttgctccagcaccctcttcctgccacactatgccagtgccaaggtatgcgaggagaagctccgctatgcggcctacaactgcgtggccatcgacactgacatgagcccttgggaggagtgaggcgtgccgccggctgtgggaccagcaagactgcacgtgtccctcttggccttgcccagggcgaagacaccttccctgccctggtttggctgacgtgctcagcaaaaccccatgtgccctgctcctgtgtgcagttggggtaggggcagctggcatggtcaggtaacactagtggcccagccccgcagacccacaagccctacccgtgctggggcttgcttcccgaggtatttcacctcttaagagggaatcttccacaagcccagcacaagctgccaggcctgagctacttgaagggggccatctaggtccccaacccatggactttgcctccattttcagctccgccttttttctcctattttctctctggctttcttcagccatgactcacaactaaaaacataaaacactggaggttagtggaggcccctccccaagcagggagcctgggatgggcagggagtgatagccaaactccttggtcacctgctccaagaaggaagcagtagctgagcacctgccctcacatactgctcttttcccctctccctccacaccagagatgtggtgagctctgttcttctaccaacccagtctcaacacacaaagtgccaccaccttccctgactcagaacccacatccactcaatgtgaactctactaccacgacctccccatattcctcacttctccatcacctccagcctgactccctgtctgccctttcacccccaagattttgcacaggttaaggccagttatggcctttttgaaatctgtaatagctcccctttccccaactctaaagcctagaccttaaacctgttcctagagctatgcacacccctgccccagtttaccgttcctccctcagggcctccgtgacactccatgaaaagaagttcttgcataccggaaagttgaataaatggatgaattca

SEQ ID NO: 19402 - DNA, 3613 bp, Homo sapiens
cggccgctgccagcagcgctggctttcgtgccgcgagaggtgctctacaagctttacaaggacccagcgggaccgtcgcgcgtgcttctgccggtgtgggaggcagagggcctggggctgcgtgtgggcgccgcaggcccagcccccggtaccggctccgggcccctccgcgccgcccgcgacagcattgagctccggcgcggcgcctgcgtgcgcaccacgggcgaggagctgtgcaatggccacgggctctgggtgaagctgacaaaggtgcgctcttccctgcccaggacccggtaaaagacccctggggccagagaaacctctggctgtttgccttttctcccctgtattgagttggcattgcgttcggcgccctttgccctgggctgggcacgacaggcggctgggcagttccctgacggctgtccccatcctacgcgtcccggcaggagcagctggcagagcacctgggcgactgcgggctgcaggaaggctggctgctggtgtgccgcccggcggagggcggagcccgcctggtacccatcgacactcccaaccacctccagcggcagcagcagctctttggcgtggattatcggccggtgctcaggtgggaacaggtggtggacctgacatactcacatcgcctgggatcgagacctcagccggcagaggcatacgcagaagctgtacaaaggctactctatgtacccccgacatggacctacgagtgcgacgaggacctgatccacttcttgtatgaccacctgggcaaggaggatgagaacctgggtagcgtgaagcagtatgtggagagcatagacgtttcctcctacacggaggagttcaacgtgtcctgcctgacagacagcaatgccgatacctactgggagagcgatgggtcccagtgccaacactgggtacggcttactatgaagaagggcaccattgtcaagaagctgctactcacagtggataccacagatgacaactttatgccaaagcgggtggtggtctatgggggtgaaggggacaacctgaagaagctgagtgacgtgagcattgacgagaccctcatcggggatgtctgtgtcctggaggacatgaccgtccacctcccgatcatcgagatccgcatcgtggagtgccgagatgatgggattgatgttcgtctccgaggggtcaagatcaagtcatctagacagcgggaactagggttgaatgcagacctgttccagccaactagtctggtgcgatatccacgcctagaaggcaccgaccctgaagtactgtaccgcagagctgtcctcctgcagagattcatcaagatcctcgatagtgtcctgcaccacctggtacctgcctgggaccacacactgggcaccttcagtgagattaagcaagtgaagcagttcctactgctgtcccgccagcggccaggcctggtggctcagtgcctgcgtgactctgagagcagcaagcccagcttcatgccacgcctatacatcaaccgccgtcttgccatggaacaccgtgcctgcccctctcgagaccctgcctgcaagaatgcagtcttcacccaggtatatgaaggcctcaagccctctgacaaatatgaaaagcccctggactacaggtggcccatgcgctatgaccagtggtgggagtgtaaatttattgcagaaggcatcattgaccaagggggtggtttccgggacagcctggcagatatgtcagaagagctgtgccctagctcagcggatacccccgtgcccctgcccttctttgtacgcacagccaaccagggcaatggcactggtgaggctcgggacatgtatgtacccaacccctcctgccgagactttgccaagtatgaatggatcggacagctgatgggggctgcccttcggggtaaggagttcctggtcctggccctgcctggttttgtgtggaagcagctttctggtgaggaggtgagctggagcaaggacttcccagctgtggactctgtgctggtgaagctcctggaagtgatggaaggaatggacaaggagacgtttgagttcaagtttgggaaggaactaacattcaccactgtactgagtgaccaacaggtggtggagctgatccctgggggtgcaggcatcgtcgtgggatatggggaccgttctcgtttcatccaactggtccagaaggcacggctagaggagagcaaggagcaggtggcagctatgcaggcaggtctgctgaaggtggtaccacaggctgtgctggacttgctgacctggcaagagttggagaagaaagtgtgtggggatccagaggtcactgtggatgctctgcgcaagctcacccggtttgaggacttcgagccatctgactcgcgggtgcagtatttctgggaggcactgaacaacttcaccaacgaggaccggagccgcttcctgcgctttgtcacgggccgcagtcgcctgccagcacggatctacatctacccagacaagctgggctacgagaccacagacgcgctgcccgagtcttccacttgctccagcaccctcttcctgccacactatgccagtgccaaggtatgcgaggagaagctccgctatgcggcctacaactgcgtggccatcgacactgacatgagcccttgggaggagtgaggcgtgccgccggctgtgggaccagcaagactgcacgtgtccctcttggccttgcccagggcgaagacaccttccctgccctggtttggctgacgtgctcagcaaaaccccatgtgccctgctcctgtgtgcagttggggtaggggcagctggcatggtcaggtaacactagtggcccagccccgcagacccacaagccctacccgtgctggggcttgcttcccgaggtatttcacctcttaagagggaatcttccacaagcccagcacaagctgccaggcctgagctacttgaagggggccatctaggtccccaacccatggactttgcctccattttcagctccgccttttttctcctattttctctctggctttcttcagccatgactcacaactaaaaacataaaacactggaggttagtggaggcccctccccaagcagggagcctgggatgggcagggagtgatagccaaactccttggtcacctgctccaagaaggaagcagtagctgagcacctgccctcacatactgctcttttcccctctccctccacaccagagatgtggtgagctctgttcttctaccaacccagtctcaacacacaaagtgccaccaccttccctgactcagaacccacatccactcaatgtgaactctactaccacgacctccccatattcctcacttctccatcacctccagcctgactccctgtctgccctttcacccccaagattttgcacaggttaaggccagttatggcctttttgaaatctgtaatagctcccctttccccaactctaaagcctagaccttaaacctgttcctagagctatgcacacccctgccccagtttaccgttcctccctcagggcctccgtgacactccatgaaaagaagttcttgcataccggaaagttgaataaatggatgaattca

SEQ ID NO: 19403 - DNA, 3431 bp, Homo sapiens
cggccgctgccagcagcgctggctttcgtgccgcgagaggtgctctacaagctttacaaggacccagcgggaccgtcgcgcgtgcttctgccggtgtgggaggcagagggcctggggctgcgtgtgggcgccgcaggcccagcccccggtaccggctccgggcccctccgcgccgcccgcgacagcattgagctccggcgcggcgcctgcgtgcgcaccacgggcgaggagctgtgcaatggccacgggctctgggtgaagctgacaaaggagcagctggcagagcacctgggcgactgcgggctgcaggaaggctggctgctggtgtgccgcccggcggagggcggagcccgcctggtacccatcgacactcccaaccacctccagcggcagcagcagctctttggcgtggattatcggccggtgctcaggtgggaacaggtggtggacctgacatactcacatcgcctgggatcgagacctcagccggcagaggcatacgcagaagctgtacaaaggctactctatgtacccccgacatggacctacgagtgcgacgaggacctgatccacttcttgtatgaccacctgggcaaggaggatgagaacctgggtagcgtgaagcagtatgtggagagcatagacgtttcctcctacacggaggagttcaacgtgtcctgcctgacagacagcaatgccgatacctactgggagagcgatgggtcccagtgccaacactgggtacggcttactatgaagaagggcaccattgtcaagaagctgctactcacagtggataccacagatgacaactttatgccaaagcgggtggtggtctatgggggtgaaggggacaacctgaagaagctgagtgacgtgagcattgacgagaccctcatcggggatgtctgtgtcctggaggacatgaccgtccacctcccgatcatcgagatccgcatcgtggagtgccgagatgatgggattgatgttcgtctccgaggggtcaagatcaagtcatctagacagcgggaactagggttgaatgcagacctgttccagccaactagtctggtgcgatatccacgcctagaaggcaccgaccctgaagtactgtaccgcagagctgtcctcctgcagagattcatcaagatcctcgatagtgtcctgcaccacctggtacctgcctgggaccacacactgggcaccttcagtgagattaagcaagtgaagcagttcctactgctgtcccgccagcggccaggcctggtggctcagtgcctgcgtgactctgagagcagcaagcccagcttcatgccacgcctatacatcaaccgccgtcttgccatggaacaccgtgcctgcccctctcgagaccctgcctgcaagaatgcagtcttcacccaggtatatgaaggcctcaagccctctgacaaatatgaaaagcccctggactacaggtggcccatgcgctatgaccagtggtgggagtgtaaatttattgcagaaggcatcattgaccaagggggtggtttccgggacagcctggcagatatgtcagaagagctgtgccctagctcagcggatacccccgtgcccctgcccttctttgtacgcacagccaaccagggcaatggcactggtgaggctcgggacatgtatgtacccaacccctcctgccgagactttgccaagtatgaatggatcggacagctgatgggggctgcccttcggggtaaggagttcctggtcctggccctgcctggttttgtgtggaagcagctttctggtgaggaggtgagctggagcaaggacttcccagctgtggactctgtgctggtgaagctcctggaagtgatggaaggaatggacaaggagacgtttgagttcaagtttgggaaggaactaacattcaccactgtactgagtgaccaacaggtggtggagctgatccctgggggtgcaggcatcgtcgtgggatatggggaccgttctcgtttcatccaactggtccagaaggcacggctagaggagagcaaggagcaggtggcagctatgcaggcaggtctgctgaaggtggtaccacaggctgtgctggacttgctgacctggcaagagttggagaagaaagtgtgtggggatccagaggtcactgtggatgctctgcgcaagctcacccggtttgaggacttcgagccatctgactcgcgggtgcagtatttctgggaggcactgaacaacttcaccaacgaggaccggagccgcttcctgcgctttgtcacgggccgcagtcgcctgccagcacggatctacatctacccagacaagctgggctacgagaccacagacgcgctgcccgagtcttccacttgctccagcaccctcttcctgccacactatgccagtgccaaggtatgcgaggagaagctccgctatgcggcctacaactgcgtggccatcgacactgacatgagcccttgggaggagtgaggcgtgccgccggctgtgggaccagcaagactgcacgtgtccctcttggccttgcccagggcgaagacaccttccctgccctggtttggctgacgtgctcagcaaaaccccatgtgccctgctcctgtgtgcagttggggtaggggcagctggcatggtcaggtaacactagtggcccagccccgcagacccacaagccctacccgtgctggggcttgcttcccgaggtatttcacctcttaagagggaatcttccacaagcccagcacaagctgccaggcctgagctacttgaagggggccatctaggtccccaacccatggactttgcctccattttcagctccgccttttttctcctattttctctctggctttcttcagccatgactcacaactaaaaacataaaacactggaggttagtggaggcccctccccaagcagggagcctgggatgggcagggagtgatagccaaactccttggtcacctgctccaagaaggaagcagtagctgagcacctgccctcacatactgctcttttcccctctccctccacaccagagatgtggtgagctctgttcttctaccaacccagtctcaacacacaaagtgccaccaccttccctgactcagaacccacatccactcaatgtgaactctactaccacgacctccccatattcctcacttctccatcacctccagcctgactccctgtctgccctttcacccccaagattttgcacaggttaaggccagttatggcctttttgaaatctgtaatagctcccctttccccaactctaaagcctagaccttaaacctgttcctagagctatgcacacccctgccccagtttaccgttcctccctcagggcctccgtgacactccatgaaaagaagttcttgcataccggaaagttgaataaatggatgaattca

SEQ ID NO: 19404 - DNA, 3095 bp, Homo sapiens
  misc_feature (18)..(18): n is a, c, g, or t
  misc_feature (20)..(20): n is a, c, g, or t
tgatgtttccgtagggcngntagagccatcgacactcccaaccacctccagcggcagcagcagctctttggcgtggattatcggccggtgctcaggtgggaacaggtggtggacctgacatactcacatcgcctgggatcgagacctcagccggcagaggcatacgcagaagctgtacaaaggctactctatgtacccccgacatggacctacgagtgcgacgaggacctgatccacttcttgtatgaccacctgggcaaggaggatgagaacctgggtagcgtgaagcagtatgtggagagcatagacgtttcctcctacacggaggagttcaacgtgtcctgcctgacagacagcaatgccgatacctactgggagagcgatgggtcccagtgccaacactgggtacggcttactatgaagaagggcaccattgtcaagaagctgctactcacagtggataccacagatgacaactttatgccaaagcgggtggtggtctatgggggtgaaggggacaacctgaagaagctgagtgacgtgagcattgacgagaccctcatcggggatgtctgtgtcctggaggacatgaccgtccacctcccgatcatcgagatccgcatcgtggagtgccgagatgatgggattgatgttcgtctccgaggggtcaagatcaagtcatctagacagcgggaactagggttgaatgcagacctgttccagccaactagtctggtgcgatatccacgcctagaaggcaccgaccctgaagtactgtaccgcagagctgtcctcctgcagagattcatcaagatcctcgatagtgtcctgcaccacctggtacctgcctgggaccacacactgggcaccttcagtgagattaagcaagtgaagcagttcctactgctgtcccgccagcggccaggcctggtggctcagtgcctgcgtgactctgagagcagcaagcccagcttcatgccacgcctatacatcaaccgccgtcttgccatggaacaccgtgcctgcccctctcgagaccctgcctgcaagaatgcagtcttcacccaggtatatgaaggcctcaagccctctgacaaatatgaaaagcccctggactacaggtggcccatgcgctatgaccagtggtgggagtgtaaatttattgcagaaggcatcattgaccaagggggtggtttccgggacagcctggcagatatgtcagaagagctgtgccctagctcagcggatacccccgtgcccctgcccttctttgtacgcacagccaaccagggcaatggcactggtgaggctcgggacatgtatgtacccaacccctcctgccgagactttgccaagtatgaatggatcggacagctgatgggggctgcccttcggggtaaggagttcctggtcctggccctgcctggttttgtgtggaagcagctttctggtgaggaggtgagctggagcaaggacttcccagctgtggactctgtgctggtgaagctcctggaagtgatggaaggaatggacaaggagacgtttgagttcaagtttgggaaggaactaacattcaccactgtactgagtgaccaacaggtggtggagctgatccctgggggtgcaggcatcgtcgtgggatatggggaccgttctcgtttcatccaactggtccagaaggcacggctagaggagagcaaggagcaggtggcagctatgcaggcaggtctgctgaaggtggtaccacaggctgtgctggacttgctgacctggcaagagttggagaagaaagtgtgtggggatccagaggtcactgtggatgctctgcgcaagctcacccggtttgaggacttcgagccatctgactcgcgggtgcagtatttctgggaggcactgaacaacttcaccaacgaggaccggagccgcttcctgcgctttgtcacgggccgcagtcgcctgccagcacggatctacatctacccagacaagctgggctacgagaccacagacgcgctgcccgagtcttccacttgctccagcaccctcttcctgccacactatgccagtgccaaggtatgcgaggagaagctccgctatgcggcctacaactgcgtggccatcgacactgacatgagcccttgggaggagtgaggcgtgccgccggctgtgggaccagcaagactgcacgtgtccctcttggccttgcccagggcgaagacaccttccctgccctggtttggctgacgtgctcagcaaaaccccatgtgccctgctcctgtgtgcagttggggtaggggcagctggcatggtcaggtaacactagtggcccagccccgcagacccacaagccctacccgtgctggggcttgcttcccgaggtatttcacctcttaagagggaatcttccacaagcccagcacaagctgccaggcctgagctacttgaagggggccatctaggtccccaacccatggactttgcctccattttcagctccgccttttttctcctattttctctctggctttcttcagccatgactcacaactaaaaacataaaacactggaggttagtggaggcccctccccaagcagggagcctgggatgggcagggagtgatagccaaactccttggtcacctgctccaagaaggaagcagtagctgagcacctgccctcacatactgctcttttcccctctccctccacaccagagatgtggtgagctctgttcttctaccaacccagtctcaacacacaaagtgccaccaccttccctgactcagaacccacatccactcaatgtgaactctactaccacgacctccccatattcctcacttctccatcacctccagcctgactccctgtctgccctttcacccccaagattttgcacaggttaaggccagttatggcctttttgaaatctgtaatagctcccctttccccaactctaaagcctagaccttaaacctgttcctagagctatgcacacccctgccccagtttaccgttcctccctcagggcctccgtgacactccatgaaaagaagttcttgcataccggaaagttgaataaatggatgaattca

SEQ ID NO: 19405 - DNA, 2894 bp, Homo sapiens
cggccgctgccagcagcgctggctttcgtgccgcgagaggtgctctacaagctttacaaggacccagcgggaccgtcgcgcgtgcttctgccggtgtgggaggcagagggcctggggctgcgtgaggagttcaacgtgtcctgcctgacagacagcaatgccgatacctactgggagagcgatgggtcccagtgccaacactgggtacggcttactatgaagaagggcaccattgtcaagaagctgctactcacagtggataccacagatgacaactttatgccaaagcgggtggtggtctatgggggtgaaggggacaacctgaagaagctgagtgacgtgagcattgacgagaccctcatcggggatgtctgtgtcctggaggacatgaccgtccacctcccgatcatcgagatccgcatcgtggagtgccgagatgatgggattgatgttcgtctccgaggggtcaagatcaagtcatctagacagcgggaactagggttgaatgcagacctgttccagccaactagtctggtgcgatatccacgcctagaaggcaccgaccctgaagtactgtaccgcagagctgtcctcctgcagagattcatcaagatcctcgatagtgtcctgcaccacctggtacctgcctgggaccacacactgggcaccttcagtgagattaagcaagtgaagcagttcctactgctgtcccgccagcggccaggcctggtggctcagtgcctgcgtgactctgagagcagcaagcccagcttcatgccacgcctatacatcaaccgccgtcttgccatggaacaccgtgcctgcccctctcgagaccctgcctgcaagaatgcagtcttcacccaggtatatgaaggcctcaagccctctgacaaatatgaaaagcccctggactacaggtggcccatgcgctatgaccagtggtgggagtgtaaatttattgcagaaggcatcattgaccaagggggtggtttccgggacagcctggcagatatgtcagaagagctgtgccctagctcagcggatacccccgtgcccctgcccttctttgtacgcacagccaaccagggcaatggcactggtgaggctcgggacatgtatgtacccaacccctcctgccgagactttgccaagtatgaatggatcggacagctgatgggggctgcccttcggggtaaggagttcctggtcctggccctgcctggttttgtgtggaagcagctttctggtgaggaggtgagctggagcaaggacttcccagctgtggactctgtgctggtgaagctcctggaagtgatggaaggaatggacaaggagacgtttgagttcaagtttgggaaggaactaacattcaccactgtactgagtgaccaacaggtggtggagctgatccctgggggtgcaggcatcgtcgtgggatatggggaccgttctcgtttcatccaactggtccagaaggcacggctagaggagagcaaggagcaggtggcagctatgcaggcaggtctgctgaaggtggtaccacaggctgtgctggacttgctgacctggcaagagttggagaagaaagtgtgtggggatccagaggtcactgtggatgctctgcgcaagctcacccggtttgaggacttcgagccatctgactcgcgggtgcagtatttctgggaggcactgaacaacttcaccaacgaggaccggagccgcttcctgcgctttgtcacgggccgcagtcgcctgccagcacggatctacatctacccagacaagctgggctacgagaccacagacgcgctgcccgagtcttccacttgctccagcaccctcttcctgccacactatgccagtgccaaggtatgcgaggagaagctccgctatgcggcctacaactgcgtggccatcgacactgacatgagcccttgggaggagtgaggcgtgccgccggctgtgggaccagcaagactgcacgtgtccctcttggccttgcccagggcgaagacaccttccctgccctggtttggctgacgtgctcagcaaaaccccatgtgccctgctcctgtgtgcagttggggtaggggcagctggcatggtcaggtaacactagtggcccagccccgcagacccacaagccctacccgtgctggggcttgcttcccgaggtatttcacctcttaagagggaatcttccacaagcccagcacaagctgccaggcctgagctacttgaagggggccatctaggtccccaacccatggactttgcctccattttcagctccgccttttttctcctattttctctctggctttcttcagccatgactcacaactaaaaacataaaacactggaggttagtggaggcccctccccaagcagggagcctgggatgggcagggagtgatagccaaactccttggtcacctgctccaagaaggaagcagtagctgagcacctgccctcacatactgctcttttcccctctccctccacaccagagatgtggtgagctctgttcttctaccaacccagtctcaacacacaaagtgccaccaccttccctgactcagaacccacatccactcaatgtgaactctactaccacgacctccccatattcctcacttctccatcacctccagcctgactccctgtctgccctttcacccccaagattttgcacaggttaaggccagttatggcctttttgaaatctgtaatagctcccctttccccaactctaaagcctagaccttaaacctgttcctagagctatgcacacccctgccccagtttaccgttcctccctcagggcctccgtgacactccatgaaaagaagttcttgcataccggaaagttgaataaatggatgaattca

SEQ ID NO: 19406 - DNA, 3660 bp, Homo sapiens
cggccgctgccagcagcgctggctttcgtgccgcgagaggtgctctacaagctttacaaggacccagcgggaccgtcgcgcgtgcttctgccggtgtgggaggcagagggcctggggctgcgtgtgggcgccgcaggcccagcccccggtaccggctccgggcccctccgcgccgcccgcgacagcattgagctccggcgcggcgcctgcgtgcgcaccacgggcgaggagctgtgcaatggccacgggctctgggtgaagctgacaaaggtgcgctcttccctgcccaggacccggtaaaagacccctggggccagagaaacctctggctgtttgccttttctcccctgtattgagttggcattgcgttcggcgccctttgccctgggctgggcacgacaggcggctgggcagttccctgacggctgtccccatcctacgcgtcccggcaggagcagctggcagagcacctgggcgactgcgggctgcaggaaggctggctgctggtgtgccgcccggcggagggcggagcccgcctggtacccatcgacactcccaaccacctccagcggcagcagcagctctttggcgtggattatcggccggtgctcaggtgggaacaggtggtggacctgacatactcacatcgcctgggatcgagacctcagccggcagaggcatacgcagaagctgtacaaaggctactctatgtacccccgacatggacctacgagtgcgacgaggacctgatccacttcttgtatgaccacctgggcaaggaggatgagaacctgggtagcgtgaagcagtatgtggagagcatagacgtttcctcctacacggaggagttcaacgtgtcctgcctgacagacagcaatgccgatacctactgggagagcgatgggtcccagtgccaacactgggtacggcttactatgaagaagggcaccattgtcaagaagctgctactcacagtggataccacagatgacaactttatgccaaagcgggtggtggtctatgggggtgaaggggacaacctgaagaagctgagtgacgtgagcattgacgagaccctcatcggggatgtctgtgtcctggaggacatgaccgtccacctcccgatcatcgagatccgcatcgtggagtgccgagatgatgggattgatgttcgtctccgaggggtcaagatcaagtcatctagacagcgggaactagggttgaatgcagacctgttccagccaactagtctggtgcgatatccacgcctagaaggcaccgaccctgaagtactgtaccgcagagctgtcctcctgcagagattcatcaagatcctcgatagtgtcctgcaccacctggtacctgcctgggaccacacactgggcaccttcagtgagattaagcaagtgaagcagttcctactgctgtcccgccagcggccaggcctggtggctcagtgcctgcgtgactctgagagcagcaagcccagcttcatgccacgcctatacatcaaccgccgtcttgccatggaacaccgtgcctgcccctctcgagaccctgcctgcaagaatgcagtcttcacccaggtatatgaaggcctcaagccctctgacaaatatgaaaagcccctggactacaggtggcccatgcgctatgaccagtggtgggagtgtaaatttattgcagaaggcatcattgaccaagggggtggtttccgggacagcctggcagatatgtcagaagagctgtgccctagctcagcggatacccccgtgcccctgcccttctttgtacgcacagccaaccagggcaatggcactggtgaggctcgggacatgtatgtacccaacccctcctgccgagactttgccaagtatgaatggatcggacagctgatgggggctgcccttcggggtaaggagttcctggtcctggccctgcctggttttgtgtggaagcagctttctggtgaggaggtgagctggagcaaggacttcccagctgtggactctgtgctggtgaagctcctggaagtgatggaaggaatggacaaggagacgtttgagttcaagtttgggaaggaactaacattcaccactgtactgagtgaccaacaggtggtggagctgatccctgggggtgcaggcatcgtcgtgggatatggggaccgttctcgtttcatccaactggtccagaaggcacggctagaggagagcaaggagcaggtggcagctatgcaggcaggtctgctgaaggtggtaccacaggctgtgctggacttgctgacctggcaagagttggagaagaaagtgtgtggggatccagaggtcactgtggatgctctgcgcaagctcacccggtttgaggacttcgagccatctgactcgcgggtgcagtatttctgggaggcactgaacaacttcaccaacgaggaccggagccgcttcctgcgctttgtcacgggccgcagtcgcctgccagcacggatctacatctacccagacaagctgggctacgagaccacagacgcgctgcccgagtcttccacttgctccagcaccctcttcctgccacactatgccagtgccaaggtatgcgaggagaagctccgctatgcggcctacaactgcgtggccatcgacactgacatgagcccttgggaggagtgaggcgtgccgccggctgtgggaccagcaagactgcacgtgtccctcttggccttgcccagggcgaagacaccttccctgccctggtttggctgacgtgctcagcaaaaccccatgtgccctgctcctgtgtgcagttggggtaggggcagctggcatggtcaggtaacactagtggcccagccccgcagacccacaagccctacccgtgctggggcttgcttcccgaggtatttcacctcttaagagggaatcttccacaagcccagcacaagctgccaggcctgagctacttgaagggggccatctaggtccccaacccatggactttgcctccattttcagctccgccttttttctcctattttctctctggctttcttcagccatgactcacaactaaaaacataaaacactggaggttagtggaggcccctccccaagcagggagcctgggatgggcagggagtgatagccaaactccttggtcacctgctccaagaaggaagcagtagctgagcacctgccctcacatactgctcttttcccctctccctccacaccagagatgtggtgagctctgttcttctaccaacccagtctcaacacacaaagtgccaccaccttccctgactcagaacccacatccactcaatgtgaactctactaccacgacctccccatattcctcacttctccatcacctccagcctgactccctgtctgccctttcacccccaagattttgcacaggttaaggccagttatggcctttttgaaatctgtaatagctcccctttccccaactctaaagcctagaccttaaacctgttcctagagctatgcacacccctgccccagtttaccgttcctccctcagggcctccgtgacactccatgaaaagaagttcttgcataccggaaagttgaataaatggatgaattcattccttcagaatgtgtttattgggccctgggcttaggcacagggtca

SEQ ID NO: 19407 - DNA, 1915 bp, Homo sapiens
agggatcatttagtggaaaatgttcccagtggaaaatgttcagggaagtctttgggccaggaaaatagggtgtatctcatgccacactcacagctctgtctctggggcagggcaatggcactggtgaggctcgggacatgtatgtacccaacccctcctgccgagactttgccaagtatgaatggatcggacagctgatgggggctgcccttcggggtaaggagttcctggtcctggccctgcctggttttgtgtggaagcagctttctggtgaggaggtgagctggagcaaggacttcccagctgtggactctgtgctggtgaagctcctggaagtgatggaaggaatggacaaggagacgtttgagttcaagtttgggaaggaactaacattcaccactgtactgagtgaccaacaggtggtggagctgatccctgggggtgcaggcatcgtcgtgggatatggggaccgttctcgtttcatccaactggtccagaaggcacggctagaggagagcaaggagcaggtggcagctatgcaggcaggtctgctgaaggtggtaccacaggctgtgctggacttgctgacctggcaagagttggagaagaaagtgtgtggggatccagaggtcactgtggatgctctgcgcaagctcacccggtttgaggacttcgagccatctgactcgcgggtgcagtatttctgggaggcactgaacaacttcaccaacgaggaccggagccgcttcctgcgctttgtcacgggccgcagtcgcctgccagcacggatctacatctacccagacaagctgggctacgagaccacagacgcgctgcccgagtcttccacttgctccagcaccctcttcctgccacactatgccagtgccaaggtatgcgaggagaagctccgctatgcggcctacaactgcgtggccatcgacactgacatgagcccttgggaggagtgaggcgtgccgccggctgtgggaccagcaagactgcacgtgtccctcttggccttgcccagggcgaagacaccttccctgccctggtttggctgacgtgctcagcaaaaccccatgtgccctgctcctgtgtgcagttggggtaggggcagctggcatggtcaggtaacactagtggcccagccccgcagacccacaagccctacccgtgctggggcttgcttcccgaggtatttcacctcttaagagggaatcttccacaagcccagcacaagctgccaggcctgagctacttgaagggggccatctaggtccccaacccatggactttgcctccattttcagctccgccttttttctcctattttctctctggctttcttcagccatgactcacaactaaaaacataaaacactggaggttagtggaggcccctccccaagcagggagcctgggatgggcagggagtgatagccaaactccttggtcacctgctccaagaaggaagcagtagctgagcacctgccctcacatactgctcttttcccctctccctccacaccagagatgtggtgagctctgttcttctaccaacccagtctcaacacacaaagtgccaccaccttccctgactcagaacccacatccactcaatgtgaactctactaccacgacctccccatattcctcacttctccatcacctccagcctgactccctgtctgccctttcacccccaagattttgcacaggttaaggccagttatggcctttttgaaatctgtaatagctcccctttccccaactctaaagcctagaccttaaacctgttcctagagctatgcacacccctgccccagtttaccgttcctccctcagggcctccgtgacactccatgaaaagaagttcttgcataccggaaagttgaataaatggatgaattca

SEQ ID NO: 19408 - DNA, 3530 bp, Homo sapiens
cggccgctgccagcagcgctggctttcgtgccgcgagaggtgctctacaagctttacaaggacccagcgggaccgtcgcgcgtgcttctgccggtgtgggaggcagagggcctggggctgcgtgtgggcgccgcaggcccagcccccggtaccggctccgggcccctccgcgccgcccgcgacagcattgagctccggcgcggcgcctgcgtgcgcaccacgggcgaggagctgtgcaatggccacgggctctgggtgaagctgacaaaggtgcgctcttccctgcccaggacccggtaaaagacccctggggccagagaaacctctggctgtttgccttttctcccctgtattgagttggcattgcgttcggcgccctttgccctgggctgggcacgacaggcggctgggcagttccctgacggctgtccccatcctacgcgtcccggcaggagcagctggcagagcacctgggcgactgcgggctgcaggaaggctggctgctggtgtgccgcccggcggagggcggagcccgcctggtacccatcgacactcccaaccacctccagcggcagcagcagctctttggcgtggattatcggccggtgctcaggtgggaacaggtggtggacctgacatactcacatcgcctgggatcgagacctcagccggcagaggcatacgcagaagctgtacaaaggctactctatgtacccccgacatggacctacgagtgcgacgaggacctgatccacttcttgtatgaccacctgggcaaggaggatgagaacctgggtagcgtgaagcagtatgtggagagcatagacgtttcctcctacacggaggagttcaacgtgtcctgcctgacagacagcaatgccgatacctactgggagagcgatgggtcccagtgccaacactgggtacggcttactatgaagaagggcaccattgtcaagaagctgctactcacagtggataccacagatgacaactttatgccaaagcgggtggtggtctatgggggtgaaggggacaacctgaagaagctgagtgacgtgagcattgacgagaccctcatcggggatgtctgtgtcctggaggacatgaccgtccacctcccgatcatcgagatccgcatcgtggagtgccgagatgatgggattgatgttcgtctccgaggggtcaagatcaagtcatctagacagcgggaactagggttgaatgcagacctgttccagccaactagtctggtgcgatatccacgcctagaaggcaccgaccctgaagtactgtaccgcagagctgtcctcctgcagagattcatcaagatcctcgatagtgtcctgcaccacctggtacctgcctgggaccacacactgggcaccttcagtgagattaagcaagtgaagcagttcctactgctgtcccgccagcggccaggcctggtggctcagtgcctgcgtgactctgagagcagcaagcccagcttcatgccacgcctatacatcaaccgccgtcttgccatggaacaccgtgcctgcccctctcgagaccctgcctgcaagaatgcagtcttcacccaggtatatgaaggcctcaagccctctgacaaatatgaaaagcccctggactacaggtggcccatgcgctatgaccagtggtgggagtgtaaatttattgcagaaggcatcattgaccaagggggtggtttccgggacagcctggcagatatgtcagaagagctgtgccctagctcagcggatacccccgtgcccctgcccttctttgtacgcacagccaaccagggcaatggcactggtgaggctcgggacatgtatgtacccaacccctcctgccgagactttgccaagtatgaatggatcggacagctgatgggggctgcccttcggggtaaggagttcctggtcctggccctgcctggttttgtgtggaagcagctttctggtgaggaggtgagctggagcaaggacttcccagctgtggactctgtgctggtgaagctcctggaagtgatggaaggaatggacaaggagacgtttgagttcaagtttgggaaggaactaacattcaccactgtactgagtgaccaacaggtggtggagctgatccctgggggtgcaggcatcgtcgtgggatatggggaccgttctcgtttcatccaactggtccagaaggcacggctagaggagagcaaggagcaggtggcagctatgcaggcaggtctgctgaaggtggtaccacaggctgtgctggacttgctgacctggcaagagttggagaagaaagtgtgtggggatccagaggtcactgtggatgctctgcgcaagctcacccggtttgaggacttcgagccatctgactcgcgggtgcagtatttctgggaggcactgaacaacttcaccaacgaggaccggagccgcttcctgcgctttgtcacgggccgcagtcgcctgccagcacggatctacatctacccagacaagctgggctacgagaccacagacgcgctgcccgagtcttccacttgctccagcaccctcttcctgccacactatgccagtgccaaggtatgcgaggagaagctccgctatgcggcctacaactgcgtggccatcgacactgacatgagcccttgggaggagtgaggcgtgccgccggctgtgggaccagcaagactgcacgtgtccctcttggccttgcccagggcgaagacaccttccctgccctggtttggctgacgtgctcagcaaaaccccatgtgccctgctcctgtgtgcagttggggtaggggcagctggcatggtcaggtaacactagtggcccagccccgcagacccacaagccctacccgtgctggggcttgcttcccgaggtatttcacctcttaagagggaatcttccacaagcccagcacaagctgccaggcctgagctacttgaagggggccatctaggtccccaacccatggactttgcctccattttcagctccgccttttttctcctattttctctctggctttcttcagccatgactcacaactaaaaacataaaacactggaggttagtggaggcccctccccaagcagggagcctgggatgggcagggagtgatagccaaactccttggtcacctgctccaagaaggaagcagtagctgagcacctgccctcacatactgctcttttcccctctccctccacaccagagatgtggtgagctctgttcttctaccaacccagtctcaacacacaaagtgccaccaccttccctgactcagaacccacatccactcaatgtgaactctactaccacgacctccccatatctcatttcatcactcagctgatctgttgccttacccaagattgccgtaggccgtttgcttgaatggaagtccttcacttagctaactacggtctaattggacggccggtcgtcccggcggaccgaagtgcggggtggggcacaacaaggagcaaacacggcgttcgctgttatttttc

SEQ ID NO: 19409 - DNA, 3349 bp, Homo sapiens
  misc_feature (3328)..(3329): n is a, c, g, or t
cggccgctgccagcagcgctggctttcgtgccgcgagaggtgctctacaagctttacaaggacccagcgggaccgtcgcgcgtgcttctgccggtgtgggaggcagagggcctggggctgcgtgtgggcgccgcaggcccagcccccggtaccggctccgggcccctccgcgccgcccgcgacagcattgagctccggcgcggcgcctgcgtgcgcaccacgggcgaggagctgtgcaatggccacgggctctgggtgaagctgacaaaggtgcgctcttccctgcccaggacccggtaaaagacccctggggccagagaaacctctggctgtttgccttttctcccctgtattgagttggcattgcgttcggcgccctttgccctgggctgggcacgacaggcggctgggcagttccctgacggctgtccccatcctacgcgtcccggcaggagcagctggcagagcacctgggcgactgcgggctgcaggaaggctggctgctggtgtgccgcccggcggagggcggagcccgcctggtacccatcgacactcccaaccacctccagcggcagcagcagctctttggcgtggattatcggccggtgctcaggtgggaacaggtggtggacctgacatactcacatcgcctgggatcgagacctcagccggcagaggcatacgcagaagctgtacaaaggctactctatgtacccccgacatggacctacgagtgcgacgaggacctgatccacttcttgtatgaccacctgggcaaggaggatgagaacctgggtagcgtgaagcagtatgtggagagcatagacgtttcctcctacacggaggagttcaacgtgtcctgcctgacagacagcaatgccgatacctactgggagagcgatgggtcccagtgccaacactgggtacggcttactatgaagaagggcaccattgtcaagaagctgctactcacagtggataccacagatgacaactttatgccaaagcgggtggtggtctatgggggtgaaggggacaacctgaagaagctgagtgacgtgagcattgacgagaccctcatcggggatgtctgtgtcctggaggacatgaccgtccacctcccgatcatcgagatccgcatcgtggagtgccgagatgatgggattgatgttcgtctccgaggggtcaagatcaagtcatctagacagcgggaactagggttgaatgcagacctgttccagccaactagtctggtgcgatatccacgcctagaaggcaccgaccctgaagtactgtaccgcagagctgtcctcctgcagagattcatcaagatcctcgatagtgtcctgcaccacctggtacctgcctgggaccacacactgggcaccttcagtgagattaagcaagtgaagcagttcctactgctgtcccgccagcggccaggcctggtggctcagtgcctgcgtgactctgagagcagcaagcccagcttcatgccacgcctatacatcaaccgccgtcttgccatggaacaccgtgcctgcccctctcgagaccctgcctgcaagaatgcagtcttcacccaggtatatgaaggcctcaagccctctgacaaatatgaaaagcccctggactacaggtggcccatgcgctatgaccagtggtgggagtgtaaatttattgcagaaggcatcattgaccaagggggtggtttccgggacagcctggcagatatgtcagaagagctgtgccctagctcagcggatacccccgtgcccctgcccttctttgtacgcacagccaaccagggcaatggcactggtgaggctcgggacatgtatgtacccaacccctcctgccgagactttgccaagtatgaatggatcggacagctgatgggggctgcccttcggggtaaggagttcctggtcctggccctgcctggttttgtgtggaagcagctttctggtgaggaggtgagctggagcaaggacttcccagctgtggactctgtgctggtgaagctcctggaagtgatggaaggaatggacaaggagacgtttgagttcaagtttgggaaggaactaacattcaccactgtactgagtgaccaacaggtggtggagctgatccctgggggtgcaggcatcgtcgtgggatatggggaccgttctcgtttcatccaactggtccagaaggcacggctagaggagagcaaggagcaggtggcagctatgcaggcaggtctgctgaaggtggtaccacaggctgtgctggacttgctgacctggcaagagttggagaagaaagtgtgtggggatccagaggtcactgtggatgctctgcgcaagctcacccggtttgaggacttcgagccatctgactcgcgggtgcagtatttctgggaggcactgaacaacttcaccaacgaggaccggagccgcttcctgcgctttgtcacgggccgcagtcgcctgccagcacggatctacatctacccagacaagctgggctacgagaccacagacgcgctgcccgagtcttccacttgctccagcaccctcttcctgccacactatgccagtgccaaggtatgcgaggagaagctccgctatgcggcctacaactgcgtggccatcgacactgacatgagcccttgggaggagtgaggcgtgccgccggctgtgggaccagcaagactgcacgtgtccctcttggccttgcccagggcgaagacaccttccctgccctggtttggctgacgtgctcagcaaaaccccatgtgccctgctcctgtgtgcagttggggtaggggcagctggcatggtcaggtaacactagtggcccagccccgcagacccacaagccctacccgtgctggggcttgcttcccgaggtatttcacctcttaagagggaatcttccacaagcccagcacaagctgccaggcctgagctacttgaagggggccatctaggtccccaacccatggactttgcctccattttcagctccgccttttttctcctattttctctctggctttcttcagccatgactcacaactaaaaacataaaacactggaggttagtggaggcccctccccaagcagggagcctgggatgggcagggagtgatagccaaactccttggtcacctgctccaagaaggaagcagtagctgagcacctgccctcacatactgctcttttcccctctccctccacaccagagatgtggtgagctctgttcttctaccaacccagtctcaacacacaaagtgccaccaccttccctgactcagaaccctaatacgcagacgcgcctnntgggatcctcgcgaacgctc

SEQ ID NO: 19410 - DNA, 1859 bp, Homo sapiens
tctcctaacttcccttatgtcccagccatcatttgggtctcagctgagacaccattttccacaggatgcctcctctggcctccaaggctggttaggtgttgtcttgatgcttttacagctcttgtactgacaccctcattccctgctgcctccatggggactgccttgcctggctgtctctgcttccctgtgagcatcttgtggaaagacagggactatctccacagtgaaaaggttacctccctgcctctctccaacccctaggtgaagctcctggaagtgatggaaggaatggacaaggagacgtttgagttcaagtttgggaaggaactaacattcaccactgtactgagtgaccaacaggtggtggagctgatccctgggggtgcaggcatcgtcgtgggatatggggaccgttctcgtttcatccaactggtccagaaggcacggctagaggagagcaaggagcaggtggcagctatgcaggcaggtctgctgaaggtggtaccacaggctgtgctggacttgctgacctggcaagagttggagaagaaagtgtgtggggatccagaggtcactgtggatgctctgcgcaagctcacccggtttgaggacttcgagccatctgactcgcgggtgcagtatttctgggaggcactgaacaacttcaccaacgaggaccggagccgcttcctgcgctttgtcacgggccgcagtcgcctgccagcacggatctacatctacccagacaagctgggctacgagaccacagacgcgctgcccgagtcttccacttgctccagcaccctcttcctgccacactatgccagtgccaaggtatgcgaggagaagctccgctatgcggcctacaactgcgtggccatcgacactgacatgagcccttgggaggagtgaggcgtgccgccggctgtgggaccagcaagactgcacgtgtccctcttggccttgcccagggcgaagacaccttccctgccctggtttggctgacgtgctcagcaaaaccccatgtgccctgctcctgtgtgcagttggggtaggggcagctggcatggtcaggtaacactagtggcccagccccgcagacccacaagccctacccgtgctggggcttgcttcccgaggtatttcacctcttaagagggaatcttccacaagcccagcacaagctgccaggcctgagctacttgaagggggccatctaggtccccaacccatggactttgcctccattttcagctccgccttttttctcctattttctctctggctttcttcagccatgactcacaactaaaaacataaaacactggaggttagtggaggcccctccccaagcagggagcctgggatgggcagggagtgatagccaaactccttggtcacctgctccaagaaggaagcagtagctgagcacctgccctcacatactgctcttttcccctctccctccacaccagagatgtggtgagctctgttcttctaccaacccagtctcaacacacaaagtgccaccaccttccctgactcagaacccacatccactcaatgtgaactctactaccacgacctccccatattcctcacttctccatcacctccagcctgactccctgtctgccctttcacccccaagattttgcacaggttaaggccagttatggcctttttgaaatctgtaatagctcccctttccccaactctaaagcctagaccttaaacctgttcctagagctatgcacacccctgccccagtttaccgttcctccctcagggcctccgtgacactccatgaaaagaagttcttgcataccggaaagttgaataaatggatgaattca

SEQ ID NO: 19411 - DNA, 3314 bp, Homo sapiens
cggccgctgccagcagcgctggctttcgtgccgcgagaggtgctctacaagctttacaaggacccagcgggaccgtcgcgcgtgcttctgccggtgtgggaggcagagggcctggggctgcgtgtgggcgccgcaggcccagcccccggtaccggctccgggcccctccgcgccgcccgcgacagcattgagctccggcgcggcgcctgcgtgcgcaccacgggcgaggagctgtgcaatggccacgggctctgggtgaagctgacaaaggtgcgctcttccctgcccaggacccggtaaaagacccctggggccagagaaacctctggctgtttgccttttctcccctgtattgagttggcattgcgttcggcgccctttgccctgggctgggcacgacaggcggctgggcagttccctgacggctgtccccatcctacgcgtcccggcaggagcagctggcagagcacctgggcgactgcgggctgcaggaaggctggctgctggtgtgccgcccggcggagggcggagcccgcctggtacccatcgacactcccaaccacctccagcggcagcagcagctctttggcgtggattatcggccggtgctcaggtgggaacaggtggtggacctgacatactcacatcgcctgggatcgagacctcagccggcagaggcatacgcagaagctgtacaaaggctactctatgtacccccgacatggacctacgagtgcgacgaggacctgatccacttcttgtatgaccacctgggcaaggaggatgagaacctgggtagcgtgaagcagtatgtggagagcatagacgtttcctcctacacggaggagttcaacgtgtcctgcctgacagacagcaatgccgatacctactgggagagcgatgggtcccagtgccaacactgggtacggcttactatgaagaagggcaccattgtcaagaagctgctactcacagtggataccacagatgacaactttatgccaaagcgggtggtggtctatgggggtgaaggggacaacctgaagaagctgagtgacgtgagcattgacgagaccctcatcggggatgtctgtgtcctggaggacatgaccgtccacctcccgatcatcgagatccgcatcgtggagtgccgagatgatgggattgatgttcgtctccgaggggtcaagatcaagtcatctagacagcgggaactagggttgaatgcagacctgttccagccaactagtctggtgcgatatccacgcctagaaggcaccgaccctgaagtactgtaccgcagagctgtcctcctgcagagattcatcaagatcctcgatagtgtcctgcaccacctggtacctgcctgggaccacacactgggcaccttcagtgagattaagcaagtgaagcagttcctactgctgtcccgccagcggccaggcctggtggctcagtgcctgcgtgactctgagagcagcaagcccagcttcatgccacgcctatacatcaaccgccgtcttgccatggaacaccgtgcctgcccctctcgagaccctgcctgcaagaatgcagtcttcacccaggtatatgaaggcctcaagccctctgacaaatatgaaaagcccctggactacaggtggcccatgcgctatgaccagtggtgggagtgtaaatttattgcagaaggcatcattgaccaagggggtggtttccgggacagcctggcagatatgtcagaagagctgtgccctagctcagcggatacccccgtgcccctgcccttctttgtacgcacagccaaccagggcaatggcactggtgaggctcgggacatgtatgtacccaacccctcctgccgagactttgccaagtatgaatggatcggacagctgatgggggctgcccttcggggtaaggagttcctggtcctggccctgcctggttttgtgtggaagcagctttctggtgaggaggtgagctggagcaaggacttcccagctgtggactctgtgctggtgaagctcctggaagtgatggaaggaatggacaaggagacgtttgagttcaagtttgggaaggaactaacattcaccactgtactgagtgaccaacaggtggtggagctgatccctgggggtgcaggcatcgtcgtgggatatggggaccgttctcgtttcatccaactggtccagaaggcacggctagaggagagcaaggagcaggtggcagctatgcaggcaggtctgctgaaggtggtaccacaggctgtgctggacttgctgacctggcaagagttggagaagaaagtgtgtggggatccagaggtcactgtggatgctctgcgcaagctcacccggtttgaggacttcgagccatctgactcgcgggtgcagtatttctgggaggcactgaacaacttcaccaacgaggaccggagccgcttcctgcgctttgtcacgggccgcagtcgcctgccagcacggatctacatctacccagacaagctgggctacgagaccacagacgcgctgcccgagtcttccacttgctccagcaccctcttcctgccacactatgccagtgccaaggtatgcgaggagaagctccgctatgcggcctacaactgcgtggccatcgacactgacatgagcccttgggaggagtgaggcgtgccgccggctgtgggaccagcaagactgcacgtgtccctcttggccttgcccagggcgaagacaccttccctgccctggtttggctgacgtgctcagcaaaaccccatgtgccctgctcctgtgtgcagttggggtaggggcagctggcatggtcaggtaacactagtggcccagccccgcagacccacaagccctacccgtgctggggcttgcttcccgaggtatttcacctcttaagagggaatcttccacaagcccagcacaagctgccaggcctgagctacttgaagggggccatctaggtccccaacccatggactttgcctccattttcagctccgccttttttctcctattttctctctggctttcttcagccatgactcacaactaaaaacataaaacactggaggttagtggaggcccctccccaagcagggagcctgggatgggcagggagtgatagccaaactccttggtcacctgctccaagaaggaagcagtagctgagcacctgccctcacatactgctcttttcccctctccctccacaccagagatgtggtgagctctgttcttctaccaacccagtctcaacacgcactcagtagcggtcgttttcctcaagagtcagcgatt

SEQ ID NO: 19412 - DNA, 3303 bp, Homo sapiens
cggccgctgccagcagcgctggctttcgtgccgcgagaggtgctctacaagctttacaaggacccagcgggaccgtcgcgcgtgcttctgccggtgtgggaggcagagggcctggggctgcgtgtgggcgccgcaggcccagcccccggtaccggctccgggcccctccgcgccgcccgcgacagcattgagctccggcgcggcgcctgcgtgcgcaccacgggcgaggagctgtgcaatggccacgggctctgggtgaagctgacaaaggtgcgctcttccctgcccaggacccggtaaaagacccctggggccagagaaacctctggctgtttgccttttctcccctgtattgagttggcattgcgttcggcgccctttgccctgggctgggcacgacaggcggctgggcagttccctgacggctgtccccatcctacgcgtcccggcaggagcagctggcagagcacctgggcgactgcgggctgcaggaaggctggctgctggtgtgccgcccggcggagggcggagcccgcctggtacccatcgacactcccaaccacctccagcggcagcagcagctctttggcgtggattatcggccggtgctcaggtgggaacaggtggtggacctgacatactcacatcgcctgggatcgagacctcagccggcagaggcatacgcagaagctgtacaaaggctactctatgtacccccgacatggacctacgagtgcgacgaggacctgatccacttcttgtatgaccacctgggcaaggaggatgagaacctgggtagcgtgaagcagtatgtggagagcatagacgtttcctcctacacggaggagttcaacgtgtcctgcctgacagacagcaatgccgatacctactgggagagcgatgggtcccagtgccaacactgggtacggcttactatgaagaagggcaccattgtcaagaagctgctactcacagtggataccacagatgacaactttatgccaaagcgggtggtggtctatgggggtgaaggggacaacctgaagaagctgagtgacgtgagcattgacgagaccctcatcggggatgtctgtgtcctggaggacatgaccgtccacctcccgatcatcgagatccgcatcgtggagtgccgagatgatgggattgatgttcgtctccgaggggtcaagatcaagtcatctagacagcgggaactagggttgaatgcagacctgttccagccaactagtctggtgcgatatccacgcctagaaggcaccgaccctgaagtactgtaccgcagagctgtcctcctgcagagattcatcaagatcctcgatagtgtcctgcaccacctggtacctgcctgggaccacacactgggcaccttcagtgagattaagcaagtgaagcagttcctactgctgtcccgccagcggccaggcctggtggctcagtgcctgcgtgactctgagagcagcaagcccagcttcatgccacgcctatacatcaaccgccgtcttgccatggaacaccgtgcctgcccctctcgagaccctgcctgcaagaatgcagtcttcacccaggtatatgaaggcctcaagccctctgacaaatatgaaaagcccctggactacaggtggcccatgcgctatgaccagtggtgggagtgtaaatttattgcagaaggcatcattgaccaagggggtggtttccgggacagcctggcagatatgtcagaagagctgtgccctagctcagcggatacccccgtgcccctgcccttctttgtacgcacagccaaccagggcaatggcactggtgaggctcgggacatgtatgtacccaacccctcctgccgagactttgccaagtatgaatggatcggacagctgatgggggctgcccttcggggtaaggagttcctggtcctggccctgcctggttttgtgtggaagcagctttctggtgaggaggtgagctggagcaaggacttcccagctgtggactctgtgctggtgaagctcctggaagtgatggaaggaatggacaaggagacgtttgagttcaagtttgggaaggaactaacattcaccactgtactgagtgaccaacaggtggtggagctgatccctgggggtgcaggcatcgtcgtgggatatggggaccgttctcgtttcatccaactggtccagaaggcacggctagaggagagcaaggagcaggtggcagctatgcaggcaggtctgctgaaggtggtaccacaggctgtgctggacttgctgacctggcaagagttggagaagaaagtgtgtggggatccagaggtcactgtggatgctctgcgcaagctcacccggtttgaggacttcgagccatctgactcgcgggtgcagtatttctgggaggcactgaacaacttcaccaacgaggaccggagccgcttcctgcgctttgtcacgggccgcagtcgcctgccagcacggatctacatctacccagacaagctgggctacgagaccacagacgcgctgcccgagtcttccacttgctccagcaccctcttcctgccacactatgccagtgccaaggtatgcgaggagaagctccgctatgcggcctacaactgcgtggccatcgacactgacatgagcccttgggaggagtgaggcgtgccgccggctgtgggaccagcaagactgcacgtgtccctcttggccttgcccagggcgaagacaccttccctgccctggtttggctgacgtgctcagcaaaaccccatgtgccctgctcctgtgtgcagttggggtaggggcagctggcatggtcaggtaacactagtggcccagccccgcagacccacaagccctacccgtgctggggcttgcttcccgaggtatttcacctcttaagagggaatcttccacaagcccagcacaagctgccaggcctgagctacttgaagggggccatctaggtccccaacccatggactttgcctccattttcagctccgccttttttctcctattttctctctggctttcttcagccatgactcacaactaaaaacataaaacactggaggttagtggaggcccctccccaagcagggagcctgggatgggcagggagtgatagccaaactccttggtcacctgctccaagaaggaagcagtagctgagcacctgccctcacatactgctcttttcccctctccctccacaccagagatgtggtgagctctgttcttctaccaacccagtctcaacagtagcgaacgggtaccgagcttgctagtg

SEQ ID NO: 19413 - DNA, 3162 bp, Homo sapiens
cggccgctgccagcagcgctggctttcgtgccgcgagaggtgctctacaagctttacaaggacccagcgggaccgtcgcgcgtgcttctgccggtgtgggaggcagagggcctggggctgcgtgtgggcgccgcaggcccagcccccggtaccggctccgggcccctccgcgccgcccgcgacagcattgagctccggcgcggcgcctgcgtgcgcaccacgggcgaggagctgtgcaatggccacgggctctgggtgaagctgacaaaggtgcgctcttccctgcccaggacccggtaaaagacccctggggccagagaaacctctggctgtttgccttttctcccctgtattgagttggcattgcgttcggcgccctttgccctgggctgggcacgacaggcggctgggcagttccctgacggctgtccccatcctacgcgtcccggcaggagcagctggcagagcacctgggcgactgcgggctgcaggaaggctggctgctggtgtgccgcccggcggagggcggagcccgcctggtacccatcgacactcccaaccacctccagcggcagcagcagctctttggcgtggattatcggccggtgctcaggtgggaacaggtggtggacctgacatactcacatcgcctgggatcgagacctcagccggcagaggcatacgcagaagctgtacaaaggctactctatgtacccccgacatggacctacgagtgcgacgaggacctgatccacttcttgtatgaccacctgggcaaggaggatgagaacctgggtagcgtgaagcagtatgtggagagcatagacgtttcctcctacacggaggagttcaacgtgtcctgcctgacagacagcaatgccgatacctactgggagagcgatgggtcccagtgccaacactgggtacggcttactatgaagaagggcaccattgtcaagaagctgctactcacagtggataccacagatgacaactttatgccaaagcgggtggtggtctatgggggtgaaggggacaacctgaagaagctgagtgacgtgagcattgacgagaccctcatcggggatgtctgtgtcctggaggacatgaccgtccacctcccgatcatcgagatccgcatcgtggagtgccgagatgatgggattgatgttcgtctccgaggggtcaagatcaagtcatctagacagcgggaactagggttgaatgcagacctgttccagccaactagtctggtgcgatatccacgcctagaaggcaccgaccctgaagtactgtaccgcagagctgtcctcctgcagagattcatcaagatcctcgatagtgtcctgcaccacctggtacctgcctgggaccacacactgggcaccttcagtgagattaagcaagtgaagcagttcctactgctgtcccgccagcggccaggcctggtggctcagtgcctgcgtgactctgagagcagcaagcccagcttcatgccacgcctatacatcaaccgccgtcttgccatggaacaccgtgcctgcccctctcgagaccctgcctgcaagaatgcagtcttcacccaggtatatgaaggcctcaagccctctgacaaatatgaaaagcccctggactacaggtggcccatgcgctatgaccagtggtgggagtgtaaatttattgcagaaggcatcattgaccaagggggtggtttccgggacagcctggcagatatgtcagaagagctgtgccctagctcagcggatacccccgtgcccctgcccttctttgtacgcacagccaaccagggcaatggcactggtgaggctcgggacatgtatgtacccaacccctcctgccgagactttgccaagtatgaatggatcggacagctgatgggggctgcccttcggggtaaggagttcctggtcctggccctgcctggttttgtgtggaagcagctttctggtgaggaggtgagctggagcaaggacttcccagctgtggactctgtgctggtgaagctcctggaagtgatggaaggaatggacaaggagacgtttgagttcaagtttgggaaggaactaacattcaccactgtactgagtgaccaacaggtggtggagctgatccctgggggtgcaggcatcgtcgtgggatatggggaccgttctcgtttcatccaactggtccagaaggcacggctagaggagagcaaggagcaggtggcagctatgcaggcaggtctgctgaaggtggtaccacaggctgtgctggacttgctgacctggcaagagttggagaagaaagtgtgtggggatccagaggtcactgtggatgctctgcgcaagctcacccggtttgaggacttcgagccatctgactcgcgggtgcagtatttctgggaggcactgaacaacttcaccaacgaggaccggagccgcttcctgcgctttgtcacgggccgcagtcgcctgccagcacggatctacatctacccagacaagctgggctacgagaccacagacgcgctgcccgagtcttccacttgctccagcaccctcttcctgccacactatgccagtgccaaggtatgcgaggagaagctccgctatgcggcctacaactgcgtggccatcgacactgacatgagcccttgggaggagtgaggcgtgccgccggctgtgggaccagcaagactgcacgtgtccctcttggccttgcccagggcgaagacaccttccctgccctggtttggctgacgtgctcagcaaaaccccatgtgccctgctcctgtgtgcagttggggtaggggcagctggcatggtcaggtaacactagtggcccagccccgcagacccacaagccctacccgtgctggggcttgcttcccgaggtatttcacctcttaagagggaatcttccacaagcccagcacaagctgccaggcctgagctacttgaagggggccatctaggtccccaacccatggactttgcctccattttcagctccgccttttttctcctattttctctctggcaagtattgtctgtgtcccctctggaatgtcagctcctcgagggcagggattttatctgttttgttttctgtgatcttcagttcctagaagagtgtttgcacacagtagcaacggtccga

SEQ ID NO: 19414 - DNA, 1277 bp, Homo sapiens
tcggctaggtacaggccgcgtgtcaaatcggccgaggagccatctgactcgcgggtgcagtatttctgggaggcactgaacaacttcaccaacgaggaccggagccgcttcctgcgctttgtcacgggccgcagtcgcctgccagcacggatctacatctacccagacaagctgggctacgagaccacagacgcgctgcccgagtcttccacttgctccagcaccctcttcctgccacactatgccagtgccaaggtatgcgaggagaagctccgctatgcggcctacaactgcgtggccatcgacactgacatgagcccttgggaggagtgaggcgtgccgccggctgtgggaccagcaagactgcacgtgtccctcttggccttgcccagggcgaagacaccttccctgccctggtttggctgacgtgctcagcaaaaccccatgtgccctgctcctgtgtgcagttggggtaggggcagctggcatggtcaggtaacactagtggcccagccccgcagacccacaagccctacccgtgctggggcttgcttcccgaggtatttcacctcttaagagggaatcttccacaagcccagcacaagctgccaggcctgagctacttgaagggggccatctaggtccccaacccatggactttgcctccattttcagctccgccttttttctcctattttctctctggctttcttcagccatgactcacaactaaaaacataaaacactggaggttagtggaggcccctccccaagcagggagcctgggatgggcagggagtgatagccaaactccttggtcacctgctccaagaaggaagcagtagctgagcacctgccctcacatactgctcttttcccctctccctccacaccagagatgtggtgagctctgttcttctaccaacccagtctcaacacacaaagtgccaccaccttccctgactcagaacccacatccactcaatgtgaactctactaccacgacctccccatattcctcacttctccatcacctccagcctgactccctgtctgccctttcacccccaagattttgcacaggttaaggccagttatggcctttttgaaatctgtaatagctcccctttccccaactctaaagcctagaccttaaacctgttcctagagctatgcacacccctgccccagtttaccgttcctccctcagggcctccgtgacactccatgaaaagaagttcttgcataccggaaagttgaataaatggatgaattca

SEQ ID NO: 19415 - DNA, 823 bp, Homo sapiens
aacgaccgctactgtatccggcttcattagcatcacttttcccgaacatagtggcccagccccgcagacccacaagccctacccgtgctggggcttgcttcccgaggtatttcacctcttaagagggaatcttccacaagcccagcacaagctgccaggcctgagctacttgaagggggccatctaggtccccaacccatggactttgcctccattttcagctccgccttttttctcctattttctctctggctttcttcagccatgactcacaactaaaaacataaaacactggaggttagtggaggcccctccccaagcagggagcctgggatgggcagggagtgatagccaaactccttggtcacctgctccaagaaggaagcagtagctgagcacctgccctcacatactgctcttttcccctctccctccacaccagagatgtggtgagctctgttcttctaccaacccagtctcaacacacaaagtgccaccaccttccctgactcagaacccacatccactcaatgtgaactctactaccacgacctccccatattcctcacttctccatcacctccagcctgactccctgtctgccctttcacccccaagattttgcacaggttaaggccagttatggcctttttgaaatctgtaatagctcccctttccccaactctaaagcctagaccttaaacctgttcctagagctatgcacacccctgccccagtttaccgttcctccctcagggcctccgtgacactccatgaaaagaagttcttgcataccggaaagttgaataaatggatgaattca

SEQ ID NO: 19416 - DNA, 2570 bp, Homo sapiens
cggccgctgccagcagcgctggctttcgtgccgcgagaggtgctctacaagctttacaaggacccagcgggaccgtcgcgcgtgcttctgccggtgtgggaggcagagggcctggggctgcgtgtgggcgccgcaggcccagcccccggtaccggctccgggcccctccgcgccgcccgcgacagcattgagctccggcgcggcgcctgcgtgcgcaccacgggcgaggagctgtgcaatggccacgggctctgggtgaagctgacaaaggtgcgctcttccctgcccaggacccggtaaaagacccctggggccagagaaacctctggctgtttgccttttctcccctgtattgagttggcattgcgttcggcgccctttgccctgggctgggcacgacaggcggctgggcagttccctgacggctgtccccatcctacgcgtcccggcaggagcagctggcagagcacctgggcgactgcgggctgcaggaaggctggctgctggtgtgccgcccggcggagggcggagcccgcctggtacccatcgacactcccaaccacctccagcggcagcagcagctctttggcgtggattatcggccggtgctcaggtgggaacaggtggtggacctgacatactcacatcgcctgggatcgagacctcagccggcagaggcatacgcagaagctgtacaaaggctactctatgtacccccgacatggacctacgagtgcgacgaggacctgatccacttcttgtatgaccacctgggcaaggaggatgagaacctgggtagcgtgaagcagtatgtggagagcatagacgtttcctcctacacggaggagttcaacgtgtcctgcctgacagacagcaatgccgatacctactgggagagcgatgggtcccagtgccaacactgggtacggcttactatgaagaagggcaccattgtcaagaagctgctactcacagtggataccacagatgacaactttatgccaaagcgggtggtggtctatgggggtgaaggggacaacctgaagaagctgagtgacgtgagcattgacgagaccctcatcggggatgtctgtgtcctggaggacatgaccgtccacctcccgatcatcgagatccgcatcgtggagtgccgagatgatgggattgatgttcgtctccgaggggtcaagatcaagtcatctagacagcgggaactagggttgaatgcagacctgttccagccaactagtctggtgcgatatccacgcctagaaggcaccgaccctgaagtactgtaccgcagagctgtcctcctgcagagattcatcaagatcctcgatagtgtcctgcaccacctggtacctgcctgggaccacacactgggcaccttcagtgagattaagcaagtgaagcagttcctactgctgtcccgccagcggccaggcctggtggctcagtgcctgcgtgactctgagagcagcaagcccagcttcatgccacgcctatacatcaaccgccgtcttgccatggaacaccgtgcctgcccctctcgagaccctgcctgcaagaatgcagtcttcacccaggtatatgaaggcctcaagccctctgacaaatatgaaaagcccctggactacaggtggcccatgcgctatgaccagtggtgggagtgtaaatttattgcagaaggcatcattgaccaagggggtggtttccgggacagcctggcagatatgtcagaagagctgtgccctagctcagcggatacccccgtgcccctgcccttctttgtacgcacagccaaccagggcaatggcactggtgaggctcgggacatgtatgtacccaacccctcctgccgagactttgccaagtatgaatggatcggacagctgatgggggctgcccttcggggtaaggagttcctggtcctggccctgcctggttttgtgtggaagcagctttctggtgaggaggtgagctggagcaaggacttcccagctgtggactctgtgctggtgaagctcctggaagtgatggaaggaatggacaaggagacgtttgagttcaagtttgggaaggaactaacattcaccactgtactgagtgaccaacaggtggtggagctgatccctgggggtgcaggcatcgtcgtgggatatggggaccgttctcgtttcatccaactggtccagaaggcacggctagaggagagcaaggagcagtagtggcccagccccgcagacccacaagccctacccgtgctggggcttgcttcccgaggtatttcacctcttaagagggaatcttccacaagcccagcacaagctgccaggcctgagctacttgaagggggccatctaggtccccaacccatggactttgcctccattttcagctccgccttttttctcctattttctctctggctttcttcagccatgactcacaactaaaaacataaaacaactccatgaaaagaagttcttgcataccggaaagttgaataaatggatgaattcattccttcagaatgtgtttattgggccctgggcttaggcacagggtca

SEQ ID NO: 19417 - DNA, 2290 bp, Homo sapiens
cggccgctgccagcagcgctggctttcgtgccgcgagaggtgctctacaagctttacaaggacccagcgggaccgtcgcgcgtgcttctgccggtgtgggaggcagagggcctggggctgcgtgtgggcgccgcaggcccagcccccggtaccggctccgggcccctccgcgccgcccgcgacagcattgagctccggcgcggcgcctgcgtgcgcaccacgggcgaggagctgtgcaatggccacgggctctgggtgaagctgacaaaggtgcgctcttccctgcccaggacccggtaaaagacccctggggccagagaaacctctggctgtttgccttttctcccctgtattgagttggcattgcgttcggcgccctttgccctgggctgggcacgacaggcggctgggcagttccctgacggctgtccccatcctacgcgtcccggcaggagcagctggcagagcacctgggcgactgcgggctgcaggaaggctggctgctggtgtgccgcccggcggagggcggagcccgcctggtacccatcgacactcccaaccacctccagcggcagcagcagctctttggcgtggattatcggccggtgctcaggtgggaacaggtggtggacctgacatactcacatcgcctgggatcgagacctcagccggcagaggcatacgcagaagctgtacaaaggctactctatgtacccccgacatggacctacgagtgcgacgaggacctgatccacttcttgtatgaccacctgggcaaggaggatgagaacctgggtagcgtgaagcagtatgtggagagcatagacgtttcctcctacacggaggagttcaacgtgtcctgcctgacagacagcaatgccgatacctactgggagagcgatgggtcccagtgccaacactgggtacggcttactatgaagaagggcaccattgtcaagaagctgctactcacagtggataccacagatgacaactttatgccaaagcgggtggtggtctatgggggtgaaggggacaacctgaagaagctgagtgacgtgagcattgacgagaccctcatcggggatgtctgtgtcctggaggacatgaccgtccacctcccgatcatcgagatccgcatcgtggagtgccgagatgatgggattgatgttcgtctccgaggggtcaagatcaagtcatctagacagcgggaactagggttgaatgcagacctgttccagccaactagtctggtgcgatatccacgcctagaaggcaccgaccctgaagtactgtaccgcagagctgtcctcctgcagagattcatcaagatcctcgatagtgtcctgcaccacctggtacctgcctgggaccacacactgggcaccttcagtgagattaagcaagtgaagcagttcctactgctgtcccgccagcggccaggcctggtggctcagtgcctgcgtgactctgagagcagcaagcccagcttcatgccacgcctatacatcaaccgccgtcttgccatggaacaccgtgcctgcccctctcgagaccctgcctgcaagaatgcagtcttcacccaggtatatgaaggcctcaagccctctgacaaatatgaaaagcccctggactacaggtggcccatgcgctatgaccagtggtgggagtgtaaatttattgcagaaggcatcattgaccaagggggtggtttccgggacagcctggcagatatgtcagaagagctgtgccctagctcagcggatacccccgtgcccctgcccttctttgtacgcacagccaaccagggcaatggcactggtgaggctcgggacatgtatgtacccaacccctcctgccgagactttgccaagtatgaatggatcggacagctgatgggggctgcccttcggggtaaggagttcctggtgagtagccttatccacacccccgtccgatcagccctggcccttggaaggaaaggccagccaaacctgggcagctcagggtgagaagacagtggggagtgtttgtcacacaggtcctggccctgcctggttttgtgtggaagcagctttctggtgaggaggtgagctggagcaaggacttcccagctgtggactctgtgctggtgagtaggacctggaaccagtgtttcctctgcccagcccctaaaggttggtcctccctaaggctgttctgtaccttgttctttcaccacacacaagatccctctccaatccatccactcccatggcttcaactactgtctgtagactcgtgaccccta

SEQ ID NO: 19418 - DNA, 2015 bp, Homo sapiens
cggccgctgccagcagcgctggctttcgtgccgcgagaggtgctctacaagctttacaaggacccagcgggaccgtcgcgcgtgcttctgccggtgtgggaggcagagggcctggggctgcgtgtgggcgccgcaggcccagcccccggtaccggctccgggcccctccgcgccgcccgcgacagcattgagctccggcgcggcgcctgcgtgcgcaccacgggcgaggagctgtgcaatggccacgggctctgggtgaagctgacaaaggtgcgctcttccctgcccaggacccggtaaaagacccctggggccagagaaacctctggctgtttgccttttctcccctgtattgagttggcattgcgttcggcgccctttgccctgggctgggcacgacaggcggctgggcagttccctgacggctgtccccatcctacgcgtcccggcaggagcagctggcagagcacctgggcgactgcgggctgcaggaaggctggctgctggtgtgccgcccggcggagggcggagcccgcctggtacccatcgacactcccaaccacctccagcggcagcagcagctctttggcgtggattatcggccggtgctcaggtgggaacaggtggtggacctgacatactcacatcgcctgggatcgagacctcagccggcagaggcatacgcagaagctgtacaaaggctactctatgtacccccgacatggacctacgagtgcgacgaggacctgatccacttcttgtatgaccacctgggcaaggaggatgagaacctgggtagcgtgaagcagtatgtggagagcatagacgtttcctcctacacggaggagttcaacgtgtcctgcctgacagacagcaatgccgatacctactgggagagcgatgggtcccagtgccaacactgggtacggcttactatgaagaagggcaccattgtcaagaagctgctactcacagtggataccacagatgacaactttatgccaaagcgggtggtggtctatgggggtgaaggggacaacctgaagaagctgagtgacgtgagcattgacgagaccctcatcggggatgtctgtgtcctggaggacatgaccgtccacctcccgatcatcgagatccgcatcgtggagtgccgagatgatgggattgatgttcgtctccgaggggtcaagatcaagtcatctagacagcgggaactagggttgaatgcagacctgttccagccaactagtctggtgcgatatccacgcctagaaggcaccgaccctgaagtactgtaccgcagagctgtcctcctgcagagattcatcaagatcctcgatagtgtcctgcaccacctggtacctgcctgggaccacacactgggcaccttcagtgagattaagcaagtgaagcagttcctactgctgtcccgccagcggccaggcctggtggctcagtgcctgcgtgactctgagagcagcaagcccagcttcatgccacgcctatacatcaaccgccgtcttgccatggaacaccgtgcctgcccctctcgagaccctgcctgcaagaatgcagtcttcacccaggtatatgaaggcctcaagccctctgacaaatatgaaaagcccctggactacaggtggcccatgcgctatgaccagtggtgggagtgtaaatttattgcagaaggcatcattgaccaagggggtggtttccgggacagcctggcagatatgtcagaagagctgtgccctagctcagcggatacccccgtgcccctgcccttctttgtacgcacagccaaccagggcaatggcactggtgaggctcgggacatgtatgtacccaacccctcctgccgagactttgccaagtatgaatggatcggacagctgatgggggctgcccttcggggtaaggagttcctggtttgcgtgggccacggtggtgaggggtccatttcctgtgcatttcatctggggctgtcactccttcttcagtgaggcagctgagag

SEQ ID NO: 19419 - DNA, 1244 bp, Homo sapiens
cggccgctgccagcagcgctggctttcgtgccgcgagaggtgctctacaagctttacaaggacccagcgggaccgtcgcgcgtgcttctgccggtgtgggaggcagagggcctggggctgcgtgtgggcgccgcaggcccagcccccggtaccggctccgggcccctccgcgccgcccgcgacagcattgagctccggcgcggcgcctgcgtgcgcaccacgggcgaggagctgtgcaatggccacgggctctgggtgaagctgacaaaggtgcgctcttccctgcccaggacccggtaaaagacccctggggccagagaaacctctggctgtttgccttttctcccctgtattgagttggcattgcgttcggcgccctttgccctgggctgggcacgacaggcggctgggcagttccctgacggctgtccccatcctacgcgtcccggcaggagcagctggcagagcacctgggcgactgcgggctgcaggaaggctggctgctggtgtgccgcccggcggagggcggagcccgcctggtacccatcgacactcccaaccacctccagcggcagcagcagctctttggcgtggattatcggccggtgctcaggtgggaacaggtggtggacctgacatactcacatcgcctgggatcgagacctcagccggcagaggcatacgcagaagctgtacaaaggctactctatgtacccccgacatggacctacgagtgcgacgaggacctgatccacttcttgtatgaccacctgggcaaggaggatgagaacctgggtagcgtgaagcagtatgtggagagcatagacgtttcctcctacacggaggagttcaacgtgtcctgcctgacagacagcaatgccgatacctactgggagagcgatgggtcccagtgccaacactgggtacggcttactatgaagaagggcaccattgtcaagaagctgctactcacagtggataccacagatgacaactttatgccaaagcgggtggtggtctatgggggtgaaggggacaacctgaagaagctgagtgacgtgagcattgacgagaccctcatcggggatgtctgtgtcctggaggacatgaccgtccacctcccgatcatcgagatccgcatcgtggagtgccgaggtgaggtttaaggctataaggagggaaagagagcccggcgtggagatgggggcaaacagagagtgtgtgtggagagaagaggatgggct

SEQ ID NO: 19420 - DNA, 297 bp, Homo sapiens
gcccctcctgagccccagctcctgggacccagaacacagcctgtaagccaccagtactccaagaactctggcccccaccattcctcagtgccacctttctgctgctaaaaggccacagtgatgccccccagtgtgaggcgggaggtgtgccctcttccccagccaagcctttttacccactccccaggtggcagctatgcaggcaggtctgctgaaggtggtaccacaggctgtgctggacttgctgacctggcaagagttggagaagaaagtgtgtggggatccagaggtcactgt

SEQ ID NO: 19421 - DNA, 247 bp, Homo sapiens
gttgtagaccctccctcaccatccatgcaggcactgatttccttctccctccagaggaccggagccgcttcctgcgctttgtcacgggccgcagtcgcctgccagcacggatctacatctacccagacaagctggggtgagtgctggagggaggcctgaaggtgccatggccgccttctgtcctccctccccacacacgtacatgtgccccaacacatcttcctgacctatggtccctcaatgcccc

SEQ ID NO: 19422 - DNA, 869 bp, Homo sapiens
gtctgggggaagcagagagtggaaccacatagttcagcaggaaagcctcagttcattaattccaagcaaatctagtaaatggcttcctaccataggctgtgattgcttcagaggagaataaaggaaggttaatcaatggccattttaaaaaatctgaaaaatagatttgactgctaataaaatttagattaaatagtttatttctgaatattccacatcgggtatattacatctgcacatcttagatctgatgcaaagccacactaaatggcttctgtgactaaatagaatccaccttgcatttattggtattgctttattttaaagcattctttaaatcatctatacaatgataaatggtgaaatattacagctttcatgtgcgattaacttaaggagtcttgaattcgtttccattgatgcctcaatcataaaatagggatatcctcttttaaaaccgaggatagaactttgttgtgtttgggccaaatgctgttgcaaaatcccccaagcaagaagatttacaggcaaaaatgttgtagacatgacaaagttagaagtatatttagagtatgagattatgtaatacatcattctataggtttaactgttgtgagttttttcagccacaaagggttaaaatgaaaaaatcgaaatgttatgtctttgttgaaacaaataatttactttcactgaaaatattattgaaaaaataatcataaggatctaatgacagtgccaaaatatagaaaacaaaagttaccatggaaggtgctgtggcttaagaacatcacagctatgatcatatagtggttagtactctgtgttgtgcctgcagcaacctcagttgtatccaagttgtggcacca

SEQ ID NO: 19423 - DNA, 296 bp, Homo sapiens
gtctcaaaaaaagaaaaagaaaagaaaagaaaaaaaaagagtataaaggggttctaaatccaaaaagttaagaactgcagccactgaacattactttgggctaattggtccagaggaataataattaataacaccaaaattcaccaaaatgggaaatatcatgtgtggttttagataaaggaccagagtaaaagtttcaaacctacaaactagcccactgtttaaaaggtgagattacaattttcacctattaaatatgccaatttgtgaaagtatagagagaaaggcagtcatgg

SEQ ID NO: 19424 - DNA, 447 bp, Homo sapiens
ggcttttttttttgcagaaattgacaagatgatcctaaaattaataaggaaatcaagaaacccacaatagacacaatagttttgaaaaataagaacaaagttggaggcctcacatttcctgatttcaaaacgtattagtagcctacagtaatcaaaacagtgtgggttttgacataaaggcagacatatagaccaatgaaatagaatagagtccagaaaaaaaaaccctcacatatataatatatgatcaattgatttttgacaagtgtgccaagaaaattcaatgggagaaagaatagtttgttaaaaactgatgctaggacaactggagatccacatacaaaggaaagaagtgggattcttactcccccaccccctccccccaaaaaaaggaaagaaaaaaagaccttaaattttaccatggaccttgacataatagctaaatat

SEQ ID NO: 19425 - DNA, 458 bp, Homo sapiens
ttgagaaatactatcacctctgtgtgggtgtgcatttgtactgtatggcaggctctgtgcatttaatatatatgatatcctttaaccctcaatgcaaccttgcaaggtagatattaacgtccacatttttcagatgtggaaactaagcctgagcaagttttaaaatggtctctaaattcacacggctgcaggaactactaggtgaaataggctgaatgtaaacacaggtttaacgctaaatcccatgttactcccctcaacttttccccatttaaggaccttatattgagggtttattctgagccaggctgtatgctaagactttacgccatttgtccttatttacctgtgaagtcaatacggtcattatctccattttacaaatgaggaaactgacttgtaaagtggttagtcatatgcccaaggccacaaaactaataaagtgggaaaccttacca

SEQ ID NO: 19426 - DNA, 352 bp, Homo sapiens
tttatatttgttatagattcttatcagaagacactcagggttctacagattttagatgaagatgcacagctctccaacattaaaattactgagtctagcatagtgtgcaaagaaagctagttattttatgcctaataccatacagaaaattctaggccgggcatggtggctcacacccgtaattccagcactttggaaggctgaggcgggtggatcacttgaggccaggagtttgagaccagcctggccaacatagtgaaacccctttctgggaaaatacaaaaattagctgggtgtggtgatgtgtgcctgtagtcccagcttgggacccgaggtgggaggatgacttgag

SEQ ID NO: 19427 - DNA, 437 bp, Homo sapiens
tatcaacatatggtactaggcagggatgatgtaaataatgcaatcaacagatcttgggagaattacttactgactcaagattggccaccacgcctggccaaaagggactttaaaaagctttgttgcaatttctaaaacatcataaggatatatttccaaaaattttcacatacttcatttctatctcttttttctctgtccttgccttcctcacaaactcagcctagtatagtgattaaaagcgtgggttttagaatcagtatgacattgcgtagagctcaggctacattattgactaccaacatcaccttgggcaaattactagtcttgaggattatcctgctttgtctctaaacttcacttaatagggtatagtactgtttgtgaaaagtaattgaaattgtgtaaataatttagcagtacctggcacatacatg

SEQ ID NO: 19428 - DNA, 407 bp, Homo sapiens
tatcaacatatggtactaggcagggatgatgtaaataatgcaatcaacagatcttgggagaattacttactgactcaagattggccaccacgcctggccaaaagggactttaaaaagctttgttgcaatttctaaaacatcataaggatatatttccaaaaattttcacatacttcatttctatctcttttttctctgtccttgccttcctcacaaactcagcctaggcgacagaacaagactctgtctcaaagaaacaaacaaactgcatgcatagagaactttccagggatatgtctgtcatgctaaatataatgattccagatagcactaatagttttttaaggttttcttttcaaaggttaattctttcctttcaggtttaggtaaagaggaacttaaggaag

SEQ ID NO: 19429 - DNA, 751 bp, Homo sapiens
aaatcccctaaagcacttccttgaagtagagatatgccatctgtgcaatcatacagcattttaccttctctttgcttagctttaaatggctcccagttttggaagccacaggcttctccaatcaactgtatatttctccagtaaagcatattcaggaaagttgactagttgattcttatcctgattgtttctcagctttgcttccttctttaaagaaatgtactcagaagaaaatatcataaattacactaacattgttttattattattaaactagaagcaacatactatttgtcccaggtcagagttcacattttcataatcaatagaatcagatgttgggatgaatatgacattattcttagtttcatatttcatggattcagtatatagaaaccacaaatttcctaagtttactctcccaaagacaatttaataaaccaaaaatgctaccaaaagagttcaagtgtgattgatgaagtattgacaatcaaaattaacaataactgacaaaacttaactttctgcagagactattacttaaaagtgtaattcagagatttggataaagaaatgatctctttcaaaagttaatatttctatactactttagactgtatactacctaattctgacatttatgtattattttatagttttcaaaatgttttcacatacattacatttgatcctttcaacaatttaaattcagctttactaacagagaagtagatatccatcatcgacctgt

SEQ ID NO: 19430 - DNA, 466 bp, Homo sapiens
ccacatcacacaggcttggctgggggaatagttgttactgcagccattggctataaaacagtttaacattcccctacatgcaccacctcccccattgtaaattgttgcattatgatcagcatacttgaacccaaatttgtgttaaattaaatgtttgatggtttccttagtttagattcctttcagtgtacttaccagtcaaagaagatgaagctttagaaggcccaaaggtcgttcagttgggattacagacatgagccactcaggccctgcctaattttgcatttctttagttgcttgtaagattgagcatggttagcatatttatggcttacctggctgtagtgcgtgtgtgaatgaagcagtcttattttcaagccacttttcatttgggcagctaaacagtttcttgaatcatcttcagttgtctttgggttactcttgactgaacaaaggcagaggggag

SEQ ID NO: 19431 - DNA, 303 bp, Homo sapiens
gattttcatgattccttgctgtgctgactgctcttacattcttctcaaaagaatattttagtttaacaaataatttaatgttgattccattttccacatggatttagtgtttaggcctgttttgtccgactgaaggacagactacattatcagggcttttctaatgaaagtgtatgtaggcagttaggtgctactgcgtgtgagaacagcagacgctaggtggcagcatcttgcttcggaactggcacaacaaactgggcgctgagttcatagctgcattttagagagcagggtcaaaggacc

SEQ ID NO: 19432 - DNA, 445 bp, Homo sapiens
gagcttctagctactgtgatcatcactggagtgcatccttctggcagggatatggaaaaaatatattcatgctaagcttttctctgaagagaaaagacttggaattctctggttgatgagaaaggacccttaagctgtgataggacctatgtgtaaagtttgcctggtcttcatgctctaatgactcctgtgatcagtgccagagtgaactgatggaaaatgtgtggttctttttcccttttgtgagctgtgagcctcagtattaccctacagctatatgaatatcagtgctttcattggaaggacagttgttcagatttgtttaagcttaaagtcttaagtttcaaacccttctcaaaaagtctcattcctcagtatcttttcacactgtatattgaagaatttcttcattttgatcttgttttagtttgtccctgtagtaatg

SEQ ID NO: 19433 - DNA, 1072 bp, Homo sapiens
aggactcaaaaggcttgtagcatggccaccccgtgggctgggttggtggaaagcctgggatattgctctggggcaagaggggcagaaggaagcgcaaatgaaaagccagactcctttcctaccagactccactgtcagatccctctccaactcttcctgtgtgggatgatggcatttttcacagaagaagggggacatgttgatatggcctacaaggtagacatcttcactcatctctcaccctaaagtggctgtgcccaagcagctgccatgctctgcccctctttccaccgcagtgccacacagtgacctatctccatcactggcctatttcagtgttgcccactttaaggcctaactccgagtacccttcctcatctagccttgacttcctaggccagtcccaagcactgtgagctctacaagctgcaggggctctgtggttatgcacctgggctttggaatcagacctgaccttgaaactgttttttaactgcatgactttagatatgctactcaagttctttaaagagactgtaattgtatctatttcatagggttgtgaagctttaataagaaaatacttgtaaagcacttgtataataaatgttcaacacgggttggtattgttggatatgggccatatgaactggctgagacttacactgtgtgtgccttgtgctgttagttgacactttagttcttctgtgccttgtgctgttaatcgacatcttagttcttccacatcctatttcttcagttgggttacaatattcttaaggcagggacctatcttaactgtcctctcacagcagggacttgtgccaagtaggaatatttgattaatggattcattagctaatcacactttgtagatgctttttgaggaacagaacttttgaatgcacgataaacttgggttctcgtctgaataccatggctttgaggttggttatatggagcctttcagtgtgaatccctaagcctcttgagatttcttgagaggcagatatgcctgcatagcctgccctgcctgatacttcacagaatgggctgctactttttacttatt

SEQ ID NO: 19434 - DNA, 564 bp, Homo sapiens
agtagctctatgtatcttttagttggaaatgcctttggctctatgcatgcacacactgcccattaattagcaaaccaacatagaatcatctgttgatgacaaaattaccaaaatggatcatccataagtgtttatactgcaaacagtgtatcagaaatgtcataatctcattcattaagaaatttacatacacaccagattttagagtgctcattcatgatgaatgtctacttccacactgtttgtttggaaacattcaatagcccttttcaaaatgttgctgtggcaacatgacgtcaaaagtgaaaagtggccaaaagaccaaaaagtgaaccttgacctgatacaaaaatcgagtaaatggatcacagccttaaatgtaaaacgatgaaacttttatgaaaaacataggagacaatctcagaatctaggggtaatcaaatttctactgaaaattttagtagccacagcaaataagcaataaatagaaagaaatgtcattaaggttggaaagaagtgaaactactcttatttgtagatgacattttgcatatagaaaatctt

SEQ ID NO: 19435 - DNA, 425 bp, Homo sapiens
tcagctgtggaataaccacagctaagccactagaccccatttgaaaaaaaggaaaatggaaccacaagagaatgaagtcaggtttttcagaaaggtctcaatctaccagctggtcttttggctgctgccctgcctaaaagcagctttcagaatgcttagaatttccctggatttacggtcctaatcctttatatggtactttccaatagcttccatccttacaaaggtttttgtttacgtttactgattaaaaagaaagaaaatgctgcccatgggtatcattgtgtcacctcctaagaaggcacaaggaagataattctacccattttagagatggaaaaaccaaggtgtgaagtatatctttttctgttttaatcataatcaaggttgggcttgcattcaggaccttacgttagtctcctagc

SEQ ID NO: 19436 - DNA, 194 bp, Homo sapiens
aacactttgattttaggacttctcacttccagagctgtaagacaataaatttatgttgttttaagccagaaactttatgataatttgtagcagcagcagcagcaatagcatactaatatagtccttcaaaaattgaattaatcatcttgcagaatcaaggggaagaactattttgtgtcacacaccaaaagtac

SEQ ID NO: 19437 - DNA, 1049 bp, Homo sapiens
gtggtgcaggcctgtaattccagctactcagaaggctgatgtgagagaagtgcttgaacccaggaggcgcaggagtgcagtgccactgcactccagcctgggcaacagagtgagactccatctcaaaaataaaaaaaaataaaaaaataaaagaagaagaaagaaagagagaacgagaaaggagaagggagggaggcaggaaggaaggaaggaaggagagagagagagagaaactgccctttgggtagcatggcatatgccgcttctcctgttcgcagtcagatcttcctccctttatgtaaagagtctattcttaccactgctgacatctaaagagcacagaagcaagaattacagcttagagaagttctgcaagatagaagtaacaagggaagacagaagattgtctactctggggagttttctgctttagtgttcacaaaacatttcataatctgcagataaatgtgcaggctctgcaaaatagaacatgcaaatagttcttggtaaaatctatggatcaaagctatttctctttgcccttcaaatgatctagtttgctttttaaatatttgaacattttcctacaagttgtgacaatgacacaagtttaaacacaccatgccttttataaatagatcctaacctgaaaaagcttccaccctgactgactcttgtctgaggtttgagaggaaaagagagatttaaagggaagctaattaatacaaatcttctaaaacatacatgaggctaggaatatattaagtgcttaattaaaaaacaatgtaatcccagcactttgggaggccgaggcgggcggatcacgaggtcaggagatcgagaccatcctggcgaacacggtgaaaccccgtctctactaaaaatacaaaaaaaatttagccgggcgtggtggcaggcgcctgtagtcccagctactcgggaggctgaggcaggagaatggtgtgaacccggggggcggagcttgcggtgagccgtgaccgcgccactgcactcctgcctgggagacagcgagactccatctcaaaaaa

SEQ ID NO: 19438 - DNA, 496 bp, Homo sapiens
gcccctggaaactccagtggtctgacatcatgggaatttgcccgggcggctttgtgaagggagttctgccctactcttggctgtgtcttttgttgttgtttatatagtaagtaaatatatcatccctttgaggctcagttacataatttatgtttccccagtattcagagaagaaaccagaacaaatccacttccagattccagtccagctgaatgaggttatcagtagattaaaaagttttccttgatcaccagtgacactgcttgctttcctttacaaaatcttagtgtcctgtgctgtgtggaacgtctgtctaattatcagtacgcgtggaaatgagaaaaacggatgtgaacagcagacacgtcacagcacacctgggttccttggcaacattccacttggttcttttttcaagttgtcctacttttaagcattcccagttttttgtattcacccagcgtcacttgtgattcaaaataaaccttggattct

SEQ ID NO: 19439 - DNA, 537 bp, Homo sapiens
tatattaaagaacctgaatatgaaaatgtaaaatatacattgtctttatctaggggcccataagttaggagtttttagtgtccttactgttttcttcacattttcctcactttatctcatcttctcagatacttcagggcatttgtaaagggactgaactatttcttcacaaggaaggagtatatatgaggaggagatgggcagattgccaaatatgcattaatagctttgatgtcagtctgctgactgatgacttgtttctagctgccctaggaggtcccacctggtaattttggtgacaaaagcaagtaccatgggtgtttttggctagatggttgagcaaaaaggtggtcaggcttcataggaaacaaaataggaaagggtggcattgggggcaatttctagttcttctactgtctgaatcaccaactcaaaatacaaggctgacaatgctgtctttgaattcaggagaagcaaactgaaggagaagcacaaaaatcatcacagctatggtgaaaccctgtctctacaaaaaaa

SEQ ID NO: 19440 - DNA, 373 bp, Homo sapiens
  misc_feature (328)..(328): n is a, c, g, or t
  misc_feature (358)..(358): n is a, c, g, or t
gacaggctgagggctctctaattagccacagttcccactctttttttgtcttgctcctctcttcccacgctatggcagtagtccactgccatgggcactggagtggcacctctccattcttttcttttcttccactttgatcccctgtcctcaggattctgtccctatttattaatacatttcctttttttttttttggagattgtgccattgtacttcagcctgggcaacaagagtgaaactctgtcccaaaaataaataaataaataaataaataaaagaaggggacagagacaaaggtgatgacagaaatgaaacagaaaacggnctcctcctttatacccaacctgggtcttgntggaccaggaatcct

SEQ ID NO: 19441 - DNA, 171 bp, Homo sapiens
tgaatatgagcacagacttggggatattagtgtcacctagcgttattagctagtattctccttttgtttccccataacatcccctcctccttcccacagatccactttccactcatttccatcctgtcttacgccacttggggcttgtcccttctagaatgcatccctggc

SEQ ID NO: 19442 - DNA, 456 bp, Homo sapiens
tgcctatctgtaataaggcaatgtgacctctaatataccccccgtgcttcccatcactagtctattacccttgtttattttctcagtgcatatatcaccatgtgaagttacttttacttattgttgatttcccctctagattttaagtgccagaagagcacttaccttgtttattcctgttttccaatacctagaccagtgcctgcacatagtaggcactcaatatttgttgaaaaaataaactgaaatggaaaaatatttttggcagtagctgtagctacaagttatatcactgaattttggatcccagtagagtctgcttgtgacctcttaggattctattttcgttccccctgaagattgggagctgataatcgtaaagtactgggaccccatcagcttccctctgttttcagtacacaactcatgaaaagacttacaatgtgactatcttgg

SEQ ID NO: 19443 - DNA, 283 bp, Homo sapiens
gccataacaaagataacttagactgggtaatttatacacaatggaaatatatttctcataattctggcctgtaatcccagctacttgggaagctgaggtgagaggattgcttgagcttaagagttggaggctgcagtgaactctgatcgtaacactgcactccagcctgggtgacagagggagaccccatctctaatccattattttattttatatatatttttaaattattttaaaaagaaaaaagaaatgaacctaagtgacaaaaaagcatggtttattt

SEQ ID NO: 19444 - DNA, 698 bp, Homo sapiens
gtatggtgtagtttctacatacagttcgtcatctgttagggaaaagggtagatagaaaaattcacgaaacagtatttgctatgattttcacagggtggtggaaaaccaaaggttctttcactgctctgactccatccacaagggtacaccacgagggtactttctaccaccaacttgcagaaaactagagaatgtgaccagagatcatgttttgatcccaagatgggtttccccattgggtctctttcattagcctccctgactactgacaaagttgcacagttttcaccaccatgagaaacaatctgtgtatagatgtgtaaatttccagtgtgtatttttatatggcttaagggtaaatcaggtaataaggcaagctcacttccctgaccacacctttaatcagaagtctaaggaacagactgtttaacctgtttccagtggtttcagggacttctgtattgggtgtagcaaggacaaaactggtcattacactctacccaaaaagatcattagaccatatcaggttgcagtcatgcttttggaaacttggacatgtttcttaacttctctgagcaactgtgtcctaatgtgtaaaggagatatgagactggcttgcagcattgttgtgaggattggtaattatttatgtgacaatagaatttaatagatgataacaattattaatatgctcacca

SEQ ID NO: 19445 - DNA, 403 bp, Homo sapiens
ggggttcgtgctgggggttgcccaggtcgctggctgcattctcaggtgtggaggtggggagctggctctggctagacatcacagttaaactcttcaatgactgagagattaaccaggctctgcaggagggtctggctacttctcagtgccccgcctctgctaggaacatgtcgtgtcaagtattataatctctattctaatacactcatatgataagccaatattataatttctgttccagtaaattgcacatgacacaagttttaaaaattgtggggaggctgaggctggggaatgggagactgaggcagaagggtcgcttgaactcgggaggtggaggttccagtgagtcaagattgcgccactgtactccagcctgggtgacagagtgagactctgtctc

SEQ ID NO: 19446 - DNA, 234 bp, Homo sapiens
cctgagttattcttccattgcccggtgctatcatacagatacaggactggtgactacaaacagtgttagcaggacgtacttggagctcatttggcagtgggagtggacgtgctgggggccatcccccttccacctgaagcgttcttgtcctaaagcatgttgctgagacagctgtgtagggcgtggcggtgaccctggggaaggaccgtactgagagctccagactccagccag

SEQ ID NO: 19447 - DNA, 508 bp, Homo sapiens
tggccccccaggccagccatgcaggttggacacagtcatcaagaattgttgtaaaggacagtatgaatggtgccttctagagcacagtcatgatggactgccttgggaacagtggctgttgaaggagtaactggcccaacagtggttaagcacttagcccatcgcctggcacagagtcagagcttgttaaatggtagctgctattctacagacatgccctgaggttttgatgagtggccctcaggttcacggagtgttgagacctccactgttcattgttcactgttcagatttgttgaatgtcagcttaaggatgacctgctggggccatgtccagccaagaaatgtttttccctgtgtatatcctgctcaatgtgagcctttgatccttgcacttctcagtccctctaaatcgcccttgggcactcaaagactaagtgatgtgggtgggctcacggcaacatctgttcctcgatttatccctcctcccctcaccaccccaccccgg

SEQ ID NO: 19448 - DNA, 423 bp, Homo sapiens
ggcccagaaaaaaaagtcaccttggatttccattcatgaatacatacttctgtgacataggaggtgtgaaagaagcatttgctgaatgaaataaaacttcctgaaatgtaaaaataggcaagggtttgtagccatacactaaaaattattgtaaagcactgtcactgttagcatggccaagatatacctagaagaacacttttcgtcttcttgtagcactgcttcttggatgtgataggtgctccacaaatatactattaatttaattaagcaaatttgatttagaataatctcctggccaaatgcctagggatcttgaacctgaactaattatagtcacaaagaagggcttgcatttgaaatcttcgagggttaagaatggtcaaatacatgtcacaaagacaataaaaatattccaagggc

SEQ ID NO: 19449 - DNA, 222 bp, Homo sapiens
gtccccacctccgcctcccctctaccttcaccttggtcgttccaggagagcaggagacagtgttggttgtggttcagctttccagctcatccaaactcaaattccaggcctctgactttcacaaggtatctaacaccgctaagcctcagtgttctcacctgtacgatggagtctgtactagctcttggaattaaacaagactatgtgttttggtacgtttat

SEQ ID NO: 19450 - DNA, 2386 bp, Homo sapiens
tgtatcttgtaagcgcaatttaattagggtcaaactattctgtatggacttgctttttcgacttctgaggatttagtagtcatgattaagtgctgtcacgctactgcgatctacaaacagtagctccacaacatccgcccgcatcgtggcaaagaattatcaagaaatccccaagggggcggtgaggagccgccggtcggccaggtcgcccggtccctcagtctggtgaaaagctccgttgcccaccctgagggcttcgcggaaggaagttggccgtatcgctgcaccttagagatgcgacggccgaggctcccagctcaagcttctggtagtaaggcctgtgtgcctggcattcggggaggccacttttctatccccagcttccgggccaccacttgggtgcgtcgtggggatgtcggcagctacgtttgcggcacagctccggctaaactgaaaaacgaatcctcaggtttgacaaaactaaactaaaaagacacttttctcctctcactctgacgtcccaaaagtttcctttttaggggtcggggcctacggtgggcgaggagaaactcgaggtatctacccaccgcaccaaacaactcatgcgtcgcttcctttcgacttggagctggccagtatcccggcgtcctctcggccgacgctgcggtctgaggccactctggccggcagccgacgtctctatggctccgaccgaggggcggagccgctgctcgagctgctgctggattgaactcagagaagccgggggtgctggaaatgtaaacaagaatagactgttcattcctgatggcttttagtctatactaacatattgtttgtcatggcatccgagactgaaaagacccatgctttactgcagacttgtagcactgaatctcttatttccagccttggtctgggggcattttgcctcgtagctgacagacttcttcagttttccacaattcagcaaaatgactggcttcgtgctctctcagataatgcagtacattgtgtaattggcatgtggtcatgggcggtagtcactggaatcaagaagaagactgactttggagaaatcattttagctggatttttagcctctgttattgatgtagaccacttttttctagctggatccatgtctttaaaggctgctttgactctcccgcgaagacctttccttcactgttctactgtgattcccgttgtggttctgaccctgaaatttactatgcaccttttcaagctcaaagactcatggtgctttcttccctggatgttatttatatcctggacttcacatcatatccgagatgggattcgtcatggtttgtggatatgcccatttggaaaaacttctcctttgccattctggctttatgtaataatcacatcatctttacctcacatctgttcattcgttatgtatttaacaggaaccagacaaatgatgtcttcaaaacatggagttcgtattgatgtctgaggtacacggcagtcttagagaagcaaatggctcagatgatgataattaagagtagccaacattaaagttaatttttaaaaatacagttaggtgtttatattatttagttattataattctgcaatcctcttgctcaggaagtgtatacaacttttttaaaaattatacttgttattattctacttctctcttctatgacaactctagtgcaatattagagtttcatttattccacaatatatttttactgtttttttctatttatctggctttactagtagttcttttagattaacatccagttcattttctggaaatatacctggaatttagtccatttcctaatgaaaaacagctcaaattttagggtaactaatttgtaaagagttaacattatatttggatccaattttcctgagatattgaaatagtgaaatcaccaaataaatgatatgaatcatttaactatacaaatgtatagttaatgctaacatgtatttattttcatatatgttgatcctgagtgaaatttaatttgcagaatgctttatgagttatgattactggcaaaaccttcagagcacttgtgacacatcattataatatccagtagctaacattagatctagcttattatttcagaaattaatttaggaaataattattaaaacatgttggctacagtagcactttactgaagtagtattttttggtatctctagcctagaatctcgtgtgttagttttaactgttttgaaaataataagtaacattaacaaaatgttgatatttggatcataaccgtaacatttgaatttatgcaaaaaaaagaccagaaatgtcatttcaaatgtaaattcctgaatgtaccattaaaattattttagttgctatcag

SEQ ID NO: 19451 - DNA, 2958 bp, Homo sapiens
  misc_feature (2901)..(2901): n is a, c, g, or t
ggcacgaggctcagagaagccggggtgttgaatgtttgttttctaaaggagacaatgattcataatttgtgacactgtaaatcctgaggtttatagaaaggattcatgactttgtaatggagttttgatgcttgagtaacctgcaggagaggatgacactttcgatgtcagagctgcacttgtgggcccaggatttggagaagtggagagaaggtctgatgggagttgaaggagctgcaggtccagcttcttccccatgccagcaagggtgctggaaatgtaaacaagaatagactgttcattcctgatggcttttagtctatactaacatattgtttgtcatggcatccgagactgaaaagacccatgctttactgcagacttgtagcactgaatctcttatttccagccttggtctgggggcattttgcctcgtagctgacagacttcttcagttttccacaattcagcaaaatgactggcttcgtgctctctcagataatgcagtacattgtgtaattggcatgtggtcatgggcggtagtcactggaatcaagaagaagactgactttggagaaatcattttagctggatttttagcctctgttattgatgtagaccacttttttctagctggatccatgtctttaaaggctgctttgactctcccgcgaagacctttccttcactgttctactgtgattcccgttgtggttctgaccctgaaatttactatgcaccttttcaagctcaaagactcatggtgctttcttccctggatgttatttatatcctggacttcacatcatatccgagatgggattcgtcatggtttgtggatatgcccatttggaaaaacttctcctttgccattctggctttatgtaataatcacatcatctttacctcacatctgttcattcgttatgtatttaacaggaaccagacaaatgatgtcttcaaaacatggagttcgtattgatgtctgaggtacacggcagtcttagagaagcaaatggctcagatgatgataattaagagtagccaacattaaagttaatttttaaaaatacagttaggtgtttatattatttagttattataattctgcaatcctcttgctcaggaagtgtatacaacttttttaaaaattatacttgttattattctacttctctcttctatgacaactctagtgcaatattagagtttcatttattccacaatatatttttactgtttttttctatttatctggctttactagtagttcttttagattaacatccagttcattttctggaaatatacctggaatttagtccatttcctaatgaaaaacagctcaaattttagggtaactaatttgtaaagagttaacattatatttggatccaattttcctgagatattgaaatagtgaaatcaccaaataaatgatatgaatcatttaactatacaaatgtatagttaatgctaacatgtatttattttcatatatgttgatcctgagtgaaatttaatttgcagaatgctttatgagttatgattactggcaaaaccttcagagcacttgtgacacatcattataatatccagtagctaacattagatctagcttattatttcagaaattaatttaggaaataattattaaaacatgttggctacagtagcactttactgaagtagtattttttggtatctctagcctagaatctcgtgtgttagttttaactgttttgaaaataataagtaacattaacaaaatgttgatatttggatcataaccgtaacatttgaatttatgcaaaaaaaagaccagaaatgtcatttcaaatgtaaattcctgaatgtaccattaaaattattttagttgctatcagtttgtttatatactattttatatactattctaaaatattttactctgcctgatactgaaagacagcatatatttttttcaaaataaagttttaggaaatttgctttttcctttttctttcaggttgatcttctattaaaatgattcctctttattagagaaggaaaatttagttgctatacatcttatatttgcacagtttattaaagtcagtgccctaaaggtacctgcttttctttgtggcatatatggcatctgctgtcttcagattttcttacacttttgtgatttataatgttagtgattggtgccttattctctgaggaaagatggagggttcataaagcaatgccttatccacagcagattttcttgtatattaagttaaacagaattctgtaaattattatgaaggttcaagctctttaggggagttttttttcttgttgttaacaaattggttgcaatctattatattttgcaattgattagatattacagtctacttatttttcaagagtaattattgtataagtttggttggtataatggtaaatattatatagtgggggtaaatttgattagagttttttttttaagcactggcttcagaaatccatggaaataaagtctgtatcttgtgtaacaattcctgactaaattgcaaaaccttttctactttttctttcttcatattaaacaaataaatattattaaaaatatagggccttatttaagaatgctacatagtgaccggacgtggtggctcacgcctgtaatcccaacactttgggaggccgaggcaggcaggtcacttgaggtcaggagttcgagaccagcctggccaacatggtgaaaccccgtctctactaaaaatacaaaaattaactgggcgtgctggtgtgcacctgtagtttcagctattcgggaggctgaggcagacaatggcttgaacctgggaggcagaggttgtagtgagctgagatggggccactgcactgcagcctgtgtgacanagggagactgtcttaaaaaataaacataaaataaataaataagaatgctacataggc

SEQ ID NO: 19452 - DNA, 603 bp, Homo sapiens
atgattgcatttttatatcaattaaggttatttggttcaaggcatcagaaatgtaaaggggatttgatgggaaaatgttggggtagctcattgaagtggagggggagctgcaagatctagggtagctctgagaacctttagacgttggacataagtactcactgtcatcatgattctattagcctttctcctttgtgtctctctgggattttattttcctaggctatttcgtgtagtggagcccatggcctccaagaagaggaactttctctaccacaagacaaattttggaaaggaatctgattggctcagcctggaccactttcattactagattagtcaccattattagggaaatggaaaactctaattggtgagctctggagtttaatgtgagaaagttttcccaaaggaagggattactgttgtcagaagtatggaaagtagttgttgggtacacaaacccaacggatattcaccaccatgtactacacacagctgggagatagatctatttgatgaccttaaagcaatagattgcagttggtgggctttctgaaattctccttgatacataccatgtaccctgcttttcctaaaaaa

SEQ ID NO: 19453 - DNA, 3033 bp, Homo sapiens
tgtatcttgtaagcgcaatttaattagggtcaaactattctgtatggacttgctttttcgacttctgaggatttagtagtcatgattaagtgctgtcacgctactgcgatctacaaacagtagctccacaacatccgcccgcatcgtggcaaagaattatcaagaaatccccaagggggcggtgaggagccgccggtcggccaggtcgcccggtccctcagtctggtgaaaagctccgttgcccaccctgagggcttcgcggaaggaagttggccgtatcgctgcaccttagagatgcgacggccgaggctcccagctcaagcttctggtagtaaggcctgtgtgcctggcattcggggaggccacttttctatccccagcttccgggccaccacttgggtgcgtcgtggggatgtcggcagctacgtttgcggcacagctccggctaaactgaaaaacgaatcctcaggtttgacaaaactaaactaaaaagacacttttctcctctcactctgacgtcccaaaagtttcctttttaggggtcggggcctacggtgggcgaggagaaactcgaggtatctacccaccgcaccaaacaactcatgcgtcgcttcctttcgacttggagctggccagtatcccggcgtcctctcggccgacgctgcggtctgaggccactctggccggcagccgacgtctctatggctccgaccgaggggcggagccgctgctcgagctgctgctggattgaactcagagaagccgggggtgctggaaatgtaaacaagaatagactgttcattcctgatggcttttagtctatactaacatattgtttgtcatggcatccgagactgaaaagacccatgctttactgcagacttgtagcactgaatctcttatttccagccttggtctgggggcattttgcctcgtagctgacagacttcttcagttttccacaattcagcaaaatgactggcttcgtgctctctcagataatgcagtacattgtgtaattggcatgtggtcatgggcggtagtcactggaatcaagaagaagactgactttggagaaatcattttagctggatttttagcctctgttattgatgtagaccacttttttctagctggatccatgtctttaaaggctgctttgactctcccgcgaagacctttccttcactgttctactgtgattcccgttgtggttctgaccctgaaatttactatgcaccttttcaagctcaaagactcatggtgctttcttccctggatgttatttatatcctggacttcacatcatatccgagatgggattcgtcatggtttgtggatatgcccatttggaaaaacttctcctttgccattctggctttatgtaataatcacatcatctttacctcacatctgttcattcgttatgtatttaacaggaaccagacaaatgatgtcttcaaaacatggagttcgtattgatgtctgaggtacacggcagtcttagagaagcaaatggctcagatgatgataattaagagtagccaacattaaagttaatttttaaaaatacagttaggtgtttatattatttagttattataattctgcaatcctcttgctcaggaagtgtatacaacttttttaaaaattatacttgttattattctacttctctcttctatgacaactctagtgcaatattagagtttcatttattccacaatatatttttactgtttttttctatttatctggctttactagtagttcttttagattaacatccagttcattttctggaaatatacctggaatttagtccatttcctaatgaaaaacagctcaaattttagggtaactaatttgtaaagagttaacattatatttggatccaattttcctgagatattgaaatagtgaaatcaccaaataaatgatatgaatcatttaactatacaaatgtatagttaatgctaacatgtatttattttcatatatgttgatcctgagtgaaatttaatttgcagaatgctttatgagttatgattactggcaaaaccttcagagcacttgtgacacatcattataatatccagtagctaacattagatctagcttattatttcagaaattaatttaggaaataattattaaaacatgttggctacagtagcactttactgaagtagtattttttggtatctctagcctagaatctcgtgtgttagttttaactgttttgaaaataataagtaacattaacaaaatgttgatatttggatcataaccgtaacatttgaatttatgcaaaaaaaagaccagaaatgtcatttcaaatgtaaattcctgaatgtaccattaaaattattttagttgctatcagtttgtttatatactattttatatactattctaaaatattttactctgcctgatactgaaagacagcatatatttttttcaaaataaagttttaggaaatttgctttttcctttttctttcaggttgatcttctattaaaatgattcctctttattagagaaggaaaatttagttgctatacatcttatatttgcacagtttattaaagtcagtgccctaaaggtacctgcttttctttgtggcatatatggcatctgctgtcttcagattttcttacacttttgtgatttataatgttagtgattggtgccttattctctgaggaaagatggagggttcataaagcaatgccttatccacagcagattttcttgtatattaagttaaacagaattctgtaaattattatgaaggttcaagctctttaggggagttttttttcttgttgttaacaaattggttgcaatctattatattttgcaattgattagatattacagtctacttatttttcaagagtaattattgtataagtttggttggtataatggtaaatattatatagtgggggtaaatttgattagagttttttttttaagcactggcttcagaaatccatggaaataaagtctgtatcttgtgtaaca

SEQ ID NO: 19454 - DNA, 2939 bp, Homo sapiens
  misc_feature (39)..(39): n is a, c, g, or t
  misc_feature (53)..(53): n is a, c, g, or t
atgttgattctgtttcttatctctgctctgtgtaatttnatagtggctttttntccagcctgggcaacagaacaagactttgtctctaaaaaaagaaaagaaaatttgtgataatatataaacaaagattgagtggcagcagagcttttgtgttaggcgtctgtgtagtctgtgcccagcctaggttcttctcatacctgaatggccttctttctcattagggctaacttacaggccatactttattgaaggaggggaatattgctgctgccgctgctctgggttggccattaattcaagttttcagtgtccctgtttcagtccagctaagtggataagggcatttatttttagttgaaagggacattttatcaactttaaagttatatgcattaaatatttaaatatgttgacttctttatccattcaggtgttgaatgtttgttttctaaaggagacaatgattcataatttgtgacactgtaaatcctgaggtttatagaaaggattcatgactttgtaatggagttttgatgcttgagtaacctgcaggagaggatgacactttcgatgtcagagctgcacttgtgggcccaggatttggagaagtggagagaaggtctgatgggagttgaaggagctgcaggtccagcttcttccccatgccagcaagggtgctggaaatgtaaacaagaatagactgttcattcctgatggcttttagtctatactaacatattgtttgtcatggcatccgagactgaaaagacccatgctttactgcagacttgtagcactgaatctcttatttccagccttggtctgggggcattttgcctcgtagctgacagacttcttcagttttccacaattcagcaaaatgactggcttcgtgctctctcagataatgcagtacattgtgtaattggcatgtggtcatgggcggtagtcactggaatcaagaagaagactgactttggagaaatcattttagctggatttttagcctctgttattgatgtagaccacttttttctagctggatccatgtctttaaaggctgctttgactctcccgcgaagacctttccttcactgttctactgtgattcccgttgtggttctgaccctgaaatttactatgcaccttttcaagctcaaagactcatggtgctttcttccctggatgttatttatatcctggacttcacatcatatccgagatgggattcgtcatggtttgtggatatgcccatttggaaaaacttctcctttgccattctggctttatgtaataatcacatcatctttacctcacatctgttcattcgttatgtatttaacaggaaccagacaaatgatgtcttcaaaacatggagttcgtattgatgtctgaggtacacggcagtcttagagaagcaaatggctcagatgatgataattaagagtagccaacattaaagttaatttttaaaaatacagttaggtgtttatattatttagttattataattctgcaatcctcttgctcaggaagtgtatacaacttttttaaaaattatacttgttattattctacttctctcttctatgacaactctagtgcaatattagagtttcatttattccacaatatatttttactgtttttttctatttatctggctttactagtagttcttttagattaacatccagttcattttctggaaatatacctggaatttagtccatttcctaatgaaaaacagctcaaattttagggtaactaatttgtaaagagttaacattatatttggatccaattttcctgagatattgaaatagtgaaatcaccaaataaatgatatgaatcatttaactatacaaatgtatagttaatgctaacatgtatttattttcatatatgttgatcctgagtgaaatttaatttgcagaatgctttatgagttatgattactggcaaaaccttcagagcacttgtgacacatcattataatatccagtagctaacattagatctagcttattatttcagaaattaatttaggaaataattattaaaacatgttggctacagtagcactttactgaagtagtattttttggtatctctagcctagaatctcgtgtgttagttttaactgttttgaaaataataagtaacattaacaaaatgttgatatttggatcataaccgtaacatttgaatttatgcaaaaaaaagaccagaaatgtcatttcaaatgtaaattcctgaatgtaccattaaaattattttagttgctatcagtttgtttatatactattttatatactattctaaaatattttactctgcctgatactgaaagacagcatatatttttttcaaaataaagttttaggaaatttgctttttcctttttctttcaggttgatcttctattaaaatgattcctctttattagagaaggaaaatttagttgctatacatcttatatttgcacagtttattaaagtcagtgccctaaaggtacctgcttttctttgtggcatatatggcatctgctgtcttcagattttcttacacttttgtgatttataatgttagtgattggtgccttattctctgaggaaagatggagggttcataaagcaatgccttatccacagcagattttcttgtatattaagttaaacagaattctgtaaattattatgaaggttcaagctctttaggggagttttttttcttgttgttaacaaattggttgcaatctattatattttgcaattgattagatattacagtctacttatttttcaagagtaattattgtataagtttggttggtataatggtaaatattatatagtgggggtaaatttgattagagttttttttttaagcactggcttcagaaatccatggaaataaagtctgtatcttgtgtaaca

SEQ ID NO: 19455 - DNA, 3507 bp, Homo sapiens
tgtatcttgtaagcgcaatttaattagggtcaaactattctgtatggacttgctttttcgacttctgaggatttagtagtcatgattaagtgctgtcacgctactgcgatctacaaacagtagctccacaacatccgcccgcatcgtggcaaagaattatcaagaaatccccaagggggcggtgaggagccgccggtcggccaggtcgcccggtccctcagtctggtgaaaagctccgttgcccaccctgagggcttcgcggaaggaagttggccgtatcgctgcaccttagagatgcgacggccgaggctcccagctcaagcttctggtagtaaggcctgtgtgcctggcattcggggaggccacttttctatccccagcttccgggccaccacttgggtgcgtcgtggggatgtcggcagctacgtttgcggcacagctccggctaaactgaaaaacgaatcctcaggtttgacaaaactaaactaaaaagacacttttctcctctcactctgacgtcccaaaagtttcctttttaggggtcggggcctacggtgggcgaggagaaactcgaggtatctacccaccgcaccaaacaactcatgcgtcgcttcctttcgacttggagctggccagtatcccggcgtcctctcggccgacgctgcggtctgaggccactctggccggcagccgacgtctctatggctccgaccgaggggcggagccgctgctcgagctgctgctggattgaactcagagaagccggggtgttgaatgtttgttttctaaaggagacaatgattcataatttgtgacactgtaaatcctgaggtttatagaaaggattcatgactttgtaatggagttaggatccatcaaagaagcagaactactttgtgagctaaagacctatggaattgtgggaggtggcagagcggtctgcagacttgcctctgagtctcttgttcagcctgaagttgctgcagatctactagactggcagtcagacagggatactggatgtggatgagagaaaagacaaactgaaacccttgggaacaaaacggaacctgcatcagcctctcaccaaccctagttttgatgcttgagtaacctgcaggagaggatgacactttcgatgtcagagctgcacttgtgggcccaggatttggagaagtggagagaaggtctgatgggagttgaaggagctgcaggtccagcttcttccccatgccagcaagggtgctggaaatgtaaacaagaatagactgttcattcctgatggcttttagtctatactaacatattgtttgtcatggcatccgagactgaaaagacccatgctttactgcagacttgtagcactgaatctcttatttccagccttggtctgggggcattttgcctcgtagctgacagacttcttcagttttccacaattcagcaaaatgactggcttcgtgctctctcagataatgcagtacattgtgtaattggcatgtggtcatgggcggtagtcactggaatcaagaagaagactgactttggagaaatcattttagctggatttttagcctctgttattgatgtagaccacttttttctagctggatccatgtctttaaaggctgctttgactctcccgcgaagacctttccttcactgttctactgtgattcccgttgtggttctgaccctgaaatttactatgcaccttttcaagctcaaagactcatggtgctttcttccctggatgttatttatatcctggacttcacatcatatccgagatgggattcgtcatggtttgtggatatgcccatttggaaaaacttctcctttgccattctggctttatgtaataatcacatcatctttacctcacatctgttcattcgttatgtatttaacaggaaccagacaaatgatgtcttcaaaacatggagttcgtattgatgtctgaggtacacggcagtcttagagaagcaaatggctcagatgatgataattaagagtagccaacattaaagttaatttttaaaaatacagttaggtgtttatattatttagttattataattctgcaatcctcttgctcaggaagtgtatacaacttttttaaaaattatacttgttattattctacttctctcttctatgacaactctagtgcaatattagagtttcatttattccacaatatatttttactgtttttttctatttatctggctttactagtagttcttttagattaacatccagttcattttctggaaatatacctggaatttagtccatttcctaatgaaaaacagctcaaattttagggtaactaatttgtaaagagttaacattatatttggatccaattttcctgagatattgaaatagtgaaatcaccaaataaatgatatgaatcatttaactatacaaatgtatagttaatgctaacatgtatttattttcatatatgttgatcctgagtgaaatttaatttgcagaatgctttatgagttatgattactggcaaaaccttcagagcacttgtgacacatcattataatatccagtagctaacattagatctagcttattatttcagaaattaatttaggaaataattattaaaacatgttggctacagtagcactttactgaagtagtattttttggtatctctagcctagaatctcgtgtgttagttttaactgttttgaaaataataagtaacattaacaaaatgttgatatttggatcataaccgtaacatttgaatttatgcaaaaaaaagaccagaaatgtcatttcaaatgtaaattcctgaatgtaccattaaaattattttagttgctatcagtttgtttatatactattttatatactattctaaaatattttactctgcctgatactgaaagacagcatatatttttttcaaaataaagttttaggaaatttgctttttcctttttctttcaggttgatcttctattaaaatgattcctctttattagagaaggaaaatttagttgctatacatcttatatttgcacagtttattaaagtcagtgccctaaaggtacctgcttttctttgtggcatatatggcatctgctgtcttcagattttcttacacttttgtgatttataatgttagtgattggtgccttattctctgaggaaagatggagggttcataaagcaatgccttatccacagcagattttcttgtatattaagttaaacagaattctgtaaattattatgaaggttcaagctctttaggggagttttttttcttgttgttaacaaattggttgcaatctattatattttgcaattgattagatattacagtctacttatttttcaagagtaattattgtataagtttggttggtataatggtaaatattatatagtgggggtaaatttgattagagttttttttttaagcactggcttcagaaatccatggaaataaagtctgtatcttgtgtaaca

SEQ ID NO: 19456 - DNA, 2602 bp, Homo sapiens
gagctgtatctagaggacccccggtaacagcggtctgcagacttgcctctgagtctcttgttcagcctgaagttgctgcagatctactagactggcagtcagacagggatactggatgtggatgagagaaaagacaaactgaaacccttgggaacaaaacggaacctgcatcagcctctcaccaaccctagttttgatgcttgagtaacctgcaggagaggatgacactttcgatgtcagagctgcacttgtgggcccaggatttggagaagtggagagaaggtctgatgggagttgaaggagctgcaggtccagcttcttccccatgccagcaagggtgctggaaatgtaaacaagaatagactgttcattcctgatggcttttagtctatactaacatattgtttgtcatggcatccgagactgaaaagacccatgctttactgcagacttgtagcactgaatctcttatttccagccttggtctgggggcattttgcctcgtagctgacagacttcttcagttttccacaattcagcaaaatgactggcttcgtgctctctcagataatgcagtacattgtgtaattggcatgtggtcatgggcggtagtcactggaatcaagaagaagactgactttggagaaatcattttagctggatttttagcctctgttattgatgtagaccacttttttctagctggatccatgtctttaaaggctgctttgactctcccgcgaagacctttccttcactgttctactgtgattcccgttgtggttctgaccctgaaatttactatgcaccttttcaagctcaaagactcatggtgctttcttccctggatgttatttatatcctggacttcacatcatatccgagatgggattcgtcatggtttgtggatatgcccatttggaaaaacttctcctttgccattctggctttatgtaataatcacatcatctttacctcacatctgttcattcgttatgtatttaacaggaaccagacaaatgatgtcttcaaaacatggagttcgtattgatgtctgaggtacacggcagtcttagagaagcaaatggctcagatgatgataattaagagtagccaacattaaagttaatttttaaaaatacagttaggtgtttatattatttagttattataattctgcaatcctcttgctcaggaagtgtatacaacttttttaaaaattatacttgttattattctacttctctcttctatgacaactctagtgcaatattagagtttcatttattccacaatatatttttactgtttttttctatttatctggctttactagtagttcttttagattaacatccagttcattttctggaaatatacctggaatttagtccatttcctaatgaaaaacagctcaaattttagggtaactaatttgtaaagagttaacattatatttggatccaattttcctgagatattgaaatagtgaaatcaccaaataaatgatatgaatcatttaactatacaaatgtatagttaatgctaacatgtatttattttcatatatgttgatcctgagtgaaatttaatttgcagaatgctttatgagttatgattactggcaaaaccttcagagcacttgtgacacatcattataatatccagtagctaacattagatctagcttattatttcagaaattaatttaggaaataattattaaaacatgttggctacagtagcactttactgaagtagtattttttggtatctctagcctagaatctcgtgtgttagttttaactgttttgaaaataataagtaacattaacaaaatgttgatatttggatcataaccgtaacatttgaatttatgcaaaaaaaagaccagaaatgtcatttcaaatgtaaattcctgaatgtaccattaaaattattttagttgctatcagtttgtttatatactattttatatactattctaaaatattttactctgcctgatactgaaagacagcatatatttttttcaaaataaagttttaggaaatttgctttttcctttttctttcaggttgatcttctattaaaatgattcctctttattagagaaggaaaatttagttgctatacatcttatatttgcacagtttattaaagtcagtgccctaaaggtacctgcttttctttgtggcatatatggcatctgctgtcttcagattttcttacacttttgtgatttataatgttagtgattggtgccttattctctgaggaaagatggagggttcataaagcaatgccttatccacagcagattttcttgtatattaagttaaacagaattctgtaaattattatgaaggttcaagctctttaggggagttttttttcttgttgttaacaaattggttgcaatctattatattttgcaattgattagatattacagtctacttatttttcaagagtaattattgtataagtttggttggtataatggtaaatattatatagtgggggtaaatttgattagagttttttttttaagcactggcttcagaaatccatggaaataaagtctgtatcttgtgtaaca

SEQ ID NO: 19457 - DNA, 3131 bp, Homo sapiens
tgtatcttgtaagcgcaatttaattagggtcaaactattctgtatggacttgctttttcgacttctgaggatttagtagtcatgattaagtgctgtcacgctactgcgatctacaaacagtagctccacaacatccgcccgcatcgtggcaaagaattatcaagaaatccccaagggggcggtgaggagccgccggtcggccaggtcgcccggtccctcagtctggtgaaaagctccgttgcccaccctgagggcttcgcggaaggaagttggccgtatcgctgcaccttagagatgcgacggccgaggctcccagctcaagcttctggtagtaaggcctgtgtgcctggcattcggggaggccacttttctatccccagcttccgggccaccacttgggtgcgtcgtggggatgtcggcagctacgtttgcggcacagctccggctaaactgaaaaacgaatcctcaggtttgacaaaactaaactaaaaagacacttttctcctctcactctgacgtcccaaaagtttcctttttaggggtcggggcctacggtgggcgaggagaaactcgaggtatctacccaccgcaccaaacaactcatgcgtcgcttcctttcgacttggagctggccagtatcccggcgtcctctcggccgacgctgcggtctgaggccactctggccggcagccgacgtctctatggctccgaccgaggggcggagccgctgctcgagctgctgctggattgaactcagagaagccggggtgttgaatgtttgttttctaaaggagacaatgattcataatttgtgacactgtaaatcctgaggtttatagaaaggattcatgactttgtaatggagggtgctggaaatgtaaacaagaatagactgttcattcctgatggcttttagtctatactaacatattgtttgtcatggcatccgagactgaaaagacccatgctttactgcagacttgtagcactgaatctcttatttccagccttggtctgggggcattttgcctcgtagctgacagacttcttcagttttccacaattcagcaaaatgactggcttcgtgctctctcagataatgcagtacattgtgtaattggcatgtggtcatgggcggtagtcactggaatcaagaagaagactgactttggagaaatcattttagctggatttttagcctctgttattgatgtagaccacttttttctagctggatccatgtctttaaaggctgctttgactctcccgcgaagacctttccttcactgttctactgtgattcccgttgtggttctgaccctgaaatttactatgcaccttttcaagctcaaagactcatggtgctttcttccctggatgttatttatatcctggacttcacatcatatccgagatgggattcgtcatggtttgtggatatgcccatttggaaaaacttctcctttgccattctggctttatgtaataatcacatcatctttacctcacatctgttcattcgttatgtatttaacaggaaccagacaaatgatgtcttcaaaacatggagttcgtattgatgtctgaggtacacggcagtcttagagaagcaaatggctcagatgatgataattaagagtagccaacattaaagttaatttttaaaaatacagttaggtgtttatattatttagttattataattctgcaatcctcttgctcaggaagtgtatacaacttttttaaaaattatacttgttattattctacttctctcttctatgacaactctagtgcaatattagagtttcatttattccacaatatatttttactgtttttttctatttatctggctttactagtagttcttttagattaacatccagttcattttctggaaatatacctggaatttagtccatttcctaatgaaaaacagctcaaattttagggtaactaatttgtaaagagttaacattatatttggatccaattttcctgagatattgaaatagtgaaatcaccaaataaatgatatgaatcatttaactatacaaatgtatagttaatgctaacatgtatttattttcatatatgttgatcctgagtgaaatttaatttgcagaatgctttatgagttatgattactggcaaaaccttcagagcacttgtgacacatcattataatatccagtagctaacattagatctagcttattatttcagaaattaatttaggaaataattattaaaacatgttggctacagtagcactttactgaagtagtattttttggtatctctagcctagaatctcgtgtgttagttttaactgttttgaaaataataagtaacattaacaaaatgttgatatttggatcataaccgtaacatttgaatttatgcaaaaaaaagaccagaaatgtcatttcaaatgtaaattcctgaatgtaccattaaaattattttagttgctatcagtttgtttatatactattttatatactattctaaaatattttactctgcctgatactgaaagacagcatatatttttttcaaaataaagttttaggaaatttgctttttcctttttctttcaggttgatcttctattaaaatgattcctctttattagagaaggaaaatttagttgctatacatcttatatttgcacagtttattaaagtcagtgccctaaaggtacctgcttttctttgtggcatatatggcatctgctgtcttcagattttcttacacttttgtgatttataatgttagtgattggtgccttattctctgaggaaagatggagggttcataaagcaatgccttatccacagcagattttcttgtatattaagttaaacagaattctgtaaattattatgaaggttcaagctctttaggggagttttttttcttgttgttaacaaattggttgcaatctattatattttgcaattgattagatattacagtctacttatttttcaagagtaattattgtataagtttggttggtataatggtaaatattatatagtgggggtaaatttgattagagttttttttttaagcactggcttcagaaatccatggaaataaagtctgtatcttgtgtaaca

SEQ ID NO: 19458 - DNA, 2639 bp, Homo sapiens
atgattgcatttttatatcaattaaggttatttggttcaaggcatcagaaatgtaaaggggatttgatgggaaaatgttggggtagctcattgaagtggagggggagctgcaagatctagggtagctctgagaacctttagacgttggacataagtactcactgtcatcatgattctattagcctttctcctttgtgtctctctgggattttattttcctaggctatttcgtgtagtggagcccatggcctccaagaagaggaactttctctaccacaagacaaattttggaaaggaatctgattggctcagcctggaccactttcattactagattagtcaccattattagggaaatggaaaactctaattgggtgctggaaatgtaaacaagaatagactgttcattcctgatggcttttagtctatactaacatattgtttgtcatggcatccgagactgaaaagacccatgctttactgcagacttgtagcactgaatctcttatttccagccttggtctgggggcattttgcctcgtagctgacagacttcttcagttttccacaattcagcaaaatgactggcttcgtgctctctcagataatgcagtacattgtgtaattggcatgtggtcatgggcggtagtcactggaatcaagaagaagactgactttggagaaatcattttagctggatttttagcctctgttattgatgtagaccacttttttctagctggatccatgtctttaaaggctgctttgactctcccgcgaagacctttccttcactgttctactgtgattcccgttgtggttctgaccctgaaatttactatgcaccttttcaagctcaaagactcatggtgctttcttccctggatgttatttatatcctggacttcacatcatatccgagatgggattcgtcatggtttgtggatatgcccatttggaaaaacttctcctttgccattctggctttatgtaataatcacatcatctttacctcacatctgttcattcgttatgtatttaacaggaaccagacaaatgatgtcttcaaaacatggagttcgtattgatgtctgaggtacacggcagtcttagagaagcaaatggctcagatgatgataattaagagtagccaacattaaagttaatttttaaaaatacagttaggtgtttatattatttagttattataattctgcaatcctcttgctcaggaagtgtatacaacttttttaaaaattatacttgttattattctacttctctcttctatgacaactctagtgcaatattagagtttcatttattccacaatatatttttactgtttttttctatttatctggctttactagtagttcttttagattaacatccagttcattttctggaaatatacctggaatttagtccatttcctaatgaaaaacagctcaaattttagggtaactaatttgtaaagagttaacattatatttggatccaattttcctgagatattgaaatagtgaaatcaccaaataaatgatatgaatcatttaactatacaaatgtatagttaatgctaacatgtatttattttcatatatgttgatcctgagtgaaatttaatttgcagaatgctttatgagttatgattactggcaaaaccttcagagcacttgtgacacatcattataatatccagtagctaacattagatctagcttattatttcagaaattaatttaggaaataattattaaaacatgttggctacagtagcactttactgaagtagtattttttggtatctctagcctagaatctcgtgtgttagttttaactgttttgaaaataataagtaacattaacaaaatgttgatatttggatcataaccgtaacatttgaatttatgcaaaaaaaagaccagaaatgtcatttcaaatgtaaattcctgaatgtaccattaaaattattttagttgctatcagtttgtttatatactattttatatactattctaaaatattttactctgcctgatactgaaagacagcatatatttttttcaaaataaagttttaggaaatttgctttttcctttttctttcaggttgatcttctattaaaatgattcctctttattagagaaggaaaatttagttgctatacatcttatatttgcacagtttattaaagtcagtgccctaaaggtacctgcttttctttgtggcatatatggcatctgctgtcttcagattttcttacacttttgtgatttataatgttagtgattggtgccttattctctgaggaaagatggagggttcataaagcaatgccttatccacagcagattttcttgtatattaagttaaacagaattctgtaaattattatgaaggttcaagctctttaggggagttttttttcttgttgttaacaaattggttgcaatctattatattttgcaattgattagatattacagtctacttatttttcaagagtaattattgtataagtttggttggtataatggtaaatattatatagtgggggtaaatttgattagagttttttttttaagcactggcttcagaaatccatggaaataaagtctgtatcttgtgtaaca

SEQ ID NO: 19459 - DNA, 2745 bp, Homo sapiens
tgtatcttgtaagcgcaatttaattagggtcaaactattctgtatggacttgctttttcgacttctgaggatttagtagtcatgattaagtgctgtcacgctactgcgatctacaaacagtagctccacaacatccgcccgcatcgtggcaaagaattatcaagaaatccccaagggggcggtgaggagccgccggtcggccaggtcgcccggtccctcagtctggtgaaaagctccgttgcccaccctgagggcttcgcggaaggaagttggccgtatcgctgcaccttagagatgcgacggccgaggctcccagctcaagcttctggtagtaaggcctgtgtgcctggcattcggggaggccacttttctatccccagcttccgggccaccacttgggtgcgtcgtggggatgtcggcagctacgtttgcggcacagctccggctaaactgaaaaacgaatcctcaggtttgacaaaactaaactaaaaagacacttttctcctctcactctgacgtcccaaaagtttcctttttaggggtcggggcctacggtgggcgaggagaaactcgaggtatctacccaccgcaccaaacaactcatgcgtcgcttcctttcgacttggagctggccagtatcccggcgtcctctcggccgacgctgcggtctgaggccactctggccggcagccgacgtctctatggctccgaccgaggggcggagccgctgctcgagctgctgctggattgaactcagagaagccggggtgttgaatgtttgttttctaaaggagacaatgattcataatttgtgacactgtaaatcctgaggtttatagaaaggattcatgactttgtaatggaggctgctttgactctcccgcgaagacctttccttcactgttctactgtgattcccgttgtggttctgaccctgaaatttactatgcaccttttcaagctcaaagactcatggtgctttcttccctggatgttatttatatcctggacttcacatcatatccgagatgggattcgtcatggtttgtggatatgcccatttggaaaaacttctcctttgccattctggctttatgtaataatcacatcatctttacctcacatctgttcattcgttatgtatttaacaggaaccagacaaatgatgtcttcaaaacatggagttcgtattgatgtctgaggtacacggcagtcttagagaagcaaatggctcagatgatgataattaagagtagccaacattaaagttaatttttaaaaatacagttaggtgtttatattatttagttattataattctgcaatcctcttgctcaggaagtgtatacaacttttttaaaaattatacttgttattattctacttctctcttctatgacaactctagtgcaatattagagtttcatttattccacaatatatttttactgtttttttctatttatctggctttactagtagttcttttagattaacatccagttcattttctggaaatatacctggaatttagtccatttcctaatgaaaaacagctcaaattttagggtaactaatttgtaaagagttaacattatatttggatccaattttcctgagatattgaaatagtgaaatcaccaaataaatgatatgaatcatttaactatacaaatgtatagttaatgctaacatgtatttattttcatatatgttgatcctgagtgaaatttaatttgcagaatgctttatgagttatgattactggcaaaaccttcagagcacttgtgacacatcattataatatccagtagctaacattagatctagcttattatttcagaaattaatttaggaaataattattaaaacatgttggctacagtagcactttactgaagtagtattttttggtatctctagcctagaatctcgtgtgttagttttaactgttttgaaaataataagtaacattaacaaaatgttgatatttggatcataaccgtaacatttgaatttatgcaaaaaaaagaccagaaatgtcatttcaaatgtaaattcctgaatgtaccattaaaattattttagttgctatcagtttgtttatatactattttatatactattctaaaatattttactctgcctgatactgaaagacagcatatatttttttcaaaataaagttttaggaaatttgctttttcctttttctttcaggttgatcttctattaaaatgattcctctttattagagaaggaaaatttagttgctatacatcttatatttgcacagtttattaaagtcagtgccctaaaggtacctgcttttctttgtggcatatatggcatctgctgtcttcagattttcttacacttttgtgatttataatgttagtgattggtgccttattctctgaggaaagatggagggttcataaagcaatgccttatccacagcagattttcttgtatattaagttaaacagaattctgtaaattattatgaaggttcaagctctttaggggagttttttttcttgttgttaacaaattggttgcaatctattatattttgcaattgattagatattacagtctacttatttttcaagagtaattattgtataagtttggttggtataatggtaaatattatatagtgggggtaaatttgattagagttttttttttaagcactggcttcagaaatccatggaaataaagtctgtatcttgtgtaaca

SEQ ID NO: 19460 - DNA, 2784 bp, Homo sapiens
  misc_feature (39)..(39): n is a, c, g, or t
  misc_feature (53)..(53): n is a, c, g, or t
atgttgattctgtttcttatctctgctctgtgtaatttnatagtggctttttntccagcctgggcaacagaacaagactttgtctctaaaaaaagaaaagaaaatttgtgataatatataaacaaagattgagtggcagcagagcttttgtgttaggcgtctgtgtagtctgtgcccagcctaggttcttctcatacctgaatggccttctttctcattagggctaacttacaggccatactttattgaaggaggggaatattgctgctgccgctgctctgggttggccattaattcaagttttcagtgtccctgtttcagtccagctaagtggataagggcatttatttttagttgaaagggacattttatcaactttaaagttatatgcattaaatatttaaatatgttgacttctttatccattcaggtgttgaatgtttgttttctaaaggagacaatgattcataatttgtgacactgtaaatcctgaggtttatagaaaggattcatgactttgtaatggagttaggatccatcaaagaagcagaactactttgtgagctaaagacctatggaattgtgggaggtggcagagcggtctgcagacttgcctctgagtctcttgttcagcctgaagttgctgcagatctactagactggcagtcagacagggatactggatgtggatgagagaaaagacaaactgaaacccttgggaacaaaacggaacctgcatcagcctctcaccaaccctagttttgatgcttgagtaacctgcaggagaggatgacactttcgatgtcagagctgcacttgtgggcccaggatttggagaagtggagagaaggtctgatgggagttgaaggagctgcaggtccagcttcttccccatgccagcaaggctgctttgactctcccgcgaagacctttccttcactgttctactgtgattcccgttgtggttctgaccctgaaatttactatgcaccttttcaagctcaaagactcatggtgctttcttccctggatgttatttatatcctggacttcacatcatatccgagatgggattcgtcatggtttgtggatatgcccatttggaaaaacttctcctttgccattctggctttatgtaataatcacatcatctttacctcacatctgttcattcgttatgtatttaacaggaaccagacaaatgatgtcttcaaaacatggagttcgtattgatgtctgaggtacacggcagtcttagagaagcaaatggctcagatgatgataattaagagtagccaacattaaagttaatttttaaaaatacagttaggtgtttatattatttagttattataattctgcaatcctcttgctcaggaagtgtatacaacttttttaaaaattatacttgttattattctacttctctcttctatgacaactctagtgcaatattagagtttcatttattccacaatatatttttactgtttttttctatttatctggctttactagtagttcttttagattaacatccagttcattttctggaaatatacctggaatttagtccatttcctaatgaaaaacagctcaaattttagggtaactaatttgtaaagagttaacattatatttggatccaattttcctgagatattgaaatagtgaaatcaccaaataaatgatatgaatcatttaactatacaaatgtatagttaatgctaacatgtatttattttcatatatgttgatcctgagtgaaatttaatttgcagaatgctttatgagttatgattactggcaaaaccttcagagcacttgtgacacatcattataatatccagtagctaacattagatctagcttattatttcagaaattaatttaggaaataattattaaaacatgttggctacagtagcactttactgaagtagtattttttggtatctctagcctagaatctcgtgtgttagttttaactgttttgaaaataataagtaacattaacaaaatgttgatatttggatcataaccgtaacatttgaatttatgcaaaaaaaagaccagaaatgtcatttcaaatgtaaattcctgaatgtaccattaaaattattttagttgctatcagtttgtttatatactattttatatactattctaaaatattttactctgcctgatactgaaagacagcatatatttttttcaaaataaagttttaggaaatttgctttttcctttttctttcaggttgatcttctattaaaatgattcctctttattagagaaggaaaatttagttgctatacatcttatatttgcacagtttattaaagtcagtgccctaaaggtacctgcttttctttgtggcatatatggcatctgctgtcttcagattttcttacacttttgtgatttataatgttagtgattggtgccttattctctgaggaaagatggagggttcataaagcaatgccttatccacagcagattttcttgtatattaagttaaacagaattctgtaaattattatgaaggttcaagctctttaggggagttttttttcttgttgttaacaaattggttgcaatctattatattttgcaattgattagatattacagtctacttatttttcaagagtaattattgtataagtttggttggtataatggtaaatattatatagtgggggtaaatttgattagagttttttttttaagcactggcttcagaaatccatggaaataaagtctgtatcttgtgtaaca

SEQ ID NO: 19461 - DNA, 2647 bp, Homo sapiens
tgtatcttgtaagcgcaatttaattagggtcaaactattctgtatggacttgctttttcgacttctgaggatttagtagtcatgattaagtgctgtcacgctactgcgatctacaaacagtagctccacaacatccgcccgcatcgtggcaaagaattatcaagaaatccccaagggggcggtgaggagccgccggtcggccaggtcgcccggtccctcagtctggtgaaaagctccgttgcccaccctgagggcttcgcggaaggaagttggccgtatcgctgcaccttagagatgcgacggccgaggctcccagctcaagcttctggtagtaaggcctgtgtgcctggcattcggggaggccacttttctatccccagcttccgggccaccacttgggtgcgtcgtggggatgtcggcagctacgtttgcggcacagctccggctaaactgaaaaacgaatcctcaggtttgacaaaactaaactaaaaagacacttttctcctctcactctgacgtcccaaaagtttcctttttaggggtcggggcctacggtgggcgaggagaaactcgaggtatctacccaccgcaccaaacaactcatgcgtcgcttcctttcgacttggagctggccagtatcccggcgtcctctcggccgacgctgcggtctgaggccactctggccggcagccgacgtctctatggctccgaccgaggggcggagccgctgctcgagctgctgctggattgaactcagagaagccggggctgctttgactctcccgcgaagacctttccttcactgttctactgtgattcccgttgtggttctgaccctgaaatttactatgcaccttttcaagctcaaagactcatggtgctttcttccctggatgttatttatatcctggacttcacatcatatccgagatgggattcgtcatggtttgtggatatgcccatttggaaaaacttctcctttgccattctggctttatgtaataatcacatcatctttacctcacatctgttcattcgttatgtatttaacaggaaccagacaaatgatgtcttcaaaacatggagttcgtattgatgtctgaggtacacggcagtcttagagaagcaaatggctcagatgatgataattaagagtagccaacattaaagttaatttttaaaaatacagttaggtgtttatattatttagttattataattctgcaatcctcttgctcaggaagtgtatacaacttttttaaaaattatacttgttattattctacttctctcttctatgacaactctagtgcaatattagagtttcatttattccacaatatatttttactgtttttttctatttatctggctttactagtagttcttttagattaacatccagttcattttctggaaatatacctggaatttagtccatttcctaatgaaaaacagctcaaattttagggtaactaatttgtaaagagttaacattatatttggatccaattttcctgagatattgaaatagtgaaatcaccaaataaatgatatgaatcatttaactatacaaatgtatagttaatgctaacatgtatttattttcatatatgttgatcctgagtgaaatttaatttgcagaatgctttatgagttatgattactggcaaaaccttcagagcacttgtgacacatcattataatatccagtagctaacattagatctagcttattatttcagaaattaatttaggaaataattattaaaacatgttggctacagtagcactttactgaagtagtattttttggtatctctagcctagaatctcgtgtgttagttttaactgttttgaaaataataagtaacattaacaaaatgttgatatttggatcataaccgtaacatttgaatttatgcaaaaaaaagaccagaaatgtcatttcaaatgtaaattcctgaatgtaccattaaaattattttagttgctatcagtttgtttatatactattttatatactattctaaaatattttactctgcctgatactgaaagacagcatatatttttttcaaaataaagttttaggaaatttgctttttcctttttctttcaggttgatcttctattaaaatgattcctctttattagagaaggaaaatttagttgctatacatcttatatttgcacagtttattaaagtcagtgccctaaaggtacctgcttttctttgtggcatatatggcatctgctgtcttcagattttcttacacttttgtgatttataatgttagtgattggtgccttattctctgaggaaagatggagggttcataaagcaatgccttatccacagcagattttcttgtatattaagttaaacagaattctgtaaattattatgaaggttcaagctctttaggggagttttttttcttgttgttaacaaattggttgcaatctattatattttgcaattgattagatattacagtctacttatttttcaagagtaattattgtataagtttggttggtataatggtaaatattatatagtgggggtaaatttgattagagttttttttttaagcactggcttcagaaatccatggaaataaagtctgtatcttgtgtaaca

SEQ ID NO: 19462 - DNA, 3242 bp, Homo sapiens
tgtatcttgtaagcgcaatttaattagggtcaaactattctgtatggacttgctttttcgacttctgaggatttagtagtcatgattaagtgctgtcacgctactgcgatctacaaacagtagctccacaacatccgcccgcatcgtggcaaagaattatcaagaaatccccaagggggcggtgaggagccgccggtcggccaggtcgcccggtccctcagtctggtgaaaagctccgttgcccaccctgagggcttcgcggaaggaagttggccgtatcgctgcaccttagagatgcgacggccgaggctcccagctcaagcttctggtagtaaggcctgtgtgcctggcattcggggaggccacttttctatccccagcttccgggccaccacttgggtgcgtcgtggggatgtcggcagctacgtttgcggcacagctccggctaaactgaaaaacgaatcctcaggtttgacaaaactaaactaaaaagacacttttctcctctcactctgacgtcccaaaagtttcctttttaggggtcggggcctacggtgggcgaggagaaactcgaggtatctacccaccgcaccaaacaactcatgcgtcgcttcctttcgacttggagctggccagtatcccggcgtcctctcggccgacgctgcggtctgaggccactctggccggcagccgacgtctctatggctccgaccgaggggcggagccgctgctcgagctgctgctggattgaactcagagaagccgggggtgctggaaatgtaaacaagaatagactgttcattcctgatggcttttagtctatactaacatattgtttgtcatggcatccgagactgaaaagacccatgctttactgcagacttgtagcactgaatctcttatttccagccttggtctgggggcattttgcctcgtagctgacagacttcttcagttttccacaattcagcaaaatgactggcttcgtgctctctcagataatgcagtacattgtgtaattggcatgtggtcatgggcggtagtcactggaatcaagaagaagactgactttggagaaatcattttagctggatttttagcctctgttattgatgtagaccacttttttctagctggatccatgtctttaaaggctgctttgactctcccgcgaagacctttccttcactgttctactgtgattcccgttgtggttctgaccctgaaatttactatgcaccttttcaagctcaaagactcatggtgctttcttccctggatgttatttatatcctggacttcacatcatatccgagatgggattcgtcatggtttgtggatatgcccatttggaaaaacttctcctttgccattctggctttatgtaataatcacatcatctttacctcacatctgttcattcgttatgtatttaacaggaaccagacaaatgatgtcttcaaaacatggagttcgtattgatgtctgaggtacacggcagtcttagagaagcaaatggctcagatgatgataattaagagtagccaacattaaagttaatttttaaaaatacagttaggtgtttatattatttagttattataattctgcaatcctcttgctcaggaagtgtatacaacttttttaaaaattatacttgttattattctacttctctcttctatgacaactctagtgcaatattagagtttcatttattccacaatatatttttactgtttttttctatttatctggctttactagtagttcttttagattaacatccagttcattttctggaaatatacctggaatttagtccatttcctaatgaaaaacagctcaaattttagggtaactaatttgtaaagagttaacattatatttggatccaattttcctgagatattgaaatagtgaaatcaccaaataaatgatatgaatcatttaactatacaaatgtatagttaatgctaacatgtatttattttcatatatgttgatcctgagtgaaatttaatttgcagaatgctttatgagttatgattactggcaaaaccttcagagcacttgtgacacatcattataatatccagtagctaacattagatctagcttattatttcagaaattaatttaggaaataattattaaaacatgttggctacagtagcactttactgaagtagtattttttggtatctctagcctagaatctcgtgtgttagttttaactgttttgaaaataataagtaacattaacaaaatgttgatatttggatcataaccgtaacatttgaatttatgcaaaaaaaagaccagaaatgtcatttcaaatgtaaattcctgaatgtaccattaaaattattttagttgctatcagtttgtttatatactattttatatactattctaaaatattttactctgcctgatactgaaagacagcatatatttttttcaaaataaagttttaggaaatttgctttttcctttttctttcaggttgatcttctattaaaatgattcctctttattagagaaggaaaatttagttgctatacatcttatatttgcacagtttattaaagtcagtgccctaaaggtacctgcttttctttgtggcatatatggcatctgctgtcttcagattttcttacacttttgtgatttataatgttagtgattggtgccttattctctgaggaaagatggagggttcataaagcaatgccttatccacagcagattttcttgtatattaagttaaacagaattctgtaaattattatgaaggttcaagctctttaggggagttttttttcttgttgttaacaaattggttgcaatctattatattttgcaattgattagatattacagtctacttatttttcaagagtaattattgtataagtttggttggtataatggtaaatattatatagtgggggtaaatttgattagagttttttttttaagcactggcttcagaaatccatggaaataaagtctgtatcttgtgtaacaattcctgactaaattgcaaaaccttttctactttttctttcttcatattaaacaaataaatattattaaaaatatagggccttatttaagaatgctacatagattacaggcgtgagctaccgtgcccagtcaaaactctccgttttattttcacctctttaactcggccctttctgaggcagcaaccttcccactctgacccttaggca

SEQ ID NO: 19463 - DNA, 2539 bp, Homo sapiens
tgtatcttgtaagcgcaatttaattagggtcaaactattctgtatggacttgctttttcgacttctgaggatttagtagtcatgattaagtgctgtcacgctactgcgatctacaaacagtagctccacaacatccgcccgcatcgtggcaaagaattatcaagaaatccccaagggggcggtgaggagccgccggtcggccaggtcgcccggtccctcagtctggtgaaaagctccgttgcccaccctgagggcttcgcggaaggaagttggccgtatcgctgcaccttagagatgcgacggccgaggctcccagctcaagcttctggtagtaaggcctgtgtgcctggcattcggggaggccacttttctatccccagcttccgggccaccacttgggtgcgtcgtggggatgtcggcagctacgtttgcggcacagctccggctaaactgaaaaacgaatcctcaggtttgacaaaactaaactaaaaagacacttttctcctctcactctgacgtcccaaaagtttcctttttaggggtcggggcctacggtgggcgaggagaaactcgaggtatctacccaccgcaccaaacaactcatgcgtcgcttcctttcgacttggagctggccagtatcccggcgtcctctcggccgacgctgcggtctgaggccactctggccggcagccgacgtctctatggctccgaccgaggggcggagccgctgctcgagctgctgctggattgaactcagagaagccggggctgctttgactctcccgcgaagacctttccttcactgttctactgtgattcccgttgtggttctgaccctgaaatttactatgcaccttttcaagctcaaagactcatggtgctttcttccctggatgttatttatatcctggacttcacatcatatccgagatgggattcgtcatggaaccagacaaatgatgtcttcaaaacatggagttcgtattgatgtctgaggtacacggcagtcttagagaagcaaatggctcagatgatgataattaagagtagccaacattaaagttaatttttaaaaatacagttaggtgtttatattatttagttattataattctgcaatcctcttgctcaggaagtgtatacaacttttttaaaaattatacttgttattattctacttctctcttctatgacaactctagtgcaatattagagtttcatttattccacaatatatttttactgtttttttctatttatctggctttactagtagttcttttagattaacatccagttcattttctggaaatatacctggaatttagtccatttcctaatgaaaaacagctcaaattttagggtaactaatttgtaaagagttaacattatatttggatccaattttcctgagatattgaaatagtgaaatcaccaaataaatgatatgaatcatttaactatacaaatgtatagttaatgctaacatgtatttattttcatatatgttgatcctgagtgaaatttaatttgcagaatgctttatgagttatgattactggcaaaaccttcagagcacttgtgacacatcattataatatccagtagctaacattagatctagcttattatttcagaaattaatttaggaaataattattaaaacatgttggctacagtagcactttactgaagtagtattttttggtatctctagcctagaatctcgtgtgttagttttaactgttttgaaaataataagtaacattaacaaaatgttgatatttggatcataaccgtaacatttgaatttatgcaaaaaaaagaccagaaatgtcatttcaaatgtaaattcctgaatgtaccattaaaattattttagttgctatcagtttgtttatatactattttatatactattctaaaatattttactctgcctgatactgaaagacagcatatatttttttcaaaataaagttttaggaaatttgctttttcctttttctttcaggttgatcttctattaaaatgattcctctttattagagaaggaaaatttagttgctatacatcttatatttgcacagtttattaaagtcagtgccctaaaggtacctgcttttctttgtggcatatatggcatctgctgtcttcagattttcttacacttttgtgatttataatgttagtgattggtgccttattctctgaggaaagatggagggttcataaagcaatgccttatccacagcagattttcttgtatattaagttaaacagaattctgtaaattattatgaaggttcaagctctttaggggagttttttttcttgttgttaacaaattggttgcaatctattatattttgcaattgattagatattacagtctacttatttttcaagagtaattattgtataagtttggttggtataatggtaaatattatatagtgggggtaaatttgattagagttttttttttaagcactggcttcagaaatccatggaaataaagtctgtatcttgtgtaaca

SEQ ID NO: 19464 - DNA, 2979 bp, Homo sapiens
tgtatcttgtaagcgcaatttaattagggtcaaactattctgtatggacttgctttttcgacttctgaggatttagtagtcatgattaagtgctgtcacgctactgcgatctacaaacagtagctccacaacatccgcccgcatcgtggcaaagaattatcaagaaatccccaagggggcggtgaggagccgccggtcggccaggtcgcccggtccctcagtctggtgaaaagctccgttgcccaccctgagggcttcgcggaaggaagttggccgtatcgctgcaccttagagatgcgacggccgaggctcccagctcaagcttctggtagtaaggcctgtgtgcctggcattcggggaggccacttttctatccccagcttccgggccaccacttgggtgcgtcgtggggatgtcggcagctacgtttgcggcacagctccggctaaactgaaaaacgaatcctcaggtttgacaaaactaaactaaaaagacacttttctcctctcactctgacgtcccaaaagtttcctttttaggggtcggggcctacggtgggcgaggagaaactcgaggtatctacccaccgcaccaaacaactcatgcgtcgcttcctttcgacttggagctggccagtatcccggcgtcctctcggccgacgctgcggtctgaggccactctggccggcagccgacgtctctatggctccgaccgaggggcggagccgctgctcgagctgctgctggattgaactcagagaagccgggggtgctggaaatgtaaacaagaatagactgttcattcctgatggcttttagtctatactaacatattgtttgtcatggcatccgagactgaaaagacccatgctttactgcagacttgtagcactgaatctcttatttccagccttggtctgggggcattttgcctcgtagctgacagacttcttcagttttccacaattcagcaaaatgactggcttcgtgctctctcagataatgcagtacattgtgtaattggcatgtggtcatgggcggtagtcactggaatcaagaagaagactgactttggagaaatcattttagctggatttttagcctctgttattgatgtagaccacttttttctagctggatccatgtctttaaaggctgctttgactctcccgcgaagacctttccttcactgttctactgtgattcccgttgtggttctgaccctgaaatttactatgcaccttttcaagctcaaagactcatggtgctttcttccctggatgttatttatatcctggacttcacatcatatccgagatgggattcgtcatggtttgtggatatgcccatttggaaaaacttctcctttgccattctggctttatgtaataatcacatcatctttacctcacatctgttcattcgttatgtatttaacaggaaccagacaaatgatgtcttcaaaacatggagttcgtattgatgtctgaggtacacggcagtcttagagaagcaaatggctcagatgatgataattaagagtagccaacattaaagttaatttttaaaaatacagttaggtgtttatattatttagttattataattctgcaatcctcttgctcaggaagtgtatacaacttttttatattagagtttcatttattccacaatatatttttactgtttttttctatttatctggctttactagtagttcttttagattaacatccagttcattttctggaaatatacctggaatttagtccatttcctaatgaaaaacagctcaaattttagggtaactaatttgtaaagagttaacattatatttggatccaattttcctgagatattgaaatagtgaaatcaccaaataaatgatatgaatcatttaactatacaaatgtatagttaatgctaacatgtatttattttcatatatgttgatcctgagtgaaatttaatttgcagaatgctttatgagttatgattactggcaaaaccttcagagcacttgtgacacatcattataatatccagtagctaacattagatctagcttattatttcagaaattaatttaggaaataattattaaaacatgttggctacagtagcactttactgaagtagtattttttggtatctctagcctagaatctcgtgtgttagttttaactgttttgaaaataataagtaacattaacaaaatgttgatatttggatcataaccgtaacatttgaatttatgcaaaaaaaagaccagaaatgtcatttcaaatgtaaattcctgaatgtaccattaaaattattttagttgctatcagtttgtttatatactattttatatactattctaaaatattttactctgcctgatactgaaagacagcatatatttttttcaaaataaagttttaggaaatttgctttttcctttttctttcaggttgatcttctattaaaatgattcctctttattagagaaggaaaatttagttgctatacatcttatatttgcacagtttattaaagtcagtgccctaaaggtacctgcttttctttgtggcatatatggcatctgctgtcttcagattttcttacacttttgtgatttataatgttagtgattggtgccttattctctgaggaaagatggagggttcataaagcaatgccttatccacagcagattttcttgtatattaagttaaacagaattctgtaaattattatgaaggttcaagctctttaggggagttttttttcttgttgttaacaaattggttgcaatctattatattttgcaattgattagatattacagtctacttatttttcaagagtaattattgtataagtttggttggtataatggtaaatattatatagtgggggtaaatttgattagagttttttttttaagcactggcttcagaaatccatggaaataaagtctgtatcttgtgtaaca

SEQ ID NO: 19465 - DNA, 1059 bp, Homo sapiens
  misc_feature (39)..(39): n is a, c, g, or t
  misc_feature (53)..(53): n is a, c, g, or t
atgttgattctgtttcttatctctgctctgtgtaatttnatagtggctttttntccagcctgggcaacagaacaagactttgtctctaaaaaaagaaaagaaaatttgtgataatatataaacaaagattgagtggcagcagagcttttgtgttaggcgtctgtgtagtctgtgcccagcctaggttcttctcatacctgaatggccttctttctcattagggctaacttacaggccatactttattgaaggaggggaatattgctgctgccgctgctctgggttggccattaattcaagttttcagtgtccctgtttcagtccagctaagtggataagggcatttatttttagttgaaagggacattttatcaactttaaagttatatgcattaaatatttaaatatgttgacttctttatccattcaggtgttgaatgtttgttttctaaaggagacaatgattcataatttgtgacactgtaaatcctgaggtttatagaaaggattcatgactttgtaatggaggtatgttttgcattttttgtattttggtcacatctcttgggtgagagtacctggaaatcattatttccagatcctggaagaatctatagaaaataatccatcttaatgctttagagaacaattttcattattgcaaatgatcaagaatgagcattgttgtagactccattatcatttaaaaaatagttgttatctgcaaagtaagtacgcttcacataaggaatctgcataagttatttcttgtgtctattattacataactatgaacaaatttatgttatacaataaatttgatttatgagattggatgtaattttattaataccaattagtgttatatatttaatgtgcatattaatatatatttataatgttataccttttttttacctttttaaaattacacttttaagagactgactttaacaatcaagtatgagttgtttaattactcctggctttaacttttcaaagtagctttattggttttatggtcataacagtaagacatcgaaatttttcaaaaattca

SEQ ID NO: 19466 - DNA, 681 bp, Homo sapiens
  misc_feature (1)..(1): n is a, c, g, or t
ntagagtttccccgactagtccaaccacactcagtttgtttatatactattttatatactattctaaaatattttactctgcctgatactgaaagacagcatatatttttttcaaaataaagttttaggaaatttgctttttcctttttctttcaggttgatcttctattaaaatgattcctctttattagagaaggaaaatttagttgctatacatcttatatttgcacagtttattaaagtcagtgccctaaaggtacctgcttttctttgtggcatatatggcatctgctgtcttcagattttcttacacttttgtgatttataatgttagtgattggtgccttattctctgaggaaagatggagggttcataaagcaatgccttatccacagcagattttcttgtatattaagttaaacagaattctgtaaattattatgaaggttcaagctctttaggggagttttttttcttgttgttaacaaattggttgcaatctattatattttgcaattgattagatattacagtctacttatttttcaagagtaattattgtataagtttggttggtataatggtaaatattatatagtgggggtaaatttgattagagttttttttttaagcactggcttcagaaatccatggaaataaagtctgtatcttgtgtaaca

SEQ ID NO: 19467 - DNA, 984 bp, Homo sapiens
  misc_feature (39)..(39): n is a, c, g, or t
  misc_feature (53)..(53): n is a, c, g, or t
atgttgattctgtttcttatctctgctctgtgtaatttnatagtggctttttntccagcctgggcaacagaacaagactttgtctctaaaaaaagaaaagaaaatttgtgataatatataaacaaagattgagtggcagcagagcttttgtgttaggcgtctgtgtagtctgtgcccagcctaggttcttctcatacctgaatggccttctttctcattagggctaacttacaggccatactttattgaaggaggggaatattgctgctgccgctgctctgggttggccattaattcaagttttcagtgtccctgtttcagtccagctaagtggataagggcatttatttttagttgaaagggacattttatcaactttaaagttatatgcattaaatatttaaatatgttgacttctttatccattcaggtgttgaatgtttgttttctaaaggagacaatgattcataatttgtgacactgtaaatcctgaggtttatagaaaggattcatgactttgtaatggagttttgatgcttgagtaacctgcaggagaggatgacactttcgatgtcagagctgcacttgtgggcccaggatttggagaagtggagagaaggtctgatgggagttgaaggagctgcaggtccagcttcttccccatgccagcaaggtgagctaacagatcggcagcacatgcaaacttcacagtgtgctctccattgaccttcacggtgtaaaaaatatgacttgcttcatttgtgagttccatataatgtctcctatagccaacagtacccagaactatataaggaagggaattctgggaaatgtttttaagtccgagttagctgagttgatacagtacaaagccattagagctctagttaactgatctttttcatcttttaatagagttttgttgtttcattcttgctattttaattcttggcactttgagttgctattggaacttctcatttt

SEQ ID NO: 19468 - DNA, 1071 bp, Homo sapiens
  misc_feature (39)..(39): n is a, c, g, or t
  misc_feature (53)..(53): n is a, c, g, or t
atgttgattctgtttcttatctctgctctgtgtaatttnatagtggctttttntccagcctgggcaacagaacaagactttgtctctaaaaaaagaaaagaaaatttgtgataatatataaacaaagattgagtggcagcagagcttttgtgttaggcgtctgtgtagtctgtgcccagcctaggttcttctcatacctgaatggccttctttctcattagggctaacttacaggccatactttattgaaggaggggaatattgctgctgccgctgctctgggttggccattaattcaagttttcagtgtccctgtttcagtccagctaagtggataagggcatttatttttagttgaaagggacattttatcaactttaaagttatatgcattaaatatttaaatatgttgacttctttatccattcaggtgttgaatgtttgttttctaaaggagacaatgattcataatttgtgacactgtaaatcctgaggtttatagaaaggattcatgactttgtaatggagattaatttggagagaataacaccatcagtgttgtcttcttatgcaaaaaaaaaaaaaaaaaaaaaaaaaaaaaaaaacttggtgcgggcgcggcctccggcgccctccggaagaacgttttcttaaaccattcgcggtggggcgcgcgcgggggcccaaggagggataaggggacacggggccaataggcgggttccctagaggagagaaccgggggccaaggaacaagaggggcgagggaattctctctccaccaaatataaaaaaggcccgcgggggccacacgagagagggtttgcggagaacaaatctccagagaggggagttctcgagagagggctcattaaggggagactcttttcacagaggggagtctcaagggggaagctcggaatattctccaattaaggccgccggtctgggtgggtggacaaaaagaataacacaagaaacgaaaacgaaacacaaaaacagaaacaacaaagaaaacaacaaatagaacagacacaaaagaagaaaaaagaacacaaaactaacacaaga

SEQ ID NO: 19469 - DNA, 2454 bp, Homo sapiens
  misc_feature (413)..(413): n is a, c, g, or t
  misc_feature (577)..(577): n is a, c, g, or t
  misc_feature (1287)..(1287): n is a, c, g, or t
ggaatacattgattgggttttgatgttcaaaacccaatcaatgtaaatcactattaactacaaaataaaagcaatatgatcatctaaatagatgtagaaaaaaaatctgaaaaaaacccaacacccattcctgattaaaaactattagaaaactaggaatagaaaagcattttctcaaccaattgaacaattgaagggtagctatgaaaaacctacagctaatatcatatttcatgataaaagatggagttttcttactctaaattcaagaatcagggaaaagtgtctgctctcaccactctatttaacagtgctggaaatattagccagcaaaacagataaagaaaaataaataaatggcatagactggaaagattcatagttggcacaattatgtatatataaaatcctcnggaatgtacactttacatactagaatttaaaagtaagtttagcaactgtgttagttcgttttcatgctgctgataaagacatacctgagactggacaatttacaaaagaaaggtttattggacctatagttccacatgtctggggaggcctcacaatcatggcngcaggcaaggaggggcaagtcacatcttatgtggatggcaacaggcaaagagagagcttgtgcagggaaactcctgtttttaaaaccaccagatctcatgacacccattcactgtcaggagaacagcatgggaaagacccacccccatgattcaattgtctcccacaaggcccctcccataccacatgggaattatgggagctacaagatgagatttgggtgaggacacagagccaaaccacatcagcaacatgtcagaacacagaaaaaatgtaaaatatcactgtatttctatgtactagtagtgaactgtctcctagcttgtttgtttaaaaaaaaaaatcccatggtcttcaatttggtcatttaaaaataatctacaaggtatactgtttttctgttcttgttatttcctaacttttaaggtttctatttttccaccctgtagatcttgttctcactagagaataatttctacattatgcccaggttcttctgagctatgaaggggcccagatttaagggctatttttgacaccctaaatgtgctgagacaagtcattaaggtggtcctgccaggacacagccatctaaagcagcaatctgcttcttgccagaaaatctcgtgcctctgcagagccttttccagaatgaaccacaccatgctgaggtagggtagaaggggcagtacaccaataggcctgggtatnctagaacaataggcctagaacttctcatcagctcctgtttcttttcatctctaggaaaggagaaagagactacctactgcatttctgtcactcgctgaaaaggacactctgtcagaaaatcttctagcaaacttcaaagggcaaaatcaccccttgttactgataaagcccagagagcttcagcagctaacattccctggacagggcacagcaaggatttgaacctaggtcagtctggccagaacacccacaagctttccttaactcagtgtgctatctccccacgactaggtcactactgctttataatcacctttgtagccaccagtggattttgctcatcagtatttttcaggcaattgatactttagatattcagctgcaagacgtatgcagttttcattgacatcttttggagaaactgacaaacctggacttgacttaatgcctttggaaccttccaagatgttatataactctagatagaaggctgggcctccatgatgtcaggaatgttgcattcttatttccccatagataaacccatttgtccacaaagtcaaggagtcaggcagaggcccttgccatggggctttttaggataaagcaacaagcctggactttgctctacaacagggttttgcatagggagtggtatgaccagatccctcaagaaagaaagcttagagaccatcctgagcaacagggcaaaaccttgtctctactaaaaatacaaaaaattagctgggcatggtggcctgtacctataatcccagctacttgggaggctgagacacaacaatcacttgaacctgggatgcagaggttgcagggagctgagattgaaccactgtactccagcctggggaacaaactgagactctgtctcaaaaaaaaagaaagaatacttatgggtaaatctgacaaaataagtgtaagacctgtacactaaaaactacaaaacattgctgaaataaattaaagaagacctaaataatcggagagatatactttgtttaaaggtcagaagtctcagtattgctaaaatgagaactcttcccaatgcagtgctaatcaaatttctagcaggctttttgtagaaattgaaaagcagatttgaaattcatatggaagtgcgaacaaaaccaaaagagccaatataacttt

SEQ ID NO: 19470 - DNA, 808 bp, Homo sapiens
gggaatggagggaaataaatgactggatggtcgctgctttttaagtttcaaatagacattccagacaagcggtgcctgagcccgtgcctgtcttcagatcttcacagcacagttcctgggaaggtggagccaccagcctctccctgacaagcaaagtggatcagcaaaggctgcagtcaccagcatcttttccaaccttaatgaactgtatcctcaaaagaacactatcagactggctctgccgacttccagttctggaacaagatggttaaactcatttttccctgctctgctcctctaaatacaactaagtaccttggaaactattcagcagacaatgataaagggctctgaaagctagaagaaaaggtgtacttgcaagaaacctcaggacttgagtaacagcaacatggcaggccagaaagcagacccagggaggatagcacatgtcttcggctacactggtgaaggcatcgtgcctgctccacagcacatttttattcaagatgtgtaccatgtgatggccaagggagcttcatcaatcatggcatctcaagggagctggagcagatgaggaggagatggaggtcccaggaagggctgtgatctgcctggggtcccacaatgggaaacagaacaatccatttcacagatgcaagaaacagactcagtgagcacgtgatcacttctcacaactaatggagccaagattctgtcccttatggctccagagacctcttctattcccactgtagcacaacaatcaccaggactggagtgccacctatgacctcatgcctaatggatg

SEQ ID NO: 19471 - DNA, 2423 bp, Homo sapiens
  misc_feature (413)..(413): n is a, c, g, or t
  misc_feature (577)..(577): n is a, c, g, or t
  misc_feature (1287)..(1287): n is a, c, g, or t
ggaatacattgattgggttttgatgttcaaaacccaatcaatgtaaatcactattaactacaaaataaaagcaatatgatcatctaaatagatgtagaaaaaaaatctgaaaaaaacccaacacccattcctgattaaaaactattagaaaactaggaatagaaaagcattttctcaaccaattgaacaattgaagggtagctatgaaaaacctacagctaatatcatatttcatgataaaagatggagttttcttactctaaattcaagaatcagggaaaagtgtctgctctcaccactctatttaacagtgctggaaatattagccagcaaaacagataaagaaaaataaataaatggcatagactggaaagattcatagttggcacaattatgtatatataaaatcctcnggaatgtacactttacatactagaatttaaaagtaagtttagcaactgtgttagttcgttttcatgctgctgataaagacatacctgagactggacaatttacaaaagaaaggtttattggacctatagttccacatgtctggggaggcctcacaatcatggcngcaggcaaggaggggcaagtcacatcttatgtggatggcaacaggcaaagagagagcttgtgcagggaaactcctgtttttaaaaccaccagatctcatgacacccattcactgtcaggagaacagcatgggaaagacccacccccatgattcaattgtctcccacaaggcccctcccataccacatgggaattatgggagctacaagatgagatttgggtgaggacacagagccaaaccacatcagcaacatgtcagaacacagaaaaaatgtaaaatatcactgtatttctatgtactagtagtgaactgtctcctagcttgtttgtttaaaaaaaaaaatcccatggtcttcaatttggtcatttaaaaataatctacaaggtatactgtttttctgttcttgttatttcctaacttttaaggtttctatttttccaccctgtagatcttgttctcactagagaataatttctacattatgcccaggttcttctgagctatgaaggggcccagatttaagggctatttttgacaccctaaatgtgctgagacaagtcattaaggtggtcctgccaggacacagccatctaaagcagcaatctgcttcttgccagaaaatctcgtgcctctgcagagccttttccagaatgaaccacaccatgctgaggtagggtagaaggggcagtacaccaataggcctgggtatnctagaacaataggcctagaacttctcatcagctcctgtttcttttcatctctaggaaaggagaaagagactacctactgcatttctgtcactcgctgaaaaggacactctgtcagaaaatcttctagcaaacttcaaagggcaaaatcaccccttgttactgataaagcccagagagcttcagcagctaacattccctggacagggcacagcaaggatttgaacctaggtcagtctggccagaacacccacaagctttccttaactcagtgtgctatctccccacgactaggtcactactgctttataatcacctttgtagccaccagtggattttgctcatcagtatttttcaggcaattgatactttagatattcagctgcaagacgtatgcagttttcattgacatcttttggagaaactgacaaacctggacttgacttaatgcctttggaaccttccaagatgttatataactctagatagaaggctgggcctccatgatgtcaggaatgttgcattcttatttccccatagataaacccatttgtccacaaagtcaaggagtcaggcagaggcccttgccatggggctttttaggataaagcaacaagcctggactttgctctacaacagggttttgcatagggagtggtatgaccagatccctcaagaaagaaagcttagagaccaggccagagtccactgcagtagcccagtcaagagaggatggtgacttggacttgtagtagagccagttagaatgaaagaaattgacacattcagaaatggttttagagatagagtcaaactggacctgataaagaactagagaagcggagtgaggataaagagaagagccatgactgactcggaagattttgtcttgaaaaacttgagaactcaagacagagtgaaataaaatcacatgtgggaaaaatctcctgctttgttttggactactttgaagtgaaatgcctgttaagcctaagtggggtaggtcatggcgtacatgactgtgggctcaggatggatacaggcattcaggagttgtgagcaaatagaacttaaagccatgagagaagaagggatcaccaagagagacagtgtggcatagagaagaaaaggggtggaag

SEQ ID NO: 19472 - DNA, 1588 bp, Homo sapiens
gggaatggagggaaataaatgactggatggtcgctgctttttaagtttcaaatagacattccagacaagcggtgcctgagcccgtgcctgtcttcagatcttcacagcacagttcctgggaaggtggagccaccagcctctccctgacaagcaaagtggatcagcaaaggctgcagtcaccagcatcttttccaaccttaatgaactgtatcctcaaaagaacactatcagactggctctgccgacttccagttctggaacaagatggttaaactcatttttccctgctctgctcctctaaatacaactaagtaccttggaaactattcagcagacaatgataaagggctctgaaagctagaagaaaaggtgtacttgcaagaaacctcaggacttgagtaacagcaacatggcaggccagaaagcagacccagggaggatagcacatgtcttcggctacactggtgaaggcatcgtgcctgctccacagcacatttttattcaaggaaaggagaaagagactacctactgcatttctgtcactcgctgaaaaggacactctgtcagaaaatcttctagcaaacttcaaagggcaaaatcaccccttgttactgataaagcccagagagcttcagcagctaacattccctggacagggcacagcaaggatttgaacctaggtcagtctggccagaacacccacaagctttccttaactcagtgtgctatctccccacgactaggtcactactgctttataatcacctttgtagccaccagtggattttgctcatcagtatttttcaggcaattgatactttagatattcagctgcaagacgtatgcagttttcattgacatcttttggagaaactgacaaacctggacttgacttaatgcctttggaaccttccaagatgttatataactctagatagaaggctgggcctccatgatgtcaggaatgttgcattcttatttccccatagataaacccatttgtccacaaagtcaaggagtcaggcagaggcccttgccatggggctttttaggataaagcaacaagcctggactttgctctacaacagggttttgcatagggagtggtatgaccagatccctcaagaaagaaagcttagagaccaggccagagtccactgcagtagcccagtcaagagaggatggtgacttggacttgtagtagagccagttagaatgaaagaaattgacacattcagaaatggttttagagatagagtcaaactggacctgataaagaactagagaagcggagtgaggataaagagaagagccatgactgactcggaagattttgtcttgaaaaacttgagaactcaagacagagtgaaataaaatcacatgtgggaaaaatctcctgctttgttttggactactttgaagtgaaatgcctgttaagcctaagtggggtaggtcatggcgtacatgactgtgggctcaggatggatacaggcattcaggagttgtgagcaaatagaacttaaagccatgagagaagaagggatcaccaagagagacagtgtggcatagagaagaaaaggggtggaag

SEQ ID NO: 19473 - DNA, 361 bp, Homo sapiens
ttaagtgcatgtggtgattcatgtgcatggaaagtaccttgggctgaccacaaactagagttccctacaactacatcaatgtcaaaactaaccactgtctcctagcttgtttgtttaaaaaaaaaaatcccatggtcttcaatttggtcatttaaaaataatctacaaggtatactgtttttctgttcttgttatttcctaacttttaaggtttctatttttccaccctgtagatcttgttctcactagagaataatttctacattatgcccaggttcttctgagctatgaaggggcccagatttaagggctatttttgacaccctaaatgtgctgagacaagtcattaaggtggtcctgc

SEQ ID NO: 19474 - DNA, 316 bp, Homo sapiens
aagttatcacattaccatgtctccaaaaggcttctagtaaatatgcatgtttctttcttagcaaagaagtgatgataacacaatgggagtcatgaacacctaagcttatgtgcaagatcccaaagggaaggagctataagggagttgtggaaggagaaaaagcttaatctaaaatcttatttagaaatgattcttctcaaacccctgcttactactactggaaaataacaccaccaagactgagaacatttcagtagaggagacaccacggaagccgtacactgattttcaacactaatcattagatcacagataa

SEQ ID NO: 19475 - DNA, 330 bp, Homo sapiens
tcttattctctcttaaactttacctaatcagggttttttgtttgtttttacctttgctgtaccatgaaaactttcctttcaaaaccaacagtgacctccatgttgccaaattcaactgtcatttttttctcagaccttatctaacttgatctgccatcagcatttggcacagttgctcattccttattcttggaaacacacatgcctttttttcttcctacatttctgagtattccttttagccttctttgttgttatgcctcatcttttctacttctaaatgatggagtgtcccaagagtctgtcattgttgcttttctaacctatagc

SEQ ID NO: 19476 - DNA, 1017 bp, Homo sapiens
aataattccatctttcaaccctcactcctgttttcttctggttcctcaattatgttttcttcagcgtcagttaaaaaactttcttgtcatgcttcacattttccttagatggtaggtgatttttggatgcctttttatattaatgatgagacatttgggaggtttattcattaatacgcttctcctttatgtgagtagatagggagctggctcttacacttgagggtttttcattttttaaaatacagataaagcagactttaaaggataaaggtggtggttatcagtgttgattaatcaagttgggctcaaggatttcacaggtcttaaatgccatcacacagactgccatgccaagggcattctgaatgccaattacagattgaagttccttcagaaaccaagatgttatcaaaaactgatgaagtctgggtttctcttcaagtaagacaaacacatttcttacatagagaaaatagattacttggttctgaaagttaaaacactacgctgaataattccccttccccttccccacaagtccctaaggcaatattacggttgcctctgacagttaaaatttcagcatttcaatagagcgggctgaggagaactgggaaaaatgaaaagcaaaattaatgtaattgatatggggggtattttttaaaaaaaatagagacggggtctcacattgttgaccaggctgaatttgaactccttggctttagtagctggaatttcaggcatgtactaccatgcctggcaaggcagtatagaaacataaagactcacagtaggattgacttacgagacctttcagcactgaaggatatgagtttccaagtatgtatagtctatggaatgacagtgtagtggatcaaaaatagacactgcaaaatttcacaacactggggatggaaggaagatattagaagcatccagactggggaaaaaaaaaggtcatatacaaaacattaagaatctgaatggcttttgtccttggcacaaattagaagt

SEQ ID NO: 19477 - DNA, 725 bp, Homo sapiens
ccactgcactccagcctgggcaacagagcaagactcagtctcaaaaaaaaataataaaaataaataaataaaagagtcagggtctcttattgctctgtccccaggctggagtgcagtggggtgatcacgataatggctcactgcagctttaacctcctgggctcaagccatcctccattctcagcctcccaagtggctagaactacaggcatgtaccatcacacccgactattttttttttttaattttattgtaggcctggtgcgatggctcacatctgtaatcccagcactttgggaggctgtgagcagaacacttgaggtcaggagttcgagaccagcctggccaacatggtgaaaccacatctctactaaaagtacaaaacttagtgggattacaggcgtgagccactgcgcctggcaaggaggtgatctttctctgttgcccaggctggtctggaactcctggcttcaaggagcttttggcctcccaaagctctggcatgacaggtatgggccaccgtgcccggcctgtgaccttccttaaccctcacaccacactgtaacacagggatcacgttatgctacaattatgcccattgaacagatgagaaaatggaggctgaaagcgactacacttctattttcctctcagccacagtcactaacactgtgtgcaaaaaatttctgactctccccctttggaccaaacaggtggatggcact

SEQ ID NO: 19478 - DNA, 466 bp, Homo sapiens
agtatttgtcctttgtccaaggttcctgaagcggccttgggacagcttcagagcagtaaaggtgaaagacagtcttttgttagaatgttggggcactctaagcctcagaagcaggcctcagaaaacagaagctctgtctgtctcttgccctctaatcatcccctgcctttctgtcttagagctggttgtaaagaaattctctgacctatctcgtctgattgtttcagagggggtcctgccccttacccagtaggaaggaataccacacacagaggccagggagaatctggatgggccttgctgggtgtctgcactcagtcttagtattagatcacactctctgtccagtcaattactgtgaggttggccatgcttcaatcatctctctaatgaaatctctacaaaacgcccaagagaacttctggatagtctaacaggtggaagtttctggagggtggtatgcctg

SEQ ID NO: 19479 - DNA, 418 bp, Homo sapiens
gcagacattcttccagatcttttcctaagcattgacataggacatgtgtacagatacatagacattgtttacgtaagcagaatcactatgagttgttcagcttgttttttttttcacataaaaacgtatcttgggggctgggtgcggtgtctcacgcctgtaatcccagcactttgggaggccgaggcgggcggatcacaaggtcaggagatcgagaccatcctggctaacacggtgaaaccccgtctctactaaaaatacaaaaaattagccgggagtagtggcggacgcctatagtcacagctactcgggaggctgaggcagggaaatggcatgaacccaggaggcagaggttgcagtgagctgagatcccaccactgcactccagcctgggcgacagagcaagactccgcctcaa

SEQ ID NO: 19480 - DNA, 396 bp, Homo sapiens
gttcttccatagtgggttataaattttagcagtcagtacaaactttttcctttaagttttgttttcttgatggactgtattcaaaataaatacctgaacaaataccaactatataacatgaagccataaaacttggtctttatatataaataaagtttatcttggggtcagatgtctgtgctgttttctatatttttttatatccaatagtttggtctttttcctttcagttttgtatgcttttcttgtaatcgagccttggaagagacagagccactgagcccaaaacctagctttgtggtcggctgtggtggctcatgcctgtaatcccagcactttgggaggctaaggcgggaggattgcttaaactcaggagtatgagaccttgtctctatt

SEQ ID NO: 19481 - DNA, 373 bp, Homo sapiens
caaaagcagaaaggagagggagtttataatccaatatgatatgataaattgtcagaagattctcaggatagtggaagtttgagcattttggtagcagaggggaaggagacgttagacaggcaaggctggaagaactagagggtaactggtggaatgtggcccatgaagagactgggaatgacatcaaaggtgtatttgcctctttttctttcctaactcctttcacccactttcctacatatctgcaacatatttctctctccttgccttaaatgtcagtgttatttggtaacattttgcctcctgttcttaatttcaaaagtgcagaaaccaaaccttgtatatttcagctcccaaaaacccatattgttaa

SEQ ID NO: 19482 - DNA, 235 bp, Homo sapiens
tgtcattttcatggaatctggagttacggaaccatccaatgtttattacagagaatgaccacccataagcctctccatgcttatggaagcaacagttctggggccgctggctgcatattccttccaggtgtttatttctgggtctacatcatgtccctcactcatcaatttaactctatccagagaattcctctatggtcttcatcagattaggaagtaaatcatcagtcacttc

SEQ ID NO: 19483 - DNA, 455 bp, Homo sapiens
caatgattaccgctcccggaggcctactgagaccagccagcacatgtttgcttttttgcaatcacgcagcggcaccaaacttcttaccctgttgtttcaggcgttcccacagcctggccctagccttgccttcttcattttccactcttcccttgcaggtgcggttggctatagacatcttgcattctccaagccttttatctgtctttagtcagatagttccatctacctaaaaggccctttgcccttctctctcccatatccacctgctctcaacctgcctgtccctgaagaatgacatggcccagatgccaaagcctccatgaaaccccctggctgcctcagccgccctagactgtatctgtacctctcttgtagctcttctgtctcagttgataggaattgtgcaatgccctgtctccctagagaactccctgaaacgcttgagaggcaga

SEQ ID NO: 19484 - DNA, 598 bp, Homo sapiens
acccccaaaggcattgtttcctcatctcaacaagaatccagcacccgtcattttatcagcacacgtcactagcttctcaagtgagactactctgaagtgatctgtgtttgaagaatgcctttcccctttccccttacgtaactaagaggatgaaaaaggacactcactccctatatgaaagctgtgtattgtaagcagtcatcttgcctggctgagaactctaggatctttttctctgctctcctttaggctgacactcatagccagaccttctgtttattagccccctgaatctatttgaaaatatttttgctttcattataatataagtcacattcttcttgcatctgccgctgcattttccaaaagggttatgtcaagggaaattcaacactcacttttctcattatttgcttaccagcttgctcactcatcaaaataccagagttatttgatacttcagaagattatttccccctttagatgatgtgtcaagggaaggggagctggccccagtatcaggtgacagaattttcttcgcatttctactgttgactcaataaatgcccttgggcaagtcatggagcctcttcatact

SEQ ID NO: 19485 - DNA, 385 bp, Homo sapiens
gatagatcgtgtcctagagctaaatcatgagtactctggttttatactaatatactagattattggtattaaacatactctaaaatgtccaactgtaatattttctacaggaatagaaattgtgaattaagaaaaagtgttggccagacacagtggcttacgcctgtaatcccggcactttgggaggctgaggcaggaggatcgcttgagcccaggagtttgagaccagcctggtcaacacagtgagaccctgtctctacaagaaatacaaaagttagccaggcatagtggtgcgtgcctgtagcctgagctactgggaaggctgatgtaggagaatcacctgagccctggaggtcaaggctacagtgagccttgatagtgctac

SEQ ID NO: 19486 - DNA, 236 bp, Homo sapiens
aacactgcactccagcctaggggacagagtcagattccatctctaaaaagtaaaaacgcctggagccatggtgatactgtataccaaggatctgcaaactatggaccatgggctaaaatctggcccacagcctgtttttatatgtctggcagtctagaatggctttcatattttaattggctaaaaaaatgtgaaaagaataataatattttgtgatgtgaaaatgacatgaaatt

SEQ ID NO: 19487 - DNA, 210 bp, Homo sapiens
cttgattaatagaatgccaatcatgttgtttttatatctctctttctatgtctactgtgatgtgagaaacactcagaggaatgggtgagccaggtgccttcccctgctccctactttgccaagttgataactcctttgacccttgaacattaaccatgagcaccgatgcccgtctttcattcaggctgtattaaagtccactttgcaaag

SEQ ID NO: 19488 - DNA, 526 bp, Homo sapiens
aaagtgctgagattacaggcgtgagccaccatgcccggcctcatggttctttcttaataataaattagaagaagtagaattacagggtcaaaaagtatccattttaaagctttcaatgtaattgcctgtttatcttctagaaagtttgacctagttgtattttagagtgtcattttcttgaactttatcatcattaaagttttaaatttggaacactggcaatttgataagtatattaggattcttcttattgcaagtagcaaaatacaactcaatctagtttaagaggggaaaatgtagtcattggctaacacaatctaattttggtttaagagacaaatctagagtctcaaatgatctcagagtgtaataatccctgacttttgtcttgatattacttggcttgtatacctttgctctatttgcatgctggccttactctgccactgacaggctgtctgtatggtgtggaagaggacggctagcatccccatacctgcatccatacagtttgtaatataaaaaa

SEQ ID NO: 19489 - DNA, 427 bp, Homo sapiens
ggcacatgtatacctacgtaacaaacctgcaggttctgcacatgtaccccagaacttaaagtaaaataaaaaaaatgctgttagtcctctaatatatattgcatccaaaggtgagcagcaaaagcattataagatacaaataaaattaagaaaataataagtggaaaatgctttatcaatacattagaaaatatttttattactcatttaaaactcaagttccaactttttcttttttcttctttttttattttttgtagaaatagggcctctctatattacccaggctggtctggaactcctaggctgagattacaagtgtgagccaccatacctggccacaacttaaatgtgaaaaaatggcaaaaatatggcacagtctgactatgtaacaagttaacattttacaggtagccttagatacagt

SEQ ID NO: 19490 - DNA, 344 bp, Homo sapiens
gtcaatatatacataatacataaaacttttatgatcatttaaatctccctaaaaatgaatatgaacaaatctatcacgtaatgaacactttcttccattttcttttctcacaaaagctctcttaaatttggtgtttgttttatgctaaataattaaataattctttttagtggcgtaacacactgaatatactttaattttattttatgtttctgtctctctgttttatcttagtataagaaaatccttgaaattagataatttctaaaggaaaggggtctatttagctcacaattgttgaggctaaaggggccaagattgttcagcttcatctggtcgacttc

SEQ ID NO: 19491 - DNA, 279 bp, Homo sapiens
ccttactcggcaagtgttcttggcagagcatcctattgaaaatattgcagtcctaaagaatgtctagtgatagaccttgtcatacaaacataagtatatgtgcaaaatttgcaagccatgcaaaggataagatgcttgaaggaggttaagaaatttcttgtggagttttagagagtccttggaaacagttcttttcttagacatgtaatcatgagttccctctccttcatgtcttcccagccctattttgtctggatctgacaaaaacaatcatccagt

SEQ ID NO: 19492 - DNA, 243 bp, Homo sapiens
cttgagtccaggggttcgaggctgcagtgagctatgattatgccactccagcctgagcaacagagcaagaccttgtctaaaaataaaattaaattaaaaaatccagttagagaggataagcgtattttacgaatagagcaaagcaaagtctagaattggcttccctgcgcaagaataccatattactgtttggaaaagagaagttgctacctctagaccaacagtcaagggcccttcagccct

SEQ ID NO: 19493 - DNA, 527 bp, Homo sapiens
acagataagaatatcgaagcacatataagttaagtaatatgcatagggtcacaaattattagtgtataactctgaattgaatttagatctctttgattccaaggcttgggatcttacatgcccctttattaggtaggaatagatacttcatgaagatgataacatgccatctacagaatacgatatggcattgatgtgacactttacctacaaaatatcttatttctgagtcttccgcaagagaaaaagcaattttatttttatgggacaagattggatgttacatttttaatcaattacatgtaagtgtattctacctttaaaattgctatggaaaagtttaattatttccaacaggatttataactatcagttatacctcaaagttgttattaactgaataaaactacacattccaaaatgattaactcttaaagcgcattattggtacattcataatgtttaattttatttttatcatccttgctcatattgaataaatgccttttaaaaccaaaataagattg

SEQ ID NO: 19494 - DNA, 367 bp, Homo sapiens
ctgtgtttctgtttgcagcctctcctttaaggtgctgttggttctgggtgggttcaaggtcaaggtggtagggaggggtttctagttagagtggcctgaaggagggtcccagaccaggaaccagaaagtataacacaacacccacatatacctcactgctcctgtcctgcccctggcatggacagcacaggggatgatttggagaccagagggaaactcatccagattcatgcaggctgctacagaggctacacctgggcattgttctggtgatggtgcagagcctgacagattaatgggattcaggaaagaaggtgaatattggcctaacaaagaaacactgccttatttctgaggatgcatgcca

SEQ ID NO: 19495 - DNA, 266 bp, Homo sapiens
agggagtagcaggagatgaagctggaaagatttcctaacactaggtggtaaaaggaacttctctaacctggtaagaagtttggattttattctgtaggcaaaaaaataactcaagctgagtagaatattataaaatttttgtttaaaaaagaaaacttggccaggtgcggtggctcacacctgtaatcccagcactttgggaggctgaggcaggtggatcacccaaggtcaggagttcaaaacaagactggccaacatggttaaat

SEQ ID NO: 19496 - DNA, 362 bp, Homo sapiens
  misc_feature (13)..(13): n is a, c, g, or t
  misc_feature (137)..(137): n is a, c, g, or t
tgagtgggcggcnaaaaaaaaaaaaaaaccagaatcagctcagctggcctccttttcacttgctcgtagcatggccttacaaagttgcaaagacctgctggaatcaaggcctcatatttcagaataataatgggaantcaggctgggcacggtggctcacacctgtactctcagcctcttaaagtgctggcattacaggtgtgagccaccacgcctggccagggaagggtgagttctattgtcaccactgtttctgctgctgctaccttctcaatctagaaggtggtccattccattcctccttttccagatgagagatctgaggccagagttcccaaactatactctaaagattcttaaaa

SEQ ID NO: 19497 - DNA, 368 bp, Homo sapiens
gatcccagggttgtcaccatctgatcaattgctttttctctgagcctggcacatagtaagcactcaataaacgccactgcctgggccagggtcagggagggatccaccttcctgtggcctggctgccctcctggccaaaaaacctccctggtacagtcccttccatagcttgggctacagctgactgctctgggctggcaacttcctgcccggagcagcctgagcagccgcctctcccctgagaagatcttttgttccagctccccatgacgccccgagcccagcccatgaggcaggcccccctgtggcttcccatggcgggcgagcctgactccgaggctggagctcttttctaacagtgatagtaa

SEQ ID NO: 19498 - DNA, 523 bp, Homo sapiens
gtaaaagatctccagccagtgcttctcaaataactttattacataccagagccaccaggggagcctgtggaactacagattctgagttagaaagtctggggtggagcccaagactcttgctttctggacaagctccaggtgatttctgatgctgcaagtctggctttagataacagctgctaagtttgcctgaggatgaaagcttgagtaaactctgaatactgatgttacaggactccagcactttctaactatatacatttgaacataagagacagattttatagctaaaaaggtttggctttttgtatatatttcttattgatacaaatatgtgtacatgtatatgggggcacaaatatgatactctatcacatgcttacactgtgtaatgatcaaattaggggtttggggcatctatcacctcgagtattcgtcatttctgtgtgttggcattattccaagtcctcttttctagctattttgaaatctacaatacattgttgttaactatggtcatcct

SEQ ID NO: 19499 - DNA, 502 bp, Homo sapiens
atatgtacatctactttttcaactgtaaatttatgaaatctaaatcaatgaaatatttttgatgaaaatttagtgtccaaattaagatgtgctgttgtttcaaattcaagctaggttttgaagacttagtatgaaaacaaagaatataaaatacttcactgatatgttcatattgatgttttggatgcatggggttaagtaaaatatattattaggctgggtgcagtggctcacgcctgtaatcccagctctttgggagccaaggcgggctgatcctttgagcccaggagtttcagaccagcctggtatcatggtgaaatccgtctctaaaacaaatagaaaaattagccaggcatggtagtgtgcacccatagtcccagctactcgggaggctgcagtgggagaatcacttgagcctgggaggtcaagggctacggtaagccttgtgatcacgccactatattccagcctgcgagacaaagtgagaccctgttgcacacaa

SEQ ID NO: 19500 - DNA, 520 bp, Homo sapiens
taaaacttgcattggctcctccttcaccttccgccatgattgtgaggccaccccagccatgtggaactctcctactgcactgagaagcacgtgttctccatttccctgggggagaccattgtattgggcagtttggaacaaaacaccatggactgggaggcttacacaacagaaatttatttcttgctgttctagaggctgggaagctcaaggtgctggctgcatattcattctgaggcctcttctgatgtgcaggcagctgccttctgacttgtgctcacattggagagagggagtcagctttggtgtctcttcttgtaaggacactaaccccattcactagggccccaccctcatgacctaatcacccccaaaggtcctgtctccagacatatcacatggggcagagcttcaatgtaccaattctggggggtcacaaaccctccgtccatagcagacatcttggttgctcccagtttttagagattaagaataaaacaactgtaaatatttacatgca

SEQ ID NO: 19501 - DNA, 401 bp, Homo sapiens
cctgcctcagcctcccaagtagctgggattacaggtgaccatcaccacacccagctaatttttgtagtttgtagtagagatggggtttcaccatgttggccaggctgggcttgaactcctgacctcaagtaatcctcccacctcagcctcccaaagtgctgggaatacaggtgtgaaccaccacatctggcctatatttactatttatttctaatatttacattggaaatctgaatacatccaactcttaaggttctttcttgctttccttcaattaatatttgtatctcccattttcataatgaaaatcctgtttcccaacaatatcaatatgtttactcattttctcaattctatgatacatctaaaattatttcagaattgcttcactactacaaaaa

SEQ ID NO: 19502 - DNA, 771 bp, Homo sapiens
agtctggtgggttttttttcttcttcttcttttttttttttcctacacttatcacagagcctgacactgagaggcattcacattttatttttttcaggtcattttgctcatcaataagtttcctcagatatcagggagtagtgaaaaaagaatgcgttttgcagaaagatgcgcctgagtttgaattccccacctattagttttgtgacctcaggtaaatcacttaacctctctgggcctcatttttctcatctgtgaatcgggagagcagctaaatacacataagggctttactaccatattagagctggttaagtgtttaattaatgatagttcctggctctaccttcttcctccagggactgctcaagcaatcttcccacctcagcccctcgagtagagaggaccacaggtacacaccaccacacctggctaattttattttttgtcgagatgaggtctcactatgttgtccaggctggtctcaaactcctgggctaaagtgatccaccctccttggcctcccaaagtgctaagatgacaggcgtgagccacggcgccctgcctagttccaccgtcttatctgaaggctcggggtgacagctggggccagtcactgactccgacttccgccccaacaatgcggatttgagtttccacacaagatgtgactctagagtatctttattaacatgtcagaaggtttcctgatgtttctgcttacaaagtcttcagctaacttccctcttcccctggccccagctgtagttt

SEQ ID NO: 19503 - DNA, 398 bp, Homo sapiens
agtataataagatattttgagagacagaaaccacattctcatgccttttatcacagtatattgttataattattctattttaattattatttatctcttactatgcctaatttagaaattaaacattatcatagaaatgtacatataggaaaaaatatatgtagggttcggtactatccttggtttcagacatctactgagggtcttggaatgtgtcccccacagataagaagagattgctgtaataactgttttaacgttcatgtttgttaattatgtcatctgtgcaacttcctggcctgtttctattgattgatttttttttcttaccatagtttatatttttctgctttacatgctgataactttttattgaatgccagttattgtaaatttta

SEQ ID NO: 19504 - DNA, 443 bp, Homo sapiens
caatagcaaagacatggagtcaatccaagtgcatccaaggtagattgaaaatccaaggtagattggaaaattccatatataccatggaatattaagcagccataaaaagaacaaaatcacatcatttgcagcaacatggatacagctggaatccactctcctaagcaaaccaatgcagaaacagaaaccaagtatctcatgttttcactcatgtggaagctacacattgggtgcacattgtcataaacatgggaataatagacactaggaaataaaagcagggagggacagagtgggccagggttgaaaaattacttactgggtcctacgcttactacctgtgtgatgggctcaactgtactgcaaacctcggcatccctcaatatgcctttggaagaatcctacagaggtaccacctaaatttagaatacaaactaaaaaaa

SEQ ID NO: 19505 - DNA, 596 bp, Homo sapiens
agcgggcggaagggcagcgtcgcggtgctggaggctgttgctgggaggcgtggattctggaaagccgcatcgggaagctgggtatagagaaggattaacagagattgcaccctggtgacctttcccctcaggcacgtgactcttgccccttccaagttgtcatcctcattgtgaaattcacctggtagctgatactcaggagaggaatactttggaagcctgagtcttctagccatcacccttctgtttttctctcaaagctccacttggagctcagctggagaaggaaccctgtgaagtctggaattggacatgtctcttattaacgaagtaattgtggagaaaacagcattcttaccactatcatccaggaaagtatcccaagtcccttccttggcagtagcaaacttcccttaattcccttccccttgaggagatgcagccagaatgagagccttaagcagagtttttgggtgaaatgataggcatgttctaggaattgtgacttaaacttggacctcttgtgattttttttcttttcatcttaattactgcatttcactcattcatcatgaaataaactcttactgaaggct

SEQ ID NO: 19506 - DNA, 229 bp, Homo sapiens
accacacattacatctctggccccagtcaaatcatttgtaaatgcacatattttggcaaaaagtatcctaagtctacctttattggtttaaaaccaagttgtgtcagaatatccttcaacactaagaatgtatttttttatttttattttttttgagacggagtctcgctctgtcacccaggctggagtgcagtggcatgatctcagctcactgctagctccacttcct

SEQ ID NO: 19507 - DNA, 481 bp, Homo sapiens
gggaggggacgctgggagagaggcacgtgcccctggactcagaggagccggaaagaggctgactttcatttcagcttccatttaccagaggaagggagcccacaggggcagctgctggcctgtcccccagccagcaagtcacacaaaccagctccagctggtgtcactggggcctgaggtagaccatgctgctgggaagaggctactggggccaacctgaccccgtggcccccacctgaccccttcccaggaagggccccccacccagcacgggggcctgtgggcgcctggccgtcctctcctctccttacatgcccttggccgaaccactgtactcttccctctcaaggtcacagggccgtccacaccaggaatatttactcactggactggccctgttagcagcactcaccacaaatatgctttctgataaagttggcagaaaaaaaattctagagctcaaaccaatgtcagaaatcat

SEQ ID NO: 19508 - DNA, 478 bp, Homo sapiens
ggattctcccaaagcaccttgaactcctagagactaagacttacaaaaacaaaatagacttatgggacaatattttcttcaacatgccgtaaatataagataattgattgctgtggataaattattacaaacggggtataccagtacttcttcaagctagtgttcgtagctaaatggttaagtatacgtaggtaagtgtgttgtttgcttagtatcagccctgccctttcatctgtcgtccttctctccgtgactgggtttctcacccttctggttacctaggctagaccctcagcactgctggccatcctccctgccctacctacgccaccacaatcaatcacccaattacttaaactggtttcattccaaaattttgtgtaaatttaatgatggaaaagaactctgctttctcttatgctttccttcagtgtgcttaatgataaaataaataattttacagacttaaaaaacaaaa

SEQ ID NO: 19509 - DNA, 827 bp, Homo sapiens
atgctgtcatcaccagtaagataccccagcccggttggctaacccctagctcagccctgtttgtggttaggggagttctagacagaacataattagacccctgctacttcctgaaacctcagctaggactgcagggaggggtgcgaggctagccacgcaggcggggccctgggtcattttaaactctcagagtgaacgtcttgataggaccgacaagacgcatgacatgtacttagaaagcttatcttagagccacactgagattggaacccgcaaaatatgccaggaaacgccaccccagtgaccaccactgcgccgcgcagggccgtggggctgagccacgctctcgttttgtcaggcagctatgcagttgctcttccttgtttttgttttgtttttgtttttgtttttaatatttatttttttagagacagggccttgctctgttgcctgggctggagaacagtggcaccatcatagctcactgcagcctcaaactcctgggctcaagcgatcctccccgctcagcctcctgagtagctgggactacaggtgtgcaccaccacacccagccaaaacagccatcctccccttgagagtcatcagaaaaatacattaggaaaatgtgtttagaaataaaagcacaaggcagggcagtgctcacgcctgtcatcccagcactttgggaggccgagacgggaggatcagttgaggtcaggagtttgagaccagcctcggcaacatggcaaaatcttgtctcttttttttggtattaaaaaaatcataaaaataaaagaaataatgcaatttaaccttcacagttaaca

SEQ ID NO: 19510 - DNA, 3790 bp, Homo sapiens
  misc_feature (2375)..(2375): n is a, c, g, or t
  misc_feature (2441)..(2441): n is a, c, g, or t
  misc_feature (2484)..(2484): n is a, c, g, or t
  misc_feature (2497)..(2497): n is a, c, g, or t
  misc_feature (2612)..(2612): n is a, c, g, or t
  misc_feature (2637)..(2637): n is a, c, g, or t
  misc_feature (2646)..(2646): n is a, c, g, or t
  misc_feature (2667)..(2667): n is a, c, g, or t
atgctgtcatcaccagtaagataccccagcccggttggctaacccctagctcagccctgtttgtggttaggggagttctagacagaacataattagacccctgctacttcctgaaacctcagctaggactgcagggaggggtgcgaggctagccacgcaggcggggccctgggtcattttaaactctcagagtgaacgtcttgataggaccgacaagacgcatgacatgtacttagaaagcttatcttagagccacactgagattggaacccgcaaaatatgccagggaggaaggtgagcaagggacacgacactcacccggataaacccaacaagcgcagcgaggctgtggggaaaccggagccctgcacaccgccgggggaaggtgggccaccgccaccaccgtggaagaacagcgcggaggcaccccacgagatgagacggaactgccgtgagatccagcaatgccaactgtgggtctgacccaggataacggaaagcagggacgtgaacagccctcctcatgttcttgacaccgtcattctcagcagctcagctaaggcacagaggcagccgagcgtctgtcagcagagtcgtggctgagcagaacacgccacacgccacacgccacacgccacacgtgcaggattgctcaagatggaagggcacagtggaatatatatatatatttatatttttggcgagaccctggaggacacactgaatacaatggaataccatcccgcctttgaaaggaagggaaatcctggcacacgctgcaacaggagggagcttgaggacactgtggtgagtggagcacgtgagacacggaaggacacacgctgaagacacgcagagatgcccacccacgtggggaggtgacaggggagcccagcgcacagagacaaagtggaatggaggcctgggggctgggagcaaatgcggagcgagtgcttcctggggcagagtctccgtttgggaagatgagaaggttctgccgacggatgctggcgatggttgcagaagaatgtgaatgtgcccaatgctactgaaaaacggttacaatggaaacgccaccccagtgaccaccactgccccgtgggcctccctgggcctctccgccaagacctgcaacaacgtgtccttcgaagagagcaggatagtcctggtcgtggtgtacagcgcggtgtgcacgctgggggtgccggccaactgcctgactgcgtggctggcgctgctgcaggtactgcagggcaacgtgctggccgtctacctgctctgcctggcactctgcgagctgctgtacacaggcacgctgccactctgggtcatctatatccgcaaccagcaccgctggaccctaggcctgctggcctgcaaggtgaccgcctacatcttcttctgcaacatctacgtcagcatcctcttcctgtgctgcatctcctgcgaccgcttcgtggccgtggtgtacgcgctggagagtcggggccgccgccgccggaggaccgccatcctcatctccgcctgcatcttcatcctcgtcgggatcgttcactacccggtgttccagacggaagacaaggagacctgctttgacatgctgcagatggacagcaggattgccgggtactactacgccaggttcaccgttggctttgccatccctctctccatcatcgccttcaccaaccaccggattttcaggagcatcaagcagagcatgggcttaagcgctgcccagaaggccaaggtgaagcactcggccatcgcggtggttgtcatcttcctagtctgcttcgccccgtaccacctggttctcctcgtcaaagccgctgccttttcctactacagaggagacaggaacgccatgtgcggcttggaggaaaggctgtacacagcctctgtggtgtttctgtgcctgtccacggtgaacggcgtggctgaccccattatctacgtgctggccacggaccattcccgccaagaagtgtccagaatccataaggggtggaaagagtggtccatgaagacagacgtcaccaggctcacccacagcagggacaccgaggagctgcagtcgcccgtggcccttgcagaccactacaccttctccaggcccgtgcacccaccagggtcaccatgccctgcaaagaggctgattgaggagtcctgctgagcccactgtgtggcagggggatggcaggttgggggtcctggggccagcaatgtggttcctgtgcactgagcccaccagccacagtgcccatgtcccctctggaagacaaactaccaatttctcgttcctgaagccactccctccgtgaccactggccccaggctttcccacatggaaggtggctgcatgccaaggggangagcgacacctccaggcttccgggagcccagagagcatgtggcaggcagtggggcctcttcatcancagcctgcctggctggctcccttggctgtgggcaggtagcacncctgctggcagangtacctggtggctgccctgttcgcatcagtggcgatgactttatttgcggagcatttctgcaagcgttgcctggatgcggtggtgcattgtgggccctctgggctcctgcctcanaatgtcagtgagcaccatgctggangtcacccancactgtggcagcgcccagganggcatagggcagcctaccacctccaagggggcaggcgccctcatctggggttgggtctgtgctgagctggagggcctctagggaaccgtggggcagggtggccagctgctggctcccagagcgcagcccaggcgtcctcaacggggagccccaaatgtccacgcccagaacaacagttggcaggacaggtgtgacacagccacagcagaggcaaggggtgccaggagtccccagcggcatcctcggggagatgctggtgaggggtccgtacagggtggggtccccacccctagccccttactgaggggggagtgcagcagttggcctgcttgtctggcggagaaagccagctccctgcaccctcggggctgagtcagatctgggtctgccgcaaaggccttgcctagaccaggtcacactgatgccctggtttccctatctgtaaaatggggccaatgacacctacctcactgggtcaccatcgagatcaatcctcctccctgccccgacacctcgggcacatcgcatgcactcagagcacagagccgggcagacgcagcacctgcatggggagcccagtgcccggcacagcacaggggcttccagggaggccgcgcagggccgtggggctgagccacgctctcgttttgtcaggcagctatgcagttgctcttccttgtttttgttttgtttttgtttttgtttttaatatttatttttttagagacagggccttgctctgttgcctgggctggagaacagtggcaccatcatagctcactgcagcctcaaactcctgggctcaagcgatcctccccgctcagcctcctgagtagctgggactacaggtgtgcaccaccacacccagccaaaacagccatcctccccttgagagtcatcagaaaaatacattaggaaaatgtgtttagaaataaaagcacaaggcagggcagtgctcacgcctgtcatcccagcactttgggaggccgagacgggaggatcagttgaggtcaggagtttgagaccagcctcggcaacatggcaaaatcttgtctcttttttttggtattaaaaaaatcataaaaataaaagaaataatgcaatttaaccttcacagttaaca

SEQ ID NO: 19511 - DNA, 4023 bp, Homo sapiens
  misc_feature (2608)..(2608): n is a, c, g, or t
  misc_feature (2674)..(2674): n is a, c, g, or t
  misc_feature (2717)..(2717): n is a, c, g, or t
  misc_feature (2730)..(2730): n is a, c, g, or t
  misc_feature (2845)..(2845): n is a, c, g, or t
  misc_feature (2870)..(2870): n is a, c, g, or t
  misc_feature (2879)..(2879): n is a, c, g, or t
  misc_feature (2900)..(2900): n is a, c, g, or t
atgctgtcatcaccagtaagataccccagcccggttggctaacccctagctcagccctgtttgtggttaggggagttctagacagaacataattagacccctgctacttcctgaaacctcagctaggactgcagggaggggtgcgaggctagccacgcaggcggggccctgggtcattttaaactctcagagtgaacgtcttgataggaccgacaagacgcatgacatgtacttagaaagcttatcttagagccacactgagattggaacccgcaaaatatgccagggaggaaggtgagcaagggacacgacactcacccggataaacccaacaagcgcagcgaggctgtggggaaaccggagccctgcacaccgccgggggaaggtgggccaccgccaccaccgtggaagaacagcgcggaggcaccccacgagatgagacggaactgccgtgagatccagcaatgccaactgtgggtctgacccaggataacggaaagcagggacgtgaacagccctcctcatgttcttgacaccgtcattctcagcagctcagctaaggcacagaggcagccgagcgtctgtcagcagagtcgtggctgagcagaacacgccacacgccacacgccacacgccacacgtgcaggattgctcaagatggaagggcacagtggaatatatatatatatttatatttttggcgagaccctggaggacacactgaatacaatggaataccatcccgcctttgaaaggaagggaaatcctggcacacgctgcaacaggagggagcttgaggacactgtggtgagtggagcacgtgagacacggaaggacacacgctgaagacacgcagagatgcccacccacgtggggaggtgacaggggagcccagcgcacagagacaaagtggaatggaggcctgggggctgggagcaaatgcggagcgagtgcttcctggggcagagtctccgtttgggaagatgagaaggttctgccgacggatgctggcgatggttgcagaagaatgtgaatgtgcccaatgctactgaaaaacggttacaatggtgctgaggccaggtctgtctgcggcttcctgctgacctggaggtgggactccatgatctgtaaccacagaaggcccagaagcatgaactcagccagagtgggcagccaggacactggagctggtggcgctggcagagcttggggaagtcacaccactgcacaccctgcgtgacctctagcaaccccctggctggaaaggatgagtttctgacctcggagagctgtgtttgaggaaacgccaccccagtgaccaccactgccccgtgggcctccctgggcctctccgccaagacctgcaacaacgtgtccttcgaagagagcaggatagtcctggtcgtggtgtacagcgcggtgtgcacgctgggggtgccggccaactgcctgactgcgtggctggcgctgctgcaggtactgcagggcaacgtgctggccgtctacctgctctgcctggcactctgcgagctgctgtacacaggcacgctgccactctgggtcatctatatccgcaaccagcaccgctggaccctaggcctgctggcctgcaaggtgaccgcctacatcttcttctgcaacatctacgtcagcatcctcttcctgtgctgcatctcctgcgaccgcttcgtggccgtggtgtacgcgctggagagtcggggccgccgccgccggaggaccgccatcctcatctccgcctgcatcttcatcctcgtcgggatcgttcactacccggtgttccagacggaagacaaggagacctgctttgacatgctgcagatggacagcaggattgccgggtactactacgccaggttcaccgttggctttgccatccctctctccatcatcgccttcaccaaccaccggattttcaggagcatcaagcagagcatgggcttaagcgctgcccagaaggccaaggtgaagcactcggccatcgcggtggttgtcatcttcctagtctgcttcgccccgtaccacctggttctcctcgtcaaagccgctgccttttcctactacagaggagacaggaacgccatgtgcggcttggaggaaaggctgtacacagcctctgtggtgtttctgtgcctgtccacggtgaacggcgtggctgaccccattatctacgtgctggccacggaccattcccgccaagaagtgtccagaatccataaggggtggaaagagtggtccatgaagacagacgtcaccaggctcacccacagcagggacaccgaggagctgcagtcgcccgtggcccttgcagaccactacaccttctccaggcccgtgcacccaccagggtcaccatgccctgcaaagaggctgattgaggagtcctgctgagcccactgtgtggcagggggatggcaggttgggggtcctggggccagcaatgtggttcctgtgcactgagcccaccagccacagtgcccatgtcccctctggaagacaaactaccaatttctcgttcctgaagccactccctccgtgaccactggccccaggctttcccacatggaaggtggctgcatgccaaggggangagcgacacctccaggcttccgggagcccagagagcatgtggcaggcagtggggcctcttcatcancagcctgcctggctggctcccttggctgtgggcaggtagcacncctgctggcagangtacctggtggctgccctgttcgcatcagtggcgatgactttatttgcggagcatttctgcaagcgttgcctggatgcggtggtgcattgtgggccctctgggctcctgcctcanaatgtcagtgagcaccatgctggangtcacccancactgtggcagcgcccagganggcatagggcagcctaccacctccaagggggcaggcgccctcatctggggttgggtctgtgctgagctggagggcctctagggaaccgtggggcagggtggccagctgctggctcccagagcgcagcccaggcgtcctcaacggggagccccaaatgtccacgcccagaacaacagttggcaggacaggtgtgacacagccacagcagaggcaaggggtgccaggagtccccagcggcatcctcggggagatgctggtgaggggtccgtacagggtggggtccccacccctagccccttactgaggggggagtgcagcagttggcctgcttgtctggcggagaaagccagctccctgcaccctcggggctgagtcagatctgggtctgccgcaaaggccttgcctagaccaggtcacactgatgccctggtttccctatctgtaaaatggggccaatgacacctacctcactgggtcaccatcgagatcaatcctcctccctgccccgacacctcgggcacatcgcatgcactcagagcacagagccgggcagacgcagcacctgcatggggagcccagtgcccggcacagcacaggggcttccagggaggccgcgcagggccgtggggctgagccacgctctcgttttgtcaggcagctatgcagttgctcttccttgtttttgttttgtttttgtttttgtttttaatatttatttttttagagacagggccttgctctgttgcctgggctggagaacagtggcaccatcatagctcactgcagcctcaaactcctgggctcaagcgatcctccccgctcagcctcctgagtagctgggactacaggtgtgcaccaccacacccagccaaaacagccatcctccccttgagagtcatcagaaaaatacattaggaaaatgtgtttagaaataaaagcacaaggcagggcagtgctcacgcctgtcatcccagcactttgggaggccgagacgggaggatcagttgaggtcaggagtttgagaccagcctcggcaacatggcaaaatcttgtctcttttttttggtattaaaaaaatcataaaaataaaagaaataatgcaatttaaccttcacagttaaca

SEQ ID NO: 19512 - DNA, 2760 bp, Homo sapiens
  misc_feature (1345)..(1345): n is a, c, g, or t
  misc_feature (1411)..(1411): n is a, c, g, or t
  misc_feature (1454)..(1454): n is a, c, g, or t
  misc_feature (1467)..(1467): n is a, c, g, or t
  misc_feature (1582)..(1582): n is a, c, g, or t
  misc_feature (1607)..(1607): n is a, c, g, or t
  misc_feature (1616)..(1616): n is a, c, g, or t
  misc_feature (1637)..(1637): n is a, c, g, or t
agcaggctggtcggtcggaatttaggatcaaatatccgaaacgccaccccagtgaccaccactgccccgtgggcctccctgggcctctccgccaagacctgcaacaacgtgtccttcgaagagagcaggatagtcctggtcgtggtgtacagcgcggtgtgcacgctgggggtgccggccaactgcctgactgcgtggctggcgctgctgcaggtactgcagggcaacgtgctggccgtctacctgctctgcctggcactctgcgagctgctgtacacaggcacgctgccactctgggtcatctatatccgcaaccagcaccgctggaccctaggcctgctggcctgcaaggtgaccgcctacatcttcttctgcaacatctacgtcagcatcctcttcctgtgctgcatctcctgcgaccgcttcgtggccgtggtgtacgcgctggagagtcggggccgccgccgccggaggaccgccatcctcatctccgcctgcatcttcatcctcgtcgggatcgttcactacccggtgttccagacggaagacaaggagacctgctttgacatgctgcagatggacagcaggattgccgggtactactacgccaggttcaccgttggctttgccatccctctctccatcatcgccttcaccaaccaccggattttcaggagcatcaagcagagcatgggcttaagcgctgcccagaaggccaaggtgaagcactcggccatcgcggtggttgtcatcttcctagtctgcttcgccccgtaccacctggttctcctcgtcaaagccgctgccttttcctactacagaggagacaggaacgccatgtgcggcttggaggaaaggctgtacacagcctctgtggtgtttctgtgcctgtccacggtgaacggcgtggctgaccccattatctacgtgctggccacggaccattcccgccaagaagtgtccagaatccataaggggtggaaagagtggtccatgaagacagacgtcaccaggctcacccacagcagggacaccgaggagctgcagtcgcccgtggcccttgcagaccactacaccttctccaggcccgtgcacccaccagggtcaccatgccctgcaaagaggctgattgaggagtcctgctgagcccactgtgtggcagggggatggcaggttgggggtcctggggccagcaatgtggttcctgtgcactgagcccaccagccacagtgcccatgtcccctctggaagacaaactaccaatttctcgttcctgaagccactccctccgtgaccactggccccaggctttcccacatggaaggtggctgcatgccaaggggangagcgacacctccaggcttccgggagcccagagagcatgtggcaggcagtggggcctcttcatcancagcctgcctggctggctcccttggctgtgggcaggtagcacncctgctggcagangtacctggtggctgccctgttcgcatcagtggcgatgactttatttgcggagcatttctgcaagcgttgcctggatgcggtggtgcattgtgggccctctgggctcctgcctcanaatgtcagtgagcaccatgctggangtcacccancactgtggcagcgcccagganggcatagggcagcctaccacctccaagggggcaggcgccctcatctggggttgggtctgtgctgagctggagggcctctagggaaccgtggggcagggtggccagctgctggctcccagagcgcagcccaggcgtcctcaacggggagccccaaatgtccacgcccagaacaacagttggcaggacaggtgtgacacagccacagcagaggcaaggggtgccaggagtccccagcggcatcctcggggagatgctggtgaggggtccgtacagggtggggtccccacccctagccccttactgaggggggagtgcagcagttggcctgcttgtctggcggagaaagccagctccctgcaccctcggggctgagtcagatctgggtctgccgcaaaggccttgcctagaccaggtcacactgatgccctggtttccctatctgtaaaatggggccaatgacacctacctcactgggtcaccatcgagatcaatcctcctccctgccccgacacctcgggcacatcgcatgcactcagagcacagagccgggcagacgcagcacctgcatggggagcccagtgcccggcacagcacaggggcttccagggaggccgcgcagggccgtggggctgagccacgctctcgttttgtcaggcagctatgcagttgctcttccttgtttttgttttgtttttgtttttgtttttaatatttatttttttagagacagggccttgctctgttgcctgggctggagaacagtggcaccatcatagctcactgcagcctcaaactcctgggctcaagcgatcctccccgctcagcctcctgagtagctgggactacaggtgtgcaccaccacacccagccaaaacagccatcctccccttgagagtcatcagaaaaatacattaggaaaatgtgtttagaaataaaagcacaaggcagggcagtgctcacgcctgtcatcccagcactttgggaggccgagacgggaggatcagttgaggtcaggagtttgagaccagcctcggcaacatggcaaaatcttgtctcttttttttggtattaaaaaaatcataaaaataaaagaaataatgcaatttaaccttcacagttaaca

SEQ ID NO: 19513 - DNA, 212 bp, Homo sapiens
ttggggaagtcacaccactgcacaccctgcgtgacctctagcaaccccctggctggaaaggatgagtttctgacctcggagagctgtgtttgaggcaggttgctgagatcactttgatctccttttcttttgccctctcccacatttaaggacttttgtgattccattgggcccaccagatagtccagaataatctctttattttactgtca

SEQ ID NO: 19514 - DNA, 456 bp, Homo sapiens
agtcgcagtggctaatgtgacgttttgatgcctgttggcttggagccttgcttgtgtttctcatgtgggatgcaacggcagattctcaacatttaaaaaacacctacgaatcaacgggccacttagtaaattagtaaatactcactagccgtttgtcaatgggttaacttgtgactcaatctgatttccctaaaacaatttcaacctactctttttccaggtcattttaaactctcagagtgaacgtcttgataggaccgacaagacgcatgacatgtacttagaaagcttatcttagagccacactgagattggaacccgcaaaatatgccaggtgagagagccttctccgactttgaacatgtaagaggaagcccatgagaatttttccatgaagcatgttgtctcataattcaaaaattaacgcataaaaatagattatcgagataaaaacta

SEQ ID NO: 19515 - DNA, 390 bp, Homo sapiens
ctctagaaaaaactattattttaatatgcttttttcctaaagagaatataagtatagttcagtctttcttcttctataattgattgaattttattattattattgatagttgggattcatgagcttctcacacagagacacttcgtgcttgtagtactactataggttttggcccacaaacccataaattgtaataagttctactgtttgagatttcctataaaaaataaaaataatgctttgtgcatttaaaattacatattacttgtctatattttacacagaatttatacttttagttgacattgttaaaagcctaatcctttgctttaatgtctgtacatttgatgatacaaaaaatgttttataaagcagcttatggtttcatgc

SEQ ID NO: 19516 - DNA, 192 bp, Homo sapiens
attgattcttatgttctctcaggttgaaattctacagttgtattcattttataacatctgaccaatggcctaaagttgaaacaggccttgggaaatctctctctctctctcttttttttttccctagtgaaattgaactgaacctggaacctgggatatttcttgctgtcagatttattcagttcctgtcct

SEQ ID NO: 19517 - DNA, 188 bp, Homo sapiens
gggagacattatgtttttcataaactgttgaaaatgcttacaaccttgtaacagtctcatcaatcctgttataattaatactgcaggtatataaaaattgagtggattctcaatttttttggattcccaattcctagttgggtggatggttagaaagatgcctataggattttctccttgcaaaaaaa

SEQ ID NO: 19518 - DNA, 357 bp, Homo sapiens
gggagggcatagtgaggatagctggacagtaggagcccagcttcacctcctgcatgaatgaggaccctggtcagaccgtctctgaggctccaccgctcctgatcctgaggggaatgtgttgaatgaggaccaggccacagcgtggacagtgtggttgtagctccagcgctgaccctacttgggctagtgggagggcctggctgaggggaatcaaacagtatcctttgtggtgattcggccaggctgggtcagagaaagagcttggcttgtggcaccagcaaggccctgactctgcagctggtcttttccatttctgtgctcatgcctatgaggctgggtccaggtggcacctgctag

SEQ ID NO: 19519 - DNA, 333 bp, Homo sapiens
aactataattccagcattttggaaggccaaggtgagtggatcacttgaggcaaggagttcaagactagcctgggcaacgtgacaaaaccccttctctacctggtctctaccccgtttgtacccatctctaccccctctctactaaaacacaaaaattagctgggcatggtggcacacgtctgtaatcccagctactcaggaggccaaggggtgagaattacttgaatctgggaggtaaagcttgcagtgagccgagattgctcccctgtactccagcctaggcaacagagcgagactctgtctcaaaaaaaaaaaaaaaaaaaaaaaaagatg

SEQ ID NO: 19520 - DNA, 293 bp, Homo sapiens
ttaaaggatcctgataaatgatatcacatggaagctgtcagccaaatccacaaaaggagtgtctcaaacaaattaatatggaaataaatcaaaagaagagggagaaaaaaggagggagtatgttgtacattaagagagatttcaagagcgataagaaccaaatgtattctgtaaacttcatttaatcctaacttgaacaaatcaactgtaaaatgacgtatttgagacaagtggggaaactttactatattagatgacagtaaagaatgtattaatcttgttagatgtgatat

SEQ ID NO: 19521 - DNA, 153 bp, Homo sapiens
gatgaaaattgttctaaaattagtttgtggcgatggctgcatagctctaaatatacttaaaaccattggattatatactttaaatcggggactttaatggtatgtgaattatatctcaataaaccctttttttttttttttaaagaaatgtga

SEQ ID NO: 19522 - DNA, 144 bp, Homo sapiens
gaagcacttgttatgctcctactggggaaaccgtcctgagcctaagcatgatgctccaatgcttccatgcttcgagggacacaaaggtgattcagcccacagcccttacacccgctgccttagaagagcccacaaaggaacaag

SEQ ID NO: 19523 - DNA, 254 bp, Homo sapiens
actagtcactgactgctgtgaatgggttttttaatcttctagccctgaggccatggtcactttagttccaagacgttacacagtaacgtgacctgcttttacgacaaggtagtaagaggaaggcagagggaacactgccctaaaaacttcaataagttaccaccttcagctgggatctgggttttaagttttttctctagttgtttccatagtttgacttactaggaaataaattcagaggatgctgacactga

SEQ ID NO: 19524 - DNA, 472 bp, Homo sapiens
tttttttttgagacagggtctcactttgtcacccaggctggaatgcagtagtacaagcatggctcactgcagcctcaacctgtcaggctcacgcaatccaagctatcctcccacctcagcctcttgagtagctgggactacaagtgcctgccacatctaattttttgtattttttgtagagatggagttttgccatgttgcccaggctggtctcgaacttctgagcgcaagtgattcatctgccttagcctcccaaagtgctgggattacaggcgtgagctactttttttttttaaacagataatcaacagggccaaagcaattaagtcattttcccagtcacttggccaataagcagcaagtcaatgaccagaacaaattatacaactttcatcttcccataactgatctaagcctaccaaaaaaacggatgagactagacagaagaaacagtgtcaccttcatccccggt

SEQ ID NO: 19525 - DNA, 866 bp, Homo sapiens
tttttttttgagacagggtctcactttgtcacccaggctggaatgcagtagtacaagcatggctcactgcagcctcaacctgtcaggctcacgcaatccaagctatcctcccacctcagcctcttgagtagctgggactacaagtgcctgccacatctaattttttgtattttttgtagagatggagttttgccatgttgcccaggctggtctcgaacttctgagcgcaagtgattcatctgccttagcctcccaaagtgctggggttacatgcatgagccaccatgcccggccatatatcctactattctttaagattcagttcaagttccatccgtgtgtgatgtctccttgaccactcactgcacaattctctccctcatatgcatattttattttccttccaatagatatcctgtgttaattatatgttatcatatcgctaatttcccagttacatatatgacatatctcttctagaatacaagctttgtgagaatataatgtatggcaaatactttctcatatctcccatacaccaaatacagccttacatattctgctatttaaaaaacatcaaactggccgggtgcagtggctcacacctgtaatcccagcactttcggaggctgaggcgggcagatcacccgaggtcaggagttcgagaccagcctggccaacatggtgaaaccccgtctctactaaaaatacaaaaattagctgggcgtggtggcgggcgcctgttatcccagctactcgggaggctaaggcaggagaatcacttgaacccgggaggcggaggttgcagtgagctgaaattgggccactgcactccagcctgggtgacaagagcaaaactccacctc

SEQ ID NO: 19526 - DNA, 893 bp, Homo sapiens
tttttttttgagacagggtctcactttgtcacccaggctggaatgcagtagtacaagcatggctcactgcagcctcaacctgtcaggctcacgcaatccaagctatcctcccacctcagcctcttgagtagctgggactacaagtgcctgccacatctaattttttgtattttttgtagagatggagttttgccatgttgcccaggctggtctcgaacttctgagcgcaagtgattcatctgccttagcctcccaaagtgctggggttacatgcatgagccaccatgcccggccatatatcctactattctttaagattcagttcaagttccatccgtgtgtgatgtctccttgaccactcactgcacaattctctccctcatatgcatattttattttccttccaatagatatcctgtgttaattatatgttatcatatcgctaatttcccagttacatatatgacatatctcttctagaatacaagctttgtgagaatataatgtatggcaaatactttctcatatctcccatacaccaaatacagccttacatattctgctatttaaaaaacatcaaactggccgggtgcagtggcaatattttatcttttaaacaaaactgagtgtgtctggggaatacaactggatattcatacacaaaaacatataactgcacctttacctcacacatacacaaaaaccaacatcaggaagatcaaaaacctaaacatgaaaagctaaaaatgataaaggttctaagaaataataagagacatatcttcatggtctcagagtatccttaaaaaggacacagaaagcactgaaaaaaattggtaagtctgactacattaaaattaagaatttctattatcaaaagggtaccaataaga

SEQ ID NO: 19527 - DNA, 394 bp, Homo sapiens
gtgcattccctcgcggcctcaccagctgccttttagtcttttcattaattacccacagaaaaagagctgctacacctttgtgtttccttgctggtccttttagcttagtttaccctttttatgaggtgttggaatgaggtcttttctcaaagagccagttcagcctttcgtccctaaggcccagcacactatttagggcagcaaattattcccctttacaaaatgcaggatttcacatgtgatcttaccatctaggctggcttactctgattatttcaggccataagggccttaaaactgcctctctgtacaagttaatgtttatttgtttaaaaacattaaaaaaaatttgtatcgtggtaaaatacacataacacaaaatttaccgtcttaa

SEQ ID NO: 19528 - DNA, 261 bp, Homo sapiens
tctgattcttttttaaaagtttttaaataggagcagtgttcccttcagtcaggaaagatttctgaaaatatcaaacatattcttatcaaactcatattcccaggtgataattactctacagggcagtgttcaccaacttttagttccagacatttgagtcctttgcttagaattgtttctactttccctggaagacagggcaactgatgagcacgcttcctggagtctcacaaattgcagatctggccctggcactgaggc

SEQ ID NO: 19529 - DNA, 382 bp, Homo sapiens
atacaagtagccataagacttactggcctggtgtgtggagacttcagaggaggtagggcaactcttctaggtgccatgagcaagccccattaaactaaagaaatcaaatcacctcattcttaaagtcttgagaagatgagataaacttaaaagctttcaactgtgaaagaacagaaacaaagctcgctggagagatgggatctgaatagtcaaatcattttgaataggcactatgtacttgggaacttctgcatgagcaagtgattcttggatattcctgtaaatccattctgaatatggtaagtaatactgaagaataactgttttcgagtgctttatctgcatgtatcaaaataaaaaagatttgtgccaatgtgcattt

SEQ ID NO: 19530 - DNA, 351 bp, Homo sapiens
ctcattcatttgtgtcagtgaggactgaggaatgatgagaattaaaatcatggccccattaaactaaagaaatcaaatcacctcattcttaaagtcttgagaagatgagataaacttaaaagctttcaactgtgaaagaacagaaacaaagctcgctggagagatgggatctgaatagtcaaatcattttgaataggcactatgtacttgggaacttctgcatgagcaagtgattcttggatattcctgtaaatccattctgaatatggtaagtaatactgaagaataactgttttcgagtgctttatctgcatgtatcaaaataaaaaagatttgtgccaatgtgcattt

SEQ ID NO: 19531 - DNA, 317 bp, Homo sapiens
gatgtaacatacatagcagtatgctagcaagagagtgattttgtgatagcttcattttatggatatcaatcctgattactagtgatagactaccataacccaagattcttttcaaggtcattgccatgttgatgctttccttaatatatttacttttcctaaagaggagtggtgtccttttatgtattcatttgtgtgtgactttttaaataagtatctcttaaaatctatcagaatgttctctcatatgtgtggactagatagattgcattcagaaatgccattttagatctgattattaatctaaaggggctatg

SEQ ID NO: 19532 - DNA, 1545 bp, Homo sapiens
gaacaaatgagacatagccatgtcctccaggaagcttggagtttagccaaataggagagagcttggcatgtttaaatgtaaagaaagaggagccagaggagacagtaaagatgaggagagtggggataattgagtggagaagaacttagaggagcaggactgcatgagactcaatattaagcataggtggcacagctggtgtaagacaaaaaggagggaagaggcagaaaagagaatacagttggaatcagctctatataagtcaagagatgtagcagttgatgactgattacagttgagggtatctgctgagaatgatgaagaaatggaaatttcaatactgacagtcggaaagcgtagaaaagcagttaaaggaacttgctaggaaattgatcggacgttatggccagacatagccaagcatcaggtaatgtgcagctgaaataagagtgagtgtgtggtagcttcattcctgagttttcctaacagcagtctaaagcatgcaggaagattcagaacgcaattttaccgatagcctctgttagcttgctgaccatagaggaagctaggcaaggaatcaagagtagtcagaagtgtggtgatgaggccctaaagggaaggaaggccccagggaagctaaatcatcatctcacaggcataagagaggtatcagattttcaaagtagtgctttaccttgactgtggaaagcagggtgcagcagtgctgctgtgtggctgatggactgaggagacctagcttacatgatggagggattgtgaaagcgcaggtcatcagggacatccacacagaagaagggaagctgagtttatcatcaaggatggtgcttcccaagctccagtgtggatctgaatcacctgaaggtgattttggttttgttgtcatgatcttttatatttacacacaataattgtatagatctgtggggtatctgtgattttttatatatgcatataatgtataatgatcaaatcaggataattagggtattcactccaaatatttattatttctttgggtttggaacattccaaatcttctcttccagctattttaaaatatgtaataaatcattgttaactatagtcatcttactgttgtatcaaacactagaacttattccttctgcctaactgtatttttgtacccattaccaacctcttttcatttcccctacccccacttgaagcgcttgttaaaaatgcagattatgggtctcacccactgagtttctaattcagtaggtcaggggtaaggccagggaatttctatttttaacatgttcctaagggatgctggtagaccatgaaacacagttggagaaccattgatgtaaaatgtagaaataagtcctggagagaacagacaatagcaacactgactggaagaagtggtaccactgagtgacattcaaatattgtcgtaagtttcataattctgaatttatctttaactggaatgtatacaggaaagcaaatgatactacaataactaaataaaaattacatattcttctagaccaatat

SEQ ID NO: 19533 - DNA, 1597 bp, Homo sapiens
gaacaaatgagacatagccatgtcctccaggaagcttggagtttagccaaataggagagagcttggcatgtttaaatgtaaagaaagaggagccagaggagacagtaaagatgaggagagtggggataattgagtggagaagaacttagaggagcaggactgcatgagactcaatattaagcataggtggcacagctggtgtaagacaaaaaggagggaagaggcagaaaagagaatacagttggaatcagctctatataagtcaagagatgtagcagttgatgactgattacagttgagggtatctgctgagaatgatgaagaaatggaaatttcaatactgacagtcggaaagcgtagaaaagcagttaaaggaacttgctaggaaattgatcggacgttatggccagacatagccaagcatcaggtaatgtgcagctgaaataagagtgagtgtgtggtagcttcattcctgagttttcctaacagcagtctaaagcatgcaggaagattcagaacgcaaaatagcggggtagaagagtgaaagtttaataggaaggtagaagagtgacaaattttaccgatagcctctgttagcttgctgaccatagaggaagctaggcaaggaatcaagagtagtcagaagtgtggtgatgaggccctaaagggaaggaaggccccagggaagctaaatcatcatctcacaggcataagagaggtatcagattttcaaagtagtgctttaccttgactgtggaaagcagggtgcagcagtgctgctgtgtggctgatggactgaggagacctagcttacatgatggagggattgtgaaagcgcaggtcatcagggacatccacacagaagaagggaagctgagtttatcatcaaggatggtgcttcccaagctccagtgtggatctgaatcacctgaaggtgattttggttttgttgtcatgatcttttatatttacacacaataattgtatagatctgtggggtatctgtgattttttatatatgcatataatgtataatgatcaaatcaggataattagggtattcactccaaatatttattatttctttgggtttggaacattccaaatcttctcttccagctattttaaaatatgtaataaatcattgttaactatagtcatcttactgttgtatcaaacactagaacttattccttctgcctaactgtatttttgtacccattaccaacctcttttcatttcccctacccccacttgaagcgcttgttaaaaatgcagattatgggtctcacccactgagtttctaattcagtaggtcaggggtaaggccagggaatttctatttttaacatgttcctaagggatgctggtagaccatgaaacacagttggagaaccattgatgtaaaatgtagaaataagtcctggagagaacagacaatagcaacactgactggaagaagtggtaccactgagtgacattcaaatattgtcgtaagtttcataattctgaatttatctttaactggaatgtatacaggaaagcaaatgatactacaataactaaataaaaattacatattcttctagaccaatat

SEQ ID NO: 19534 - DNA, 1543 bp, Homo sapiens
gaacaaatgagacatagccatgtcctccaggaagcttggagtttagccaaataggagagagcttggcatgtttaaatgtaaagaaagaggagccagaggagacagtaaagatgaggagagtggggataattgagtggagaagaacttagaggagcaggactgcatgagactcaatattaagcataggtggcacagctggtgtaagacaaaaaggagggaagaggcagaaaagagaatacagttggaatcagctctatataagtcaagagatgtagcagttgatgactgattacagttgagggtatctgctgagaatgatgaagaaatggaaatttcaatactgacagtcggaaagcgtagaaaagcagttaaaggaacttgctaggaaattgatcggacgttatggccagacatagccaagcatcaggtaatgtgcagctgaaataagagtgagtgtgtggtagcttcattcctgagttttcctaacagcagtctaaagcatgcaggaagattcagaacgcaaaatagcggggtagaagagtgaaagtttaataggaaggtagaagagtgacaaattttaccgatagcctctgttagcttgctgaccatagaggaagctaggcaaggaatcaagagtagtcagaagtgtggtgatgaggccctaaagggaaggaaggccccagggaagctaaatcatcatctcacaggcataagagaggtatcagattttcaaagtagtgctttaccttgactgtggaaagcagggtgcagcagtgctgctgtgtggctgatggactgaggagacctagcttacatgatggagggattgtgaaagcgcaggtcatcagggacatccacacagaagaagggaagctgagtttatcatcaaggatggtgcttcccaagctccagtgtggatctgaatcacctgaaggtgattttggttttgttgtcatgatcttttatatttacacacaataattgtatagatctgtggggtatctgtgattttttatatatgcatataatgtataatgatcaaatcaggataattagggtattcactccaaatatttattatttctttgggtttggaacattccaaatcttctcttccagctattttctagaacttattccttctgcctaactgtatttttgtacccattaccaacctcttttcatttcccctacccccacttgaagcgcttgttaaaaatgcagattatgggtctcacccactgagtttctaattcagtaggtcaggggtaaggccagggaatttctatttttaacatgttcctaagggatgctggtagaccatgaaacacagttggagaaccattgatgtaaaatgtagaaataagtcctggagagaacagacaatagcaacactgactggaagaagtggtaccactgagtgacattcaaatattgtcgtaagtttcataattctgaatttatctttaactggaatgtatacaggaaagcaaatgatactacaataactaaataaaaattacatattcttctagaccaatat

SEQ ID NO: 19535 - DNA, 1543 bp, Homo sapiens
gaacaaatgagacatagccatgtcctccaggaagcttggagtttagccaaataggagagagcttggcatgtttaaatgtaaagaaagaggagccagaggagacagtaaagatgaggagagtggggataattgagtggagaagaacttagaggagcaggactgcatgagactcaatattaagcataggtggcacagctggtgtaagacaaaaaggagggaagaggcagaaaagagaatacagttggaatcagctctatataagtcaagagatgtagcagttgatgactgattacagttgagggtatctgctgagaatgatgaagaaatggaaatttcaatactgacagtcggaaagcgtagaaccaagcatcaggtaatgtgcagctgaaataagagtgagtgtgtggtagcttcattcctgagttttcctaacagcagtctaaagcatgcaggaagattcagaacgcaaaatagcggggtagaagagtgaaagtttaataggaaggtagaagagtgacaaattttaccgatagcctctgttagcttgctgaccatagaggaagctaggcaaggaatcaagagtagtcagaagtgtggtgatgaggccctaaagggaaggaaggccccagggaagctaaatcatcatctcacaggcataagagaggtatcagattttcaaagtagtgctttaccttgactgtggaaagcagggtgcagcagtgctgctgtgtggctgatggactgaggagacctagcttacatgatggagggattgtgaaagcgcaggtcatcagggacatccacacagaagaagggaagctgagtttatcatcaaggatggtgcttcccaagctccagtgtggatctgaatcacctgaaggtgattttggttttgttgtcatgatcttttatatttacacacaataattgtatagatctgtggggtatctgtgattttttatatatgcatataatgtataatgatcaaatcaggataattagggtattcactccaaatatttattatttctttgggtttggaacattccaaatcttctcttccagctattttaaaatatgtaataaatcattgttaactatagtcatcttactgttgtatcaaacactagaacttattccttctgcctaactgtatttttgtacccattaccaacctcttttcatttcccctacccccacttgaagcgcttgttaaaaatgcagattatgggtctcacccactgagtttctaattcagtaggtcaggggtaaggccagggaatttctatttttaacatgttcctaagggatgctggtagaccatgaaacacagttggagaaccattgatgtaaaatgtagaaataagtcctggagagaacagacaatagcaacactgactggaagaagtggtaccactgagtgacattcaaatattgtcgtaagtttcataattctgaatttatctttaactggaatgtatacaggaaagcaaatgatactacaataactaaataaaaattacatattcttctagaccaatat

SEQ ID NO: 19536 - DNA, 1544 bp, Homo sapiens
gaacaaatgagacatagccatgtcctccaggaagcttggagtttagccaaataggagagagcttggcatgtttaaatgtaaagaaagaggagccagaggagacagtaaagatgaggagagtggggataattgagtggagaagaacttagaggagcaggactgcatgagactcaatattaagcataggtggcacagctggtgtaagacaaaaaggagggaagaggcagaaaagagaatacagttggaatcagctctatataagtcaagagatgtagcagttgatgactgattacagttgagggtatctgctgagaatgatgaagaaatggaaatttcaatactgacagtcggaaagcgtagaaaagcagttaaaggaacttgctaggaaattgatcggacgttatggccagacatagccaagcatcaggtaatgtgcagctgaaataagagtgagtgtgtggtagcttcattcctgagttttcctaacagcagtctaaagcatgcaggaagattcagaacgcaaaatagcggggtagaagagtgaaagtttaataggaaggtagaagagtgacagaatcaagagtagtcagaagtgtggtgatgaggccctaaagggaaggaaggccccagggaagctaaatcatcatctcacaggcataagagaggtatcagattttcaaagtagtgctttaccttgactgtggaaagcagggtgcagcagtgctgctgtgtggctgatggactgaggagacctagcttacatgatggagggattgtgaaagcgcaggtcatcagggacatccacacagaagaagggaagctgagtttatcatcaaggatggtgcttcccaagctccagtgtggatctgaatcacctgaaggtgattttggttttgttgtcatgatcttttatatttacacacaataattgtatagatctgtggggtatctgtgattttttatatatgcatataatgtataatgatcaaatcaggataattagggtattcactccaaatatttattatttctttgggtttggaacattccaaatcttctcttccagctattttaaaatatgtaataaatcattgttaactatagtcatcttactgttgtatcaaacactagaacttattccttctgcctaactgtatttttgtacccattaccaacctcttttcatttcccctacccccacttgaagcgcttgttaaaaatgcagattatgggtctcacccactgagtttctaattcagtaggtcaggggtaaggccagggaatttctatttttaacatgttcctaagggatgctggtagaccatgaaacacagttggagaaccattgatgtaaaatgtagaaataagtcctggagagaacagacaatagcaacactgactggaagaagtggtaccactgagtgacattcaaatattgtcgtaagtttcataattctgaatttatctttaactggaatgtatacaggaaagcaaatgatactacaataactaaataaaaattacatattcttctagaccaatat

SEQ ID NO: 19537 - DNA, 349 bp, Homo sapiens
ttcttttccctgattaggactccacagttgtaattcagaaaatactaaaaagttagtggggaagataagagcatttactataggaaacggatttcaaagtgtacttgatttaaagatttaagcacaatagaaaagcctgggcaacatggtgaaacctcatctctaccaaataaggaaaatacgtaaattacgtgggcatggtgggcatgcttgtggtcccagctactcaggaggctgagatgagagaattgcttgagcctgggaggtggaggtttgccatgagccagtatcgtgctactgcactccagccttggcaacagagcgaccctgtctcagaggctagacatac

SEQ ID NO: 19538 - DNA, 592 bp, Homo sapiens
aagtggaaagaatgatagacctgaatgagacttttcttcagtagcaggggataattagagacaataaaacaatgctttgagaggagaaattactgtaaacatagagttattgatccagcaaagctatcaagtcagatacaaggtcaagagatgacaattttagagacccaaggattcatgttgcatgcaccctttctgaggaggtaatttgaagatataatacagcgaaatgaggatgaacatcagaaggaagatttcctagtgcacgacaaccaagaggacagctgtgtagcaggctggaaaatgtattccatttagaatagaaagttggctggctgtaagaatttcttaaggaaaagtcagtttcattcagtagtgggtagagtgagtaagaagcttggtggtatggaaaagggtcttctgaaaaagaaaaagaaaaggcaatcggaaactccatgaaaaggggtgagggagtagggcaaagaaagctgtagcctgaaaaatggggcctaattttgacagtattgaaagagagagcttctttgacctgactctgggaagattttctccttgcagctcctatgttgtatac

SEQ ID NO: 19539 - DNA, 310 bp, Homo sapiens
agtcaagatgcaggacactttagtcatcacaggaatccctcatgttgctcttttgtagccatacccacttccctcataaccccactccctccttaatccgtggcaacctctaatctgttctctatttctataattttgccattttaagaatattacataaacaacatggaaaccttttggatttgacttttttcacttagcataactcctggcgttttccaggttcttgtatgtatagtttgcaccttttcctttttcttttttttttctttcttttcttttctttctttctttcttttttttttttttg

SEQ ID NO: 19540 - DNA, 367 bp, Homo sapiens
ttggaattatactctttccccttccccagctgtggaattttgtcagtcaggttttctcctcagctgcaactcttgttcttcctctctccttactggaaactgcatgtaacttagtgcctccttctgtcaaagttgtagtagtgatctgcactggttacacatggaaatttactgaggacaagggctttatcttcatatctcttacacagtctaaggcattgtgatttttttttgtttttttttgagaccctgtttcaaaaaaaagaaaaataaaagaaagaaagaaatgaatagataaagatgaccttttgagaatcaacaagacttggtaaactaatattttggcatggggcaaggtcacagaagg

SEQ ID NO: 19541 - DNA, 246 bp, Homo sapiens
tggcatttgtttatttatttattttacagacagcatcttactatgttgcacaggctggtcttgaattcctgggctcaagagatctgcccacctcagcctcccaaagtgctgggattacaggcatgagccactgccaaatttagcatttcaactgagggtttcacagataccctgaagcttctccctgccctcgctttcagaaaactcatagatccccaaactaaagtaactggtcaaggaggtcaa

SEQ ID NO: 19542 - DNA, 342 bp, Homo sapiens
ttttttttttaaatcacattgtcctcactctattcctgtctactatcagctttaacatgaaaaatattttgattattctccctgctttcaatgtacaccccttcaatcacagagacaagagtgcccagttttaatataaaccaactcgtctcatttgccagcttggaagtctgatgtgatttcctgatttcttaatgtggcttacaaagtcttgtgagatttggtatctgtcattctctcctttctgatctccttctctcttttgttctaggtctcaggcatattgctactttaattccttgactatataatgttgcttcccactttgagggctttttccat

SEQ ID NO: 19543 - DNA, 1353 bp, Homo sapiens
ctgatacaagaaaggagactccagcactagtttcctcagtccttctgcagggcgggccttctcacggcctcaaagtcatggagaagagtgtgcacaggacacctcactttaagcaaagcccatagaccgtatttgagaaaaggagttaaataaagaggcagccaccaacaaaccagagccctgtggtcactcaggtcccatagactctagaggtcaaagggcctccgagcatttgagaatcagagagggcaagtaacttggctgatatcacatagcacgaaggtggcagagccaggattccacctgctggcctcccagatgtctttcctgttggaccctgcttgctggccactcctggtgggggtcactccaccattagtgtgttcatcaaactgacagttgtggtccagatcccttgcctctggtgtgcccagcaccttagctggcacctccctcagcaaacccagccttcgccatcctcccaagcatacttcccagggctgttttgtccattacggtcccagaatataaggcctttgggttttttcagggcctgtgaaaaggtttgaaaaatgaaaaacacactggcagttccaaaattctcaaataaaactgtagaaatgccttaggaattaaatatgtaataagatgtgaacacttcattacacacctacaattagtcacatgcctacgatatgtgaataatgtcaggtcagctagtgaactgttatacagtaattgcgcatcacttatatagatatacacaaagtgcacttactgacttggatgtgtgtgttcattgtttgaagtggcgtggatggaggctccaaaagataacaagaatgtaggggaggtgactcttcaaatggccctcacccaccccttaccctcagctcacccaccatgaagcttccccttccaaggaggacacacctcctttcctagaacattcttcagtgccacaagctgctcagtcagccctgattctggagtctccagtgagcgaggcctggggtggccccagtgggatgagccacactccccacagcactcagcctggatgtggcactggctgcacatagcaagaggcagctattggacacctgctcgccacatgttctgtcttatcctcccagcaacaccgagtgagggagggagtgttaacccaccattcaccaggtttaccagagaccaagcccaggatctctccactgcacacttttaaaagggtcctttcagcttcccattaaagaagtttgttcctttgttcctcctctcctgttcttcctaagacatcatcactgaaatttaagcttataaatttaaaatgaagtaaatctataagggaaaagc

SEQ ID NO: 19544 - DNA, 576 bp, Homo sapiens
attcatcattaaagaataaatagtatcaggattaagcagcaaagctcacattgcaaaaatattgccaacagttaactctctataaaagccaattcaaatacagcttgggaagtaggtcaaagctggaatgtacatgaagacatctatgatcccaaaaggttccaggaaatctagtattaaatctctcttcatcaatggggtacataagttttgaaattactgaaaaaaaaaaaaaaaaccaactgggtatacttcacaaaaatatttccattttgtaaatttttctttcctttaatttttcagaccaggcagaaacagctcttcctcaactacatatataagaaatcaaagcaaagaaccagttttgctatcttaatgtatcacaattttagtattaaaagctgtagttcattaaagaaaaaaaaattcctgtaaggaaaagcatatgcatcaacaagtgtgtacaagacactgcagaggataaaaacatacataactgtccctatcaaccaacaggggatgttatactagctgtcgtgaactgggattgcggatacgatgtcacacagaacagct

SEQ ID NO: 19545 - DNA, 788 bp, Homo sapiens
attcatcattaaagaataaatagtatcaggattaagcagcaaagctcacattgcaaaaatattgccaacagttaactctctataaaagccaattcaaatacagcttgggaagtaggtcaaagctggaatgtacatgaagacatctatgatcccaaaaggttccaggaaatctagtattaaatctctcttcatcaatggggtacataagttttgaaattactgaaaaaaaaaaaaaaaaccaactgggtatacttcacaaaaatatttccattttgtaaatttttctttcctttaatttttcagaccaggcagaaacagctcttcctcaactacatatataagaaatcaaagcaaagaaccagttttgctatcttaatgtatcacaattttagtattaaaagctgtagttcattaaagaaaaaaaaattcctgtaaggaaaagcatatgcatcaacaagtgtgtacaagacactgcagaggataaaaacatacataactgtccctatctccaaacagtttataatctatatactgtctctaaggtatttcatataactttaaagctttttaaaactttctctcaaaaattaagcctgactacttaataaaatttccttttttttcttttaactaaaagtaaaatgagaagaaagccgacactgtggcttgtgcctacaatcccagcaacttgggaggctgaggccagaggactgcttgaggccaggagttcaagaccaccagcctgggcaacacagcaggatccctccatgtaaaaaaaatttaaaaat

SEQ ID NO: 19546 - DNA, 396 bp, Homo sapiens
aggggttgtgtgcaagattggagttcataaaaggatgtcacccagggtgcagagttaggatatttctgggtttggtgacttaggaaaaaatatgaggaaaatctgtttcgctttaagggttggagtacacttactaagagcatcagagcatttatttcacaagggggtattgtcaaacttaaatgcatacatcacagtagccaaaacctatgccatcacaataaaaattcatattaaatgtttttggatattcattaagcccttatatttcttaatacaaattatatgcatatgcccatacacattaactgtaatgggtttttctttatatattttcttgcacacctttaatactatagcaaggtgttcaatttttggatttaattatactctttt

SEQ ID NO: 19547 - DNA, 191 bp, Homo sapiens
cttattcttcttcctccttctgtttttaaatgaggaagcccatagaaaatattgtgacagggagaaatggattttaaataagtatgactgaaaaaaaacttttactataatagaaaatcttggtgctgagggaagaaatccaaaaaattaaaaatcttcagaaggtatgtctttgaacagacaaacattca

SEQ ID NO: 19548 - DNA, 299 bp, Homo sapiens
accaagtacagatggactgagtacggcctcacgtttacagagaaatggaacaccgacaatacactaggcaccaagattactgtggaagatcagcttgcacgtggactgaagctgaccttcgattcatccttttcacctaacactgggaaaaaaaatgctaaaatcaagactgatgaattccagcttcacacaaatgtgaatgacgggacagagtttggcggctccatttaccagaaagtgaacaagaagttggagaccaccgtcaatcttgcctggacagcaggaaacagtaacacgcg

SEQ ID NO: 19549 - DNA, 594 bp, Homo sapiens
gctggagcccaggagttcgagaccggcctgggcaacatagcaagaccttatctctatttaaaaataaataaataaataacatctcttacaaaatcctgtttactattatctccatattgcctagccattgggatctgaagctactgaaggggggagaaatcctagccaattaaacaattcttcaaaacaaactaaaatccttaagatataatttataactcatttcaactttttaaaatacgggcattactgacatctataaacaaaggcaagagaggaaggtgcagatgaagtcccttttcaaatcaaacttctactcaaatcagaattggtaaaattgttttagaattcttaaaataaagtttggtgggttttttcccccagaaacctgtgtgaggtcagttccatcaaaagtcatcatcacccctgatcacctcctcagacatggggaatctcactcagctgagaccaacagttggaggaggtactggtcccattggtacagatggtcacagccctttaattgaggtcagctgacttgcttagtcatatgccacctctctcaccaggtccaccacaggacagtaatttctc

SEQ ID NO: 19550 - DNA, 377 bp, Homo sapiens
tggtaacattgatttctactctatttaccagcgtttctaattggaaaagctgcattatacgaagttaaaacatttacagtggttcctcagggcttgcagcctgacaaataaatctccttcgctcccgacccttctatttctgtctcctttcagaagtgttccacacatattcgagtagatttatatagacgtgtgttaatatatttcttactccaccccattcttttaaaaatacaaatgaaaacgtaatagtgttacgtgccccttttctcactcaaaaaaaaaaaagtatatatttatggagagcatgagaacaggtaagatttagtatataggtataatcatcttttattttattatgagggtcaaaatggcat

SEQ ID NO: 19551 - DNA, 458 bp, Homo sapiens
gtttccaaatatgggtctccagactctcagctgattctgtgagcttccttcccttcagcaaagcgatttctgacctttgtttctgaatttgctatgtgctgtttgtttgacaggtctagtttatattttaacaaggaatcggaggttcccaggtataataaactacccaaatttgcacaacaggtgcatgtctaagaagaattttacttccagttcattggcttcaaaaccggtttttattttgtattactaaatcattttcaaaacatgttttcatattattaatactgtggaatttgcgagccactcatcaataatgaagttaccaactaacagagataggagagccatgtcagtgttctccagccaaaatccaactgccacattctttgttacctctcagcaaacagaacggactgctttttggacatacgtcattgtgatttctttgtactggt

SEQ ID NO: 19552 - DNA, 378 bp, Homo sapiens
aactctcatctccctgagacagagcacctggggggaggggcagctgtggtctcaggttaagcagtcctacctgctgactctgaagagtctgggcgttcagaatgagggcaattccctgagcacagatcaccagctccaccaatgggcagccagactgcttccttaaggacgtccgtgatactgtgctttttgtctgggtgagacctcccaagtggggttagtagacaactcatatgggagagttccagctggcatcaggttgctgcccctctgggacgaagcttccagaggaaagagcagacagcaatctgctgttctgcagcctccactggtgatacccaggcaaacggtctggagtggacccccagaaaactgcag

SEQ ID NO: 19553 - DNA, 133 bp, Homo sapiens
taatgggcacaagggagaaaaagccacctagagacagactctccccttaatgaagtattcaagcacagggaacccttgaatgtgttataatacatgagcagaaaagatcctgacttgatcctaattagcgtga

SEQ ID NO: 19554 - DNA, 207 bp, Homo sapiens
tgctgagttagaactatatccctggagcagtggttttcaagctggagtaatcagggttgtagacttccaagggatacacttgcacgtctagcttaacatgaatacatttccagatcctcagcttcccagtgaacttttttttttttttttgagacagagtcttgctccgtcacccaggctggagtgcaatggcacgatcttggctca

SEQ ID NO: 19555 - DNA, 665 bp, Homo sapiens
tatttttttttagcaacacattcaaatacaagcatctcaccattcattacctgaggcctttaacaatctccttagatctgcttcctcccaccaaagctaaatatcctaggactgaaaaatacaattgttttgctaggtagacgagctcttttctagaaactcctcatttgaccatacatgagaactcatccttgacatgtgcagagattcagcagggacccgaaataggagcaaggtggtctgccctatcactctgccatattaacttctctacattccactcatttcccatgatgaaatgaaatgatttctgaacacctactagtgccaggttctgtgctaggtatattacagactttacccctctaattctcactacaatacccttctaccagtgagaaagagtgaggttcaaagaagttacaaaaactggtccctagccatacatctggattcaaacttgggtcccaccgagagtggtactctttccgctgcaccacactgcttaccaagacatggagcacctcagggcacatccatggaaattcttaggtgccatatatatgtgtagatagcataaaccattatccaacttcaacaaatttaaaaattaaaaatctgggccaggcgtgttggcttcagaatggtggggtctctagagtcga

SEQ ID NO: 19556 - DNA, 1909 bp, Homo sapiens
attggtccattttacagagagctgattggtccattttacagagtgctgattggtccgttttacagagtgctgattggtctgtttttacagagtgctgattggtgcgtttacaaacctttagctagacacagagcgctgatttgtgcatttacaatcctttagctaggcagaaaagttctccaagtcctcacctgacccagaagcccagccagcttcacctctcattttgatcaggagccaagacagtggtcctgccaaatacacgggtcctgttttctgtttgaactctttagtgctactcatccttcaagctatttcctatactgccaccagagtgaccctcaaaccccaaagtcgtgtcaaataaaacctctaaatcaattccccaccaatctacttatagaatcctgactccccagggtatgaattcactctctagacagtaatggttacttccagaatcccttccatctctgacccatgacctgtgctttgggccatctctcccagtggtttatatcatctgcctgctttaggaatacacaaactatgaggaaaacaagtgcaaaacaaaggagtaatggcacctgaaattttggtgtcttccgagtgctctcttgacatacactgagatcagcgaattttcctaacagacagcttaggggcagccagaggctctttttccccctcctttcttccactcatcctctgaatatctcctcatctttccagaaaccactcaatgtccattgtattcttctgctgcccaactaggaggaaatttctacttctttctctgagctcctttagttctttgcatccttgattctgctcatatctggtccagagcctaccaggtgctcaggtgctcctggggctgacccagaggttgttgggaggtcagtggggacagatttagggacagtgtcacattccgctctgccatcccatcacctcagaaagactccagctacccagttggagtctaataaatgctgatgtatccagctgaagcctggacagtgacccagttccagctgtggggaagatgactgcttgcccgcggccagctggggccatgcacaaaactgggaggccgcatctgtgcagggagcttgtgtctgagggtgttgacagctgttttctgcctcaggagaaactgaaaccagaatacctgcaggcactccctgaaatgctgaagctctactcacagtttctggggaagcagccatggtttcttggggacaagatcacctttgtggatttcatcgcttatgatgtccttgagagaaaccaagtatttgagcccagctgcctggatgccttcccaaatctgaaggacttcatctcccgctttgagggcttggagaagatctctgcctacatgaagtccagccgcttcctcccaagacctgtgttcacaaagatggctgtctggggcaacaagtagggccttgaaggccaggaggtgggagtgaggagcccatactcagcctgctgcccaggctgtgcagcgcagctggactctgcatcccagcacctgcctcctcgttcctttctcctgtttattcccatctttactcccaagacttcattgtccctcttcactccccctaaacccctgtcccatgcaggccctttgaagcctcagctacccactatccttcgtgaacatcccctcccatcattacccttccctgcactaaagccagcctgaccttccttcctgttagtggttgtgtctgctttaaagggcctgcctggcccctcgcctgtggagctcagccccgagctgtccccgtgttgcatgaaggagcagcattgactggtttacaggccctgctcctgcagcatggtccctgccttaggcctacctgatggaagtaaagcctcaaccacatttgctgtg

SEQ ID NO: 19557 - DNA, 1774 bp, Homo sapiens
attggtccattttacagagagctgattggtccattttacagagtgctgattggtccgttttacagagtgctgattggtctgtttttacagagtgctgattggtgcgtttacaaacctttagctagacacagagcgctgatttgtgcatttacaatcctttagctaggcagaaaagttctccaagtcctcacctgacccagaagcccagccagcttcacctctcattttgatcaggagccaagacagtggtcctgccaaatacacgggtcctgttttctgtttgaactctttagtgctactcatccttcaagctatttcctatactgccaccagagtgaccctcaaaccccaaagtcgtgtcaaataaaacctctaaatcaattccccaccaatctacttatagaatcctgactccccagggtatgaattcactctctagacagtaatggttacttccagaatcccttccatctctgacccatgacctgtgctttgggccatctctcccagtggtttatatcatctgcctgctttaggaatacacaaactatgaggaaaacaagtgcaaaacaaaggagtaatggcacctgaaattttggtgtcttccgagtgctctcttgacatacactgagatcagcgaattttcctaacagacagcttaggggcagccagaggctctttttccccctcctttcttccactcatcctctgaatatctcctcatctttccagaaaccactcaatgtccattgtattcttctgctgcccaactaggaggaaatttctacttctttctctgagctcctttagttctttgcatccttgattctgctcatatctggtccagagcctaccaggtgctcaggtgctcctggggctgacccagaggttgttgggaggtcagtggggacagatttagggacagtgtcacattccgctctgccatcccatcacctcagaaagactccagctacccagttggagtctaataaatgctgatgtatccagctgaagcctggacagtgacccagttccagctgtggggaagatgactgcttgcccgcggccagctggggccatgcacaaaactgggaggccgcatctgtgcagggagcttgtgtctgagggtgttgacagctgttttctgcctcaggagaaactgaaaccagaatacctgcaggcactccctgaaatgctgaagctctactcacagtttctggggaagcagccatggtttcttggggacaagatcacctttgtggatttcatcgcttatgatgtccttgagagaaaccaagtatttgagcccagctgcctggatgccttcccaaatctgaaggacttcatctcccgctttgagggcttggagaagatctctgcctacatgaagtccagccgcttcctcccaagacctgtgttcacaaagatggctgtctggggcaacaagtagggccttgaaggccaggaggtgggagtgaggagcccatactcagcctgctgcccaggctgtgcagcgcagctggactctgcatcccagcacctgcctcctcgttcctttctcctgtttattcccatctttactcccaagacttcattgtccctcttcactccccctaaacccctgcctggcccctcgcctgtggagctcagccccgagctgtccccgtgttgcatgaaggagcagcattgactggtttacaggccctgctcctgcagcatggtccctgccttaggcctacctgatggaagtaaagcctcaaccacatttgctgtg

SEQ ID NO: 19558 - DNA, 689 bp, Homo sapiens
cctccttccttccttcactccttctttcatttctccttccctcctttccttccctccttccttcctttctttcttccttcctttctccttccctccttctttccttcccgccttccctccttccttccttccttctttccttcctttctttccttttatttcttccctccttccttttttccttccttttcttttctttcttccctccttccttccttccctccttccttcctttctttttacagtttcctgcatttcaccaacttcccgcaatgacatctataagacacaaaggtaaagagcttggattctgagccagaatccccagcttcaaatcccatctccactacttactacccatgtgtgtggggtgcgcggcggaaggggtgggcggggcagtgttggaagtagaagttgcttaacctctcgaagccttagtggtctcaacaataaataagattgttgggaagatgggatgcaatatcctaatcaaagcacccagaaccacggctggcatgaaatcagcatttgccacaaagacaattccgattgttaaaataccaaggcaagcccagagtagtggttcacacctgtaatcccagcactttggtaggccaaggcaggcggatcacttgaggccaggagttcaagaccagcctaggcaacatggcgaaaccccatctctacta

SEQ ID NO: 19559 - DNA, 749 bp, Homo sapiens
cttggcctgggatcgcctgagggccctgtgaagcttcagagcagtgcctgaaacactctgaggacagaaactcagggaccaacacacctgtttccacagagctggcccctgcctctgcttcctggaagcactgcaagagtgcctgcagttatagccgggagatgaccacagtgagaagccagagaagaggtaaacagcaaccttgggcaagcaggaaggcagaagcagatgcttggaaccacccagaggttttctaccacagaatgtgtaactttgattttcacacacaaaatggtctcaacagtggttgaaatatacaaaaacagaaaccccaatccagcccttagcctgatgctctgcatgctgttaagaagggggtgttgaatgattccatttatttgaaatacccaggagagggagaaggttcatttgagaacttcccctgctgaagctttccctgaccctctgggaggggccggaccctccgtctgtggtcccacaacccctgaggaggaggaggcactcatcaggtcccttggcgccttgcagcccttttcttgggcctgccttttacctccatcctccactccactgatggctcagagcccagaatcctgtcttcatcctggcaacagtcccttcagggcccagcaggatgggggaatgaataaatgtgcctgtttctgaacataatcattaaattctttacctgtaatgtggacattaaaggtgaatcatttcccccctta

SEQ ID NO: 19560 - DNA, 2840 bp, Homo sapiens
  misc_feature (2728)..(2728): n is a, c, g, or t
  misc_feature (2745)..(2745): n is a, c, g, or t
gcccccttgaccaagcagtctcgatccccaagtttcaatatgcagctaatatcccaggtgtagttttgacatcctccctcatctttctgcttaccttttaaactgaacatttcattgtgcaagaagacacttcatcccacattgtgaaaatattggtcactgttatcagatttcatttagtttaggtatcttcatactgtattttgtatcaaaacagcaataaggttttctttatccctctttcctacatcttctcttcacctatcccttgtaaatgtgtttgtgaagcagtataaaatggttgccttttccatgccttcctttctccttgggtgatgtgcaatccatcgtaggctgatcggtcccatttcaacactgtgagactgagggtacattagaggaaatggtgtatatgatccctatgaaacgattctttggcttttgtttaaaaacaaaacgggtttgttctcataatctatagaactatgaagattactggatcatatttttttctcttaaccaggagtgcctcagagattctgctatgactttggacttctctgagtctgtgcaatcattttctggagaagcatggggaaaggtggtagactgctgcactttttcattaaaatgagggtagctctttctccacccccccatctcctttatcccgaagacataaatgttcaattacggaggcatttaaatcaagttgtgaccacctccattggagggcaggactcttgattgtgtaattgataatgcactttctcaatggctgtatagtcattattaacgtgtcttccctcttccccacaaggacatataaggtcatttctgtccttcaagtttggccaactaacaaatcagaatctgaggggcatgttctatttcccaggaatgattgacactttggtgctggggttttgtgggggcggggggtagtttttgtttagcttttgtggagattgtgtgtgtgagaggagatttgatttttttttcttcttttcctttgtgagctgatggctgaagtgtaacagtacatcttcaggtaaagagagggatttctcaatctactttctgttatgtcagactataagagaaaccctttcagctgctttctagatgtacctaaattcagtcagacattttggattaagaaacctaaagtcctgatacattacatactccaaggaaatatatcagggacagacaattggctgaaacactgatacttcaatgtgacacatttttatagaacatttctaccagggggtactgaccttgatttctcctacaaggaccacactgcctttgtgtttaatgtaatgcaatttgtgtaccttctaatcatatatctgcagttcctcatttttataaaactttgatatcatgccagtaagctagatgttgaatgtatgtaagtagcatttggtaactgctaagaggttacaaaaacattattggtaaaaaaaatttccttagttctgatctggttggataagattttatcataacttttctgggtctcaggctctgatgtttgaaaaagaagggaatatattgggttttaaaaaagtgtattgtgacttaaactgttataagttatccttccacagaatacatcagagctatcagtgctttgtacatttagatgtttttacttgattattgtttaagaaaaatatactgaatttatagaaagcaagtattctcctaattagcaaaagttaaaattttatctctaccattaaaattacaatagattttgataaataaccagaaaaaacgccttttttttttcacacctagcaatcctcccgtttttattgtaaggactttcttttttccctaagagactttctgttagactctttatatatgagatgcttgtttaaatatggtggtctgtaacatttttccagctcatgtgaaaatggaaaactagaacctgaactagtatctacaacattgccaaagtccagggtaaagctaaaagttgataagtagacaatttattgttttgtgtgtgtctgtgtgtgtgtgtgtgtgtgtgtgtgtgtgtgtatggtgtgtatatgtatatatcacaaagttgtattttaaatattttaaataccctttcttttaatttaagggatgtcaaataaatgaaaggagtttaaaaatagccaaaataaatgagctataaaggcccataacatactaaaacaggcagtttcaggtatgtaaggaaaggaacattatacttacctagaaagtgagatctaaaaaaaaattaaaaataaataaaaaataaaaaagaaagtgagatcttggctatggctggaggtcagtcactttatggcataaattatttgggaggtaaaaagactgttttcaattcaaattgtgcatttattggcatctaaatctagcatgattttggttagagcacaaaagaaataccacataataccaaatcacagcaaatgttagaattaatacaacaaaattttcctttggctagaaatcttatgttatacctgaaaaattggttttaaaaaatgttcatcttggccgggcacggtggctcacgcctgtggtcccaacactctgggaggctgaggtgggtgaatcatgaggtcaggagttcgagaccagcctggccaacatggtgaaaccctgtctctactgaaaatacaaaaaattagctgggcgtggtggcaggcgcctgtaatcccagctnctcgggaggctgaggcnggagaatctcttgagcctgggaggtggaggttgcagtgagccaagaatgcactactgtactccagcctaggcaacagtgcaagactccatctctg

SEQ ID NO: 19561 - DNA, 2532 bp, Homo sapiens
gcccccttgaccaagcagtctcgatccccaagtttcaatatgcagctaatatcccaggtgtagttttgacatcctccctcatctttctgcttaccttttaaactgaacatttcattgtgcaagaagacacttcatcccacattgtgaaaatattggtcactgttatcagatttcatttagtttaggtatcttcatactgtattttgtatcaaaacagcaataaggttttctttatccctctttcctacatcttctcttcacctatcccttgtaaatgtgtttgtgaagcagtataaaatggttgccttttccatgccttcctttctccttgggtgatgtgcaatccatcgtaggctgatcggtcccatttcaacactgtgagactgagggtacattagaggaaatggtgtatatgatccctatgaaacgattctttggcttttgtttaaaaacaaaacgggtttgttctcataatctatagaactatgaagattactggatcatatttttttctcttaaccaggagtgcctcagagattctgctatgactttggacttctctgagtctgtgcaatcattttctggagaagcatggggaaaggtggtagactgctgcactttttcattaaaatgagggtagctctttctccacccccccatctcctttatcccgaagacataaatgttcaattacggaggcatttaaatcaagttgtgaccacctccattggagggcaggactcttgattgtgtaattgataatgcactttctcaatggctgtatagtcattattaacgtgtcttccctcttccccacaaggacatataaggtcatttctgtccttcaagtttggccaactaacaaatcagaatctgaggggcatgttctatttcccaggaatgattgacactttggtgctggggttttgtgggggcggggggtagtttttgtttagcttttgtggagattgtgtgtgtgagaggagatttgatttttttttcttcttttcctttgtgagctgatggctgaagtgtaacagtacatcttcaggtaaagagagggatttctcaatctactttctgttatgtcagactataagagaaaccctttcagctgctttctagatgtacctaaattcagtcagacattttggattaagaaacctaaagtcctgatacattacatactccaaggaaatatatcagggacagacaattggctgaaacactgatacttcaatgtgacacatttttatagaacatttctaccagggggtactgaccttgatttctcctacaaggaccacactgcctttgtgtttaatgtaatgcaatttgtgtaccttctaatcatatatctgcagttcctcatttttataaaactttgatatcatgccagtaagctagatgttgaatgtatgtaagtagcatttggtaactgctaagaggttacaaaaacattattggtaaaaaaaatttccttagttctgatctggttggataagattttatcataacttttctgggtctcaggctctgatgtttgaaaaagaagggaatatattgggttttaaaaaagtgtattgtgacttaaactgttataagttatccttccacagaatacatcagagctatcagtgctttgtacatttagatgtttttacttgattattgtttaagaaaaatatactgaatttatagaaagcaagtattctcctaattagcaaaagttaaaattttatctctaccattaaaattacaatagattttgataaataaccagaaaaaacgccttttttttttcacacctagcaatcctcccgtttttattgtaaggactttcttttttccctaagagactttctgttagactctttatatatgagatgcttgtttaaatatggtggtctgtaacatttttccagctcatgtgaaaatggaaaactagaacctgaactagtatctacaacattgccaaagtccagggtaaagctaaaagttgataagtagacaatttattgttttgtgtgtgtctgtgtgtgtgtgtgtgtgtgtgtgtgtgtgtgtatgccgtgtctcctgtcctcttcttactcccacccctctccgcactctcacacccctgtcctctcaccctctacatcgcctctcccggccctgcccctctcctcacactttctcgctttcctccctctgcccacccttcactcctccctcaccctctcctctctcctccctctcctcctgcctctctcccctccctcccttccctctcctccctcctctccttacctcccccccatcctctccttctctctctccctctctcctcgtctcctcactctctattcccctctccctcctctcctctccctcctcccctccctcctcctcttcttctgctctccgtccatctctccgccccactacccctccgtcccccctctcctctcctctaccccgtgacgctgttcttccccctctcgtcctccctatctctctctcccctctcctccttcctctctctccccg

SEQ ID NO: 19562 - DNA, 390 bp, Homo sapiens
tagagagatgtgtggaatgaagtaagtgtgcagtaagtgttaactacaaatattattatcttagacatacagatttccatgattcatgaatggtgaagcatcttagaagacatccattccaggccaggcatggggttgcgcacctatagtcccagctgctcagtagaatgaggcaggagaattgcttgagcctaggagtttgaggctagtatgggcaatatggtgagaccctatctcaagaaaaaagcaaaactttttttaaagtttaaaaagagagacatctgttccactactctcatcttagaggccagaaaactgaggctcagataatttcagagactttcacagatcccccaaccatttggtggcaaagccaggaatagaactctg

SEQ ID NO: 19563 - DNA, 165 bp, Homo sapiens
cgttgagatgggaagcgggatccggggttcgaaataaagccattgtagctaaaacgtggagcagtcaggcgagggaaggcaaggaaaacagcacttaaaagatttgaagacaaacctgcaggactcggtagtcatttagaacagtggttctcaaaatgtggttcc

SEQ ID NO: 19564 - DNA, 451 bp, Homo sapiens
ataggcatgtgtgtgctaccagaaaatatgtacatgttaggctctttggaagcagtggtagtttggtgagaattgctgcattggctcatcaacacagacctgatcgcactttgatttcatatcttgctatgcagggctcccattatctgcctgccatttgtgtgcatttatgtttagcgtcaatttctcctcccatgaggctataatctgccttgtaaggagctaaaatgggaaaagcagttagaatgatgagtccagttggagcctgctggggaacaagacagtcatcacaggccaatcggcagtggagacagggtggcccttatcacacagaggcatctggagactgagagagacaaagcaacacagctgcaagccgaccatgatctgctggaagcttcttcagtcataaagcaaaggacagtaattctgaatgacaatgtaggaaaac

SEQ ID NO: 19565 - DNA, 256 bp, Homo sapiens
gatcccctgaagtcaggagtttgagaccagcctggccaacatggtgaaaccttatctgccgagaccagctcggtcagggagaccctaacccagcagtgctagaggaattaaagacacacacacagaaatatagaggtgtgaggccgggcgcggtggctcacgcttgtaatcccagcactttcggaggccgaggcaggcggatcacgaagtcaggagatcaagaccatcctggctaacacggtgaaaccccgtctct

SEQ ID NO: 19566 - DNA, 500 bp, Homo sapiens
ggcacagtatgaccatggtatatatacttaagcacaaatggcacatctctgagactaggccaaattcctaggaagaaatgagcagcaacaaaaatcctacattttcattaagtgctaagtatcgtctgcaactgattttcctgacagatctgcttcacatttctgtgtaagcaaattatgtttaaaagctgggctgccatccattatccttcccaatgccccaggcaaggctgatctcttccacatatcactcctcatcattaatgtttgtaactgcaagtaattctagcccatgcagtgacagggaagcaagatagagcagagaactcaatgactggcctgctttctcaataaaaggcaagagattctccgaatctcttctgcagaaaggggtaggagtcaattctcatcttttctcatgtgttctttccctctgcaatatgctgagaaagtagagaacagatagaaagggcatgtgtgtgagtgacatattccttctt

SEQ ID NO: 19567 - DNA, 305 bp, Homo sapiens
gtcatgctctgctaatgtctcttttggaccaggcttcaagcttgctccacccccagctttggcttgcccagcccagccttagcaaggaattctgctaagtcatctcccaaccctagatatctaattacccttgatatctgatcaagttcttcatcctccacctttttgatgtctaagtccttggactgcctttagcaagagtcctgttaggccagcttagcaagaattcccctgcccttgatgtgttcttttagcaatttcccatcctttgacatcctcatgctgttcttggctataaatcttca

SEQ ID NO: 19568 - DNA, 498 bp, Homo sapiens
gtaggcaggttgccccttctactgtggtgtcagtagaggccgtatcaagggcaacaatgaggcacccctttttctctcagccagggaggtttctgtggaagcctagctgggagctagaactctcacccttgctcagcagtaacgaggagccctccactctgcagtgtcagtggaggctgagtacggaacctggactcctacccctacctagaagtaatgaagtagtgctcctcttctgttggagcagtgtcagagaaagccagcttaaacaaagggtttgaataagatccagggtcttaaaacataatgccccaaatgtgcagattttaatgaaaaatcacttgttatactaagaatgaggaagatctcaaactgaatgaaaaaagagaatcaaatcaacagatgtcaaaactgagatgatagagatgttagattttaaagaagtcctcataaaattgcttcaataagcaattgcaggtatgcttgaaacaaacaatg

SEQ ID NO: 19569 - DNA, 557 bp, Homo sapiens
ctactgagtgcctcatatgtgccaagcgatgtgctaggttctagagatacagcagtaagacctgccttgatgcagcttacagtcttacagggcacatagccattgaacaggtaatatatctcaagggatccatcgcaagtgcaccaaatgtggttaagcgggatgctacaggagtaggtcagcaggcctgacctacttcccaatgggtgaagaggaagtctaaagccaggggttctcaaaacatggtccttggaccagccatgtcaccatcacctgaggacttgctagaaatgcatattcacagtcccaccccagacctactaaatcaagctctggaagtgggcccaagcaatctgtttaatttgattttgatatacattaaagtttgagaaccactggcctacagaaactaacatttaagctgagctctaaagctgcatgatctagtgcggtagccactggtcacatgtggctatggagcacttgaaatgtggctggttcacattgagatatgctttcattataaagtacacaccagattccaaagacatactgtg

SEQ ID NO: 19570 - DNA, 391 bp, Homo sapiens
tgattgcattgtttatgagagcgttttatttccctaataattaattttacatattaatgtttaaagctcacattgtacattatgtaacagagttgaatatttacacttgtctccacttgactttaatctttttacatgagggatggcaattgtatgtccacgggtaaaaataagattgaaatgtattgcatagtggcttgtgcctgtggttccagcacttcggaaggccgaggtgggtggattgcttgagctcaggaattcgagaccagtctgggcccatctttacaaaaaatacaaaaattagctgggtgtggtggctagtgccagtagtcctagctactcaggagaccgaggcaggaggatcacttgagcccaggaggcagaggttgca

SEQ ID NO: 19571 - DNA, 420 bp, Homo sapiens
gtaaactccctcctatctaacatggcatagtgtgacggaactatagagaagaaaactggttcctactgtaaatgctgaagctgtaaggagggctctaacacccagatcctaccaggatgcttcatacacagtttcccaaccctcaaacagacctttggatccatcttgcttatgaatatcaatgcaaatgtcctaagtaagttattggtggagaatctaacaaaacactgaaggacaaagtaaaatttattataaggcaaggatggtttgacaatagagaatctattatataattaaccatattaataaattcaaaatattatccaggtgtctcaatgaacatcaaaaaggcaactaatagtatttaacacccattcttgatttttttaaaactcacaataaaataatagtacatggata

SEQ ID NO: 19572 - DNA, 374 bp, Homo sapiens
gaaagaggtttaattgactcacagttccacatggctgaggaggcctcacagtcatggcggaaggcgaatgaggagcaaagtcttgtcttacatgggggtggcaagagagcttaggcaggggaactcccatgtataaaatcatcagaccccatgagactttttcactaccatgagaacagtatgggggaaactgccccgatgattcaattatctctacctcgccccgcccttgacacgtagggattattacaattcaaggtgagatttgggtgggaacgcaaagcttaaccatatcacagaataaagatataaagaaaatattttgtacaactgtacaatgtatttgtgttttaagctgtgtgattacgagtcaa

SEQ ID NO: 19573 - DNA, 125 bp, Homo sapiens
actggttaattccaccaaacatataaggaaacaataataccaatcttaaactctttcataatacttcccaactgattttatgaggccaacataaccctgatcctaaactatgacaaagaccatgc

SEQ ID NO: 19574 - DNA, 617 bp, Homo sapiens
tcagagaagaccttcaggccacaccacacctttgaacaaagagtagaagtttgacttctccgagagcagcatccacccaaaatcttggtagtaacagaacgatacaaggctgagaagcagcttcccgtcctggataaagcaatgttccttgtactggaccacatcaacctgagtgagctcatcaagatcattagaaggtccttccagctcagtgctaatcaagccttcctcctggcggtgaacagacacagcattgtagcagagtgagaaggatgaagatggattcctgtacatggtctgtgtctcccaggagacaattggaatgaaattgtcagtgtaaaactgaaaaaaaaaaaatgcatctattttagaatttttaaacctttaccaaggaaaaaataaaggaatgttacccactgagatcgatcagttcatctaatcacagatcgtcaaacagtagtgttcccacctaggagtgtcaggaagttgtgtttgtatttgaagcagaaaactgggctccaagtgagcacgttcagctttggaaactatgttatttaacataggctagcttgttttcagattttaaaagtttaaaaagaaaatactttgcattctaa

SEQ ID NO: 19575 - DNA, 495 bp, Homo sapiens
tggagccaatacaaaaacatggtctgtgactaatagaatctatttttccccttgctactcactaaatagattttttaaaaattctcccttcaactagcataggaagccactgacatcttcagccacttagtagccaacctgttaccataaggaagtgcatttacagtggggattctgttgagatcatgtgaggcggttgtgaaggcacgtttacaaccccaattgatggtagttacttttggtctttctcttcctccccatggggaagaaacagacaatgagtagagaccagaggaggaaaaagaagcaccgcaaaaaaggaatagagaacctaaaaggcacaaatagtgcccccccacccaaagccaaatgtgtgcctttgaggctaaaaaggtgactgaccctggtgttaacgttgtatattttcaataagctatattcagctgtctactccttgaatttcttcttagcaacttaaacacaaacgaggcctcc

SEQ ID NO: 19576 - DNA, 425 bp, Homo sapiens
gcacttatcaaaactaatagatgagtaataaatctttcaaaacaaagaaaaccgatggacaaagtggtgaaaatatagcatttgtctcttattgccaatgcgtggcacataccaactcaattcatatttgcatgaatttatgaaagcaaggatgaaaaaatatgtactaagatataaaattagcaatattatttttaaaaggttgttaaaagtcaaggccttttgggccaggctgttgggctgtttcttaaggatatgatattttatttattttaacatattcagaaacacctagtggtattaaaacctctgagattggcagcatttggccttttagagaatgttgactctactttctttctctagaatttattctatcattttttatgacagtcttaataaagatgattgaaagactctgggta

SEQ ID NO: 19577 - DNA, 465 bp, Homo sapiens
tcacttaccttgtttaattgggtttcagagtttaatttcgaatgctttgagtgtattttccaccactggagacttagtgtccagagagtccttgattttctttaccacaattgggaaatccattagacactacaaatgtaggtacttgagtgcttcgagtatagctagtatttgtgatactcttcagggataacaagttctatgagttgtgtggaagaaaatagtatttagagcagtgcctgtgaggagatggttattcacagcaaaaatttatatatgtttgtgttgatagtttcagtagcaactgtcttcttggtagtatgaataggaagtactcctagtgttaatagtagataactagtggctctttatgtatatgtttaatttgtaagttagaaactaaagctgtggatatctgtgaattatctgaaatgctggggaccttaaaaaaaaaaccctcattaa

SEQ ID NO: 19578 - DNA, 825 bp, Homo sapiens
atgttggccaggctggtctcgaactcctgatctcaagtgatctgcctgccttggtctcccaaagtgctgggattacaggtgtgaccaccacgccctgccttaagaattgttccaagagaatctggtgccacttgcaggtgcccattgaagtgcaatgggcactgttgatcactgaggaggtagtgggtgctgacccggtgctggggcctgtcccctagtctctgctttgcccttggctagctaggtggtgtgccaagtggggagagaagctaccttattaaggggcatggatcagcttcctgaaaggagggcctgcctctgtaagatatgggaagtcgctgagaatgttacagaacggccctagagatggggcagataacggcccccatttgtgagaagtgagttgggaggcatgtttggggcctctgatgtttgggaggctgtgggtaattaacatgagttttggggtccagcagcagaattcaggtttcctcttccactcagtaacctcagcatccgtatctgtaatgggaatgatacaaaacctatccccaagttgagggaaaaatgagattgtgtaaagcgcacttggcacatgacagtcacaagcatggggacagtgagtccagaaggattttcttatgccagcattgtaagccctaggatcacagggctctggcttgtttaaccatcgtgtctctggtccctagcctgcaaacctggtgtgtagggatgcctcagtcgcttacatgttgattgagtgaatcgtcggtttctttctggacactgacttcaaaaataaaataggatatgaaaatggctcca

SEQ ID NO: 19579 - DNA, 468 bp, Homo sapiens
gcccggctagtggccactgggcgacacctttatctgcccagacaacagcctccaccctcttcctcagccgatctcattatcctgtccacaaatgaccagacagagatcaatgcaacctgtccacggcacacagctctgcagggcagagcgggggcagagcccagagccctgtccatggagggagctctctgggtggtctcttcccttgccgtttcaattagaaagattcaaatagaaaaaaaaaagcagtcaccatcttgttcagaagtcaatttcaaatgtcccttctgtgatgtccctgtggctggggaaagttggcggtgaggcccagtcccctttgttcaaccccttgggatcccattccctgatctcctgaccctgatggcttgggatcttgattttgggggtgataaccgaagtcactgggcacacacagtgccgtggagccgcagggataccccaaagtga

SEQ ID NO: 19580 - DNA, 425 bp, Homo sapiens
gcgctaggcacacagtgttcccgaacccggcgggagggcctgccaagttcgcggcgggcgtgacgcggaaacgtagataatgaggcccagggcggggccggacgcactgccccgcgggctccagagctgcgaacgccccagagtgtgcagggaggcctgcagaaagaaaatgcggctgaggtccccgtgggacccactcagaggtgggccgtaaagatcccggaagggtggatggcattagataccacctagtactccagcaagggctgggtcaccgaattgggatctcggcctcttcttccagtctggggaaaagtgtgttaaatgctaaacatcagtgtttatcgagtgaggcccagcctgtctggcataatgatttttaaaatctacattcaaatattaaataaaaactcaacctccccaat

SEQ ID NO: 19581 - DNA, 387 bp, Homo sapiens
tggcacactatcagtacatgtgcttcggagccttgagctactacataagaagtctgacatgaagctgcagtgctgagaggcgacagggaaataaagatagttgcatgaggagcctcagatgtttgagtctttccagcccatgcaccagatacatgggggaaccacctttgaatagtttgactgtctgaaactacataatagatgcctagcaaggccaaggcaagcctgtaaattatgacagagaacagtacagtgattgttgcattttataccactaaatctggggttgttacatagcaatggaaatctcataggcctgataagttatttaaaatatttattttatatgaaaatataataaaacactatagatataccagtagtata

SEQ ID NO: 19582 - DNA, 238 bp, Homo sapiens
ggtaaatgttaggactggtaaaaaataaaaattcttacatttaacaacaggttacaaccataaccgcagttgatgagaataaactagattggaacatttgataaatatccttctgataatcttattttatgaccttaccagtaaaaagattttcgttacaagtattacagatacagtgtttttaatgagatggtctgtatctttaaaaactatttatgacctttgacttttctctgta

SEQ ID NO: 19583 - DNA, 307 bp, Homo sapiens
cccaggagtttctaaccactttctgatgccagttccccaagctctgctgtctctgccatcttcctagccctgtccagtttcctgcggctccttgttaaatctctctggccagaaagctggggctttattgaccctgctgtcttgcacacttcctgcaactacactcctgggaggaccaaaagaggaaagagcaatggggtttcactccacctttctaggaccacagcacttccagctacacagccaggctcccctcttagagttttaggtgcctgtgggctgccatgagctggcgtgtgagaacacg

SEQ ID NO: 19584 - DNA, 208 bp, Homo sapiens
tctcccagggaactgatttcagcccgatgatacataatagctatgattgcagttttaaaggtggtggtaattctccttaattgagacacttttaggtaatttagtgctgcttgggactaggtgtgtgagaatgtgtatgctctggcgtctctgatttgttttgttttcttctgcagtatggagtgcaggattaattcacacaactgca

SEQ ID NO: 19585 - DNA, 373 bp, Homo sapiens
gaatatctataacctctttctctgtcttgggcctctgttcccctctttattttatcctgtaaatatgttcaaagattccattagaaaaacagacaaacagaaaaaagtacttctcagtaggacccaaagtaataataaacatataggattagctgaacaaatacataccaaatggttaaaagaggttatctcgggaaaagaatataaaaaaagacttcagcattatgcatctgtctttgtaagtatgtttaaggtgtgcctgaattacctgtgtagttagataatttttttttaaggtaaataaaggaaaaaagagaacagttactgtggagaaggagggtcagaatctgggttacagaatattgggaatggg

SEQ ID NO: 19586 - DNA, 897 bp, Homo sapiens
ctctcctaagagaatgaccctagatacagaaatagccataaacatgaaaatgtccatctcaggattgtttaacattgcaaccttggcccaaatggatgtgaacaggggaacagttaaccaaacggtggcaacacttgggacagaaatgatggaattaggccaggcatggtagctcatgcctgtaatccccacactttgggaggctgaagcaggccaatcacttgaggccaggagttcgagaccagtctggccaacatggcgaaactgtctctacttaaaaatataaaaggtagctgggtgtggtggtgcaggcctgtaatcccagctactgaggaggctgaggcatgagaactgcttgaacctgggaggtggaggttgcagggagtcaagatcgtgccccttactccagcctgggtgatggagcaagaccctgtctcaaaataataataataataataataataataataatagtaataaagaaatgatatttctggggagatgatggtgaaatatgaatcttcttttcttaatttttcatatgattaaattacatttataattttaaacaactgagatagtacaatatgtcatcaaatgtataaatgcattttccatcatgtctaaaaagtagagagaaaagatacaaaaaaaaagagtccttatgctaggagaggaaaaacttgtatattctgcttaaagaaaatctaaccacagctgaaaagacatgaaagcatctcagtcctcattccatgtgtccaccatgatatttatactgatattttcccttcagcaaaattattataattaccattcaaaggcatttatatgtgcttataactcttgaagggagacatcagtcatcggatgaatagtcttttagtcatcttctaaccc

SEQ ID NO: 19587 - DNA, 401 bp, Homo sapiens
ggagaaacctttagattatcagtcatactatgtaaatcttatttagctcctgatttagactaacaaactttttttttaatatgagaaaatagaaaatttgagaactggatatttgatgatatttttaaacacttacattttagatttgatcattgcaatttttaacctttttttcattagagatactgattatggctgaaataagtttgatatatgcttgagaattatatagggagagtaaagggtagagatgaaataagaatgttcatgtgtgtgaataactgaggccaggtattgattacatgggcattctctatactattctgcccacttttatatgtttgaagttctctgtagtaaaaaaaacaacaaaaaaaaaaaaaaaatttaagctacagatc

SEQ ID NO: 19588 - DNA, 357 bp, Homo sapiens
  misc_feature (36)..(36): n is a, c, g, or t
  misc_feature (39)..(39): n is a, c, g, or t
gcggccgcctactactactaaattcgcggattgtcnacnagaaaatagaaaatttgagaactggatatttgatgatatttttaaacacttacattttagatttgatcattgcaatttttaacctttttttcattagagatactgattatggctgaaataagtttgatatatgcttgagaattatatagggagagtaaagggtagagatgaaataagaatgttcatgtgtgtgaataactgaggccaggtattgattacatgggcattctctatactattctgcccacttttatatgtttgaagttctctgtagtaaaaaaaacaacaaaaaaaaaaaaaaaatttaagctacagatc

SEQ ID NO: 19589 - DNA, 677 bp, Homo sapiens
ctcaaagaagtactacatctggaggcaaaaagataataatcactatcatgaaaacacacaaaagtgtaaaacttatgggtggggcagatacataaaggagaaaaagaaaggaatcaaaggttatcactacagaaatccaccaaagtgcaatgacaaacaatgacagaggaagaaaacaacaaaggatatacacaacactcagaaaacagttaacaaaatcacaagaatatgtcctcacttatcaataactctgagtgaaaacagactaaattccccacttaaaagatagaaactgtctgaattgatattttttaaatgactcaaaaatatgctgcttacaagaaactcacttcacctataaagatatataccaattgaaaatgaagagatgatggccaggcccaatggctcacacctgtaatcccagcaccttgggaggccaagggggacagatcacttgaggtcaggagttttgagaccagctgggccaacatggtgaaacccatctctactgaatatacaaaaattagctgggcatggtggcatgtgcctgttgtcccagctgctcaggaggctaaggcaggataatcacttgaacccaggaggtggaggttgcagtgagccaagaatgcaccgctgccctccaccctgggcaacaaagtgaaactccatctcaa

SEQ ID NO: 19590 - DNA, 350 bp, Homo sapiens
gggcaaaatgaaaacgggaagccctttgttcaaaaattattataaagttgaagacagcaacagcatgggcttgtgtcactgcacacgttccatgcctccgatggctatgacggctagccttctcctgaggccagcaaaaaggtgcccaagcagaactgattaaggggacgcaggaatttatagagcctcaggtgtctgggtgagacagaagtgcgcccctcacctccaatccctggaaagaatccgaggatagttgggtcttccctggcatgtgagacaagattcaagcccatttcgtttgaatttccaaaaataagatgaccccagctgacgtgggtcatgagcacttg

SEQ ID NO: 19591 - DNA, 1156 bp, Homo sapiens
attctggcaaaaattgtacaaattttgtgggaagtcttgattgttacacaagagtactttctggttaagaacacttaaggtaacaatcactttcttcaagtattgttcaggtctgtagtattttaatgaatgccttgtaaattcagattcatccatgtatcaacacacttcttgactaaacttggaaaggagagttgtggtaaggtcagtgtttgctgttatgtaatctgtttgtccaaaatatttaaaaatcagtatcgtaagattcttaattcagagtcaagaattatcagtgtgacagcaattttcatatgttgaaagttttttccccagtagttgtttcatgataatcaagctgtttcttaggtgtggacctcaaaaagtattatcagttgatttttatgactttgaaaaattctaatttaaatgcaattgatatattgagagctcataaacagaatgtgctttccctgttgatactgctgctaatttaattctaggtaactgaaggaaaaggaatggtgtgcattcttgttgttttttcatactctcacattcatcttttatctagtctcaagatgatcttaagagtaaagctgtaattataactgattagaaagaatttcctaactttagtatagagggaagcacatagggtgctttcttaatgttctagaaagcagaccctattttagcttcttagtcatggagtggggggaactgtttctttctttttaaaattattttacagttatcattgtattcaatttttaaaattcttacaacctctgtgaagaaggtaaagagtagatgaataaattttaatgtcaacctagaacttcactccataatttatttgtgttatagtaagttattttaagctagtatatacccctattcaaaagtcaagatttaaacattgttgctaaaaagtaaatggggcgtgagccaccatacccagccagtgaaatattttcatatgttcattagctaatagtgaaaagcaaaaaattaagacagtgtttttggtatctatcaaacagttcaatccagtattggaggagatatggggaaatgggcatattaatatactgccggtgggaatatgaaactatattcttttttagagggcatttttacttttttaaaaaaaata

SEQ ID NO: 19592 - DNA, 615 bp, Homo sapiens
tgctagagacagggtttcaccatgttggccaggctgacctcgaactcctgacctcaagtgttctgcccacctcgacctcccaaagtgctgggattacaggcgtgagccaccatacccagccagtgaaatattttcatatgttcattagctaatagtgaaaagcaaaaaattaagacagtgtttttggtatctatcaaacagttcaatccagtattggaggagatatggggaaatgggcatattaatatactgccggtgggaatatgaaactatattcttttttagagggcatttttacttttttaaaaaaaataaattttagactcacaatagagttgcaaaaatcatacaccatttccatgggtcctttacccaatttcccctaatgttaacatgttacacgattatagtacaattataaaaactaaaaatgttcctaatctgggttaatctaatgttttttcatgatttgattgagattatgcaatttgggcaagaataccacaaaaatgatgctgtgttcttctcagtgaatcaaactagggcttacatgatatagatgtaccttatactggtgatggtaactctgatcacctagttaagatggtatcagct

SEQ ID NO: 19593 - DNA, 491 bp, Homo sapiens
gtagagacggggtttcatcatattggccagtatggtctcgatctcctgatctcgtgatccgccagcctcggcctcccaaagtactgggtttacaggcatgagccactgcgcccggcctgttttgtttttaaagcaaaaaaccatttggcacctcagtgatttgaagaccctgggctgttaaatctgcttctgacaacctactgtatagtgtgttgtattttgtgaatgtaaaatgttttggtttctgattttgaataaacttgtagagtagaccatgtttgtctttatgttcctggcaaatctgtaaaaaggaaagataagcttgtcattggagctcctaatgtttcataaatctttgtgatttttggtgtctagaaaagagtgtacatttgcgaggtgagaattgtggggaattccttgctggtgctgacatttaatacataagagatgagtttggaaagataaaatttccttgttaacttaaaaaaaaa

SEQ ID NO: 19594 - DNA, 521 bp, Homo sapiens
tcttggggaattctttttaaaatggcaggggtcattctgttcattctctatgtgatggtcacttctcatagagtgatggggccttctcccttaagacagacacgtggatcaggaatagacaggactgacaagagcccctcttctttcccagatggaagacactgcctatttctacaaaatgggggatacctagccacccctgggctgttaaatctgcttctgacaacctactgtatagtgtgttgtattttgtgaatgtaaaatgttttggtttctgattttgaataaacttgtagagtagaccatgtttgtctttatgttcctggcaaatctgtaaaaaggaaagataagcttgtcattggagctcctaatgtttcataaatctttgtgatttttggtgtctagaaaagagtgtacatttgcgaggtgagaattgtggggaattccttgctggtgctgacatttaatacataagagatgagtttggaaagataaaatttccttgttaacttaaaaaaaaa

SEQ ID NO: 19595 - DNA, 480 bp, Homo sapiens
gtagagacggggtttcatcatattggccagtatggtctcgatctcctgatctcgtgatccgccagcctcggcctcccaaagtactgggtttacaggcatgagccactgcgcccggcctgttttgtttttaaagcaaaaaaccatttggcacctcagtgatttgaagaccctgggctgttaaatctgcttctgacaacctactgtatagtgtgttgtattttgtgaatgtaaaatgttttggtttctgattttgaataaacttgtagagtagaccatgtttgtctttatgttcctggcaaatctgtaaaaaggaaagataagcttgtcattggagctcctaatgtttcataaatctttgtgatttttgggtgactgttatggtagagcactgtgatctgggcaacttttgtgctggtacaaatcctgtttaacacaaaaaacagtaactcattgaattaacttgccctggcgaggttagga

SEQ ID NO: 19596 - DNA, 1619 bp, Homo sapiens
ggaaacatcaatattttataaatgtttcttaaatataagtattttgtctgaattcatcttcactctctaatctgctggctctattgaacaccaacagagttaatgcttttagtagctttgtaccttttaaagctctattatgaatctttctaatacatatgaaattaatattatattagaattatgtacattatacaaaataattcataaccaagcaatattcatactatagaataatttattattatatatatgaatattacattgagactgaacaaataaccactctgctccaaatattactctcaagttctctgcctttaattattatagtcaattcataaaattctacatacagttgtacatggtgggttatcaaagtactccataatccaaatgcatctaaaagtattccaaatgcgcctttcattctagaatactaaaggaaagcgtttgaaagaagaggaaagtaaagcagacttctaactatttaatttaaacattgccattcagattgaataatttttaaatgatgatgctccactctttgatctacagacaaggttacaaaagatttacaattagtccaaaatcagaggattttaaatcttaaaggagttaagtttgtctcaatgatccaagactacaaaatttcttgctacattggcaaggaaatatgtttaaagccgagaactaaaatagctttttaaaatttaaaaattcctctgtttcttctgaatgtaaaacaggcaaaatgatcctgacttcaaaatgaaatatattgattgctctcaaaagatgtttgacaaagttaagtcagtatcttcaatgctttaacagtaggtagaggtctttggggttggaactcaggatacagtgactaggacagagtgcattcttaggctaattagtgcctagtcctctggagtattttttaatgccctgaatttcaagttgtcaaactggtttacatattgaatgacattttgaatcaataaaaatgagaaaaaaacatttaaatttggttttcatgtctcatttgagaataaagatttccttcatcaccctaagtaataaaagctgatatgtcttgaaacaactatagacaatcagaatgtgttcatttataaagtatcactggtttgtatattttaatgctgacctttgcctgtgaactagaaaatcaagatttgtagagtcaggttgatttgccttcatttaattcctgcaaatgcattggaagtggatggataacttggaactttttccatactgttttccccctcaccaagcattaaatctaattcaaaatatgtctttctaaaaaacaatagtttatttttaaaactaacaactaattgtgttattccttgttgataagaaagtcactttttagaaacaagaatatagctattgtggctttggtcgcttaggattctcatatatttacacatggcattattcttttcatatacacctaccagatttcaagctattggatatttcccttgtacaacctttacatcctttttttttccttaaatgctctgtacaatcacatgtaaagtcatgagctacaaacctcaataaaaatatcagtaaacaagaagtgatgtagt

SEQ ID NO: 19597 - DNA, 80 bp, Homo sapiens
atgcaactgcagctctgtaagcaaatctgagacgtgttcacatgtggcagctgtgcatgggtgagggggccttcaggaag

SEQ ID NO: 19598 - DNA, 334 bp, Homo sapiens
ttgtgggggtctcactgcattctacagatgtttcttttgtgctttcaaagtaacataattgcctcatcaaaagtttgtgaaacaggctgggcgcagtggctcactcctgtaatcccagcactttgggaggccgaggtgggcggattacctgaggtccggagtttgagaccagcctggccaacatggtgaaacctcgtctctactaaaaatacaaaaattagccaggcatggtggcggacgcctgtaatctcagctaccctggaagctaaggcagggagaattgcttgaacctgggaggcagaagtttcagtgagctgagatcgtgccactgtac

SEQ ID NO: 19599 - DNA, 593 bp, Homo sapiens
tgttgttgtttttaaagacaggttctcactgggttttttaaagacaggttctcactgggttgcccaggctggagtgcagtggcatgatcatagctcattgcagcctggagctcccaggctcaagcgatcctcctgcctcagtttccagagcagctaggactacaggtgtgcaccaccacacctagctaatttttttattttttgtagagacggggtctcagtatgttgaccaagcttgtctcaaactcctgggctaaagcaatcctcccaccttggcctctcaaagcgctgggattacaggcatgagccatcatgcctggcctagtatttctttatataatatgcataaaatgtctccaaaggcatacataagaaacttaacggtcggtgtttgtcgggaagggaaccaggtggactaggggatggggtgtgacaaacactggtcacttttacacccttgctggtcttttgtatgttaagccatagtaatattacatatttacaaaatacatacttttttaattaaaaaagaaagtctcctctgcaaacctgtctctgccctccccaggcctccatcctgggtccttcccgcc

SEQ ID NO: 19600 - DNA, 404 bp, Homo sapiens
atcgcactcaccttctcagccctgggtctctacaccaggacaatgcaggaagttgttagagactgtgtcttaacatatctgtactgaacagcctccttccctactatcataaaataaaagatgtcagcttgggaagagaggagaaatctctactcgaggtagggcggctggcatttgcagtcctgactttggtccccagcattcccctcctgctggagatgtcttggtgatgattactcctgtcacaagctagttggggaagacaggacccctccagcaaccctgtctgatgattcctaacgggtggtcctggatcagcagcatcaggatctggttcctcagccccacccagacccatgggatcataatccctgcatgtgggcccagcactctgcattctagca

SEQ ID NO: 19601 - DNA, 406 bp, Homo sapiens
tgctaggattataggcataagccaccacgcccggcctcttttttttctttttcttttctttatctggagactgagttttgcacttgttgcccaggctggagtgcaatggtgcgatctcagctcactgcaatctccacctcagcaggagagcaggaatcttcagtgatccacgggcagatctgccaccattgtgggcacctgttcctcccgcgacctttgtgcccgcctctctccttccagtacctattgcatgaccccccacgtccgcctcccgccattgccagcaagtgcctcgcgcgggtacctggctgcgcttattaatccgttaagctcgctctgtcacgggcgccgtgatgtgctcacgcgcccgctccctcaggtttaaaaggcgcgttgcccggcaaca

SEQ ID NO: 19602 - DNA, 380 bp, Homo sapiens
tctcctgcacatatcctgagttctagattcttccattatgatttctttattaatctgattttacttcccttggttttgcagctgtctgttaaactctttaacttgtcattgtactctatgtctttataagtttattcataatataattttatagtgttatttcaaggacacttttggaaggaaaagagagataaacatatgtaccagatctatcattctgaagtagaagctatcaaactttatgtgacgagaaaatgcatttgggtatatactgataggtttcctatcacttcatgctttattgcatttcttctcccatgtttttgaagctttctaatcaactgtggaatgatggaaataaaagaatccaagaagcaatt

SEQ ID NO: 19603 - DNA, 399 bp, Homo sapiens
gtgctgccttgactgggttcagagttctggagccccggcctctgctctggggcgctccacaggcctcttctggtctgcgggctcctcctttacttcagggcccttttgccgagggcttccttgttttcaaccctccttcctacccttccctcctccctcgctccctttcttgtcagtattctttccggtttttgaggcctatctccagatcgcttttccactcattttttaaaatgcgagcactttaattctgcctagaacctgggcaacagagtgagactccatctaaaaaaagaaagaaaagaaaagaaaagaaaagccacagactagaggaaaatatttacagagacaatctgataatggaccaaactatacgaagaactcttaaaactcaacagt

SEQ ID NO: 19604 - DNA, 427 bp, Homo sapiens
caggtagctggcgagtgtgtacgacctgacatcgccacttacttactgcgggaggcgccacggcacgctgtttgcgctctggggaagctgagaggcctggaatccgcgcgcctccccagccatctgtgctctcgcagcgcgctaggcgctcccggctgctgacttacaggatctgggttcctccgcctacgctctggggcgccctgaagcgcgggtagacacctgaggtttttgccttagccagtggcgcaagatgccgcggaactcttgggattggagagaccaagaaggctttaaaggggcgacacgcaggggcggcaaagaggaaaggttccccagggcgcgcgtgcccaaggctccagctggctcccccagtaaaacctgaaagagcaattttatccttacgatgtagaatttttcctcctaa

SEQ ID NO: 19605 - DNA, 346 bp, Homo sapiens
attctggcctgtacagcagactgtctcaaaaaatacataaataaaataaagtcaaggctggatttcagaccttgacacagaagtggtctgcctggaatagggggttggaggggacctggctagcaggattggctcacgggcccagaactgtctctccctttggaattctctgctctcattgcctacttgggctcgaccttatcagagaagcctgccccccttcgtagcatgttgctcaggctggcctctgactcctgggctcaaatgatcctcctgcctcagcacctccaagtagctgagagtattaaacatgtgccagggtgcccagctatgttacttctgggaa

SEQ ID NO: 19606 - DNA, 578 bp, Homo sapiens
accaccctgttttttctcagtgacactaccatgccattccagaaactgcaacaacgtgggggcagcaaccacattttatcttctttttatacatcttaatcatactaagaagttaaagagtggaattgaaggccacaaaataaaaatgaagtattagaaacagtctgaagctgagaaaattctcacctaaaacgtctgatgatggtgatagaaaacaaatattatctgtagtaatgacaagaagtgatagagcactagacagaaggcaagaaaagtggattcttgccttagatatgctaacgctgaattgcaaagtcgtttccacttaacacttgcctcatctaactatccctcataaaatgagggaataatgacatgtgatctatacattcgcatgcctaaaaggccatgattctggaagtaagctggactactacatcacagacaaatggacaaataacagaaccatcacatttttctactttggtagccatgactgccaagaaagcctattgactacaaacccctttaacaatgaaagtaaacaaataaaaattttctgagttatgttaaataaa

SEQ ID NO: 19607 - DNA, 348 bp, Homo sapiens
gcatagtgccaatttcacaatactgtattgtatacttaaacatttgctaagactgcagattttatgttttctctctgtctctttctcgtgcacacacacacacacacacacgcacgcgcacacccaaaataataataataataataaaaagaatggacaggaactttgggaggagatggatgtgtttatggaatagattgtggtgatggtttcatgggtgtatactcatctccaagcttatcaagttgtatacatgaaatatgtacagctttctgtatgtcaaccagacctcaaaaagtagttttaaaaaaagaaaataataaatatacagcattgcatttagaaaga

SEQ ID NO: 19608 - DNA, 458 bp, Homo sapiens
atgcctggcatgtactagatagatgatcacaaaatacggattttcttttctttttcaatgcaatcatcagtttattaatgaattagtgacacagagattggggaaagttggtgaaagcagaggctggaggaggatgtggaagaagggtaacagaaatagaaatgagagtccgacaagagaaaaggactctgttactgggatctggggccacccttcaccttctggtcttttgtagaagggtcctctgccagtgccaagtaggagggaggtagaagattgagctttcacagtgttccacattgccctaatcatttcatttctaatgtactttctgagttggcgcattacccagagctgattcatccctgaggcataggtctccctttagcctaacggagatgactgcatacaagtggtggctggataacctcaatcatcaaaagaaatatgcttcagaa

SEQ ID NO: 19609 - DNA, 176 bp, Homo sapiens
tctcctccaaactcatgaacagcccagaactggatttagttgaatctgtaattccagtagaaagtttggcctttccccaggggagaccaatctgggttggggtcattgttctttgtgatactggatttactttcttttgccatggtatgaaaagtattaatatggagaatacattt

SEQ ID NO: 19610 - DNA, 311 bp, Homo sapiens
gctataatttaagatcagatgagagtttaatattattattacaatgatgcacctgacaaggaagtatggttatttctgctgcatacaacctcttaagataatcactggaattatgactgatagtgttacaccaggactattagatttctaagaatttcttacaatttctgaaacacatattaataacacatccaaacaaatataacttaaagatttagcattactcattaattaacaatgtttcccatataatttaataaatcaaataagcccaattagtttaatatctctctttttataaggaaatatat

SEQ ID NO: 19611 - DNA, 424 bp, Homo sapiens
agcagtacaatcacaggaattaagaatacccttagatgttctgcaatgttctctttcttttcctgcagagcaatgaagtaatgagagatacagtggttgggatgtgagattttatgctcaactataaagatgctatcttttactagatttgatgaagcaagctgccatgatgaagagcctcatatttcaagagactgaaggtggcctctgttcaacagcacacaaggaagtgaatcttatcgacaaccactaaatgatcttagaaggagatcctgccccaatttaaccttgagatgactgtgaacctgcactaaaaacctaattgcagccttgtgaaaggtgctgagctaaaggatccaactaacttatacctaactcacataaactgtgagataataaatgcatgctctcttaagatgctaaa

SEQ ID NO: 19612 - DNA, 484 bp, Homo sapiens
tttcagaatttttttttgccctaatttgtcagctctagcggaaccaaccagtcctcctcgttcgctctcaaaggagactgttgactcatttcccggctgcagggtcacgccttaagacccttgagggtttcctccaggccagggagactctgcccgaatctccaggctcccctcccggtctctcccctcccagaaacgccccatccccttttgtttttaaagaacctcggctcctccccctttttcggctcttaaagggccaatccaccttagactagcctggatccagcgctggaaggatgcttagagaccagccagctagccagtgtcgttgcagacaaagaagctcaggcccagagtgcggacatgacctatcaaaggtcacagagcaagttaccagtgaagccaggacttgaacccaggcctatgactccgaagccagtggattctatggatctacttaaataaaaactaaaacaaaaaa

SEQ ID NO: 19613 - DNA, 369 bp, Homo sapiens
ccgctccgcagcgcagcgcatggagcccggcggggaccaccggagccggagcagcggcggcaggggcggccccgggccagcagtggcctcggcacggggccgacggctgccgcccgccggatcgagcggcagcgcggagccagaggaagacgaaggcgactagcctggatccagcgctggaaggatgcttagagaccagccagctagccagtgtcgttgcagacaaagaagctcaggcccagagtgcggacatgacctatcaaaggtcacagagcaagttaccagtgaagccaggacttgaacccaggcctatgactccgaagccagtggattctatggatctacttaaataaaaactaaaacaaaaaa

SEQ ID NO: 19614 - DNA, 564 bp, Homo sapiens
ttcctatatttttattcaataggaatgggatacgtttacaggtgtggttgttggagacatgttacggaaagctgactctcaacaaaaaatacgtgatcagcttccgtcttggatagatcaggaacgaagctgggccgtggcaacattaaagattgctctccccagtctttatcagaccctctgctttgaagatgcagctctgtggcgtacttattataataattcaatgtgtgagcaagagtttccatctatccttgcaaagaaagtttccttatttcagcagattcttgtagtacaggcgctaagaccggacagattgcaaagtgccatggctctttttgcatgtaaaactctgggtaagtgtgatgcttttcaagaactagaccactggcctgaattatttgtttttaatttacctttcattttatgttagcctgagtttagaaatgttataatgtctcttttattcattctgtttatttatcttccaatctcatggagagtagagttagtatactgtgtggattaaaacattcttcccataaatggataacacgttcgcga

SEQ ID NO: 19615 - DNA, 2807 bp, Homo sapiens
ttcctatatttttattcaataggaatgggatacgtttacaggtgtggttgttggagacatgttacggaaagctgactctcaacaaaaaatacgtgatcagcttccgtcttggatagatcaggaacgaagctgggccgtggcaacattaaagattgctctccccagtctttatcagaccctctgctttgaagatgcagctctgtggcgtacttattataataattcaatgtgtgagcaagagtttccatctatccttgcaaagaaagtttccttatttcagcagattcttgtagtacaggcgctaagaccggacagattgcaaagtgccatggctctttttgcatgtaaaactctgggactgaaagaggtgtccccactgcctctaaatctcaaacgtttatacaaagagacactggaaattgaacccatcttgataattatttctccgggtgctgatccttctcaggaacttcaagaactagctaatgctgaaagaagcggagagtgttatcaccaggttgccatgggtcaaggtcaagctgatttagcaattcaaatgctaaaagaatgtgcccgcaatggagactggctctgtttgaagaacttacatcttgtggtatcttggctgccagttctggaaaaggaattgaatactcttcaacctaaagatacctttcgtctttggctcactgcagaagttcatcccaactttactcctattttactacagtcaagtctgaagataacatatgagtcacctccaggtttaaagaagaatttaatgcgtacttatgagtcttggactcctgagcaaattagcaaaaaagataatacacatcgagctcatgctctcttcagtcttgcatggtttcatgctgcatgtcaagaaagaagaaactatattcctcagggttggacaaagttttatgaattttctttatcagatcttcgggctgggtacaacattattgacagactttttgatggtgccaaagatgtacaatgggaatttgtacatggtttacttgaaaatgctatttatggaggacgtatagacaactattttgaccttagagttcttcagtcatacctgaagcagttttttaattcttcagttattgatgtattcaaccaaaggaacaagaaaagcatttttccatattccgtatctctaccacaatcctgcagcattttggactatcgtgctgtcattgagaaaattccagaggacgacaaacctagtttctttggtctgcctgccaatatcgctcgctcatctcagcgcatgatcagttctcaggttatttcacagttgaggattttgggcagatccataacagctggttccaaatttgacagagaaatctggtctaatgaactttctcctgtcctcaatctctggaagaaactaaaccagaattcaaacctaatacatcagaaagtgcctcctcctaacgatcgacaaggatctccaatactgtcattcatcattcttgaacaatttaatgctattcgtttagtacaaagtgtccaccagtctcttgctgctctcagcaaagtcatcagaggaactactttactgagttcagaagtacaaaaattggcaagtgctttattaaaccaaaagtgtcctctcgcatggcagagcaagtgggaaggcccagaagatcccttacaatacctgagaggtcttgttgcccgtgcccttgcaatacagaactgggtagataaagctgaaaaacaggctcttctctctgaaacacttgacctatcagaacttttccatccagacacatttcttaatgctcttcgccaggaaactgcaagggcagtgggtcgttctgtggatagccttaaatttgtagcctcatggaaaggtcgactgcaagaagcaaagctacaaattaagatcagtggcttgttactagaaggatgtagttttgatggaaatcaactttctgaaaatcagcttgattctcccagcgtgtcatcagtgctcccttgttttatgggctggattccacaggatgcatgtggtccatattctccggatgagtgcatctctttgcctgtttacacaagtgctgaaagggatcgtgtggttaccaatattgatgttccatgtgggggcaaccaagaccagtggattcagtgtggagcagctctattcctaaaaaatcagtagaatctaatgacaacaaaagccatcttcacaaaagggaacattgattctttaagctttaaatcaaacatgtggtcagtctacatttgaaatgttagttcaaaatattaacatatagttatgttgttgatgtcactgaaattttaatgtgtaaaagcagcactgtgcatcttttaaagtaataaattaatggagttattgttaaaacagagtattcttttgacaacattaaatatttctgtgagaaagttcacttttccagtggctcaaaaatttgttttaggtcagagattttaagtggtatattaaccaataataaatattttggctgtcatttgtgtcataattatttaataaaagagcattcataatttaatttttgcagtcttcccatgactctttttacatactgaagaatgtattataaagttataatgaatgtataaaagtatcaacatgaatataattatactatgctaattataatatacaaatatataattattgtcataattatatacttataactaatatcttaaggtaattcaaataggaataattcaggtgacataataatggaggataaattctggttattaaacattcagcttttttgtgtttttgt

SEQ ID NO: 19616 - DNA, 2552 bp, Homo sapiens
ttcctatatttttattcaataggaatgggatacgtttacaggtgtggttgttggagacatgttacggaaagctgactctcaacaaaaaatacgtgatcagcttccgtcttggatagatcaggaacgaagctgggccgtggcaacattaaagattgctctccccagtctttatcagaccctctgctttgaagatgcagctctgtggcgtacttattataataattcaatgtgtgagcaagagtttccatctatccttgcaaagaaagtttccttatttcagcagattcttgtagtacaggcgctaagaccggacagattgcaaagtgccatggctctttttgcatgtaaaactctgggactgaaagaggtgtccccactgcctctaaatctcaaacgtttatacaaagagacactggaaattgaacccatcttgataattatttctccgggtgctgatccttctcaggaacttcaagaactagctaatgctgaaagaagcggagagtgttatcaccaggttgccatgggtcaaggtcaagctgatttagcaattcaaatgctaaaagaatgtgcccgcaatggagactggctctgtttgaagaacttacatcttgtggtatcttggctgccagttctggaaaaggaattgaatactcttcaacctaaagatacctttcgtctttggctcactgcagaagttcatcccaactttactcctattttactacagtcaagtctgaagataacatatgagtcacctccaggtttaaagaagaatttaatgcgtacttatgagtcttggactcctgagcaaattagcaaaaaagataatacacatcgagctcatgctctcttcagtcttgcatggtttcatgctgcatgtcaagaaagaagaaactatattcctcagggttggacaaagttttatgaattttctttatcagatcttcgggctgggtacaacattattgacagactttttgatggtgccaaagatgtacaatgggaatttgtacatggtttacttgaaaatgctatttatggaggacgtatagacaactattttgaccttagagttcttcagtcatacctgaagcagttttttaattcttcagttattgatgtattcaaccaaaggaacaagaaaagcatttttccatattccgtatctctaccacaatcctgcagcattttggactatcgtgctgtcattgagaaaattccagaggacgacaaacctagtttctttggtctgcctgccaatatcgctcgctcatctcagcgcatgatcagttctcaggttatttcacagttgaggattttgggcagatccataacagctggttccaaatttgacagagaaatctggtctaatgaactttctcctgtcctcaatctctggaagaaactaaaccagaattcaaacctaatacatcagaaagtgcctcctcctaacgatcgacaaggatctccaatactgtcattcatcattcttgaacaatttaatgctattcgtttagtacaaagtgtccaccagtctcttgctgctctcagcaaagtcatcagaggaactactttactgagttcagaagtacaaaaattggcaagtgctttattaaaccaaaagtgtcctctcgcatggcagagcaagtgggaaggcccagaagatcccttacaatacctgagaggtcttgttgcccgtgcccttgcaatacagaactgggtagataaagctgaaaaacaggctcttctctctgaaacacttgacctatcagaacttttccatccagacacatttcttaatgctcttcgccaggaaactgcaagggcagtgggtcgttctgtggatagccttaaatttgtagcctcatggaaaggtcgactgcaagaagcaaagctacaaattaagatcagtggcttgttactagaaggatgtagttttgatggaaatcaactttctgaaaatcagcttgattctcccagcgtgtcatcagtgctcccttgttttatgggctggattccacaggatgcatgtggtccatattctccggatgagtgcatctctttgcctgtttacacaagtgctgaaagggatcgtgtggttaccaatattgatgttccatgtgggggcaaccaagaccagtggattcagtgtggagcagctctattcctaaaaaatcagtagaatctaatgacaacaaaagccatcttcacaaaagggaacattgattctttaagctttaaatcaaacatgtggtcagtctacatttgaaatgttagttcaaaatattaacatatagttatgttgttgatgtcactgaaattttaatgtgtaaaagcagcactgtgcatcttttaaagtaataaattaatggagttattgttaaaacagagtattcttttgacaacattaaatatttctgtgagaaagttcacttttccagtggctcaaaaatttgttttaggtcagagattttaagtggtatattaaccaataataaatattttggctgtcatttgtgtcataattatttaataaaagagcattcata

SEQ ID NO: 19617 - DNA, 2597 bp, Homo sapiens
ttcctatatttttattcaataggaatgggatacgtttacaggtgtggttgttggagacatgttacggaaagctgactctcaacaaaaaatacgtgatcagcttccgtcttggatagatcaggaacgaagctgggccgtggcaacattaaagattgctctccccagtctttatcagaccctctgctttgaagatgcagctctgtggcgtacttattataataattcaatgtgtgagcaagagtttccatctatccttgcaaagaaagtttccttatttcagcagattcttgtagtacaggcgctaagaccggacagattgcaaagtgccatggctctttttgcatgtaaaactctgggactgaaagaggtgtccccactgcctctaaatctcaaacgtttatacaaagagacactggaaattgaacccatcttgataattatttctccgggtgctgatccttctcaggaacttcaagaactagctaatgctgaaagaagcggagagtgttatcaccaggttgccatgggtcaaggtcaagctgatttagcaattcaaatgctaaaagaatgtgcccgcaatggagactggctctgtttgaagaacttacatcttgtggtatcttggctgccagttctggaaaaggaattgaatactcttcaacctaaagatacctttcgtctttggctcactgcagaagttcatcccaactttactcctattttactacagtcaagtctgaagataacatatgagtcacctccaggtttaaagaagaatttaatgcgtacttatgagtcttggactcctgagcaaattagcaaaaaagataatacacatcgagctcatgctctcttcagtcttgcatggtttcatgctgcatgtcaagaaagaagaaactatattcctcagggttggacaaagttttatgaattttctttatcagatcttcgggctgggtacaacattattgacagactttttgatggtgccaaagatgtacaatgggaatttgtacatggtttacttgaaaatgctatttatggaggacgtatagacaactattttgaccttagagttcttcagtcatacctgaagcagttttttaattcttcagttattgatgtattcaaccaaaggaacaagaaaagcatttttccatattccgtatctctaccacaatcctgcagcattttggactatcgtgctgtcattgagaaaattccagaggacgacaaacctagtttctttggtctgcctgccaatatcgctcgctcatctcagcgcatgatcagttctcaggttatttcacagttgaggattttgggcagatccataacagctggttccaaatttgacagagaaatctggtctaatgaactttctcctgtcctcaatctctggaagaaactaaaccagtgtcctctcgcatggcagagcaagtgggaaggcccagaagatcccttacaatacctgagaggtcttgttgcccgtgcccttgcaatacagaactgggtagataaagctgaaaaacaggctcttctctctgaaacacttgacctatcagaacttttccatccagacacatttcttaatgctcttcgccaggaaactgcaagggcagtgggtcgttctgtggatagccttaaatttgtagcctcatggaaaggtcgactgcaagaagcaaagctacaaattaagatcagtggcttgttactagaaggatgtagttttgatggaaatcaactttctgaaaatcagcttgattctcccagcgtgtcatcagtgctcccttgttttatgggctggattccacaggatgcatgtggtccatattctccggatgagtgcatctctttgcctgtttacacaagtgctgaaagggatcgtgtggttaccaatattgatgttccatgtgggggcaaccaagaccagtggattcagtgtggagcagctctattcctaaaaaatcagtagaatctaatgacaacaaaagccatcttcacaaaagggaacattgattctttaagctttaaatcaaacatgtggtcagtctacatttgaaatgttagttcaaaatattaacatatagttatgttgttgatgtcactgaaattttaatgtgtaaaagcagcactgtgcatcttttaaagtaataaattaatggagttattgttaaaacagagtattcttttgacaacattaaatatttctgtgagaaagttcacttttccagtggctcaaaaatttgttttaggtcagagattttaagtggtatattaaccaataataaatattttggctgtcatttgtgtcataattatttaataaaagagcattcataatttaatttttgcagtcttcccatgactctttttacatactgaagaatgtattataaagttataatgaatgtataaaagtatcaacatgaatataattatactatgctaattataatatacaaatatataattattgtcataattatatacttataactaatatcttaaggtaattcaaataggaataattcaggtgacataataatggaggataaattctggttattaaacattcagcttttttgtgtttttgt

SEQ ID NO: 19618 - DNA, 1555 bp, Homo sapiens
accgttgctggtgggcgggggatgggcgtatagtgggctcctttgaaggttatttcacagttgaggattttgggcagatccataacagctggttccaaatttgacagagaaatctggtctaatgaactttctcctgtcctcaatctctggaagaaactaaaccagaattcaaacctaatacatcagaaagtgcctcctcctaacgatcgacaaggatctccaatactgtcattcatcattcttgaacaatttaatgctattcgtttagtacaaagtgtccaccagtctcttgctgctctcagcaaagtcatcagaggaactactttactgagttcagaagtacaaaaattggcaagtgctttattaaaccaaaagtgtcctctcgcatggcagagcaagtgggaaggcccagaagatcccttacaatacctgagaggtcttgttgcccgtgcccttgcaatacagaactgggtagataaagctgaaaaacaggctcttctctctgaaacacttgacctatcagaacttttccatccagacacatttcttaatgctcttcgccaggaaactgcaagggcagtgggtcgttctgtggatagccttaaatttgtagcctcatggaaaggtcgactgcaagaagcaaagctacaaattaagatcagtggcttgttactagaaggatgtagttttgatggaaatcaactttctgaaaatcagcttgattctcccagcgtgtcatcagtgctcccttgttttatgggctggattccacaggatgcatgtggtccatattctccggatgagtgcatctctttgcctgtttacacaagtgctgaaagggatcgtgtggttaccaatattgatgttccatgtgggggcaaccaagaccagtggattcagtgtggagcagctctattcctaaaaaatcagtagaatctaatgacaacaaaagccatcttcacaaaagggaacattgattctttaagctttaaatcaaacatgtggtcagtctacatttgaaatgttagttcaaaatattaacatatagttatgttgttgatgtcactgaaattttaatgtgtaaaagcagcactgtgcatcttttaaagtaataaattaatggagttattgttaaaacagagtattcttttgacaacattaaatatttctgtgagaaagttcacttttccagtggctcaaaaatttgttttaggtcagagattttaagtggtatattaaccaataataaatattttggctgtcatttgtgtcataattatttaataaaagagcattcataatttaatttttgcagtcttcccatgactctttttacatactgaagaatgtattataaagttataatgaatgtataaaagtatcaacatgaatataattatactatgctaattataatatacaaatatataattattgtcataattatatacttataactaatatcttaaggtaattcaaataggaataattcaggtgacataataatggaggataaattctggttattaaacattcagcttttttgtgtttttgt

SEQ ID NO: 19619 - DNA, 2754 bp, Homo sapiens
ttcctatatttttattcaataggaatgggatacgtttacaggtgtggttgttggagacatgttacggaaagctgactctcaacaaaaaatacgtgatcagcttccgtcttggatagatcaggaacgaagctgggccgtggcaacattaaagattgctctccccagtctttatcagaccctctgctttgaagatgcagctctgtggcgtacttattataataattcaatgtgtgagcaagagtttccatctatccttgcaaagaaagtttccttatttcagcagattcttgtagtacaggcgctaagaccggacagattgcaaagtgccatggctctttttgcatgtaaaactctgggactgaaagaggtgtccccactgcctctaaatctcaaacgtttatacaaagagacactggaaattgaacccatcttgataattatttctccgggtgctgatccttctcaggaacttcaagaactagctaatgctgaaagaagcggagagtgttatcaccaggttgccatgggtcaaggtcaagctgatttagcaattcaaatgctaaaagaatgtgcccgcaatggagactggctctgtttgaagaacttacatcttgtggtatcttggctgccagttctggaaaaggaattgaatactcttcaacctaaagatacctttcgtctttggctcactgcagaagttcatcccaactttactcctattttactacagtcaagtctgaagataacatatgagtcacctccaggtttaaagaagaatttaatgcgtacttatgagtcttggactcctgagcaaattagcaaaaaagataatacacatcgagctcatgctctcttcagtcttgcatggtttcatgctgcatgtcaagaaagaagaaactatattcctcagggttggacaaagttttatgaattttctttatcagatcttcgggctgggtacaacattattgacagactttttgatggtgccaaagatgtacaatgggaatttgtacatggtttacttgaaaatgctatttatggaggacgtatagacaactattttgaccttagagttcttcagtcatacctgaagcagttttttaattcttcagttattgatgtattcaaccaaaggaacaagaaaagcatttttccatattccgtatctctaccacaatcctgcagcattttggactatcgtgctgtcattgagaaaattccagaggacgacaaacctagtttctttggtctgcctgccaatatcgctcgctcatctcagcgcatgatcagttctcaggttatttcacagttgaggattttgggcagatccataacagctggttccaaatttgacagagaaatctggtctaatgaactttctcctgtcctcaatctctggaagaaactaaaccagaattcaaacctaatacatcagaaagtgcctcctcctaacgatcgacaaggatctccaatactgtcattcatcattcttgaacaatttaatgctattcgtttagtacaaagtgtccaccagtctcttgctgctctcagcaaagtcatcagaggaactactttactgagttcagaagtacaaaaattggcaagtgctttattaaaccaaaagtgtcctctcgcatggcagagcaagtgggaaggcccagaagatcccttacaatacctgagaggtcttgttgcccgtgcccttgcaatacagaactgggtagataaagctgaaaaacaggctcttctctctgaaacacttgacctatcagaacttttccatccagacacatttcttaatgctcttcgccaggaaactgcaagggcagtgggtcgttctgtggatagccttaaatttgtagcctcatggaaaggtcgactgcaagaagcaaagctacaaattaagatcagtggcttgttactagaaggatgtagttttgatggaaatcaactttctgaaaatcagcttgattctcccagcgtgtcatcagtgctcccttgttttatgggctggattccacaggatgcatgtggtccatattctccggatgagtgcatctctttgcctgtttacacaagtgctgaaagggatcgtgtggttaccaatattgatgttccatgtgggggcaaccaagaccagtggattcagtgtggagcagctctattcctaaaaaatcagtagaatctaatgacaacaaaagccatcttcacaaaagggaacattgattctttaagctttaaatcaaacatgtggtcagtctacatttgaaatatgtgtaaaagcagcactgtgcatcttttaaagtaataaattaatggagttattgttaaaacagagtattcttttgacaacattaaatatttctgtgagaaagttcacttttccagtggctcaaaaatttgttttaggtcagagattttaagtggtatattaaccaataataaatattttggctgtcatttgtgtcataattatttaataaaagagcattcataatttaatttttgcagtcttcccatgactctttttacatactgaagaatgtattataaagttataatgaatgtataaaagtatcaacatgaatataattatactatgctaattataatatacaaatatataattattgtcataattatatacttataactaatatcttaaggtaattcaaataggaataattcaggtgacataataatggaggataaattctggttattaaacattcagcttttttgtgtttttgt

SEQ ID NO: 19620 - DNA, 790 bp, Homo sapiens
ttcctatatttttattcaataggaatgggatacgtttacaggtgtggttgttggagacatgttacggaaagctgactctcaacaaaaaatacgtgatcagcttccgtcttggatagatcaggaacgaagctgggccgtggcaacattaaagattgctctccccagtctttatcagaccctctgctttgaagatgcagctctgtggcgtacttattataataattcaatgtgtgagcaagagtttccatctatccttgcaaagaaagtttccttatttcagcagattcttgtagtacaggcgctaagaccggacagattgcaaagtgccatggctctttttgcatgtaaaactctgggactgaaagaggtgtccccactgcctctaaatctcaaacgtttatacaaagagacactggaaattgaaccaagaccagtggattcagtgtggagcagctctattcctaaaaaatcagtagaatctaatgacaacaaaagccatcttcacaaaagggaacattgattctttaagctttaaatcaaacatgtggtcagtctacatttgaaatatgtgtaaaagcagcactgtgcatcttttaaagtaataaattaatggagttattgttaaaacagagtattcttttgacaacattaaatatttctgtgagaaagttcacttttccagtggctcaaaaatttgttttaggtcagagattttaagtggtatattaaccaataataaatattttggctgtcatttgtgtcataattatttaataaaagagcattcata

SEQ ID NO: 19621 - DNA, 576 bp, Homo sapiens
ggcagcagtgagatgtgattgcaccactgcactccagcctgggtgacagggcaagatgctatttctattttttttttaaacgtaaaaatagtgatttgaaaattttagggaggatttctggtttctgggcctctgtttgctgtcaacagaaatgcctcatctacgtaccatgattttcacctgccatttagccttttattagatccagaagatgtttctaaccctgtttacttttgatgataggcttgaggaagtaaatggatttcagtaatatttttgatatatacttgctatatacctattgtgacagtttaaagcacagtaaataatatggaacaatgataagtgttcccatatttagtaaacatttgtttaattagttaacattaattattgtttagttaaagtagttgcagcaactttattctttaaaaatattctgcattttattttaagattcttgtagtacaggcgctaagaccggacagattgcaaagtgccatggctctttttgcatgtaaaactctgggtaagtgtgatgcttttcaagaactagaccactggcctgaattattt

SEQ ID NO: 19622 - DNA, 364 bp, Homo sapiens
ggatctccaatactgtcattcatcattcttgaacaatttaatgctattcgtttagtacaaagtgtccaccagtctcttgctgctctcagcaaagtcatcagaggaactactttactgagttcagaagtacaaaaattggcaagtgctttattaaaccaaaaggtaagcgagtactaactgtatgtatttttatttcattgttataagtgactcctccatcacacatatatttgtcaggaatcatatagttaatagcagaagacccgagtcacactggcttaagccatataaaaattaattgactgatgtaactgaagaatccaatggtatctagcattatgccagcttgatgtaggaacttaaa

SEQ ID NO: 19623 - DNA, 456 bp, Homo sapiens
gcatcctcttgcccacggaggcctcactgcttagctcccagcctcaaggtcagatattcacggagccatgttttcctagtaagaggggcactgcactgagagctgatgcagtttgtgagcccatttctccactagggcctggacgggtaaatcaggctgatgctggtctgccccagacccacagagagagaactggaaataggaagttatgcttgcctggcctaggtgccggttctaactcagcttgaccagaaaggccctgtgttgggagtagcaagcactgtatcagccatcaatcaagtgggtcctggtttcctgggaggccatggtccttgtgtgcctaatccctgtcaagaaccccagagaggaggaaggaagcacccaaagctgatcacctccaacacttaccagggtatggcagtggggtccgggctgagacctgtgtacttggtactc

SEQ ID NO: 19624 - DNA, 473 bp, Homo sapiens
ctagcagtaatatggatccacaccacgccctcactctgtggccctggctaatccagcctgctgcctgcttgtgtaaataaagttctgttggatcctggctgctaccctttggtcatatattgtctgtagccacttttatgttacagtgacagagctgagtagctcagaagcctgacctggcccacaaaactgaaaatacttgtcattgagccccttatagagaaagcctgacacctgctcagggtgctgagaactttgactcctatctttgagatttttaaagttctaagggaaaagtaagtaacttctctattgctgtaattcttcacccacttaggcctcagctcactgggacatttttacccaggatgggaacttttgatgaaggaacaagtcaacagactttccctttgaagggctccttagcttgacttccaaaatagatgcaatgaatgaagaagcaattcacagat

SEQ ID NO: 19625 - DNA, 337 bp, Homo sapiens
taaggtagcgttttccggaggagatgggtgaccgggacccgcgcggggccagtctcggcagcgggacagggtggatcgctggcacccgattctggaaagggtggggtgcaggtcccaacggcccttcgcggccagcgccgcactaaggcgaatcccaagtcagatgcttccagaaagaccccagaaagaaaagcggcccctccctcgccaacatttccggggcaagaggacggtctcgccccgcgtcccggggccctgcactgacctgtgtaacaggacacgctgcactgagtccaggtcctccaggctgcggggggcaggtttggggatgctggac

SEQ ID NO: 19626 - DNA, 314 bp, Homo sapiens
tcctcagggcttctgcaccggctgttcctcctgcctgaaacactcctgggctccattctccaactgaacgacttctgctcctcctcctggtctcattttaaatgtcacttccacaaagcagaagccgtctcatatcgtgcactataaatgaggacttccctttgtattctcacagatcctgctctgtaccttcatggtgctgaacccaacttgtaatcttagttagatttgtgtcattattgatctcatacctccccaccattaacctgtcaggctggtgctgtgtcttatcttatgcacccttgaacctcaac

SEQ ID NO: 19627 - DNA, 288 bp, Homo sapiens
aatggccagaagtgaacctaacaatgaaacctgactctgtagtgaagcctgatgcaggctgcttagacacacgttgcttaattttaatgactcacaatgattctccattatatcccaggaaatgtactgtaaaaatgttttgtaaaagaatgagagccttggtaatgggaacctgcactgttctgcaattaaatcattgccagaaagtgggggctgtagtgtgcttgtttgtttgagagtggtgcaaaggcagtggagtgaatggaagggaagacaagggaagagaaa

SEQ ID NO: 19628 - DNA, 444 bp, Homo sapiens
cagagagcctatgaatggacatgcagtcagggaggtttcacataaccaagattcctatcccagaaaagcagatgtccatagctctgggaatggaatgcgacccttgtggacagcttacaaatgaccttaaatccctcactaacctaccaacactctcactaaacttaataataaatgctggtatatccagtgcattggtagcatcgcaggaccagaaggcagtgacccctctggacccagttttcactatcttgtgtgtgtcttttatttctcaacctgccgatctgcctgggaacaaagaaagagccctgttgcattgcaagctgctggccagatcccgcaatatagtcccagctacttgggatgctgaagcatctgtagagggagagctgccccaaatcataaatcaaaaataaaagccaattacatcaataactaaaaaaa

SEQ ID NO: 19629 - DNA, 575 bp, Homo sapiens
aacctatggtttgaacatctgagtggctccaggcttggaaattatattcacctgtcaccatccatcaatccatccatccatctcacaaatattcacttgttccaggccctgtcctaggccctggggatgtggctggtgaacaagacagaccaaactgtaccctcatggagctgtctgtctggcagggctatggacgtcagacaaaagattacacatgcatggctaatgcccttttaaaatcaaaggccctgcatcaggcactgcaacaccaggcttagaatacccctgtcctctggcttgctctgtgacctaagtgagtcctttctcctccctggccctgtaaggggtggcccagataggttttgtgtttaagggaaataccttctgaataaagggaggaaagaccattctatccattgtggaagcgcgtgccaccacacggggtgctgttcctgcgggactcctttaaggatgcagtcatcctcttggtggtttttcaagatgtcctagccctggctctgaaaggaggtgtcccgatttggggacaggagttccagagttactctgagcagagc

SEQ ID NO: 19630 - DNA, 365 bp, Homo sapiens
gtgctctggattcagttcttctgtcaggaaggattcactctccaccttgcaccccgtagctttggtaacaggctgtggaagaaagaataattgctggagggctttctgttctctgctagataggagtgtacctcaaaatgagacccagtagcatgcctgtgtagtgggtgtgatgtgaaaatggacacagaatcactgttcttcagtacttcattctgactcgtggatttgaggcctcccctgaagtttgccctgactttttcatagctgtgattctgtcaaatagagccaggataggaattctgtatcctcaaaaggtagttgttttactcccccaagttgctgaaccagtaagttgggcatct

SEQ ID NO: 19631 - DNA, 1759 bp, Homo sapiens
taacccctcctctccccctcagcactagccaaatccacaattattagtaggattagtattttgccattcaaacactctccaggcttaataaccaagcactacttctcaacttatgtttcacctttaaggaagattccacttcctcgcggtctaggctgccaccaaagttgccacttttctgagaaaaaaaagacatccatactccatcccaactccacctccctcctccctccctccccaccccaaagaccgagattctggggatgtcaaggctaaaagtcccgtttgtctctgatacttctcctcagttcttgcctctgctttgtttgctctgcaagtgtttcacaactacgagaggaccaaaataaagggggtggggagcagcttttcgctttcctctagattttgggtcggtcttgtgtttttcgggggtgtgtttaaggcttctccgtgcactgtttgcagaggctggaggagacgctgttaaacagggcgcacttctccgggcaggaggcagccgggggcagtccggcgctgaacgggtagccggctgcctgctcgtaggcgccgagcgccgggtgcagggcagcagctgctgccgctgcagccgccgagctgggcagggaggcagccgagatggcctggccctggttgaggtaggcgactaggcgccgcatctcctccagggcctgcgcctgcatgaggatgtagttcttggcgagcagcagcgtggcgatcttggagagctttcgcaccgaggggctgtgcgcgtaggggatcaccgcgcgcagctcgtccagcgcgtcgttcaggtcgtgcatccgccggcgctctcgggcattgatgttaagccgcagcgccttttgctctttggatttcttgctgctgctgctgctgctgctgctgctgccgccgctgccgctaccgctaccgccaccgccgccactgctaccgctgctgctacccccgccgccgccgccgcccaggccccccggggggacgctggcgccgccgtggaggtgggcattggagcagccctcggctgccttcgcgccaccacctcccgctcccggggaggcccgcgggtcggctactccggcccgcagcacgagctcgcagcgaccgtcgctgtcgtcgtcggggctctgctcgccgccgctgctctcggccaccgagccccggctcgcgctttcgccgtacttgaggcaaagggcggccccggccggcaggctgcttaggctagggtcgcccccaacgccggctgaacctactagcagcccggggacacccaccccgccgccgccgccgccgccacttcccgcgctgccgccgccgcctcctccaggcggcggcaacagcagccctgccccctcggggtcagccggctcgaagcagcccaggggcgacgaggaggaggacgccgggcgttcccgaggcggcggcgccagggacaggtccatgcccgggggcgtggagcggaaagccgcttccaagcgcttggaggtggaggcgctcaggctcttgtgcaggaagaggtcgtcctcgccggcggccgctgcaccgaggtgcatcccgcgctccatggtcccgcgccggcgcgcagcccgggccgccgcgcccgctgccgccgccgccgcctcggccccggagtcaggcggccccacagacgcgcgcgagctgggctccggagctggtgcgcgcgtcggtcctggtgctgccgggagccctctccccttctttctttttctttttcgccttc

SEQ ID NO: 19632 - DNA, 610 bp, Homo sapiens
atggcttcaataacagaactttattttctcacagtcctagaggctggaagatcgtctgggacaagtccaggtgctggcagggttgatttctcctgaggcctctctctgtggcttgcaaggtggctgtgtcttgacatggcctcttctctgtgtgtccctcccccttcttataaggatgtcagtcagattggattagggcccaccctaacggcagcattttaacattcacttatttaaagaccttatctctaagaacattacattctgaggacctgagactttcagtgtataaatttgggaggacacaatttagcctataatagtgctataaagagaagttcaaaaatgaagatggagattttattttttaagcaaaaaaataagtttgcttttagagtgttaaattgggaatgtacactagatagttgatgttgtcactttggatttggaagagaacacaaggttggttgcttgatttggaaagcatttgcttagaggtagtatattaaaattagagcaacataaggaaattgatttttctccacatttctgggacaagaggaaaaagtagtataagtaatcgtaaaaaattcttagaaagtatgaagaa

SEQ ID NO: 19633 - DNA, 543 bp, Homo sapiens
gtgtttgggtatgatatatttgcctgtgatttctcattctcagagcattcccataaataatgccacaaagtagagtttgatttttttttttttgagacggagtttcgctcttgttgcccaagctggagtgcaatggcgcgatctcagctcactgcaacctccgcctcccaggttcaagcgattcttctgcctcagcctcccaagtagctgggattacaggcatgcgtcaccacacccggctgtttttttttttcgcatttttaatagaaacggggtttcaccgtgttagccaggctggtctcgaactcctgaccttaggtgaactgcccgcctcagcctcccaaagtgctgggattacaggtgtgagccaccgcgccctgcctagagtttgattctcttaaaccgttctactaaaatactatcagtttaaactaccatctacagaaataaaaaacataaaccactaaaagattaaagcatttaggagtttatatgcaaagaagtcttgcaagggagtacaagctttaggaggacaggcttatc

SEQ ID NO: 19634 - DNA, 327 bp, Homo sapiens
aaaatagtaaaagattcattggaagagtgaaatctcttttaggttgtaggagatgtctcttcactcatctgatatgatacagttttaaagtgataattgagacttttttatggagtgcagttaagaaatgtcattactgtttattacagaaaatgaaataaattggtagtgcgggtaagagaactcatattgtagagaattacaactctttgggaaatacgaggtgagcatcttctttgggcacgagaattttttttcaaataccttccaattagcacaagccttgtgctcagtatttcctccactccccattcaatgacggtttat

SEQ ID NO: 19635 - DNA, 2056 bp, Homo sapiens
agatagggaaggagggcgggtcggggaggagggatgcggttcggcggaggcggccgccacagggacttgccgccatcacccctgctgccaccaccgcagcctcgggctcccagggcggacacggccaccgcctcagcgggagaggagtctccaccaggactgaccgctgccgcccagcacgtccaggtaaggtactcaactgtgtggggtactacataaatcctgaaagactacaataaagtggtgatgtctcgggaacccaccccacctctacctggagatatgtctactggtcccatagcagaaagctggtgttacacacaggttaaagtagtaaaattttcctatatgtggaccattaataacttcagtttttgtcgagaggaaatgggtgaagtgttaaaaagttcaacattttcatctggcccaagtgacaaaatgaaatggtgcctgagggtaaacccaaagggattagatgatgaaagtaaagactacttgtccttatatttgcttttagtcagctgccccaaaagtgaagttcgagcaaaattcaaattttcccttctgaatgctaaaagggaagaaacaaaagcaatggaaagccaaagagcatatcgatttgtgcaagggaaggactggggttttaaaaaattcattagaagggactttttgcttgatgaagctaatggtcttttaccagatgacaagcttacattattttgtgaggtgagtgtggtccaagattcagtaaacatatcaggacatactaatacaaatactttgaaggtgcctgagtgtcgtctagcagaagatttaggtaatctctgggaaaacacaagatttacagactgcagttttttcgtgagaggacaagaatttaaagctcataaatctgtgcttgcagctcgatctccagtttttaacgccatgtttgaacatgaaatggaagaaagcaaaaagaatcgagtggaaataaatgatttagaccctgaagtttttaaagaaatgatgagattcatttacacagggagagcaccaaaccttgacaaaatggctgacaacttgttggcagctgcagacaaatatgcactggaacggctgaaggtcatgtgcgaagaagctttgtgtagtaacctctcagtagagaatgttgcagatacccttgtccttgcagatttgcacagtgcagaacagttgaaagcacaagccatagactttattaataggtgcagtgtacttcgacaacttgggtgtaaagatgggaaaaactggaacagcaaccaagcaaccgacataatggaaagtgaacgggatcgccaacattttgataaagaagttatgaaagcctatattgaagaccttaaagaaagagaatctgttcccagctataccaccaaagtgtcttttagccttcaactttgatatccatcagaagactgcaaatctcactattctctggagctatatataaatctttgttatgatcatgtcatataggaagaatggcttgtgcttaaggacaaagtctagaaaccactatcatagttgctaaaaaaaatggttttcaaatgtcaaatacatgagtatctccctccatggactggagaattgaaaaattggtttgtatattgatatttccaggttcatttgcatatacttttttccaaataatgcacatttaatatgttttaaaatgtcttatttttaagaattataactaaaagaccaaatactgaagttaagtgcattgttttcaggaatcaaaagataaaggggccgggtgtggtggctcacacctgtaatcccagcactttgggaggccgaagtgggtggatcacctgaggtccggagttcgaggctggtttggccagcatggcgaaaccccatctctactaaaaatacaaaaaattagctgggcatggtggcagttgcctgtaatcctagctactcaggaggctgaggcaggagaatcgcttgaacctgggaggtggagttgcagtgagccgagatcatgggactgcactccagcctgggtgacagagccagactctgtctc

SEQ ID NO: 19636 - DNA, 547 bp, Homo sapiens
agatagggaaggagggcgggtcggggaggagggatgcggttcggcggaggcggccgccacagggacttgccgccatcacccctgctgccaccaccgcagcctcgggctcccagggcggacacggccaccgcctcagcgggagaggagtctccaccaggactgaccgctgccgcccagcacgtccaggtaaggtactcaactgtgtggggtactacataaatcctgaaagactacaataaagtggtgatgtctcgggaacccaccccacctctacctggagatatgtctactggtcccatagcagaaagctggtgttacacacaggttaaagtagtaaaattttcctatatgtggaccattaataacttcagtttttgtcgagaggaaatgggtgaagtgttaaaaagttcaacattttcatctggcccaagtgacaaaatgaaatgtcagctgccccaaaagtgaagttcgagcaaaattcaaattttcccttctgaatgctaaaagggaagaaacaaaagcaatggcctcgtgccgcctcgtgccg

SEQ ID NO: 19637 - DNA, 349 bp, Homo sapiens
agatagggaaggagggcgggtcggggaggagggatgcggttcggcggaggcggccgccacagggacttgccgccatcacccctgctgccaccaccgcagcctcgggctcccagggcggacacggccaccgcctcagcgggagaggagtctccaccaggactgaccgctgccgcccagcacgtccaggtaaggtactcaactgtgtggggtactacataaatcctgaaagactacaataaagtggtgatgtctcgggaacccaccccacctctacctggagatatgtctactggtcccatagcagaaagctggtgttacacacaggtacatgctcttaaaaatccctcac

SEQ ID NO: 19638 - DNA, 5586 bp, Homo sapiens
agatagggaaggagggcgggtcggggaggagggatgcggttcggcggaggcggccgccacagggacttgccgccatcacccctgctgccaccaccgcagcctcgggctcccagggcggacacggccaccgcctcagcgggagaggagtctccaccaggactgaccgctgccgcccagcacgtccaggtaaggtactcaactgtgtggggtactacataaatcctgaaagactacaataaagtggtgatgtctcgggaacccaccccacctctacctggagatatgtctactggtcccatagcagaaagctggtgttacacacaggttaaagtagtaaaattttcctatatgtggaccattaataacttcagtttttgtcgagaggaaatgggtgaagtgttaaaaagttcaacattttcatctggcccaagtgacaaaatgaaatggtgcctgagggtaaacccaaagggattagatgatgaaagtaaagactacttgtccttatatttgcttttagtcagctgccccaaaagtgaagttcgagcaaaattcaaattttcccttctgaatgctaaaagggaagaaacaaaagcaatggaaagccaaagagcatatcgatttgtgcaagggaaggactggggttttaaaaaattcattagaagggactttttgcttgatgaagctaatggtcttttaccagatgacaagcttacattattttgtgaggtgagtgtggtccaagattcagtaaacatatcaggacatactaatacaaatactttgaaggtgcctgagtgtcgtctagcagaagatttaggtaatctctgggaaaacacaagatttacagactgcagttttttcgtgagaggacaagaatttaaagctcataaatctgtgcttgcagctcgatctccagtttttaacgccatgtttgaacatgaaatggaagaaagcaaaaagaatcgagtggaaataaatgatttagaccctgaagtttttaaagaaatgatgagattcatttacacagggagagcaccaaaccttgacaaaatggctgacaacttgttggcagctgcagacaaatatgcactggaacggctgaaggtcatgtgcgaagaagctttgtgtagtaacctctcagtagagaatgttgcagatacccttgtccttgcagatttgcacagtgcagaacagttgaaagcacaagccatagactttattaataggtgcagtgtacttcgacaacttgggtgtaaagatgggaaaaactggaacagcaaccaagcaaccgacataatggaaacatcagggtggaagtccatgattcagtctcaccctcatttagtagcagaagcctttcgagcactagcatctgcacagtgtccacagtttggcattccacgcaaacggctaaaacagtcctgaaatcttccatgaacagttgaaaaatggaattgactttcactcctccaggtccagaaggattctaatacacaaaccataagcaagagttgtttctgttattttgtccacagaacagaagctgaaaaagcatattgcttgcatttcaggtggataatttatggtttattcttcagctttaaattagactgattaattcacttcaaggccttaaattatcttcaatgacttctcttgttcatataatactttaatttttttttattgtgccttgtcattttgaccaaggctatgcaggattgcactagctccataatgcagtaatattgataactgaagatactaagtttcaaaaggatcttccattattttgcaaaaagaaaaatgaattttatagggtttgtcctatgctatctcaaagtttaagttctctttaaaagcacttgtattggagattaccagtaatatctccaatctaagttctataaatatgggagaaccctcttaccttcaaggtaagttatggcaatacactgcttcaattctaatttatttttcatttcagggggcaaatatgcaatgagttggcctagatttttagtgacatttatgatgtttgtcttgtatgttaactgtccaacaaactgtgggtttattctaagtttacaattattgagaactgattgaggttaagatttcatgaagaaagcatgtattgtgtggaagtaattttttttaatttatactgacctacatttatacgaagaattctgtacatgttaaaagtaaggatgaccaaatgcaaatttaatgagtgggccaattaagaaagatacatatgcacttttactgtgtaacttttgtatgctgaatggtacatatatttttttgcttttgagggaattaataaggtataattaattgtgtcttaacttttcaaagaaatttttagatggaggcaactgggatgtttgtgataatagatgagaaagacatccttgattgtagttaaattggtttggattacagatattcattattgaattgactcctattttctcacactttggaaaagacacctgaacaataaatgaatcctggatagtctactctccttcaaacaattaactgatacttgcctttgggagatgcatacaaaaggagagaacccttagactatgtcaggtcacactaggaacctcccctcactccccgtttttcttcattgtgtttcagttactgtactaacattgtggatgatactgaaattctgcataatgtgaacaggataaactatttataaactgcttttcatgggccagttctttattataaatgaattttagctttaaatgcatatacacgttcagtgtttgatagttgtgttcttaagggaggtttgttctggtgcattgtcctggagaagcagaagcagtcagtgttggggtaccacatctgacttactgtggtggtgaccagtgtgcttcttaagggcaagatttatatttgaccacaagggaaaaagtgtgtcactggaaaaaaacgcatatacctatgtttgcaaacataactattcttcagattaaaatttgtataatttgtttatttaatgtttgaattcaggacaaaagaaaaaatgaagcttgaggtgttttcaaatagaccttatttttgctatctctttgttaggtgttaactgaagcaattcgaatatgtccagattcatttggattcatatttacattgaaaaaactcaactaagcatttgttatccacaacaacctagagtttaaaaagatcgtattttcacctgtcttcattactttctatgtagtttcattctttgtcgtggtaacttaaatttgaaattggaagaatctcttgggatagaagaaagattcttacctggtgatggaacttcatacttcatcctgtgtaagagtattatgggaagtagaaattcacttccttaaatccatcgtaagattgagcctcaagtttgcaatatacaattttaaaaatacacatacatacatacatatgtatacatttccagttttaagattttgcgagggtcttataagaaaacaaaaattccctcaggctatagaattatgttgtcatatatcagaaaagtactgatgtatccatttatatccaatgcgcaccacaccggcacattgtgatttaattcaccgcttgaatctatatttctaaccacagtgacttcagtaaaaataccgtataatgaacatttcagcttcttcttacttactcgagagtttattgcaaatcttaaggattttattataaagattttttttttagtttggtagcacattttgtaccaaaaatgtcaaacactgtgctgtaagaatatccatgtttgtagaaatgtccacttttcagataatataatgcctaccattatactaacagaatcatatggtagttgatttatttttttatttattatgtatatttttggtattgtgggttcttgaggcaatgataaaaacacttaatgtattctgacatgagtgctctaatagcctccttctcctcatttttaaactgcatacattactttcaaaataggtatagatattctgtcccgccttttgagctattagcctgttcctgtttccctttgtcacctaagcaaggctttttctgagaaggtagtgaatggtttcaaatgttgcatactataagaataatcattgggtaactgttgtttagaccaacacttagaaatactatatttgtgccttttcatttttaattttaatgtgtgttgatatttggagcacaaataatgaaggtgccataatatggcttgccaatgttacctccttgaatagtcatgtgtcattgtcttgaattggtaattggagaaccttgcatgaaatatgtgatcgtgtgtgtgtgtgtgtatgcgcgtgtgtgtctgtgtgtttgtgtacatacctgtatttgcttggggcttgtgtgtggtatgttacaaagagtgaatttctggaaatagaaatcagttaaatgttgaaagttcaggttagcagaaatatttcatttaaatatgctttactttggaggacaattgattaacagaggaaatgataattttcaaaaatgtgatcaatttactgcatgatgaaatgtgaaaacagtgcctttttaggacatcaattataataaaattgttttaaaatattaacaaagatctcaaaaagttgtcatgaacattattcatttatttttaaactggatctaaataagagcttagatggccaaaattagaattaataatatacccatttaaattttgttcataaatttaaaatcttaatcagaattctttataaaatgtgggtcatagatatgacccagtgttactaaaatagaacagggattgtgaaaatccagctcaacatacttaagtatacttggcttagagccaagtatacttgaagaggtgaattattctgacttggacatgcatgctctttgatggataaaataaaaatattcaatttattcttacaaaagaaggtgggtgggtgagtgggttcgttttagtgttctcagattataaagacagctataaagacagcactttccgcacacaaagtgtattttacaaaccttttttatacaaattaatgagctctactttatttaagtgttcatggaatgatgtaaattttaggtccagttgaacaaatattgagtgcctatcatatgcaagactaactccttactaggaatgaaatcacacagtgtcttctgtttgcagtatgtgaactttatgtttgaaaagaaattattatatttaaatttttttgttgtcagagtttatcattgtatactgtaacccagtaaattttgcattcagttttaaaaaatgaagatgtaacttacctgagtctcatttttgaaaatgaaattctgcaaaaattatttaaaaattagttcttggggaaattgattttcaagattcaagtgtataaaaacttatattgaacttttcagcctcgtttttaattagctgatgttaatgataagatacataatacatgtatcttgttgctgaaaatattttttgcatttcaacacattgagttaaaataaagttgttactacttattcaagattaaaaaaaaa

SEQ ID NO: 19639 - DNA, 4046 bp, Homo sapiens
agatagggaaggagggcgggtcggggaggagggatgcggttcggcggaggcggccgccacagggacttgccgccatcacccctgctgccaccaccgcagcctcgggctcccagggcggacacggccaccgcctcagcgggagaggagtctccaccaggactgaccgctgccgcccagcacgtccaggtaaggtactcaactgtgtggggtactacataaatcctgaaagactacaataaagtggtgatgtctcgggaacccaccccacctctacctggagatatgtctactggtcccatagcagaaagctggtgttacacacaggttaaagtagtaaaattttcctatatgtggaccattaataacttcagtttttgtcgagaggaaatgggtgaagtgttaaaaagttcaacattttcatctggcccaagtgacaaaatgaaatggtgcctgagggtaaacccaaagggattagatgatgaaagtaaagactacttgtccttatatttgcttttagtcagctgccccaaaagtgaagttcgagcaaaattcaaattttcccttctgaatgctaaaagggaagaaacaaaagcaatggaaagccaaagagcatatcgatttgtgcaagggaaggactggggttttaaaaaattcattagaagggactttttgcttgatgaagctaatggtcttttaccagatgacaagcttacattattttgtgaggtgagtgtggtccaagattcagtaaacatatcaggacatactaatacaaatactttgaaggtgcctgagtgtcgtctagcagaagatttaggtaatctctgggaaaacacaagatttacagactgcagttttttcgtgagaggacaagaatttaaagctcataaatctgtgcttgcagctcgatctccagtttttaacgccatgtttgaacatgaaatggaagaaagcaaaaagaatcgagtggaaataaatgatttagaccctgaagtttttaaagaaatgatgagattcatttacacagggagagcaccaaaccttgacaaaatggctgacaacttgttggcagctgcagacaaatatgcactggaacggctgaaggtcatgtgcgaagaagctttgtgtagtaacctctcagtagagaatgttgcagatacccttgtccttgcagatttgcacagtgcagaacagttgaaagcacaagccatagactttattaataggtgcagtgtacttcgacaacttgggtgtaaagatgggaaaaactggaacagcaaccaagcaaccgacataatggaaacatcagggtggaagtccatgattcagtctcaccctcatttagtagcagaagcctttcgagcactagcatctgcacagtgtccacagtttggcattccacgcaaacggctaaaacagtcctgaaatcttccatgaacagttgaaaaatggaattgactttcactcctccaggtccagaaggattctaatacacaaaccataagcaagagttgtttctgttattttgtccacagaacagaagctgaaaaagcatattgcttgcatttcaggtgttaactgaagcaattcgaatatgtccagattcatttggattcatatttacattgaaaaaactcaactaagcatttgttatccacaacaacctagagtttaaaaagatcgtattttcacctgtcttcattactttctatgtagtttcattctttgtcgtggtaacttaaatttgaaattggaagaatctcttgggatagaagaaagattcttacctggtgatggaacttcatacttcatcctgtgtaagagtattatgggaagtagaaattcacttccttaaatccatcgtaagattgagcctcaagtttgcaatatacaattttaaaaatacacatacatacatacatatgtatacatttccagttttaagattttgcgagggtcttataagaaaacaaaaattccctcaggctatagaattatgttgtcatatatcagaaaagtactgatgtatccatttatatccaatgcgcaccacaccggcacattgtgatttaattcaccgcttgaatctatatttctaaccacagtgacttcagtaaaaataccgtataatgaacatttcagcttcttcttacttactcgagagtttattgcaaatcttaaggattttattataaagattttttttttagtttggtagcacattttgtaccaaaaatgtcaaacactgtgctgtaagaatatccatgtttgtagaaatgtccacttttcagataatataatgcctaccattatactaacagaatcatatggtagttgatttatttttttatttattatgtatatttttggtattgtgggttcttgaggcaatgataaaaacacttaatgtattctgacatgagtgctctaatagcctccttctcctcatttttaaactgcatacattactttcaaaataggtatagatattctgtcccgccttttgagctattagcctgttcctgtttccctttgtcacctaagcaaggctttttctgagaaggtagtgaatggtttcaaatgttgcatactataagaataatcattgggtaactgttgtttagaccaacacttagaaatactatatttgtgccttttcatttttaattttaatgtgtgttgatatttggagcacaaataatgaaggtgccataatatggcttgccaatgttacctccttgaatagtcatgtgtcattgtcttgaattggtaattggagaaccttgcatgaaatatgtgatcgtgtgtgtgtgtgtgtatgcgcgtgtgtgtctgtgtgtttgtgtacatacctgtatttgcttggggcttgtgtgtggtatgttacaaagagtgaatttctggaaatagaaatcagttaaatgttgaaagttcaggttagcagaaatatttcatttaaatatgctttactttggaggacaattgattaacagaggaaatgataattttcaaaaatgtgatcaatttactgcatgatgaaatgtgaaaacagtgcctttttaggacatcaattataataaaattgttttaaaatattaacaaagatctcaaaaagttgtcatgaacattattcatttatttttaaactggatctaaataagagcttagatggccaaaattagaattaataatatacccatttaaattttgttcataaatttaaaatcttaatcagaattctttataaaatgtgggtcatagatatgacccagtgttactaaaatagaacagggattgtgaaaatccagctcaacatacttaagtatacttggcttagagccaagtatacttgaagaggtgaattattctgacttggacatgcatgctctttgatggataaaataaaaatattcaatttattcttacaaaagaaggtgggtgggtgagtgggttcgttttagtgttctcagattataaagacagctataaagacagcactttccgcacacaaagtgtattttacaaaccttttttatacaaattaatgagctctactttatttaagtgttcatggaatgatgtaaattttaggtccagttgaacaaatattgagtgcctatcatatgcaagactaactccttactaggaatgaaatcacacagtgtcttctgtttgcagtatgtgaactttatgtttgaaaagaaattattatatttaaatttttttgttgtcagagtttatcattgtatactgtaacccagtaaattttgcattcagttttaaaaaatgaagatgtaacttacctgagtctcatttttgaaaatgaaattctgcaaaaattatttaaaaattagttcttggggaaattgattttcaagattcaagtgtataaaaacttatattgaacttttcagcctcgtttttaattagctgatgttaatgataagatacataatacatgtatcttgttgctgaaaatattttttgcatttcaacacattgagttaaaataaagttgttactacttattcaagattaaaaaaaaa

SEQ ID NO: 19640 - DNA, 4567 bp, Homo sapiens
gtatcatgtattcaggaacttagttggagtaaatgtttaatggttatgttttcattttggatagtatgcactggaacggctgaaggtcatgtgcgaagaagctttgtgtagtaacctctcagtagagaatgttgcagatacccttgtccttgcagatttgcacagtgcagaacagttgaaagcacaagccatagactttattaataggtgcagtgtacttcgacaacttgggtgtaaagatgggaaaaactggaacagcaaccaagcaaccgacataatggaaacatcagggtggaagtccatgattcagtctcaccctcatttagtagcagaagcctttcgagcactagcatctgcacagtgtccacagtttggcattccacgcaaacggctaaaacagtcctgaaatcttccatgaacagttgaaaaatggaattgactttcactcctccaggtccagaaggattctaatacacaaaccataagcaagagttgtttctgttattttgtccacagaacagaagctgaaaaagcatattgcttgcatttcaggtggataatttatggtttattcttcagctttaaattagactgattaattcacttcaaggccttaaattatcttcaatgacttctcttgttcatataatactttaatttttttttattgtgccttgtcattttgaccaaggctatgcaggattgcactagctccataatgcagtaatattgataactgaagatactaagtttcaaaaggatcttccattattttgcaaaaagaaaaatgaattttatagggtttgtcctatgctatctcaaagtttaagttctctttaaaagcacttgtattggagattaccagtaatatctccaatctaagttctataaatatgggagaaccctcttaccttcaaggtaagttatggcaatacactgcttcaattctaatttatttttcatttcagggggcaaatatgcaatgagttggcctagatttttagtgacatttatgatgtttgtcttgtatgttaactgtccaacaaactgtgggtttattctaagtttacaattattgagaactgattgaggttaagatttcatgaagaaagcatgtattgtgtggaagtaattttttttaatttatactgacctacatttatacgaagaattctgtacatgttaaaagtaaggatgaccaaatgcaaatttaatgagtgggccaattaagaaagatacatatgcacttttactgtgtaacttttgtatgctgaatggtacatatatttttttgcttttgagggaattaataaggtataattaattgtgtcttaacttttcaaagaaatttttagatggaggcaactgggatgtttgtgataatagatgagaaagacatccttgattgtagttaaattggtttggattacagatattcattattgaattgactcctattttctcacactttggaaaagacacctgaacaataaatgaatcctggatagtctactctccttcaaacaattaactgatacttgcctttgggagatgcatacaaaaggagagaacccttagactatgtcaggtcacactaggaacctcccctcactccccgtttttcttcattgtgtttcagttactgtactaacattgtggatgatactgaaattctgcataatgtgaacaggataaactatttataaactgcttttcatgggccagttctttattataaatgaattttagctttaaatgcatatacacgttcagtgtttgatagttgtgttcttaagggaggtttgttctggtgcattgtcctggagaagcagaagcagtcagtgttggggtaccacatctgacttactgtggtggtgaccagtgtgcttcttaagggcaagatttatatttgaccacaagggaaaaagtgtgtcactggaaaaaaacgcatatacctatgtttgcaaacataactattcttcagattaaaatttgtataatttgtttatttaatgtttgaattcaggacaaaagaaaaaatgaagcttgaggtgttttcaaatagaccttatttttgctatctctttgttaggtgttaactgaagcaattcgaatatgtccagattcatttggattcatatttacattgaaaaaactcaactaagcatttgttatccacaacaacctagagtttaaaaagatcgtattttcacctgtcttcattactttctatgtagtttcattctttgtcgtggtaacttaaatttgaaattggaagaatctcttgggatagaagaaagattcttacctggtgatggaacttcatacttcatcctgtgtaagagtattatgggaagtagaaattcacttccttaaatccatcgtaagattgagcctcaagtttgcaatatacaattttaaaaatacacatacatacatacatatgtatacatttccagttttaagattttgcgagggtcttataagaaaacaaaaattccctcaggctatagaattatgttgtcatatatcagaaaagtactgatgtatccatttatatccaatgcgcaccacaccggcacattgtgatttaattcaccgcttgaatctatatttctaaccacagtgacttcagtaaaaataccgtataatgaacatttcagcttcttcttacttactcgagagtttattgcaaatcttaaggattttattataaagattttttttttagtttggtagcacattttgtaccaaaaatgtcaaacactgtgctgtaagaatatccatgtttgtagaaatgtccacttttcagataatataatgcctaccattatactaacagaatcatatggtagttgatttatttttttatttattatgtatatttttggtattgtgggttcttgaggcaatgataaaaacacttaatgtattctgacatgagtgctctaatagcctccttctcctcatttttaaactgcatacattactttcaaaataggtatagatattctgtcccgccttttgagctattagcctgttcctgtttccctttgtcacctaagcaaggctttttctgagaaggtagtgaatggtttcaaatgttgcatactataagaataatcattgggtaactgttgtttagaccaacacttagaaatactatatttgtgccttttcatttttaattttaatgtgtgttgatatttggagcacaaataatgaaggtgccataatatggcttgccaatgttacctccttgaatagtcatgtgtcattgtcttgaattggtaattggagaaccttgcatgaaatatgtgatcgtgtgtgtgtgtgtgtatgcgcgtgtgtgtctgtgtgtttgtgtacatacctgtatttgcttggggcttgtgtgtggtatgttacaaagagtgaatttctggaaatagaaatcagttaaatgttgaaagttcaggttagcagaaatatttcatttaaatatgctttactttggaggacaattgattaacagaggaaatgataattttcaaaaatgtgatcaatttactgcatgatgaaatgtgaaaacagtgcctttttaggacatcaattataataaaattgttttaaaatattaacaaagatctcaaaaagttgtcatgaacattattcatttatttttaaactggatctaaataagagcttagatggccaaaattagaattaataatatacccatttaaattttgttcataaatttaaaatcttaatcagaattctttataaaatgtgggtcatagatatgacccagtgttactaaaatagaacagggattgtgaaaatccagctcaacatacttaagtatacttggcttagagccaagtatacttgaagaggtgaattattctgacttggacatgcatgctctttgatggataaaataaaaatattcaatttattcttacaaaagaaggtgggtgggtgagtgggttcgttttagtgttctcagattataaagacagctataaagacagcactttccgcacacaaagtgtattttacaaaccttttttatacaaattaatgagctctactttatttaagtgttcatggaatgatgtaaattttaggtccagttgaacaaatattgagtgcctatcatatgcaagactaactccttactaggaatgaaatcacacagtgtcttctgtttgcagtatgtgaactttatgtttgaaaagaaattattatatttaaatttttttgttgtcagagtttatcattgtatactgtaacccagtaaattttgcattcagttttaaaaaatgaagatgtaacttacctgagtctcatttttgaaaatgaaattctgcaaaaattatttaaaaattagttcttggggaaattgattttcaagattcaagtgtataaaaacttatattgaacttttcagcctcgtttttaattagctgatgttaatgataagatacataatacatgtatcttgttgctgaaaatattttttgcatttcaacacattgagttaaaataaagttgttactacttattcaagattaaaaaaaaa

SEQ ID NO: 19641 - DNA, 1717 bp, Homo sapiens
  misc_feature (1647)..(1647): n is a, c, g, or t
  misc_feature (1697)..(1697): n is a, c, g, or t
agatagggaaggagggcgggtcggggaggagggatgcggttcggcggaggcggccgccacagggacttgccgccatcacccctgctgccaccaccgcagcctcgggctcccagggcggacacggccaccgcctcagcgggagaggagtctccaccaggactgaccgctgccgcccagcacgtccaggtaaggtactcaactgtgtggggtactacataaatcctgaaagactacaataaagtggtgatgtctcgggaacccaccccacctctacctggagatatgtctactggtcccatagcagaaagctggtgttacacacaggttaaagtagtaaaattttcctatatgtggaccattaataacttcagtttttgtcgagaggaaatgggtgaagtgttaaaaagttcaacattttcatctggcccaagtgacaaaatgaaatggtgcctgagggtaaacccaaagggattagatgatgaaagtaaagactacttgtccttatatttgcttttagtcagctgccccaaaagtgaagttcgagcaaaattcaaattttcccttctgaatgctaaaagggaagaaacaaaagcaatggaaagccaaagagcatatcgatttgtgcaagggaaggactggggttttaaaaaattcattagaagggactttttgcttgatgaagctaatggtcttttaccagatgacaagcttacattattttgtgaggtgagtgtggtccaagattcagtaaacatatcaggacatactaatacaaatactttgaaggtgcctgagtgtcgtctagcagaagatttaggtaatctctgggaaaacacaagatttacagactgcagttttttcgtgagaggacaagaatttaaagctcataaatctgtgcttgcagctcgatctccagtttttaacgccatgtttgaacatgaaatggaagaaagcaaaaagaatcgagtggaaataaatgatttagaccctgaagtttttaaagaaatgatgagattcatttacacagggagagcaccaaaccttgacaaaatggctgacaacttgttggcagctgcagacaaatatgcactggaacggctgaaggtcatgtgcgaagaagctttgtgtagtaacctctcagtagagaatgttgcagatacccttgtccttgcagatttgcacagtgcagaacagttgaaagcacaagccatagactttattaataggtgcagtgtacttcgacaacttgggtgtaaagatgggaaaaactggaacagcaaccaagcaaccgacataatggaaacatcagggtggaagtccatgattcagtctcaccctcatttagtagcagaagcctttcgagcactagcatctgcacagtgtccacagtttggcattccacgcaaacggctaaaacagtcctgaaatcttccatgaacagttgaaaaatggaattgactttcactcctccaggtccagaaggattctaatacacaaaccataagcaagagttgtttctgttattttgtccacagaacagaagctgaaaaagcatattgcttgcatttcaggtggataatttatggtttattcttcagctttaaattagactgattaattcacttcaaggccttaatacctccagantcccctgttccaaatacttatttttttatggcctgtctttgacaggttcngatgctaccctatgcttttg

SEQ ID NO: 19642 - DNA, 541 bp, Homo sapiens
gatttaggtaatctctgggaaaacacaagatttacagactgcagttttttcgtgagaggacaagaatttaaagctcataaatctgtgcttgcaggtactttctagttatggggtaatatagtacatttaaaaaaatgcatttatgcataaaataatgatacataatcttgttacagctcgatctccagtttttaacgccatgtttgaacatgaaatggaagaaagcaaaaaggtaaacatggcttaaaggctaatattgaatttatataaacgtaaagtagttgggtgtatgttttaaaagtaatagtacaatgttctcattgtcatactgtgataagcagggaaaatttttacaaacaggaaaaaaatgtgttctataatagaacaatagatgtagctcagtgtggatgtgcagtcaatattccagagaacagctattttttatgcccttctggtaggtaaattggatagttgttatccaaaaggatagttatccaaaggactattctggtccatagctatttgagaagtctctgttcaa

SEQ ID NO: 19643 - DNA, 1617 bp, Homo sapiens
  misc_feature (69)..(69): n is a, c, g, or t
gatctcagagggaaactgcccagagaggattgtgaccatcacagcccccacagacgccatcttcaaggnctttgccatgatcgcatacaagtttgaggaggatatcatcaactccatgagcaacagccctgccaccagcaagcccccagtgacgctgaggctggtggtgcctgccagccagtgcgggtccctgatcggcaaaggaggctccaagatcaaggagatcagggagtccacaggtgcccaggtgcaggtggctggggacatgctgcccaactccacggagcgagcggtgaccatctcggggaccccagatgccatcatccagtgcgtcaagcagatctgtgtggtcatgctggagtccccaccgaaaggtgccaccattccctaccgcccaaagcccgcctccacccctgtcatttttgcaggtggtcaggcctacacaatccaggacagtatgccatccctcacccggatttgaccaagctccaccagttggccatgcagcaaaccccctttcctcccctcggacagaccaaccccgctttccccggagaaaagctgcctttacactcctccgaagaagctcaaaatctgatgggccagtcatcaggtctggacgccagcccaccggccagcactcatgagctcaccattcccaatgatctaataggctgcataattggacgccaagggaccaaaatcaatgaaattcgacagatgtctggagctcagatcaaaatcgccaacgccacggaagggtcctcagagcgtcagatcaccatcacggggaccccggccaacatcagccttgcccagtatctcatcaacgccaggctgacgtccgaggtcaccgggatgggcacgctgtaatcctacccagcacccttcccccgcgtcacccacctgccagagcctaaggcccccggctctcgcactctgtacagcccaccttccctgcctcacagataccaatagagaggttttcttaattaacaaaaggacgtatgccatggagaaacacacccgcgcacacagctgctctctacagaggctgcaggctccgccgagtcccccctcagtgttattttatttatgacttacgctcccgtctgcccatgcaccggcatgcagtggtaattattttagaaatattgttccttggtgtcagcgtagctgtctgtcttaggagctgggtcggcgttccgacagcacttcctgtccgcccttctcctctgccatccagaaccgtccagaactgttgcctgagacccctcctctctcacacagccctgccatgctgactcggtttcccctcagagccattgttgtctgggctcgagtttctgccccaggttgtgtgctggaatcggggggtggctctcctgccacccatggggagcgccaggagaggagggtcatggaggatgttggggctctgaccccaggagtggggtggagggcggagcctgctgggggccctgccttcacagagatgccgcgtgctgggaaggctcttggggtcccctgagcgtcttccagggtggctggagagcacagacgcgccagggagccccctctgtgctcctcagagttcaataaatgtcgtggcccctc

SEQ ID NO: 19644 - DNA, 1563 bp, Homo sapiens
  misc_feature (69)..(69): n is a, c, g, or t
gatctcagagggaaactgcccagagaggattgtgaccatcacagcccccacagacgccatcttcaaggnctttgccatgatcgcatacaagtttgaggaggatatcatcaactccatgagcaacagccctgccaccagcaagcccccagtgacgctgaggctggtggtgcctgccagccagtgcgggtccctgatcggcaaaggaggctccaagatcaaggagatcagggagtccacaggtgcccaggtgcaggtggctggggacatgctgcccaactccacggagcgagcggtgaccatctcggggaccccagatgccatcatccagtgcgtcaagcagatctgtgtggtcatgctggagtccccaccgaaaggtgccaccattccctaccgcccaaagcccgcctccacccctgtcatttttgcaggtggtcaggcctacacaatccaggacagtatgccatccctcacccggatttgaccaagctccaccagttggccatgcagcaaaccccctttcctcccctcggacagaccaaccccgctttccccggagaaaagctgcctttacactcctccgaagaagctcaaaatctgatgggccagtcatcaggtctggacgccagcccaccggccagcactcatgagctcaccattcccaatgatctaataggctgcataattggacgccaagggaccaaaatcaatgaaattcgacagatgtctggagctcagatcaaaatcgccaacgccacggaagggtcctcagagcgtcagatcaccatcacggggaccccggccaacatcagccttgcccagtatctcatcaacgccaggctgacgtccgaggtcaccgggatgggcacgctgtaatcctacccagcacccttcccccgcgtcacccacctgccagagcctaaggcccccggctctcgcactctgtacagcccaccttccctgcctcacagataccaatagagaggttttcttaattaacaggctgcaggctccgccgagtcccccctcagtgttattttatttatgacttacgctcccgtctgcccatgcaccggcatgcagtggtaattattttagaaatattgttccttggtgtcagcgtagctgtctgtcttaggagctgggtcggcgttccgacagcacttcctgtccgcccttctcctctgccatccagaaccgtccagaactgttgcctgagacccctcctctctcacacagccctgccatgctgactcggtttcccctcagagccattgttgtctgggctcgagtttctgccccaggttgtgtgctggaatcggggggtggctctcctgccacccatggggagcgccaggagaggagggtcatggaggatgttggggctctgaccccaggagtggggtggagggcggagcctgctgggggccctgccttcacagagatgccgcgtgctgggaaggctcttggggtcccctgagcgtcttccagggtggctggagagcacagacgcgccagggagccccctctgtgctcctcagagttcaataaatgtcgtggcccctc

SEQ ID NO: 19645 - DNA, 252 bp, Homo sapiens
tgaccaagctccaccagttggccatgcagcaaaccccctttcctcccctcggacagaccaaccccgctttccccggtacgtacccagcccttttctcacctccttctcttctcacctggggactttctctttctgagctgtgttattcggtgcagtgcatagaacaggtgcagttggatttgtgagtgccggtgctgcggcgttcacatgcagcaggcttgctggggctggggccggggacagggtgggggc

SEQ ID NO: 19646 - DNA, 296 bp, Homo sapiens
agtagaggtggggtttcaccatgttggccaggctggtctcgaactcctgatctcaagtgatctgcctgccttggtctcccaaagtgctgggattacaggtgtgaccaccacgccctgccttaagaattgttccaagagaatctggtgccacttgcaggtgcccattgaagtgcaatgggcactgttgatcactgaggaggtagtgggtgctgacccggtgctggggcctgtcccctagtctctgctttgcccttggctagctaggtggtgtgccaagtggggagagaagctacctt

SEQ ID NO: 19647 - DNA, 381 bp, Homo sapiens
catgagccacccgctcctggcctgggattttctttttaagatgaaaaagacttgagcacatccacaggtttgggaaaaagtcagcagagtgggagaagctgaaaattgaggaaagagaggggataattgatggcaggctcagggtatacacctgggaaaggaccaagaatttaaatggaaggattaactttggaacagtgcaggctgcaatacctctttctctgagactgaaaagaaagcgatacaatagatccagaaataaataatttagctagggagtataatagttgagggatttcttacttaatgatttctattatctctgtgaagtaaggtctttactgaaagtgaaggagatgaggattgaatgaaaaacttgaa

SEQ ID NO: 19648 - DNA, 2334 bp, Homo sapiens
tgcctcgccagccgctcgggcagctcccgggccgcggccagccgaggatcagagcgcttgccccgggggtctgtcgcgtcgcaggcgccgccggagccctggccatgaggaccctgtggatggcgctgtgcgcgctgtcgcggctgtggcccggggcccaggccggctgcgccgaggccgggcgctgctgtcccggccgggaccccgcctgcttcgcccgcggctggaggctggacagggtctacgggacgtgtttctgcgaccaagcctgtcgcttcaccggggactgctgcttcgactacgacagggcgtgcccagctcgcccgtgcttcgtgggggaatggagcccctggagtggttgtgcagaccagtgcaagcctacaacccgtgtgcggaggcgctcggtgcagcaggagcctcagaacggcggggcgccctgcccacccctggaagagagagctggctgcctggagtactccaccccgcaggccaggactgcgggcacacctatgttcctgcctttataactacctctgcattcaacaaggagagaacacgacaagctacgtctccacactggtctacacacacagaggatgctggatactgtatggagtttaagacagagtccttgactcctcactgtgctctggaaaactggcccttgactagatggatgcagtatctccgagagggatacacggtgtgtgtggattgtcagcctccagctatgaactctgtgagccttcgttgttctggagatggcctggactccgatggaaatcagactctccattggcaagcaattggtaatcctcggtgtcaaggaacttggaaaaaagttcggcgagtagaccagtgttcttgtccagctgttcacagttttatttttatatagatggtgatataaatatttccaaatgcatttgtaaacattctaaatattctcaagtcatgttcaatgtttcctaaaccttcaattttggccaaagtccccaaacacatcattgccacactctgaagtagagaaagaaaatttaggggccagttctcaaggaacacaggtcctttatttttattttaactaagttgaagacccactcaaaaagctcttgtggttttatgttcttgacctttcaactggagtcctctcattcagcaggtggcccgtgagacacagaatacatgtctgtttgctaaagtaaaattactgtaactcagtccgattattggtgacggaagtgtcatttaaggggatctatgttttgaaccttgcagtctattttataatcttttaaaagtttctcactttaaaacatgtatacaggtatgcacactctacacatatatttccatatatttaatattccataaattctgaaataatttcaagcaaattatcacaaataatttttccacagggcaaattatttaaaattttagtaagcattctgtaatgaaaaaccaagttatactaaaaacattttttgaagaagaaattttttttttgcttaagaagtgaaaggatcaaatgctcattgtaggtcaatgggagttcttttaaatgttataattttcatgaaaagaaatgttgacaccagtgaatgaaacaattgctttcattctgaaaattctaccaccatttgcatctaagattatttccaaggcttaaagcctgaagctgaataaaataatctttcagagtccagcttcaagtttagttgatgtaagctcactatttttttcctaccgcatgcattttctaatgtttggggtggatggtgtgtcggttatggaaggcatagacgtcattacaggtgctacgatctcacacacacacaaggaaatgttagtctccttattttatgattggaaaatcaatgacctagaggcaaaatggcatgtttaaggacctgggatgacaagtcattctgcagtcagccacagagccaaatttggactcctcaaccagaactccatgaaaagcctgactttgccaaacactgtgctggaaaagctaagcccctttcatttgtgaagtaaattttaaattcaagatatttagtttagagaattgagtcttgagatgtaaactacatgagatttctttggtttcaattgaataatattcactaacaaatgatttactaaaatacgtatttcttggtccttatcatgtaatgacagattcacaacagcaataaggatggagatttccccaataattaataacaccgagagtagcaatattttttactgtattttcatttaattgtcaaagttgtttttgtggaaaattaaattcttcagaaattaataataaaatatgtgagt

SEQ ID NO: 19649 - DNA, 4071 bp, Homo sapiens
tgcctcgccagccgctcgggcagctcccgggccgcggccagccgaggatcagagcgcttgccccgggggtctgtcgcgtcgcaggcgccgccggagccctggccatgaggaccctgtggatggcgctgtgcgcgctgtcgcggctgtggcccggggcccaggccggctgcgccgaggccgggcgctgctgtcccggccgggaccccgcctgcttcgcccgcggctggaggctggacagggtctacgggacgtgtttctgcgaccaagcctgtcgcttcaccggggactgctgcttcgactacgacagggcgtgcccagctcgcccgtgcttcgtgggggaatggagcccctggagtggttgtgcagaccagtgcaagcctacaacccgtgtgcggaggcgctcggtgcagcaggagcctcagaacggcggggcgccctgcccacccctggaagagagagctggctgcctggagtactccaccccgcaggccaggactgcgggcacacctatgttcctgcctttataactacctctgcattcaacaaggagagaacacgacaagctacgtctccacactggtctacacacacagaggatgctggatactgtatggagtttaagacagagtccttgactcctcactgtgctctggaaaactggcccttgactagatggatgcagtatctccgagagggatacacggtgtgtgtggattgtcagcctccagctatgaactctgtgagccttcgttgttctggagatggcctggactccgatggaaatcagactctccattggcaagcaattggtaatcctcggtgtcaaggaacttggaaaaaagttcggcgagtagaccagtgttcttgtccagctgttcacagttttatttttatatagatggtgatataaatatttccaaatgcatttgtaaacattctaaatattctcaagtcatgttcaatgtttcctaaaccttcaattttggccaaagtccccaaacacatcattgccacactctgaagtagagaaagaaaatttaggggccagttctcaaggaacacaggtcctttatttttattttaactaagttgaagacccactcaaaaagctcttgtggttttatgttcttgacctttcaactggagtcctctcattcagcaggtggcccgtgagacacagaatacatgtctgtttgctaaagtaaaattactgtaactcagtccgattattggtgacggaagtgtcatttaaggggatctatgttttgaaccttgcagtctattttataatcttttaaaagtttctcactttaaaacatgtatacaggtatgcacactctacacatatatttccatatatttaatattccataaattctgaaataatttcaagcaaattatcacaaataatttttccacagggcaaattatttaaaattttagtaagcattctgtaatgaaaaaccaagttatactaaaaacattttttgaagaagaaattttttttttgcttaagaagtgaaaggatcaaatgctcattgtaggtcaatgggagttcttttaaatgttataattttcatgaaaagaaatgttgacaccagtgaatgaaacaattgctttcattctgaaaattctaccaccatttgcatctaagattatttccaaggcttaaagcctgaagctgaataaaataatctttcagagtccagcttcaagtttagttgatgtaagctcactatttttttcctaccgcatgcattttctaatgtttggggtggatggtgtgtcggttatggaaggcatagacgtcattacaggtgctacgatctcacacacacacaaggaaatgttagtctccttattttatgattggaaaatcaatgacctagaggcaaaatggcatgtttaaggacctgggatgacaagtcattctgcagtcagccacagagccaaatttggactcctcaaccagaactccatgaaaagcctgactttgccaaacactgtgctggaaaagctaagcccctttcatttgtgaagtaaattttaaattcaagatatttagtttagagaattgagtcttgagatgtaaactacatgagatttctttggtttcaattgaataatattcactaacaaatgatttactaaaatacgtatttcttggtccttatcatgtaatgacagattcacaacagcaataaggatggagatttccccaataattaataacaccgagagtagcaatattttttactgtattttcatttaattgtcaaagttgtttttgtggaaaattaaattcttcagaaattaataataaaatatgtgagtctcatcaaggctagcaactttaagtcagtattaacattttcatactgtttctaacatttattaagctagatttttgaagctatgtctgggtaatttccaatgttacttaaaagtttttttttctttgagacagagtctcgctctgttgcccaggctggagtgcagtggccccatctcggctcactgcaagctccgcctcccgggttcacgccattcttctgcctcagcctcccaagtagctgggactacaggcgccgtcatcacgcctggctaattttttgttttttttttttagtagagacagggtttcactgtgttagccagggtggtctcgatctcctgacctcgtgatccacccacctcggcctcccaaggtgctgggattatgggcgtgagccactgcgcctggcctgttacttaaaatttttatactagtaaataaactttttgttcacatttataaaagctctatatttgtttgactagaaaataacccaaattttctggaccagtcagagaatgataaaatttcaccaaaaataaaacaaaaaaatccttcagaactgataggtataggtacaacaactactaatagcaataaagcaatggtgcttttatagttccgatatgtgttataacatttaacataattgaggtgtataaaataaatttttcaccttatgcatttaatttttggtggatgaccagtaattgctttcttattgaagttaaatttttgttatttctattcttgagaaaattttatgggctagaggagttaactgttaaataacagttttgaaaagcttgttattaattttagcaaagcccaagggaaatagttcagaactgaaacatgtagtccaagtgatgaatgaaaaaccaaaagtttttattttcaaatttaaaaatcaaagtatataagacctcttggcactcttttttaataagtaccttagtcttagggccctatccccaggcactctaaaaagatttacgaactctaaaatcccttaatagactgattttcaaaagtgctcatggaaaataattcgaacaaaaataaatacagccaccaggaaagaagggaaaagaagcaagggataatggccatttttgaagagaaaagtgaaaaacaagtgaaggaaaaaaagaatagaaaaaggaataaggtaactataatcacagtattctttttggagttttgctttggtttttattcgagaatgttacaattaagcataaaccgcaacagcaataatttaaagtgtttggttatcatctggcataaaaatttcagttagctatcttttctagatgtgcacaaaattgatgttaataaaactggttcctgccctctaagaatattctagtgaaggttcatacaaacaaccacaagttggcttagaaaacaaacacctgggccttctgaggtccaagcaatcagacaaagagcaccgtgagggaggtcacactctaggtcagggtgaaagacagacagacacacgtttaccctctctccttcctcatatcccactgaagagacacgattcacagaagagaataagtccacagcagatgaaccagaataaaggggccatatcctttaatacggggtacagaagaagctggaatcagagatgagagccattcttggtggggcagtcccaccaagcaccaaaggatgaataaaaagactctcagccctagagacaaatttgtgaaattgaaaatgaa

SEQ ID NO: 19650 - DNA, 578 bp, Homo sapiens
cgccacctgatcatgcttccaaccctgcctgtccccatatggtggcatgtcacccccgccttcactatactttcaaagcttcccactgtcttcagtatgcaatttcttcacgtggcttagaggggtgtcatgatcagaccccttctccagccccatggaccttctatcagccccaagggtgccatgcatccctggctttcttattttcattctcagtccaccttcgacccctggtgcagacacataacctaggcctggccaatcacagcatttcattcccagactgcagtgttggttcaaagatggacgtttgacccaatctaggtcaatgaaactcaactggagacttttacagaattctgcggggaggctaagcaagtaaggggtatagggctggaaggtgtggggccatctctagtcaccacctgcaaagctggcatgagagcaaagccaacctaggaaggtggagccgagatggagacacaaatccctaaaattacttgagtccttggatctagccatacctgaggcttacctcttacataatccaataatttacctttttgctcatgctatgg

SEQ ID NO: 19651 - DNA, 457 bp, Homo sapiens
acacgccccactcctgacagctctgtgcagcgagttcgtgcgcgagcgggtggctgtctgccaggcgaggggcgcgggtgcccaagagggcttcactgcttctggaaagatcacaaggaaaaaccacctccgcggcgggacgctacccgcgggccgctgcggtcccgctcgcggccggcagggggcaggatgtccccgcgagtcgcccgtgtcttcgggtgtcctcaggtcaccccgcaccgctcgcagcctccgcgcctagttaaagggcgacgcactcatttctgcaaagaaggagcccagcggcccctccccggggaactctttccatcaactcggggcctaataatttacatttaatttgttagcggtttaatgtttaattttaaaagcgagatgattcattaccatattaataaataataacatttattattctcctaatgagtgtccaaaa

SEQ ID NO: 19652 - DNA, 397 bp, Homo sapiens
gctgctgtcccagtgaggccccccgcaatcctttcgcatctgggcagttccaaactagaattcttgcctgccctgcctcccatggaatgcccttaccctactgccaatgtgatctttctgaaacagcatacctgatattgtcattcccaggagcagcttcccacctccctcaggatttaaactttaaactctacagctctccacactcacctcaacaatgagctcctctcatcatttcttctcctttgtcccagtcacaggccacttttggggccatgccaaaccactttagtttctgaagcttctgcccttggacctgcatgactgcagtcatcttaggccccagtcaagggagcaacaggtcaagggcagaagcttcagaaactaaaggggtacg

SEQ ID NO: 19653 - DNA, 514 bp, Homo sapiens
tcaaattgaacacagtttgaaagaattaagaaaagaagctataaaaaataaattgttcaaggattcttcctgtttctaaacaccacaagattatgatgatagagacatcatttgaagtggtagagagtactgtgaaatatctatatgtgaatgtaatgaaaatgaaaaaataatctgatgaatttttaaaattaatcttgttagagtcatttttgagaaattgtatgcaagtgtattgattgaaaatgaccttctcattcaagaaaaatttattgagcacttaccaagtgtcaacaggtgaatgtgaataaaatagatatggtccctgccttcttggagttgaataaaatagcaaacacttattgaatatttattatatgttgtgcattataatattaaccaatgtttattgagttgttattatatgccaactatgccaatcctgtcctaagcaatttatgtatgttaactaatttaatcctcacaataaatctatgaggtaggtactattatt

SEQ ID NO: 19654 - DNA, 477 bp, Homo sapiens
aagaattaactccaagaatcaaatctattccggacagataaatacatttttcttcttttctttttttggggcctggagtaaataatgagagaaggaagaaagacaaaaataatttgaggcccaaactctttgaaaagtgatggacttttcatgagttttcaggagaagtgggagtgacgggcatttgtcttgtttggagaaaagtgtgttcttccgggggtggtggctcatacctgtaatcccagcactttgggaggctgaggcgggcagagttcaagacccaccagggcaacatggtgaaaccccatctccactaaaaatacaaaaattagctgggcatggtggcgtgcacctgtaatcccaactactagagagctgaggcaggagaatcccttgaacctgggagacggaggttgcaatgagccgagatcgtaccactgcactctagacagggtgacagggtgatactctgtctca

SEQ ID NO: 19655 - DNA, 289 bp, Homo sapiens
cattatctctagtagcacttcttgtcttaaagtctagtttgcctcgtatcagtatggctttcttttgctgtatgcatgacttgtctttttctatccttttactttcactttttctttgtctttacatttaaagtgtgcttcttatactcagcatataattggattgcctttttttatccagcctggtaatattgggtttttaattaaaatatttagtccattttcatttaatataattactgatgtggttggaattagatctcttattttgttattcttcctatttgcc

SEQ ID NO: 19656 - DNA, 345 bp, Homo sapiens
agaatctggggacacagcagccctttctgtccagatctgtccacctcctgtggctggacagcaagggatacctgactcccacaatctccaggcgaccctgtcaccaaacagtctgcaaaggacagtccgcctctacccctggaactcgggaaagagaaggagaagcccaagcttcacttagcagaaccgggcctgtccctcagttcagagagcagagatgctccaagaggcaggggtggttacaaaataaggtaacaaacaacgatgaatagacacaaacgaagcacattttgcatcagaaagctccaaggtccagtcctcagccagtgtccttccagcctcaag

SEQ ID NO: 19657 - DNA, 383 bp, Homo sapiens
tcagatctggctggagcagattcagaaaacctcttatctcccccaggcggatgatgtgcccaccgaccacatcagccacgtgagatccagtgcgacagtggagcatgtgtgcgcagaggagacaggaacaacaaccgggatgtcatgcgggcgcactggggctccttgtggccccagtgcacagaattctggtggacccaccatgtgtgggagctcagtgagactcaaagtaagtgcaaggccctcctcacacatcgtacgctgaaggtggagcacactgggaaaatgtgcatgcatcaagaagaaaaatgaaaactgattttgtgcaacatttccactgttcttggaagaatgaaataaatgcatatgagctatgaaaaaag

SEQ ID NO: 19658 - DNA, 187 bp, Homo sapiens
tcacatccgtggggtcttaatccccatgggtcttgattcgcttctaagtgtgcccctcgcccagcctgagccactccctgggtaccgcctgggctcccagctcctgccatctggggagtccacctcctcactaaccccagagggcttgtgtgacccatagattgggcttcccggctctaacgccctc

SEQ ID NO: 19659 - DNA, 477 bp, Homo sapiens
tcggaggtagtgtagggagagatacctgggagaccagtgaggggaaccgtactattaacagtaatattttaactacttagcaatggatatctattaaacaaaactgatgtaacacttactacatactgtagatgggaaagaaatggtataactccacaaaagaaccaagaggagagagttcaaggatatggaaaaatgagaaatcttctctgggaccatttttcccccaactccgggaagtagcagctgatggtggccatcattataaagataaatgataacacctgccgaggaactccaccaagacactcgtagttcttggtaaacaagaactaattaattttcacaacacccttgtgaggcgggaaagtagcatcttcctgggtttactgacaggggaagcatcagcacataaacataagtggatgttggcccctttcacacagtgggagctcttgacagggctgggaataagaa

SEQ ID NO: 19660 - DNA, 431 bp, Homo sapiens
atagtcatttttattcccgaaacactttgtttccaaatatctttgtgttttggaaatccagattttcttatcttgggaacctgctgtattttatcttagttttatattctatgagcttctctcttggtgagctccaggttgagctgctctgctggcttaggcttcatctggtagaattaaaagttacattgggtcacacgtcccaggtgttgcatcacaggccacagaattacctatataaaactgagtgcaaatgtagacactcttccactaaattgtttttagcaattaaaagtgtacctttggttttgcagattttacctcccaccctgtgacccctcagtgtggtttatgacattagcatttccaagagtgtgttcattataaagaattgtttgcatcagaaagtagagagggaagctgaggtgcag

SEQ ID NO: 19661 - DNA, 307 bp, Homo sapiens
aaacaggctgtccaaaatgcaagatcagggaggagcagagccagagccaggtcttaaaggaaaagttatttggtggcgcagctgagaagtaaaaatgtgccttggctcggccagcccccacatcggggagatactggagtttaacaaacccaagcatttgttcatctgcttcctgcatggtaagatggttatggggctgttgctataagatggggacttccaggctgacctggagcaagactccgggctttccatctctcagctttggataagggttgtaaaacccaattgatggctgactgttgga

SEQ ID NO: 19662 - DNA, 183 bp, Homo sapiens
tgcccgcgtggctgctacctccgaggcttctgtgtcaccgggtagtggaaatgtcaccgagtatcagagcttcgagcctcctccagatccatccaaggtggcatcactaagtggcatttgtgtgctaggcacgtaccctcttttacatacattatcttcgatcagttcagcttcttctgcata

SEQ ID NO: 19663 - DNA, 711 bp, Homo sapiens
gaggtacttgctcagccatcgcaaagcgctaattgtgagccaccatacctaccacacctggattaccttcttaaaatgccatctctttttctcagagtgaacccatctcctctttgctaaaccatatctgctccccataattccatcaaggaatgttctcatggtactctacacactgtagtggagaaaggacttcccagagaatgcttctccactcactcatctgtccaaaacagtcagacacgcttcttgctagctgctctgagaaaaatagaaagtgtgtgcttcagggacagtactgactgggggctccaagtagtgtgggtgggatttgaactggtggggaggaaggctgaatgctaggagaaggagggaattggcgcaggcctaagtaaacacaagcaaaaggagaggacaggagaactgtagggactaggacccttgtgaagtcaaagtcagctcttgcatggtgggccttaatgcaggcccagatgcctggagatgcagctttttctggatacactgaaggctgcagaatgttcctggaaagagactcatatagaccaggcctggcacagtctatggccactgattttcaaatcaatgatgggcatctccctgccccacccggctcccagagagtctgatcagtaggtgtgaggcccagaaatctgcactctggcgtgggtgacaaagcaagaccctgtctca

SEQ ID NO: 19664 - DNA, 1311 bp, Homo sapiens
gttttctgtttatttaatattttcctttatgtcaactcactttctaaaaattttaagttaattttaaaatgaaagtttataccaccataaaaataaatacaatgaaaacaaaatggtgtattatgtaactagactcttgtcacttagggttcctgtgctaaaaattagaagttgttaaatttattaaacaagtactgttgcaaaatgggaactttttttcttgacttaattgtgattaataatttccttactgagtggtatttaaaatgtcttgttggcaaaatcatgtaacacctaaagtcatcttttgtgcaaatctcatactttggaaattactgttccagggagtattcatgtgaaaggaaagctgtttgaactatatatatacctaagcctgtaagcagaaatgactggacagaaatacaagcctgtgagacagagagatctaggagatccctagagaggtccatcaagacctccaggatgaaattacctcatttagctcaatttctcacctctccgttagtgctttggtccacgggggtcagtgtttctgcaggatttcaccaactggttccacagtgggaatgtgaagaggtacctggctgtgggaaaagctgcttatcaaagagaggcctgatagaaatgctagggaaagtggctgtgagcctgcattatggacgggagcagagcggcagggcatgttgctaggactaagcagtcgattcacgtgagtctggacaccatgtataaatattttgaaaacttcctgttacaatttaatttactccattgtgttagagggagtgcttccctgcacatggtgttctgtatatttattggttgatgtgctttagggtatagtaattatttatagcaatagattgatacccaggttgcagagttgctttagttatatctttatttccttttcttagagattatagacataatttgcttctgtcatcttttgaccaaaaatctaatgggaatgaagaattacacttgaatgtttatttttaagtaataagttctgtgatagtgattataggtgtctgcatttaaaaaaatgttttaaaaagtacagaggtcaaacaagcatctgtatgattgaacaaatgttatttcgtatatttctgtcaaattttaaaaaatggataaagaggccgggcactgtggctcacgcctgtaatcccagccacccgggaggctgaggttggagaattgtttgaacccaggagacggaggttgctgtgagcccacatggtgccaatgcactccagcctgggcgacagagtgagacaccgtctc

SEQ ID NO: 19665 - DNA, 442 bp, Homo sapiens
acggagtgcaaggtcatggagaataactctactttctgcatacttctaaactgcttttattattattggtatgtttccgtagagtgactccacattcgttattttaattcttatgatagccttgtaaacttacatgttataatcccattttgtagacgaggaaactaaggttttgatgttcttttcccttacggtgagtgaacttgacaactattctcatacatttcttggactgaagggcagaaaatatgagctgttgagacagagtctaatgatagaagatttgaaatgtttccaacacaaagaaatggtaaatgttcaaggggatggaaaccttaaacaccctgatttcaccattacacatgtatgcatgtatcaaaatatcacacgtaccccataaatatgtaaaattattatgtaacaataaatttttttaagaaat

SEQ ID NO: 19666 - DNA, 329 bp, Homo sapiens
aggatgatggatttgaaggtaagtatgtttgtatgtgaaaccataggaagtttgtcgacttagcagtttctgaatgcctactgtgtatttcagtctgctagttgaggaatatgtagtctccatcattgaagaaagttaagggtcagtcttgcaggtttccagctactgtgtgtgtatgtgggggtggggaagtaggtattgttttttatgttgttgtgttgtttgtttttaagagatgtcacctgtcacccaggctggagtgcagtggcatgatcatagcttactgcagccttgatctcctgggctcaaaggattctcccgcttcagct

SEQ ID NO: 19667 - DNA, 405 bp, Homo sapiens
ccttaatgggccaaaatctgctctaatcacagttagcttggtctacatctatattgttctctatcttagactttggaatggaaaagcattcagcttgccagtcttctttatgtttattcccctcattttctaatcatctttctaaattgctcctttttatattctgttggctatagcatcttgatgtaatgatttcagttgctggctgaattgtttagggcaattacagttgtgtgtctctgggtacagttctttgactcctgacaaactagattggaatggaggatattgagacagggtcagttgtcctttgttggttgagaggcatgtgactcctttcagtagttttgggataaatgggagtggaatacaagatgctgtgttccaagaactgagagctagaaa

SEQ ID NO: 19668 - DNA, 447 bp, Homo sapiens
gtgctgagtaaataccaggtaaacaccccaaggactggggtagaccgggactgagtgggcagggaggtgtgggaagcagcttccagcccatgtgaggcagccctcaggccccgcctcacgctccctcctcgatggggtgttggtctggatgagtgaatctcaaacctgactttgcatcagaatcacctccagaaattgttagaaaagccagtgctttctcctcgggcaccctcaccagcctcgtcatgccctaggcctcctaactccatgggacctgaatctacccatctcctcgggccgccagcaaagtgccacaacctggcggcttaagacaacaggtcactgtctcagttctggaggccaccagtccaaagtcaaggtgtctgcagagctgcactttcccgaaggctccaggggagggtcttttttgcatcttctggtggttcc

SEQ ID NO: 19669 - DNA, 2019 bp, Homo sapiens
  misc_feature (1446)..(1446): n is a, c, g, or t
gttggaaggcagacagatctgtgttccctatttgtccctctgggaatatgacataatcttagggggtaggacacaggccaagaatgtcactaactgatttgggacatgagtctctcaccaacaaaatggtaatagaccattcattcattcatcaggaaatagctattaaacacctactatgtgctaagcacgttggtattattgggaatacagtgatgaataaatcatattcttttccctaaagtcactgttactctttccattttacagatgaagaaacttgggctcaaagaagttaagcaactggcccaaggttctactcccataagtggcagagaagggttttgaagccagataccctagttttcaatctctgctttactcttgtgctgtctgcctccccggcatcatgcatttggcaggggacatgatatggacctgttacgtgggcccacagcatccaggtccagcctaagctgggaagatcaaggaaggctccctggaggaggtgacgcctatacgaattctaaagaatttggccaggcagcagggagtgtgtttggctggtgtcataggcagacagcagcatgcccaaagacaagaaggagggagggtttgatgccttcaggaaccaaaataattgaacatgcctgaacccaatttcttaaccagtgagcattgtaagggtagactaaaaggggctgtccttgtgacttgctgacacaaacccttttcccggtgaagaggtgcctgagcaatactatttaattgtatttcctggccagacaacttccaccatctccttaggagacagggtggtcaggaagcaggaaagactaagatgatggggactctctgctgtccccaccttccctgtccattgtagggtctctgcagcctcataccctatgtccagcgacctcccccaccccgccgccagtggaatgcctgaaagtggggtttggcctgggaaagtccaggtaacacttcagattaagctcctcttgtcaatttcctgctacacaagactttctgaatccaagtctctttcctatgaatagagggcgggaggccagattgcccagttggaggtgtggcttcagctggtctccgttgaagtctgaaaagccaacaaagcatagtgagaattctgtgtggttcaagagggtgccttgtgcttgttgaggagaggccgttggcttgatcactcacgacactattactgacgttattatttactgcctgcccaaccacagaaatattctgattcccctaaggagccagtgagcagtaataattttctgtattgcaacaatcctcctaatgacagaaacagatccacctccaggtacgtggtggacgaatgggagcagctggctgctggccccacacttaccaaccttgaccacagggtccacccagcaactccacctcacccatggatcngggggaaaaacaactcacagactgttctcctcttaccaaggttaaaacgcagctggaattactttgggcagtttgtttttaaaaatgagtgttgcaattgtaactgtctcaatgcaagcttcgctgtagatgcccttcttaacaatatgctttatcttctgactgagaaaatcacttgagatgttatcatgcacaatcccacttgttctgcctctccaccctggcaccttctccgaacccagagatcccagagggccagcatctcaccccatgtaactccatgtaattctcccatctaattacaccggctgagagtctgtcttaagaaattcagtgggagctccaggtgtggaggggataaagaagagatggaaatataccaagtgaaaacatcagatttttctaaaaagggatttgtgtattttcctggagtcatgagtcctatagaaaaaaatttatattctttttgttttgtcctttttactggcaagggatttaagcctttggattaagagaaactcaaaagataatttaattccattcttatacttctgcctggataaataattccag

SEQ ID NO: 19670 - DNA, 979 bp, Homo sapiens
gttggaaggcagacagatctgtgttccctatttgtccctctgggaatatgacataatcttagggggtaggacacaggccaagaatgtcactaactgatttgggacatgagtctctcaccaacaaaatggtaatagaccattcattcattcatcaggaaatagctattaaacacctactatgtgctaagcacgttggtattattgggaatacagtgatgaataaatcatattcttttccctaaagtcactgttactctttccattttacagatgaagaaacttgggctcaaagaagttaagcaactggcccaaggttctactcccataagtggcagagaagggttttgaagccagataccctagttttcaatctctgctttactcttgtgctgtctgcctccccggcatcatgcatttggcaggggacatgatatggacctgttacgtgggcccacagcatccaggtccagcctaagctgggaagatcaaggaaggctccctggaggaggtgacgcctatacgaattctaaagaatttggccaggcagcagggagtgtgtttggctggtgtcataggcagacagcagcatgcccaaagacaagaaggagggagggtttgatgccttcaggaaccaaaataattgaacatgcctgaacccaatttcttaaccagtgagcattgtaagggtagactaaaaggggctgtccttgtgacttgctgacacaaacccttttcccggtgaagaggtgcctgagcaatactatttaattgtatttcctggccagacaacttccaccatctccttaggagacagggtggtcaggaagcaggaaagactaagatgatggggactctctgctgtccccaccttccctgtccattgtagggtctctgcagcctcataccctatgtccagccatactccgccgcggcggatatcgcttgaacctggtagcagagctgcagggatcctctagat

SEQ ID NO: 19671 - DNA, 331 bp, Homo sapiens
gttaaccaggctggtctggaactcgtgacctcaagtgatccgcccgcctcagcctcccaaagtcctgggattccaggcgtgagccaccacacccggcacatttgtgctcttttgcttgtgttttctcctctttagctctgaactcatgaagtgccttctgaacatttctagtctggtctcaggggacctgagggtattttcccaccccccaagcctagagagctggggaaacagaggcaggaatgcagacccggtgggagaggtggacaagggtttgggtgtgggacaagcagcagtgtgtgctgaggtttagggaagggccagggtcctg

SEQ ID NO: 19672 - DNA, 196 bp, Homo sapiens
atctttcagggcacggtgcatttattgaatcagagacatcactacggtgctgtattctcagtaggaagaaacttgggtccagaaaccaagggatggaagagagtgtggctgcatgtcccatcccttatattcacccactgtggaacttggacttctcatatcccaaatctgggctttgtagtataggaggtcctgg

SEQ ID NO: 19673 - DNA, 345 bp, Homo sapiens
tctgtagacagcttaagcattaacagctcagttgagtgaccctccattgtcaccaatgtgacagccctttgcacccacactcatggcacccgagttcttgtccggcatccaggataaatgaggtcacacaaacgagttggagatggtaaatgcaggggattttattgccgatgaaagtggctctcaacaggaaggggagctgaaagggggatgaagcaggaagataatcccctggagtccggtcatccccagccagactcctctccaaagctatgccatcaagctgtccctctgaagtcaagccgcttctctccgatgtccaaccgtggtctacaacatccagct

SEQ ID NO: 19674 - DNA, 228 bp, Homo sapiens
ggtttctccatgttggccaggtttgtcttgaactcctaacctcaagtgatccacccacctcagcctcccaaaatgctgaggttacaggcctgagccaccacgccaggccgggatcaatggatttgaactccctcttctgtttttcgaatgcaaacttactatatgatacgctacattgtcatcttccctcattcctttcataatagaaaaactatcttttggtgtcac

SEQ ID NO: 19675 - DNA, 3144 bp, Homo sapiens
caatatatgaggggatacagtgcctcaggtttaaaagagcaggaagctgagtgagaggttgcagaaaaagtgtcttcgctcggcagaggttacaggtggcatctcagaaagagctttgaggctacaggctgtagtcgggaaggggatcggagaactgtgtgaagggacagcttagggactatcgtcctgggactagggggaagttcgcgactttctgaagactggcaggaatgtgcctcctggccctcgatgcttcccccctgaggggaggcatcgtgagggactgtggcaggcttcactgaacgctgagccggggaggtccaactccacgtatggatccggggaatgagaattcagccacagaaggccgccgcgatcatagacctagatcccgacttcgaaccccagagccgtccccgctcctgcacctggccccttccccgaccagagatcgctaaccagccgtccgagccgcccgaggtggagccagatctgggggaaaagccaggccattgaaagcgccccggagaagcgactgacacttgcccagatctacgagtggatggtccgtactgtaccctacttcaaggacaagggtgacagcaacagctcagcaggatggaagaactcgatccgccacaacctgtccctgcacagcaagttcatcaaggttcacaacgaggccaccggcaaaagctcttggtggatgctgaaccctgagggaggcaagagcggcaaagccccccgccgccgggccgcctccatggatagcagcagcaagctgctccggggccgcagtaaagcccccaagaagaaaccatctgtgctgccagctccacccgaaggtgccactccaacgagccctgtcggccactttgccaagtggtcaggcagcccttgctctcgaaaccgtgaagaagccgatatgtggaccaccttccgtccacgaagcagttcaaatgccagcagtgtcagcacccggctgtcccccttgaggccagagtctgaggtgctggcggaggaaataccagcttcagtcagcagttatgcagggggtgtccctcccaccctcaatgaaggtctagagctgttagatgggctcaatctcacctcttcccattccctgctatctcggagtggtctctctggcttctctttgcagcatcctggggttaccggccccttacacacctacagcagctcccttttcagcccagcagaggggcccctgtcagcaggagaagggtgcttctccagctcccaggctctggaggccctgctcacctctgatacgccaccaccccctgctgacgtcctcatgacccaggtagatcccattctgtcccaggctccgactcttctgttgctgggggggcttccttcctccagtaagctggccacgggcgtcggcctgtgtcccaagcccctagaggctccaggccccagcagtctggttcccaccctttctatgatagcaccacctccagtcatggcaagtgcccccatccccaaggctctggggactcctgtgctcacaccccctactgaagctgcaagccaagacagaatgcctcaggatctagatcttgatatgtatatggagaacctggagtgtgacatggataacatcatcagtgacctcatggatgagggcgagggactggacttcaactttgagccagatccctgagtcatgcctggaagctttgtcccctgcttcagatgtggagccaggcgtgttcatatctactctttacccttgagccctccccaggaatttgggaccctgctttagagctagggtggggtctggtcacacacaggtgttgaagaaattataaagataaagctgccccatctggggacgatatggggagggagatgggaggggaaaggggagagggtttttctcactgtgccaattagggggtaaggccccctctcaggagccatcatcggctttccccattcctacccacttaggctttgtagcaagatgagcaatgctgttggaaatgtgaagtcaccagtggccttacccctgcctttgggagcaggatttttttgtagagagtcttatctgagctgagccaggctagctggagcctgggatttctatgcagtggccccttaggccagtgatgtgcggtgggtgggctgtttaggggatctggaagggccaaggtctgagcactggagtggctcgccaggccaaatcacccttagaaggctgcagataacagaaaggctttttataaacttttaaagaaatataaacacaaatatagagattttttaaccatggcagggtgctagtggtgggcagaatgcttttttttctttctgaaggctttgtgatagtgacatgatacaaacactacagacaataaatattaggagacacagggaagtggggagaggtggggagtaatagtaaacacagggaagagctcccctacggaccaggtatagagaaaggtctatgcagaaataggttagagtttccctaacaaaaaagctaacccaggtcccctcattccttcaacttgtgcctgggagtgtgtggtgttagggtgcagccacactcttctatgacccagcatgggttagtgctatggtgggagagtacattgaaggcctggaattagcttggggccagggaagggactgggaggggagagaagagaaggagggaaggatttaggatggtaaagttaggtacagagacctccctgttcaaggcccctgacagctgtccctgcccttcttccccttccctgactgcaggggttatgtggaagtgtgtgtggcagcaggcagcggggaggggaggaacagggaagggggagctggggagcttggctgagggtctgggaaatgagcagggatggggggggatgtggatcaggtttactagcacctgccagggaggccatctggggctccttctccaccccagcccccaaagcagcccttcccccagtgccctttgcatcgtcccctcccccacccctgctgtgggttcccatcatttcctgtgtcagcgcctggcctacccagattgtatcatgtgctagattggagtggggaagtgtgtcaaatcaataaatgaataaattcaataaatgcctataaccagcagtg

SEQ ID NO: 19676 - DNA, 2349 bp, Homo sapiens
  misc_feature (42)..(42): n is a, c, g, or t
  misc_feature (51)..(51): n is a, c, g, or t
gctggttataggcatttattgaatttattcatttattgattngacacactncctcactccaacgagccctgtcggccactttgccaagtggtcaggcagcccttgctctcgaaaccgtgaagaagccgatatgtggaccaccttccgtccacgaagcagttcaaatgccagcagtgtcagcacccggctgtcccccttgaggccagagtctgaggtgctggcggaggaaataccagcttcagtcagcagttatgcagggggtgtccctcccaccctcaatgaaggtctagagctgttagatgggctcaatctcacctcttcccattccctgctatctcggagtggtctctctggcttctctttgcagcatcctggggttaccggccccttacacacctacagcagctcccttttcagcccagcagaggggcccctgtcagcaggagaagggtgcttctccagctcccaggctctggaggccctgctcacctctgatacgccaccaccccctgctgacgtcctcatgacccaggtagatcccattctgtcccaggctccgactcttctgttgctgggggggcttccttcctccagtaagctggccacgggcgtcggcctgtgtcccaagcccctagaggctccaggccccagcagtctggttcccaccctttctatgatagcaccacctccagtcatggcaagtgcccccatccccaaggctctggggactcctgtgctcacaccccctactgaagctgcaagccaagacagaatgcctcaggatctagatcttgatatgtatatggagaacctggagtgtgacatggataacatcatcagtgacctcatggatgagggcgagggactggacttcaactttgagccagatccctgagtcatgcctggaagctttgtcccctgcttcagatgtggagccaggcgtgttcatatctactctttacccttgagccctccccaggaatttgggaccctgctttagagctagggtggggtctggtcacacacaggtgttgaagaaattataaagataaagctgccccatctggggacgatatggggagggagatgggaggggaaaggggagagggtttttctcactgtgccaattagggggtaaggccccctctcaggagccatcatcggctttccccattcctacccacttaggctttgtagcaagatgagcaatgctgttggaaatgtgaagtcaccagtggccttacccctgcctttgggagcaggatttttttgtagagagtcttatctgagctgagccaggctagctggagcctgggatttctatgcagtggccccttaggccagtgatgtgcggtgggtgggctgtttaggggatctggaagggccaaggtctgagcactggagtggctcgccaggccaaatcacccttagaaggctgcagataacagaaaggctttttataaacttttaaagaaatataaacacaaatatagagattttttaaccatggcagggtgctagtggtgggcagaatgcttttttttctttctgaaggctttgtgatagtgacatgatacaaacactacagacaataaatattaggagacacagggaagtggggagaggtggggagtaatagtaaacacagggaagagctcccctacggaccaggtatagagaaaggtctatgcagaaataggttagagtttccctaacaaaaaagctaacccaggtcccctcattccttcaacttgtgcctgggagtgtgtggtgttagggtgcagccacactcttctatgacccagcatgggttagtgctatggtgggagagtacattgaaggcctggaattagcttggggccagggaagggactgggaggggagagaagagaaggagggaaggatttaggatggtaaagttaggtacagagacctccctgttcaaggcccctgacagctgtccctgcccttcttccccttccctgactgcaggggttatgtggaagtgtgtgtggcagcaggcagcggggaggggaggaacagggaagggggagctggggagcttggctgagggtctgggaaatgagcagggatggggggggatgtggatcaggtttactagcacctgccagggaggccatctggggctccttctccaccccagcccccaaagcagcccttcccccagtgccctttgcatcgtcccctcccccacccctgctgtgggttcccatcatttcctgtgtcagcgcctggcctacccagattgtatcatgtgctagattggagtggggaagtgtgtcaaatcaataaatgaataaattcaataaatgcctataaccagcagtg

SEQ ID NO: 19677 - DNA, 3305 bp, Homo sapiens
caatatatgaggggatacagtgcctcaggtttaaaagagcaggaagctgagtgagaggttgcagaaaaagtgtcttcgctcggcagaggttacaggtggcatctcagaaagagctttgaggctacaggctgtagtcgggaaggggatcggagaactgtgtgaagggacagcttagggactatcgtcctgggactagggggaagttcgcgactttctgaagactggcaggaatgtgcctcctggccctcgatgcttcccccctgaggggaggcatcgtgagggactgtggcaggcttcactgaacgctgagccggggaggtccaactccacgtatggatccggggaatgagaattcagccacagaaggccgccgcgatcatagacctagatcccgacttcgaaccccagagccgtccccgctcctgcacctggccccttccccgaccagagatcgctaaccagccgtccgagccgcccgaggtggagccagatctgggggaaaaggtacacacggaggggcgctcagagccgatcctgttgccctctcggctctcagagccggccgggggcccccagcccggaatcctgggggctgtaacaggtcctcggaagggaggctcccgccggaatgcctggggaaatcagtcatatgcagaattcatcagccaggccattgaaagcgccccggagaagcgactgacacttgcccagatctacgagtggatggtccgtactgtaccctacttcaaggacaagggtgacagcaacagctcagcaggatggaagaactcgatccgccacaacctgtccctgcacagcaagttcatcaaggttcacaacgaggccaccggcaaaagctcttggtggatgctgaaccctgagggaggcaagagcggcaaagccccccgccgccgggccgcctccatggatagcagcagcaagctgctccggggccgcagtaaagcccccaagaagaaaccatctgtgctgccagctccacccgaaggtgccactccaacgagccctgtcggccactttgccaagtggtcaggcagcccttgctctcgaaaccgtgaagaagccgatatgtggaccaccttccgtccacgaagcagttcaaatgccagcagtgtcagcacccggctgtcccccttgaggccagagtctgaggtgctggcggaggaaataccagcttcagtcagcagttatgcagggggtgtccctcccaccctcaatgaaggtctagagctgttagatgggctcaatctcacctcttcccattccctgctatctcggagtggtctctctggcttctctttgcagcatcctggggttaccggccccttacacacctacagcagctcccttttcagcccagcagaggggcccctgtcagcaggagaagggtgcttctccagctcccaggctctggaggccctgctcacctctgatacgccaccaccccctgctgacgtcctcatgacccaggtagatcccattctgtcccaggctccgactcttctgttgctgggggggcttccttcctccagtaagctggccacgggcgtcggcctgtgtcccaagcccctagaggctccaggccccagcagtctggttcccaccctttctatgatagcaccacctccagtcatggcaagtgcccccatccccaaggctctggggactcctgtgctcacaccccctactgaagctgcaagccaagacagaatgcctcaggatctagatcttgatatgtatatggagaacctggagtgtgacatggataacatcatcagtgacctcatggatgagggcgagggactggacttcaactttgagccagatccctgagtcatgcctggaagctttgtcccctgcttcagatgtggagccaggcgtgttcatatctactctttacccttgagccctccccaggaatttgggaccctgctttagagctagggtggggtctggtcacacacaggtgttgaagaaattataaagataaagctgccccatctggggacgatatggggagggagatgggaggggaaaggggagagggtttttctcactgtgccaattagggggtaaggccccctctcaggagccatcatcggctttccccattcctacccacttaggctttgtagcaagatgagcaatgctgttggaaatgtgaagtcaccagtggccttacccctgcctttgggagcaggatttttttgtagagagtcttatctgagctgagccaggctagctggagcctgggatttctatgcagtggccccttaggccagtgatgtgcggtgggtgggctgtttaggggatctggaagggccaaggtctgagcactggagtggctcgccaggccaaatcacccttagaaggctgcagataacagaaaggctttttataaacttttaaagaaatataaacacaaatatagagattttttaaccatggcagggtgctagtggtgggcagaatgcttttttttctttctgaaggctttgtgatagtgacatgatacaaacactacagacaataaatattaggagacacagggaagtggggagaggtggggagtaatagtaaacacagggaagagctcccctacggaccaggtatagagaaaggtctatgcagaaataggttagagtttccctaacaaaaaagctaacccaggtcccctcattccttcaacttgtgcctgggagtgtgtggtgttagggtgcagccacactcttctatgacccagcatgggttagtgctatggtgggagagtacattgaaggcctggaattagcttggggccagggaagggactgggaggggagagaagagaaggagggaaggatttaggatggtaaagttaggtacagagacctccctgttcaaggcccctgacagctgtccctgcccttcttccccttccctgactgcaggggttatgtggaagtgtgtgtggcagcaggcagcggggaggggaggaacagggaagggggagctggggagcttggctgagggtctgggaaatgagcagggatggggggggatgtggatcaggtttactagcacctgccagggaggccatctggggctccttctccaccccagcccccaaagcagcccttcccccagtgccctttgcatcgtcccctcccccacccctgctgtgggttcccatcatttcctgtgtcagcgcctggcctacccagattgtatcatgtgctagattggagtggggaagtgtgtcaaatcaataaatgaataaattcaataaatgcctataaccagcagtg

SEQ ID NO: 19678 - DNA, 1966 bp, Homo sapiens
caatatatgaggggatacagtgcctcaggtttaaaagagcaggaagctgagtgagaggttgcagaaaaagtgtcttcgctcggcagaggttacaggtggcatctcagaaagagctttgaggctacaggctgtagtcgggaaggggatcggagaactgtgtgaagggacagcttagggactatcgtcctgggactagggggaagttcgcgactttctgaagactggcaggaatgtgcctcctggccctcgatgcttcccccctgaggggaggcatcgtgagggactgtggcaggcttcactgaacgctgagccggggaggtccaactccacgtatggatccggggaatgagaattcagccacagaaggccgccgcgatcatagacctagatcccgacttcgaaccccagagccgtccccgctcctgcacctggccccttccccgaccagagatcgctaaccagccgtccgagccgcccgaggtggagccagatctgggggaaaaggtacacacggaggggcgctcagagccgatcctgttgccctctcggctctcagagccggccgggggcccccagcccggaatcctgggggctgtaacaggtcctcggaagggaggctcccgccggaatgcctggggaaatcagtcatatgcagaattcatcagccaggccattgaaagcgccccggagaagcgactgacacttgcccagatctacgagtggatggtccgtactgtaccctacttcaaggacaagggtgacagcaacagctcagcaggatggaagaactcgatccgccacaacctgtccctgcacagcaagttcatcaaggttcacaacgaggccaccggcaaaagctcttggtggatgctgaaccctgagggaggcaagagcggcaaagccccccgccgccgggccgcctccatggatagcagcagcaagctgctccggggccgcagtaaagcccccaagaagaaaccatctgtgctgccagctccacccgaaggtgccactccaacgagccctgtcggccactttgccaagtggtcaggcagcccttgctctcgaaaccgtgaagaagccgatatgtggaccaccttccgtccacgaagcagttcaaatgccagcagtgtcagcacccggctgtcccccttgaggccagagtctgaggtgctggcggaggaaataccagcttcagtcagcagttatgcagggggtgtccctcccaccctcaatgaaggtctagagctgttagatgggctcaatctcacctcttcccattccctgctatctcggagtggtctctctggcttctctttgcagcatcctggggttaccggccccttacacacctacagcagctcccttttcagcccagcagaggggcccctgtcagcaggagaagggtgcttctccagctcccaggctctggaggccctgctcacctctgatacgccaccaccccctgctgacgtcctcatgacccaggtagatcccattctgtcccaggctccgactcttctgttgctgggggggcttccttcctccagtaagctggccacgggcgtcggcctgtgtcccaagcccctagaggctccaggccccagcagtctggttcccaccctttctatgatagcaccacctccagtcatggcaagtgcccccatccccaaggctctggggactcctgtgctcacaccccctactgaagctgcaagccaagacagaatgcctcaggatctagatcttgatatgtatatggagaacctggagtgtgacatggataacatcatcagtgacctcatggatgagggcgagggactggacttcaactttgagccagatccctgagtcatgcctggaagctttgtcccctacccagattgtatcatgtgctagattggagtggggaagtgtgtcaaatcaataaatgaataaattcaataaatgcctataaccagcagtg

SEQ ID NO: 19679 - DNA, 539 bp, Homo sapiens
ctgtcactcattgcattctgtttcccccttagacaggatgtgtgttgctcagatacagagttgagagtccgaaagatgtcaagtaaaacactaatttctaactgccttcctcagttgtcaaatattcatgttaaaaattgttctggcacataatgagaaatttgtgtgaatttattggtttaaaaaatatagctggctaattataggtttaaaaaatatatagaaatgaaataatgcatctgtcatatgaaaaaaattactcttcaaagaaactggaaaatctcttattttctgtttataccaaaattctaaatataaacattttaattcaaaaggaaagatagatattccttataaaaacatctaaactatttaaaagcctccaactggctttaaagtgagtgaagaatttttcattacaggaggctttaatgcataaaataaatttttacttaaaatttatagtgagaaatgcttggctgaaacaagaataacctttaaaatgaaccgggtttcttctacacataaattgcaagagg

SEQ ID NO: 19680 - DNA, 367 bp, Homo sapiens
tggcaaagatgttctatagatagtattaatacaaaggtatctggatcaagcatttgattttcaaatccttctctgacacatgttaacctttcatttattcttatgtttttggaaaagaatgccgggctctgcattttctttctggaatctctctcccatctggctcattcccctaccacctcttccccaaatgagttctgttgctattacctcatattagtactgacccatttcatttggttactgtagtacttcttaaaataatcactatggctctagtatctcctaattcttcttcttcttcttttttttttgtgacaaggcctcactctgtcacccaagctggagtgcagtggtgtggtcatgg

SEQ ID NO: 19681 - DNA, 743 bp, Homo sapiens
taggtagatagagcaagtcctgctaccataagtttaaaattattaagacaacgggcttttttaaattgctggtagaaccaaaggctaattttgcataggtttatatttttagacttaagaaattagcacctatataataccttcataccttctgcatcactatcaatttttctgtaatttcttatttgaatgcttcctaattctttacagaaaaaattaaaatttgtcacccaaccaggtgataataacaaaacaataatttaggaacatccagtaaatttggaattagttctctaaatttgggtaattaatagcttattggataattaaaatcagccctaatgttgccttaagtaggaggaaattggatcagcaatgggattgggtatcctattttcctttcctataaaagtgctgcctcttctcaaattgctttatttctctcccactgcattagtatatctagaacagcaccttcaactgcaacaaaatataattctcctagatgactaggatatcctccaatctggtatcatgccaaacaacactatgtttggggaacagcacccgaaatgctgctaaaaagctacctcatgtcaagaaaatatggatttcaaaaaatatctggcacagtggcccatgcctataaccccagtactttgggaggccaaggcaggaggattgctggaggccaggagttcaagaccagcctgggcaacatggagagactccgcctctacaaa

SEQ ID NO: 19682 - DNA, 370 bp, Homo sapiens
gctgatcttataggaggctttggagtatgaatagcacctcgagattgttccaccatgtaccctcattgctggatcattggctgcaggctgccccgagggaatggagtaaccacctacacgtttccttgctccctgcagctgaaggcaattctgttagaagccaactgtcacagcagctgatgcgattattatttgggttggggaatggtgtgtggtcaggggatgaggatttgctttgtgcacattctactggtcaccgtctaataccaactcatgctttagacatcagctccatgacagtagggatcagaaatgcagaactagggaattaaggcaaatgtgcgtcatctcccccttctcttagaatctg

SEQ ID NO: 19683 - DNA, 638 bp, Homo sapiens
  misc_feature (11)..(11): n is a, c, g, or t
  misc_feature (17)..(18): n is a, c, g, or t
  misc_feature (22)..(22): n is a, c, g, or t
agcgcggccgncgggcnngtcncgggagtgatcgaagggttagttttaggtgcagtatcatctctacctaaatgaatgaagaaatggaaggatatttgtagatatggggaaaggaatgaagagaatttttttctgttaaatgaacagcaaatccttcatcaccatcaccatcatcattttcaggaactcacaatattaatatttagagataattttgtgtcagtttttattccatgtttttaataatcacagtattttagataagcaaaccaaggcacagcaaagaagaaccatactcaaagttttacacactctagaaaatggtggatgtgagattcatacccaattcacagtccagtcgtgagccttctgctgagagaggagtggagcaacattgggaaggagggacttaaaatgtatagggtagtcactgtggggacattgaggggacttgaccagaaacaggatgaaagagttggtttaatggtactgagggtcttattaacattacttacttgtaggtccaccagttcacaaaaccatgtgctataaatgaagtaacctgccatggttcaggagaaaaaaagagagagggttacattaatgaaaagttacagtgtgttcactagcaaaaaaaa

SEQ ID NO: 19684 - DNA, 1118 bp, Homo sapiens
actgacagaagtagaaagaatataggaagaactgaacagtaggggtccaggtaggagtccatcctttccatgccctagtagggacactcgacgctcaaggaaaatatctcaagatctcctcctctctgtgcatggtctctcatcccttgagtgacatgatgacatataaaacattcttagaatttcacttgaggcagatattactaattaattaatcaaagcaagcatgtgaaatggtatcaatttgccaaaccaggttcagacattgtgcctcaattcagaaataatagaattatgcaaatctaaaaatgtgaccctcaaaagtgtggaatacctctgcttgaggtaataccgctcctctccttcagctactcactcaactctgacaaatcgtaactcagtttactccctatatccccaagctttctttgttaaaagaaattttgaactacttgcttttgaaagtaactcacatggcatgctcttagcatcatctagcacaagctttgttttcttctgttcaacttcctttcagaggtgcatttttacaacttccctctattgttctcattgactttccgggtttgatgcgacctgaaaaactctcctttctgaaattcgttaaccagcttcatcagttttatagcaaggactggaagcaccaatttaaaatttaaatggtacaatgataacttcaaattagtttgatcaattattttaggaaattccaaaaactgaaatttcaaatattgaaatgcaggaacttccttgcccctccctggctctataaataattaaaataaaaagtttcctcacaggaaatatataaaatatgtttgttttgttttgctttagtggaggaaaagagtgtaaatctagaactaataatttggggttttctttgtttgtttccacagaaataatcaatgattccacactaatagaaaccatttgtcccaactgaaataggcaaaaacacggttctgttccaattttacaatttttttttgtttcttcacacaacaccgtggtgatgcagtgtctagactttttggaacaaggcatggagtctggaatttattctgtgggtttgaaaatggttattcagtgctcctaca

SEQ ID NO: 19685 - DNA, 932 bp, Homo sapiens
accccactggactcatggctccagcttctacccacccgtctgtactactgaatctgcacctccagccctcccatgatatcacccagatagcctcacctgggggcttcacaggtaaagcaaaatcagtccccaaatcaaaatcatttccccaaacctgcgtttctcttcgcccttagaactggtatctccatccacacatggctcctaccagagatctaggagtgattccctatccttccctctcccactccccatctccttccagtcaccacatggggtccatccagcctcatcaatctcacatacttttggccttcttgttgccattgcctgagttaaagctctcttctcttccagcccagataatggtattgagtgtctagatggtttccccgtccctagttttgttgttctccagatccatgccagcaaggccactggtgacccaataggtacctttgtgcaaattagaaaaagatgctcctagccgggtgtggtcccagcactttgggaggcagaggcagaggcaggcagagcacttgagctcaggaattcaagaccagcctgggcaacacggcgaaaccccgtctttacaaaaaatacaaaaattaggcaggcttggtggtatgtgcctgtagttccacctacttagggggctaaggcaggaggattgcttgagctcaggaggtctaggctgtagtgagccgtgatcacaccactgcactccagcctgggcaacaaaaacttaccctgcctctaaaaaaaagaaagaaaagacaatcctgcctcaagacacttttttatatttagagacggagtcttgctctgttaccaaggctggagtgcagtggtgctctcaaggctcactgcagttttaacctgggctcgcagttttaacctgggttcaagtgattctcccgcctgagcctctc

SEQ ID NO: 19686 - DNA, 274 bp, Homo sapiens
ttttggtagagacgaagtttcaccatgttgtccaggctggtcttgaactcctgagctcaggcgatctaccctccttggcctcccaaaagtgctgagattacaggtgtgagccaccccgcccggctgtagtttttcatattatttgtataataggttaggttccagcctgggtgacagagcaaggctctatctcaaacaaacaaacaaacaaacaaacaaaaaaccttagagaaaaatgggaaattgctggctcagaagagggaacaggcaaaaa

SEQ ID NO: 19687 - DNA, 489 bp, Homo sapiens
aaagagtgctgacgtactactcatctgaacagaacctgaaacaaaccatgatgaaacgggttcaatactcttccactctttatcacttataaagtttatgaagtccttctgagtccttggaccctgaggatgcctaaattcaccatctttacaatgataaatagtaggaagaacagttattgtaaactgtccagtcagtcctggctgctctgtgacatctactttcacaacattaacctcagatcttctccccattcagcaaaactttcccattccggttaatggttttgacaagcagggcaccacggggcataaaattgtatcatccagcctccttccagcagctctctccagttcttgtctgtgatgatgcgtacgttgctctgccgcctgtgggtccagggagcacccccaagcaacagtaccaggactgccagcggaactgcaagactcctggagggtgccatgtctgccgcttgcccacctcac

SEQ ID NO: 19688 - DNA, 573 bp, Homo sapiens
gataggttttcaccacgttggccaggctggtctcgaactcctgacttcaagtgatccactcgcctcggccacccaatgtgctgggattacaggcatgagccaccgcacccggcagatagttttaatttaaattcagttagacaagtgcatgtggtacacccattatgtgacgcttcatattatgtactaaaagcatgctatgcacaaagtgtaggtgtacagtgatggatagatcctgccctatggaactaacaaattagcaagcgaaatcaacatttatcaagtaattaaaagtagtttaagtgttgtgaaggaaaagtacaaaggcttatggaagtgcatatccaggatgtttataaaccaagggaggtcgaggcataaaatttctgaaagcaagaatgcagtgttcctacatttttactaatattccaagttctgaaaacgtgtacttaagtagcagcttttcctgagtttattcaatttattgcattatcagtgtagtatgaatgggagtgtgtgatgatttccttcaaatataaaaggaaatttcttaatgctgtgttttcttaaggt

SEQ ID NO: 19689 - DNA, 343 bp, Homo sapiens
taatcttgggaaagtgttaagcatatcaggaagacatatttcttctagcttgatagaagagtgatgaatctaggatgtgacctctgctgtgtgagctgatgtctccctgatatatagtggctctgtgtgtgtttgcatagagagggaaagaggatgcatccgtgtctctgtttttcttcccggccgttcccaacagtgactgggtgattgaggggctggagcacgtgcagctcctcacccacgctgaaggcatctctagtaatggcatctggcccatatgcagatctagctccactctgtgctgacatcagccggtttgtggcacctcagcgtatttctgggt

SEQ ID NO: 19690 - DNA, 269 bp, Homo sapiens
gtacagtagcgtgatcacagctcactgcagccttgacctcccgggctcaagacatcctcctgcctcagcctcctgagtagctgggactgcagttgtaagccaccgtgtccagccagtttctgttgtttgaagcccccagtgagtgcaggtttgttacggcagccacaggacactaacacagatctggagggggacctgggcagaggtgggggacagctctggagcctgaggctacctcctctggcttctcaggggagcaggtgagcatg

SEQ ID NO: 19691 - DNA, 272 bp, Homo sapiens
tcagatttggggtggctcagcttccaggtggggcttccagctccagctccagctgttgttgattggggccagggagggctccagctccaggacaatgggagaggacttgtaggtacagtgggaggcagttctttgtcatttaaaaacctattaggaaggaatctgaaaatggtcacattgtaatggaaatttctgaaagaaatatttgtattttgttagggatttaagagatcaaaactctacttatgttctttgaacactggccaacaggc

SEQ ID NO: 19692 - DNA, 586 bp, Homo sapiens
aaattgaaaatgtcagcattggaagtccccataaatgctgtcaactccaacaatgcatctggctcttaaatcttccatacagtttctctaagtggttgcccacattgtgattaaacacagccaatgctcagaaagcaaccacctgctaggcaacccatgccacctctcggctgcccggaagctgtctgcccccttcaacagccatcagattaccacccctccacagctgacacccaggccctgcccatctaccctacaggacatctcttgtagggtgttttgatcttcccgggcatctttattgctaccaacttaatagtgtttcagcaaatgtttatgaagctccatctgtaggtgccagcaacaataaaatgataaataaggaaaataacaggaaattacatatgaataggcacttttaatacaaggtgacgagggctttggtgaagtatgtgtaagatattaggggaacaaagaaagtttattacttacctactatctataagcactgaggatacaaaccaatattccctaagggatacagagatattctctgcccttcagaagcttatagtctaaaaaaaaa

SEQ ID NO: 19693 - DNA, 448 bp, Homo sapiens
caaggtttgatgggcttgccatctgagtttaagtggaaatgcagaatgtgcccataccagcctgggttacattgtcctcttataggggcctcaagcccagcagcgagctttggctcccgagttaggcagactgtctcggctggcatgtggcacacggcaaggcacttcattgcttcagagctccttctatgccataaaaagccctacaagacctggtgctaatccctctctctggcctgttctccctcacccctggcccaccctgctcactccactccagccacactggctgccttgctgttgttcctcaaccacagctggcttgtttccaccacagggcctttgcatatcctgttccccaaacccttcccatggctggctgcttcaccactcaggccccagttcaaatgccacctctttggggaaagcttccatgattccctgactt

SEQ ID NO: 19694 - DNA, 381 bp, Homo sapiens
gtttttggagtagggatgctcaactggtaagtataatgcaaatcaaaatctgaaagacttctggtcataagcactttgaataagggatactcaatctgtatcaaattctagaaaatttggctgggcgtggtggctcacgcctgtaatcacagcactttgggaagccgagatgggtggaggtcctgagctcaggagctcaagaccagtctgggcaacataggaaaaccctgtatctactaaaaatacaaaaaagtagctgggtgtggtggtgcgtgcccgtagtcctagctactcaggaggctgaggcatgagaattgcctaaacctgggaggcggaggttgcagtgaactgagagcccctgcactccagcctgggcgacag

SEQ ID NO: 19695 - DNA, 1908 bp, Homo sapiens
  misc_feature (233)..(233): n is a, c, g, or t
  misc_feature (572)..(572): n is a, c, g, or t
  misc_feature (575)..(576): n is a, c, g, or t
  misc_feature (582)..(582): n is a, c, g, or t
tgagacggagtctcactctgtcgcacaggctggagtgcagtggcgcaatctcggctcactgcaacctccgcctcctgggttcaagcgattcttctgccccagcctcccaagtagctgggactacaggcacctgccaccatgtccggctaactttttttggtatttttagtagagacggggtttcaccgttatctgccaggctggtctcaaactcctgacctcatgatcccccnacctcggcctcccggtccacttttgttttagcttgagggcgtacgtgtgcggctttgttacaagggtatgctgcgtggtgctaaagtttgggcttctatgaatcctgtcacccagacagtgaaccacaggaagtaatatgcccagatagtatccaatagaaagcatttcagcccttcctccccttcctccctccctccctccttctggagcccccagtgtctactattcccatcttttttatttgagacagtgtctcgctctgttgcccaggctggaatgcagtggcacgatcacggcttactgcagcctcaatcttctgggctcaagtgatcctcccnacnnagcctnccaaaacactgagattgcagccatgagccactgcgcctggccaggtttgatttctgtagtagctgttcaattgtgggtcaagggtcaggttctggggtaaggaggtattgggcttctcacatttaaggtcagaagtccagtcctgggtcaggggttgggatcagagatcaaggctgagctctgagtttggaggtcagggattggactctcagtgattgaaatccttaggtcagaggtacagtcactgaggataggagtcaggagtggagttcgggacagtcaaagtcgaggttaagttttaggtcatcacctccttccgctggggcacgcggcgccaccagacgtggtcgcaggaggagcaggcaaactgccggtccacagcagggataaggtcgtcctgggcacgttgaaacatgcgtaggttggcttctgtcagtggcaggagggaggtcgccactgcctgtggaatggggcaggtggggatgaggtgggggggtgtcaccccttctgcaccaacataagcatcagccctcctctccctacagacgagtcctcttcctgccccagtgaatatctcccctcctgccctaatggacatccttctgtgcctgcagatgtccccctcccaactcccccatcccaagccctagccaccaactcacctgaatgtcccggtcctgcttcatatcttctggtggatcctgggtggagatagcaggggcagaaactggggatggggctcaggcctctttccacccgtttgctgggggaggcccccggccgcaatgagtagggtgcccctaactcgccagaagctcacagagcaccactcacttattgagagccaggtgtgtggcctcagttgtcctcatagcagccctgagaggtgggcacacctgttaccttattgctcagatggggaaactgaggcttaggggagggcttgcctgagtgaggctagcctgacccccatactcacttcctgcctgcaaatgccacatgcttgttgatgttgtgacatatcgcccctttgaggccacgttgtgctcggctaagtgggagagagatgtgggttcaaatcccagctgtatcacttccagctgtggggacttgggcaagccactccctgccccctgggttcccactgacaggcatgttagagcccaggctctgactccaggtggccagggttcaaatcgcagctgcccctgcttgctggcaagtgacttcggcctcagtttctttgtctgtgaaatggggataaataataggacctgtctcctggggtcactgcagtgatgaaataaataaattcctggaatcttg

SEQ ID NO: 19696 - DNA, 490 bp, Homo sapiens
ctgcagtgagctgtaagtgcacagctgcactccagtttgggtgacagagcaggacctgtctcacaatacaaataaaaatacaagtaaaataatatctcaagtcagagccttttggctctgcagcccttgcaacccctcagccgtgcagtggggtttgcatccctgggaatgaggagacccctgcccggtgttgttgcctgattaatcagtgttttaaaacatatattaatcggggtgggcgcggtggctcacacctgtaatcccagcaattagggagacccaggcgggtggatcacctgaggtcaagagttcaagaccagccttgccaacgtggcgaaactccttctctactaagaaaatacaataattagctggacatggtagtgggcacctgtaatcccagctacttgggaggctgaggtaggagaatcgcttgaacctgcggggtggaggttgcaatgtgctgagattgcgccacttcactccagcc

SEQ ID NO: 19697 - DNA, 431 bp, Homo sapiens
tgtgaccctcatgtttatgttcacagcaaggctgctggagcttcagccagcatattctcatttcaagtagaaagaaaaggaaaggcaatagacataaaatggaagtgctttccctgacacctcatccagtgattacacttacatctcattggctagaccatgtcacaggccactctcacagagaaagaggttgagagatttttttttttaaaagagaacactgtcattcccaacacagggttaaattagtaacagaaagagaagaaaacattgacattaagtaggaattaacagtatcaaacatacttcagggagtatttgtgccagggatttgcccattagtttaaaactatacttaatattatggtattattcttaccatcttaaaagatatttaatattctaatatataatatatgctcatggaagac

SEQ ID NO: 19698 - DNA, 85 bp, Homo sapiens
aacaggtgggtagcatatacagcatagatacactggacaaagggaggactcacatcctgggcaagatggagcagaatggcagagt

SEQ ID NO: 19699 - DNA, 339 bp, Homo sapiens
ggcaggagaattgcttgaacccagaaggtggaggttgcagtgagccgagattgcaccattgcactccagcctgggtgacaagagtgagactctgtctcaaaaaaaagaaaagaaaagaaaaggaaagaaaggaggaagcaggaaggaaattgtcacaccttctatactaagtgttgtatgccaaacctaagagagctaaaactgattggcagcatgggtcattgagagggaaagcccttgttttatcttttgccagctccttctagatctttcctaccagaaattcgggtatcaaaatgccaccctaacagaagttataatactgtttcccatccctcc

SEQ ID NO: 19700 - DNA, 489 bp, Homo sapiens
cattagctccagctccggaagaacgcatgcgccaattagagcatcaaagccctctccgcagagcttgtttccataaaatggagcggatcacaaacaataacagttctccagaaactgcctccctgctacagaactcaacccccaaacccagacgaactccacgctataccttaagccaccactaccattttcttggcttataattcttttggagtatgaatagtgggttctctatggactgttatgatttttaatgtaatggtactgtagttgagtttctggcactgaacaattgctgattttctaaacagttatattactatcaatctctgacatcatcaacaaagagaattcataggattcctcctcaaatatatggttttaaacattttaaaaaataatttacaaagccagaacttaaattcaattgtaatatatctcctcaaatacaagatgtgaatgaaataaaatgacttctttaaatatata

SEQ ID NO: 19701 - DNA, 210 bp, Homo sapiens
aatgattaaaactcccccttcaaatcaaatatagacacccatacatatacagacctcaaaagaaaaatttaattgggtaaaactgtatactacaccaaaaacttaagaaacaagcccaaagggaaagcatttacgttcccgaacatgcaaattcaaacactatttcagagaaattattttgaggtctgtctcttgaccagatcccttcag

SEQ ID NO: 19702 - DNA, 305 bp, Homo sapiens
actctgaaggttatattgggagtgcccatattcagggagtgcctataatcaggccttaggtgctcttgcagagaagttgcccacactcagtgggtgtcctataccatcaggttacccaggccgcacactacctgtataaaacacctgttggaaacaccatcctttaccaagtgtaattagtgtaagttagcatcaattaaccaaactggggataattttcctctgttttatttggagatgcacctcactaagtggctgtggattagcatccataaaaggtggttaaaggtaattcatttactggt

SEQ ID NO: 19703 - DNA, 252 bp, Homo sapiens
caggctggtctcgaactcctgacctcaggtgatccacccgactcggcctccaaagtgctgggattacaggcgtgagccattgtgccccgccccctttttaacctagtttgttgtctctcaccccgaccagaatataaccttcatgagggctacagtttgttgtctatttattgcccaactccatgtccttgccacacagtaggttcccaataaatgtatgttgaataattaataaagactacattctaatga

SEQ ID NO: 19704 - DNA, 631 bp, Homo sapiens
tgatttccagatttgctgaaatcgaggttgcggctccagcttctgccctgggtttggtttgttgttgtcgtcgttgtttttgagacaggatattgccctgtccctcaggctggagtgcagttgctgtgatcatggctcactgcagcctcaacttccctgagctcaggtgatcctcctacctcagcttccccagtagctgggactacaggcgtgcgccaccacacccagctgatttttgtatattttgtagaaacagggttttggtatgttgcccaattagtctagaactcctgggctcaaatgatccacccaccccgaatgctaggtatacagttgtgaaccaccatgtccggccctgggtttgcttttgattgtggtcttttctgttttgaattgccttactcctcttagagttcagccagtccagacggacaaatccatttctagtgatttggttattttaaacactatttagtccccagagaagaaatacaatctttctgtcctagtgcaatttataagagtaattgacatattgaaatagtggatatgacagtttagcctgataaaagttgtcagcaaatgaacgaatgctgtccaccgcatacccagtgttttacatgcagtattg

SEQ ID NO: 19705 - DNA, 97 bp, Homo sapiens
gggaaatggaaaaacatcatatagaatggtaggtagcgaggtaaatattatggttaatttgatgtgtcaacgtggctaggttatgtgcccagctgtt

SEQ ID NO: 19706 - DNA, 447 bp, Homo sapiens
gctgtgcattatatgtactcaaatttttattgaacatacttataaaatgagaagtctatggataaactcttcactcttcagtgaaactttcttctccttgatgaattatatttaacacaaattaatcattaattcatttcaccaggtgtgtatccccccaaaaaactgcatttctgtatttaagacagatgatgacatgcactaatgggagaaatcacatggcattacaaaaaaacacactgggtagggaatcagaatgactgggtgtctggcttgctctgtcattaactaggcctactttcttgtttataaactagttgtatcagattagtgattctctatgtagaagagagtttcacaattacctgggaactctttcaaaacatacatgccctgccttcctggggtatagtatgtaagtgatggagggagttgtctttagttaaa

SEQ ID NO: 19707 - DNA, 595 bp, Homo sapiens
atggctccatttgtccgtaaccttgtggagaagaccccagcactggtgaatgctgctgtgacttacttgaagcctcgattggccgcattttggtactacaccacggttgagctggttcctcccacccctgctgagatccctagagctattcagagcctgaaaaaaatagtcagtagtgctcagactggtagcttcaaacagctcacagttaaggaagctttgctgaacggtttggtggccactgaggtgtcgacgtggttttatgtcagagagatcacaggcaagcgtggcatcattggctagaatgtttgaagaccagtcttaacatctgattatatttgatttattatttgagtgttgttggaccaggtgtgatcagactgctatctgaataaaataagatttgtcagaaattccaaaaaaaaaaaaaagtgaatcaagcagttccaacccatgttcaagggtcaactgtgtctatattttgaaccatttaagagtaagttgcccctttgcccctaaatatttcagtgtgtatctcctaagaacaaggacattcctttgcgtaaccacagaataattacaggaaagtaacatt

SEQ ID NO: 19708 - DNA, 1904 bp, Homo sapiens
gagaccaccttgggcaacatagtgagatcccagctctacaaaaaaaaaaaaattagctgggactacaggtgtgtgccaccatgcccagctaatttttaattgttttgtagaaacaaagtccaggctggtcttgaactcctgggctcaagcatttctcctacctcggccttccaagggctaggattacaggcatgagccactgtgcttggtccagatgtattactttttatgtttggtattattctgccaaaccaatcatgttattgtttttaatcattgaatcattggatctttaaataggagtgagtatataataataaggctcttctgttttcaacatctgtgctgggtcatgcattagcattaattactacaatgattctgtggggtaagtgttgtcctcatagacaagaaagctgaggtttagaggttaaaatgacacattgggggtaaataacagacactatatgttggagttgggaatcagatccaagtttgactccaaacccacttttaccacattgcttttgatctaaacttctattttgctaaaatacccctcacagctagtcatccatatcattgaagcgctcatgatttgatagattaacctttcatttttttaggtgactctagttagaaagtcttatttcacaatctgattgtttctttaacttaggatccaaacatgtccaaaataatgcagagtacatatgcaatcactcgtttatgctgtctagtcatgcacttaaagcaattttcaaatgtactcaaagtctctaggcttcggtacccagggttgcttcaagtatttgttcatgacacgtcaactcgatgattaaaatccttcaacacttctcattcacaataagaataaaatctacatcccttaccattcagtatgcaaaacttaaaatacataactttacccttaaatattttttctttctctgacttcataagtataggttatacctctataagaaagaaggtaaaaaactctcaacaatcccttctttcagagagaactactgttaacattttaacagacaacttcattcttttcctattcttttttataatgcttacaggaatgttaaatacttagacagatcttaagtacactagaattatctgtccctgaaataagttaggttgccctgccgcagaatttgtatctatagtttatttggattatttttgaaaaaagtaaaataacaatacccttacgaattttttggtgcatagcatctcagcttcttttatcattaaagatgtatgtataaaaaaaaaatgagtgtatatcaagttgttcatttcttagtttctggggtcttcttaaccagtacatagaactctttatgaattaactttagcttatgtttgaagtagtagtttgtttatagtgtcatggattttaaaatcaaactcagtttttatttcttcactaaaacctattttcatatgatatacatgttaaatttcccttttattttggtcatgcatcaaaataaatttactaagtactaaagagccaacattattttataagtgcctggccataggtattcactagttgaatagtttaatttgaaatgaattaattttaaatgggagttgttcaaaactatgccactttatttttcttttgtcctttgtgttattaaaatttaattgataattgtgtatattatatatatggagtacaatgtgatgttttgatatatgtttacagtgtagaatgattaaatcaatgtaataaatttattgcctcataccattttttgtggtaaaaaaaccacttaaaatctactcttaatatttttgaaatgtacaatgcattatttattatactcaccattctgtgtaatagatcagtaaagtttattcctcttgtctaactg

SEQ ID NO: 19709 - DNA, 866 bp, Homo sapiens
atccgtctgccacgggtcacgtgcttaggagccatattgtcgctagtggccgctggggctgggaggggtgtgctagagaggcgcagcttctctgggcgtggtttttatcctgggggaaggatcggtggaatgtgaggggaggtggaggagatggcggcgacggcccgggaagatggcgccagcggtcaagagcgaggtcagcggggctgcgagcactatgacagaggatgtctcctaaaggcaccttgctgtgacaagctttatacttgccgcttgtgtcatgataacaatgaagatcatcaactagatcgctttaaagtgaaggaagtgcagtgcataaactgtgaaaaaattcaacatgcccaacagacttgtgaagaatgtagcacattgtttggagaatattattgcgatatatgccatttgtttgacaaagataagaagcagtatcactgtgaaaactgtggaatttgtaggattggtccaaaggaagattttttccattgtttgaaatgtaacttatgcctagctatgaatcttcaaggaagacacaagtgtattgaaaatgtgtcccgacagaattgtccaatatgtttggaggacattcacacatcccgtgttgttgctcatgtcttgccatgtggacatcttttacataggtaaagtaacatctttttctcaatgatgtttgaaaatagtggagacagtttttgttttactaaaataatcttatattttctttcagaacgtgttatgaagaaatgttgaaagagtgagtgtttgggattttaaaaataattgtaagatgtttgacttttttgtgtgtgtggtgtggggaggtggacaaacattgttacttatactat

SEQ ID NO: 19710 - DNA, 611 bp, Homo sapiens
gaggatccctgatgcattagaccttaaaatagttcactgcataacatgacaaaaagcacaaaggctcattcagagaacatatttgttgttctccaacactgtaatagttataatttcaccactgatacattcatagaagtgtattatattttcatgaagctttgctttaagtgacactacgcgtgcagttcatttctagttcttgatagaactgcacttaattttcagtagtagtcttgactttttaagggctgtgttatattaagttctcccttactgttaaaacctaattaaatatgctttagaattttctaagacagtcctctggatcctctaaatgcaatcatgattgcatttagaccaggcaagaaaaatagactccagtgctgtaatttttttcactggaggagtgctaatgttgtatcaatctttacagtatccaaatacacaatgaacaaaagttagcccccataagagatgaaaattgtactacctggaatgtgcacaattgtttgaaacattttcccgtttttgtgtgataaaagcacaattctagggtggagggtttcatactaatctggaagtaagtttgtcagaagaatcaacgttat

SEQ ID NO: 19711 - DNA, 4445 bp, Homo sapiens
atccgtctgccacgggtcacgtgcttaggagccatattgtcgctagtggccgctggggctgggaggggtgtgctagagaggcgcagcttctctgggcgtggtttttatcctgggggaaggatcggtggaatgtgaggggaggtggaggagatggcggcgacggcccgggaagatggcgccagcggtcaagagcgaggtcagcggggctgcgagcactatgacagaggatgtctcctaaaggcaccttgctgtgacaagctttatacttgccgcttgtgtcatgataacaatgaagatcatcaactagatcgctttaaagtgaaggaagtgcagtgcataaactgtgaaaaaattcaacatgcccaacagacttgtgaagaatgtagcacattgtttggagaatattattgcgatatatgccatttgtttgacaaagataagaagcagtatcactgtgaaaactgtggaatttgtaggattggtccaaaggaagattttttccattgtttgaaatgtaacttatgcctagctatgaatcttcaaggaagacacaagtgtattgaaaatgtgtcccgacagaattgtccaatatgtttggaggacattcacacatcccgtgttgttgctcatgtcttgccatgtggacatcttttacatagaacgtgttatgaagaaatgttgaaagaaggctacagatgtccattatgtatgcactctgctttagatatgaccaggtattggagacagctggatgatgaagtagcacagactcctatgccatcagaatatcagaacatgactgtggatattctctgcaatgactgtaatggacgatccactgttcagtttcatatattaggcatgaaatgtaagatttgtgaatcctataatactgctcaagctggaggacgtagaatttcactggatcagcaatgacgagcctacacagtactggagaacttggcattttctgatatagaaaaaggctttccttggtatcgtgttatcatgtgtcgtcatctatgcattagagttgatgtgttttgtactagtgtcacagcataaaatcatattacaagtacgtaaggattcagggtctcttgatagacttatcatagctctatattgaatgaaagccactgtgcttgtgttttgattggaaattcctttagtgtcagttttttggaagccaatgatgtttgccactgatacattcatagaagtgtattatattttcatgaagctttgctttaagtgacactacgcgtgcagttcatttctagttcttgatagaactgcacttaattttcagtagtagtcttgactttttaagggctgtgttatattaagttctcccttactgttaaaacctaattaaatatgctttagaattttctaagacagtcctctggatcctctaaatgtgaattttgatgtaataactgctaataaaattatattgaaacagtgttttatagaaagttttttccaaagttttctatgtttggctcaattagggcagtatcatcagttctataatgtaaaagaaattttctttcttttgaggtattccataaaagtagttgggaaaattattatgtaaaataataagactcttccaaagccttaataaaaacatcaacattgaaaacagttttttttaggttgcccaaaattatttcttcaaagagtcattcattccttcatttagcaagtatttattgagcaactgctatgtggcagatatgtttctagatgctgtagagacaacagtgaacaataaagataaaagtccttgtcctcacagcagtacattctattgttcatcatatttgatcaatgtactcatttttctttatgcaaggagtggatgtcttattgtaaatgaatagaatatttcttccctaagcgtgtgaaaataggggatggatgagtgggaagggcatgggatattcctggcaagatctctgatttcataatacttttttgggctcatgtagtggaattaaatatacctcttacttcaggaacaaagttaacaaatatgtttgatgatccagccgactttgacactgttatctccgtaatagctttaccattaggctaggatgtaaaatgtacatttatcagttgataagtacctattgagcaccagttgtatttccaactttgagctatttgaatcttctttgaataaggaagttagccttttaactagaaagcctaagagttctggcacatttatttcttctttgttgaaatttattcacctagataaaggcagcagtttgggactcagatctttattttatcccaccttcttgtcttctgtattccactcttcttatgttctttcccttcatctgtttccttggcctggccagagcagcagtgctgatcttcatttgggaaaggatgttcctgggtattaccaattagtatacagataagtaaagactagttttccagatctaatacttttttttgaagtggttttgctctgtcatttaggctagagtgtagtgaagtgatcgtagctcactgcagccttgacttcctgggctgaactgatccttccacctcagcctcctgagtagctgggactacaggtgtgtgccaccatgcccagctaatttttaattgttttgtagaaacaaagtccaggctggtcttgaactcctgggctcaagcatttctcctacctcggccttccaagggctaggattacaggcatgagccactgtgcttggtccagatgtattactttttatgtttggtattattctgccaaaccaatcatgttattgtttttaatcattgaatcattggatctttaaataggagtgagtatataataataaggctcttctgttttcaacatctgtgctgggtcatgcattagcattaattactacaatgattctgtggggtaagtgttgtcctcatagacaagaaagctgaggtttagaggttaaaatgacacattgggggtaaataacagacactatatgttggagttgggaatcagatccaagtttgactccaaacccacttttaccacattgcttttgatctaaacttctattttgctaaaatacccctcacagctagtcatccatatcattgaagcgctcatgatttgatagattaacctttcatttttttaggtgactctagttagaaagtcttatttcacaatctgattgtttctttaacttaggatccaaacatgtccaaaataatgcagagtacatatgcaatcactcgtttatgctgtctagtcatgcacttaaagcaattttcaaatgtactcaaagtctctaggcttcggtacccagggttgcttcaagtatttgttcatgacacgtcaactcgatgattaaaatccttcaacacttctcattcacaataagaataaaatctacatcccttaccattcagtatgcaaaacttaaaatacataactttacccttaaatattttttctttctctgacttcataagtataggttatacctctataagaaagaaggtaaaaaactctcaacaatcccttctttcagagagaactactgttaacattttaacagacaacttcattcttttcctattcttttttataatgcttacaggaatgttaaatacttagacagatcttaagtacactagaattatctgtccctgaaataagttaggttgccctgccgcagaatttgtatctatagtttatttggattatttttgaaaaaagtaaaataacaatacccttacgaattttttggtgcatagcatctcagcttcttttatcattaaagatgtatgtataaaaaaaaaatgagtgtatatcaagttgttcatttcttagtttctggggtcttcttaaccagtacatagaactctttatgaattaactttagcttatgtttgaagtagtagtttgtttatagtgtcatggattttaaaatcaaactcagtttttatttcttcactaaaacctattttcatatgatatacatgttaaatttcccttttattttggtcatgcatcaaaataaatttactaagtactaaagagccaacattattttataagtgcctggccataggtattcactagttgaatagtttaatttgaaatgaattaattttaaatgggagttgttcaaaactatgccactttatttttcttttgtcctttgtgttattaaaatttaattgataattgtgtatattatatatatggagtacaatgtgatgttttgatatatgtttacagtgtagaatgattaaatcaatgtaataaatttattgcctcataccattttttgtggtaaaaaaaccacttaaaatctactcttaatatttttgaaatgtacaatgcattatttattatactcaccattctgtgtaatagatcagtaaagtttattcctcttgtctaactg

SEQ ID NO: 19712 - DNA, 1470 bp, Homo sapiens
atccgtctgccacgggtcacgtgcttaggagccatattgtcgctagtggccgctggggctgggaggggtgtgctagagaggcgcagcttctctgggcgtggtttttatcctgggggaaggatcggtggaatgtgaggggaggtggaggagatggcggcgacggcccgggaagatggcgccagcggtcaagagcgaggtcagcggggctgcgagcactatgacagaggatgtctcctaaaggcaccttgctgtgacaagctttatacttgccgcttgtgtcatgataacaatgaagatcatcaactagatcgctttaaagtgaaggaagtgcagtgcataaactgtgaaaaaattcaacatgcccaacagacttgtgaagaatgtagcacattgtttggagaatattattgcgatatatgccatttgtttgacaaagataagaagcagtatcactgtgaaaactgtggaatttgtaggattggtccaaaggaagattttttccattgtttgaaatgtaacttatgcctagctatgaatcttcaaggaagacacaagtgtattgaaaatgtgtcccgacagaattgtccaatatgtttggaggacattcacacatcccgtgttgttgctcatgtcttgccatgtggacatcttttacatagaacgtgttatgaagaaatgttgaaagaaggctacagatgtccattatgtatgcactctgctttagatatgaccaggtattggagacagctggatgatgaagtagcacagactcctatgccatcagaatatcagaacatgactgtggatattctctgcaatgactgtaatggacgatccactgttcagtttcatatattaggcatgaaatgtaagatttgtgaatcctataatactgctcaagctggaggacgtagaatttcactggatcagcaatgacgagcctacacagtactggagaacttggcattttctgatatagaaaaaggctttccttggtatcgtgttatcatgtgtcgtcatctatgcattagagttgatgtgttttgtactagtgtcacagcataaaatcatattacaagtacgtaaggattcagggtctcttgatagacttatcatagctctatattgaatgaaagccactgtgcttgtgttttgattggaaattcctttagtgtcagttttttggaagccaatgatgtttgccactgatacattcatagaagtgtattatattttcatgaagctttgctttaagtgacactacgcgtgcagttcatttctagttcttgatagaactgcacttaattttcagtagtagtcttgactttttaagggctgtgttatattaagttctcccttactgttaaaacctaattaaatatgctttagaattttctaagacagtcctctggatcctctaaatgtgaattttgatgtaataactgctaataaaattatattgaaacagtg

SEQ ID NO: 19713 - DNA, 4487 bp, Homo sapiens
atccgtctgccacgggtcacgtgcttaggagccatattgtcgctagtggccgctggggctgggaggggtgtgctagagaggcgcagcttctctgggcgtggtttttatcctgggggaaggatcggtggaatgtgaggggaggtggaggagatggcggcgacggcccgggaagatggcgccagcggtcaagagcgaggtcagcggggctgcgagcactatgacagaggatgtctcctaaaggtgacgccttctatggactcttccctgacaagcttccgtcaggcaccttgctgtgacaagctttatacttgccgcttgtgtcatgataacaatgaagatcatcaactagatcgctttaaagtgaaggaagtgcagtgcataaactgtgaaaaaattcaacatgcccaacagacttgtgaagaatgtagcacattgtttggagaatattattgcgatatatgccatttgtttgacaaagataagaagcagtatcactgtgaaaactgtggaatttgtaggattggtccaaaggaagattttttccattgtttgaaatgtaacttatgcctagctatgaatcttcaaggaagacacaagtgtattgaaaatgtgtcccgacagaattgtccaatatgtttggaggacattcacacatcccgtgttgttgctcatgtcttgccatgtggacatcttttacatagaacgtgttatgaagaaatgttgaaagaaggctacagatgtccattatgtatgcactctgctttagatatgaccaggtattggagacagctggatgatgaagtagcacagactcctatgccatcagaatatcagaacatgactgtggatattctctgcaatgactgtaatggacgatccactgttcagtttcatatattaggcatgaaatgtaagatttgtgaatcctataatactgctcaagctggaggacgtagaatttcactggatcagcaatgacgagcctacacagtactggagaacttggcattttctgatatagaaaaaggctttccttggtatcgtgttatcatgtgtcgtcatctatgcattagagttgatgtgttttgtactagtgtcacagcataaaatcatattacaagtacgtaaggattcagggtctcttgatagacttatcatagctctatattgaatgaaagccactgtgcttgtgttttgattggaaattcctttagtgtcagttttttggaagccaatgatgtttgccactgatacattcatagaagtgtattatattttcatgaagctttgctttaagtgacactacgcgtgcagttcatttctagttcttgatagaactgcacttaattttcagtagtagtcttgactttttaagggctgtgttatattaagttctcccttactgttaaaacctaattaaatatgctttagaattttctaagacagtcctctggatcctctaaatgtgaattttgatgtaataactgctaataaaattatattgaaacagtgttttatagaaagttttttccaaagttttctatgtttggctcaattagggcagtatcatcagttctataatgtaaaagaaattttctttcttttgaggtattccataaaagtagttgggaaaattattatgtaaaataataagactcttccaaagccttaataaaaacatcaacattgaaaacagttttttttaggttgcccaaaattatttcttcaaagagtcattcattccttcatttagcaagtatttattgagcaactgctatgtggcagatatgtttctagatgctgtagagacaacagtgaacaataaagataaaagtccttgtcctcacagcagtacattctattgttcatcatatttgatcaatgtactcatttttctttatgcaaggagtggatgtcttattgtaaatgaatagaatatttcttccctaagcgtgtgaaaataggggatggatgagtgggaagggcatgggatattcctggcaagatctctgatttcataatacttttttgggctcatgtagtggaattaaatatacctcttacttcaggaacaaagttaacaaatatgtttgatgatccagccgactttgacactgttatctccgtaatagctttaccattaggctaggatgtaaaatgtacatttatcagttgataagtacctattgagcaccagttgtatttccaactttgagctatttgaatcttctttgaataaggaagttagccttttaactagaaagcctaagagttctggcacatttatttcttctttgttgaaatttattcacctagataaaggcagcagtttgggactcagatctttattttatcccaccttcttgtcttctgtattccactcttcttatgttctttcccttcatctgtttccttggcctggccagagcagcagtgctgatcttcatttgggaaaggatgttcctgggtattaccaattagtatacagataagtaaagactagttttccagatctaatacttttttttgaagtggttttgctctgtcatttaggctagagtgtagtgaagtgatcgtagctcactgcagccttgacttcctgggctgaactgatccttccacctcagcctcctgagtagctgggactacaggtgtgtgccaccatgcccagctaatttttaattgttttgtagaaacaaagtccaggctggtcttgaactcctgggctcaagcatttctcctacctcggccttccaagggctaggattacaggcatgagccactgtgcttggtccagatgtattactttttatgtttggtattattctgccaaaccaatcatgttattgtttttaatcattgaatcattggatctttaaataggagtgagtatataataataaggctcttctgttttcaacatctgtgctgggtcatgcattagcattaattactacaatgattctgtggggtaagtgttgtcctcatagacaagaaagctgaggtttagaggttaaaatgacacattgggggtaaataacagacactatatgttggagttgggaatcagatccaagtttgactccaaacccacttttaccacattgcttttgatctaaacttctattttgctaaaatacccctcacagctagtcatccatatcattgaagcgctcatgatttgatagattaacctttcatttttttaggtgactctagttagaaagtcttatttcacaatctgattgtttctttaacttaggatccaaacatgtccaaaataatgcagagtacatatgcaatcactcgtttatgctgtctagtcatgcacttaaagcaattttcaaatgtactcaaagtctctaggcttcggtacccagggttgcttcaagtatttgttcatgacacgtcaactcgatgattaaaatccttcaacacttctcattcacaataagaataaaatctacatcccttaccattcagtatgcaaaacttaaaatacataactttacccttaaatattttttctttctctgacttcataagtataggttatacctctataagaaagaaggtaaaaaactctcaacaatcccttctttcagagagaactactgttaacattttaacagacaacttcattcttttcctattcttttttataatgcttacaggaatgttaaatacttagacagatcttaagtacactagaattatctgtccctgaaataagttaggttgccctgccgcagaatttgtatctatagtttatttggattatttttgaaaaaagtaaaataacaatacccttacgaattttttggtgcatagcatctcagcttcttttatcattaaagatgtatgtataaaaaaaaaatgagtgtatatcaagttgttcatttcttagtttctggggtcttcttaaccagtacatagaactctttatgaattaactttagcttatgtttgaagtagtagtttgtttatagtgtcatggattttaaaatcaaactcagtttttatttcttcactaaaacctattttcatatgatatacatgttaaatttcccttttattttggtcatgcatcaaaataaatttactaagtactaaagagccaacattattttataagtgcctggccataggtattcactagttgaatagtttaatttgaaatgaattaattttaaatgggagttgttcaaaactatgccactttatttttcttttgtcctttgtgttattaaaatttaattgataattgtgtatattatatatatggagtacaatgtgatgttttgatatatgtttacagtgtagaatgattaaatcaatgtaataaatttattgcctcataccattttttgtggtaaaaaaaccacttaaaatctactcttaatatttttgaaatgtacaatgcattatttattatactcaccattctgtgtaatagatcagtaaagtttattcctcttgtctaactg

SEQ ID NO: 19714 - DNA, 4401 bp, Homo sapiens
atccgtctgccacgggtcacgtgcttaggagccatattgtcgctagtggccgctggggctgggaggggtgtgctagagaggcgcagcttctctgggcgtggtttttatcctgggggaaggatcggtggaatgtgaggggaggtggaggagatggcggcgacggcccgggaagatggcgccagcggtcaagagcgaggcaccttgctgtgacaagctttatacttgccgcttgtgtcatgataacaatgaagatcatcaactagatcgctttaaagtgaaggaagtgcagtgcataaactgtgaaaaaattcaacatgcccaacagacttgtgaagaatgtagcacattgtttggagaatattattgcgatatatgccatttgtttgacaaagataagaagcagtatcactgtgaaaactgtggaatttgtaggattggtccaaaggaagattttttccattgtttgaaatgtaacttatgcctagctatgaatcttcaaggaagacacaagtgtattgaaaatgtgtcccgacagaattgtccaatatgtttggaggacattcacacatcccgtgttgttgctcatgtcttgccatgtggacatcttttacatagaacgtgttatgaagaaatgttgaaagaaggctacagatgtccattatgtatgcactctgctttagatatgaccaggtattggagacagctggatgatgaagtagcacagactcctatgccatcagaatatcagaacatgactgtggatattctctgcaatgactgtaatggacgatccactgttcagtttcatatattaggcatgaaatgtaagatttgtgaatcctataatactgctcaagctggaggacgtagaatttcactggatcagcaatgacgagcctacacagtactggagaacttggcattttctgatatagaaaaaggctttccttggtatcgtgttatcatgtgtcgtcatctatgcattagagttgatgtgttttgtactagtgtcacagcataaaatcatattacaagtacgtaaggattcagggtctcttgatagacttatcatagctctatattgaatgaaagccactgtgcttgtgttttgattggaaattcctttagtgtcagttttttggaagccaatgatgtttgccactgatacattcatagaagtgtattatattttcatgaagctttgctttaagtgacactacgcgtgcagttcatttctagttcttgatagaactgcacttaattttcagtagtagtcttgactttttaagggctgtgttatattaagttctcccttactgttaaaacctaattaaatatgctttagaattttctaagacagtcctctggatcctctaaatgtgaattttgatgtaataactgctaataaaattatattgaaacagtgttttatagaaagttttttccaaagttttctatgtttggctcaattagggcagtatcatcagttctataatgtaaaagaaattttctttcttttgaggtattccataaaagtagttgggaaaattattatgtaaaataataagactcttccaaagccttaataaaaacatcaacattgaaaacagttttttttaggttgcccaaaattatttcttcaaagagtcattcattccttcatttagcaagtatttattgagcaactgctatgtggcagatatgtttctagatgctgtagagacaacagtgaacaataaagataaaagtccttgtcctcacagcagtacattctattgttcatcatatttgatcaatgtactcatttttctttatgcaaggagtggatgtcttattgtaaatgaatagaatatttcttccctaagcgtgtgaaaataggggatggatgagtgggaagggcatgggatattcctggcaagatctctgatttcataatacttttttgggctcatgtagtggaattaaatatacctcttacttcaggaacaaagttaacaaatatgtttgatgatccagccgactttgacactgttatctccgtaatagctttaccattaggctaggatgtaaaatgtacatttatcagttgataagtacctattgagcaccagttgtatttccaactttgagctatttgaatcttctttgaataaggaagttagccttttaactagaaagcctaagagttctggcacatttatttcttctttgttgaaatttattcacctagataaaggcagcagtttgggactcagatctttattttatcccaccttcttgtcttctgtattccactcttcttatgttctttcccttcatctgtttccttggcctggccagagcagcagtgctgatcttcatttgggaaaggatgttcctgggtattaccaattagtatacagataagtaaagactagttttccagatctaatacttttttttgaagtggttttgctctgtcatttaggctagagtgtagtgaagtgatcgtagctcactgcagccttgacttcctgggctgaactgatccttccacctcagcctcctgagtagctgggactacaggtgtgtgccaccatgcccagctaatttttaattgttttgtagaaacaaagtccaggctggtcttgaactcctgggctcaagcatttctcctacctcggccttccaagggctaggattacaggcatgagccactgtgcttggtccagatgtattactttttatgtttggtattattctgccaaaccaatcatgttattgtttttaatcattgaatcattggatctttaaataggagtgagtatataataataaggctcttctgttttcaacatctgtgctgggtcatgcattagcattaattactacaatgattctgtggggtaagtgttgtcctcatagacaagaaagctgaggtttagaggttaaaatgacacattgggggtaaataacagacactatatgttggagttgggaatcagatccaagtttgactccaaacccacttttaccacattgcttttgatctaaacttctattttgctaaaatacccctcacagctagtcatccatatcattgaagcgctcatgatttgatagattaacctttcatttttttaggtgactctagttagaaagtcttatttcacaatctgattgtttctttaacttaggatccaaacatgtccaaaataatgcagagtacatatgcaatcactcgtttatgctgtctagtcatgcacttaaagcaattttcaaatgtactcaaagtctctaggcttcggtacccagggttgcttcaagtatttgttcatgacacgtcaactcgatgattaaaatccttcaacacttctcattcacaataagaataaaatctacatcccttaccattcagtatgcaaaacttaaaatacataactttacccttaaatattttttctttctctgacttcataagtataggttatacctctataagaaagaaggtaaaaaactctcaacaatcccttctttcagagagaactactgttaacattttaacagacaacttcattcttttcctattcttttttataatgcttacaggaatgttaaatacttagacagatcttaagtacactagaattatctgtccctgaaataagttaggttgccctgccgcagaatttgtatctatagtttatttggattatttttgaaaaaagtaaaataacaatacccttacgaattttttggtgcatagcatctcagcttcttttatcattaaagatgtatgtataaaaaaaaaatgagtgtatatcaagttgttcatttcttagtttctggggtcttcttaaccagtacatagaactctttatgaattaactttagcttatgtttgaagtagtagtttgtttatagtgtcatggattttaaaatcaaactcagtttttatttcttcactaaaacctattttcatatgatatacatgttaaatttcccttttattttggtcatgcatcaaaataaatttactaagtactaaagagccaacattattttataagtgcctggccataggtattcactagttgaatagtttaatttgaaatgaattaattttaaatgggagttgttcaaaactatgccactttatttttcttttgtcctttgtgttattaaaatttaattgataattgtgtatattatatatatggagtacaatgtgatgttttgatatatgtttacagtgtagaatgattaaatcaatgtaataaatttattgcctcataccattttttgtggtaaaaaaaccacttaaaatctactcttaatatttttgaaatgtacaatgcattatttattatactcaccattctgtgtaatagatcagtaaagtttattcctcttgtctaactg

SEQ ID NO: 19715 - DNA, 1705 bp, Homo sapiens
  misc_feature (1670)..(1670): n is a, c, g, or t
  misc_feature (1684)..(1685): n is a, c, g, or t
  misc_feature (1692)..(1692): n is a, c, g, or t
  misc_feature (1705)..(1705): n is a, c, g, or t
atccgtctgccacgggtcacgtgcttaggagccatattgtcgctagtggccgctggggctgggaggggtgtgctagagaggcgcagcttctctgggcgtggtttttatcctgggggaaggatcggtggaatgtgaggggaggtggaggagatggcggcgacggcccgggaagatggcgccagcggtcaagagcgaggtcagcggggctgcgagcactatgacagaggatgtctcctaaaggcaccttgctgtgacaagctttatacttgccgcttgtgtcatgataacaatgaagatcatcaactagatcgctttaaagtgaaggaagtgcagtgcataaactgtgaaaaaattcaacatgcccaacagacttgtgaagaatgtagcacattgtttggagaatattattgcgatatatgccatttgtttgacaaagataagaagcagtatcactgtgaaaactgtggaatttgtaggattggtccaaaggaagattttttccattgtttgaaatgtaacttatgcctagctatgaatcttcaaggaagacacaagtgtattgaaaatgtgtcccgacagaattgtccaatatgtttggaggacattcacacatcccgtgttgttgctcatgtcttgccatgtggacatcttttacatagaacgtgttatgaagaaatgttgaaagaaggctacagatgtccattatgtatgcactctgctttagatatgaccaggtattggagacagctggatgatgaagtagcacagactcctatgccatcagaatatcagaacatgactgtggatattctctgcaatgactgtaatggacgatccactgttcagtttcatatattaggcatgaaatgtaagatttgtgaatcctataatactgctcaagctggaggacgtagaatttcactggatcagcaatgacgagcctacacagtactggagaacttggcattttctgatatagaaaaaggctttccttggtatcgtgttatcatgtgtcgtcatctatgcattagagttgatgtgttttgtactagtgtcacagcataaaatcatattacaagtacgtaaggattcagggtctcttgatagacttatcatagctctatattgaatgaaagccactgtgcttgtgttttgattggaaattcctttagtgtcagttttttggaagccaatgatgtttgccactgatacattcatagaagtgtattatattttcatgaagctttgctttaagtgacactacgcgtgcagttcatttctagttcttgatagaactgcacttaattttcagtagtagtcttgactttttaagggctgtgttatattaagttctcccttactgttaaaacctaattaaatatgctttagaattttctaagacagtcctctggatcctctaaatgtgaattttgatgtaataactgctaataaaattatattgaaacagtgttttatagaaagttttttccaaagttttctatgtttggctcaattagggcagtatcatcagttctataatgtaaaagaaattttctttcttttgaggtattccataaaagtagttgggaaaattattatgtaaaataataagactcttccaaagccttaatagccacgaatgcggccaaattttcctttttttttaaaantttttttttttttnnttttttnttttttttttttn

SEQ ID NO: 19716 - DNA, 4418 bp, Homo sapiens
atccgtctgccacgggtcacgtgcttaggagccatattgtcgctagtggccgctggggctgggaggggtgtgctagagaggcgcagcttctctgggcgtggtttttatcctgggggaaggatcggtggaatgtgaggggaggtggaggagatggcggcgacggcccgggaagatggcgccagcggtcaagagcgaggtcagcggggctgcgagcactatgacagaggatgtctcctaaaggcaccttgctgtgacaagctttatacttgccgcttgtgtcatgataacaatgaagatcatcaactagatcgctttaaagtgaaggaagtgcagtgcataaactgtgaaaaaattcaacatgcccaacagacttgtgaagaatgtagcacattgtttggagaatattattgcgatatatgccatttgtttgacaaagataagaagcagtatcactgtgaaaactgtggaatttgtaggattggtccaaaggaagattttttccattgtttgaaatgtaacttatgcctagctatgaatcttcaaggaagacacaagtgtattgaaaatgtgtcccgacagaattgtccaatatgtttggaggacattcacacatcccgtgttgttgctcatgtcttgccatgtggacatcttttacatagaggctacagatgtccattatgtatgcactctgctttagatatgaccaggtattggagacagctggatgatgaagtagcacagactcctatgccatcagaatatcagaacatgactgtggatattctctgcaatgactgtaatggacgatccactgttcagtttcatatattaggcatgaaatgtaagatttgtgaatcctataatactgctcaagctggaggacgtagaatttcactggatcagcaatgacgagcctacacagtactggagaacttggcattttctgatatagaaaaaggctttccttggtatcgtgttatcatgtgtcgtcatctatgcattagagttgatgtgttttgtactagtgtcacagcataaaatcatattacaagtacgtaaggattcagggtctcttgatagacttatcatagctctatattgaatgaaagccactgtgcttgtgttttgattggaaattcctttagtgtcagttttttggaagccaatgatgtttgccactgatacattcatagaagtgtattatattttcatgaagctttgctttaagtgacactacgcgtgcagttcatttctagttcttgatagaactgcacttaattttcagtagtagtcttgactttttaagggctgtgttatattaagttctcccttactgttaaaacctaattaaatatgctttagaattttctaagacagtcctctggatcctctaaatgtgaattttgatgtaataactgctaataaaattatattgaaacagtgttttatagaaagttttttccaaagttttctatgtttggctcaattagggcagtatcatcagttctataatgtaaaagaaattttctttcttttgaggtattccataaaagtagttgggaaaattattatgtaaaataataagactcttccaaagccttaataaaaacatcaacattgaaaacagttttttttaggttgcccaaaattatttcttcaaagagtcattcattccttcatttagcaagtatttattgagcaactgctatgtggcagatatgtttctagatgctgtagagacaacagtgaacaataaagataaaagtccttgtcctcacagcagtacattctattgttcatcatatttgatcaatgtactcatttttctttatgcaaggagtggatgtcttattgtaaatgaatagaatatttcttccctaagcgtgtgaaaataggggatggatgagtgggaagggcatgggatattcctggcaagatctctgatttcataatacttttttgggctcatgtagtggaattaaatatacctcttacttcaggaacaaagttaacaaatatgtttgatgatccagccgactttgacactgttatctccgtaatagctttaccattaggctaggatgtaaaatgtacatttatcagttgataagtacctattgagcaccagttgtatttccaactttgagctatttgaatcttctttgaataaggaagttagccttttaactagaaagcctaagagttctggcacatttatttcttctttgttgaaatttattcacctagataaaggcagcagtttgggactcagatctttattttatcccaccttcttgtcttctgtattccactcttcttatgttctttcccttcatctgtttccttggcctggccagagcagcagtgctgatcttcatttgggaaaggatgttcctgggtattaccaattagtatacagataagtaaagactagttttccagatctaatacttttttttgaagtggttttgctctgtcatttaggctagagtgtagtgaagtgatcgtagctcactgcagccttgacttcctgggctgaactgatccttccacctcagcctcctgagtagctgggactacaggtgtgtgccaccatgcccagctaatttttaattgttttgtagaaacaaagtccaggctggtcttgaactcctgggctcaagcatttctcctacctcggccttccaagggctaggattacaggcatgagccactgtgcttggtccagatgtattactttttatgtttggtattattctgccaaaccaatcatgttattgtttttaatcattgaatcattggatctttaaataggagtgagtatataataataaggctcttctgttttcaacatctgtgctgggtcatgcattagcattaattactacaatgattctgtggggtaagtgttgtcctcatagacaagaaagctgaggtttagaggttaaaatgacacattgggggtaaataacagacactatatgttggagttgggaatcagatccaagtttgactccaaacccacttttaccacattgcttttgatctaaacttctattttgctaaaatacccctcacagctagtcatccatatcattgaagcgctcatgatttgatagattaacctttcatttttttaggtgactctagttagaaagtcttatttcacaatctgattgtttctttaacttaggatccaaacatgtccaaaataatgcagagtacatatgcaatcactcgtttatgctgtctagtcatgcacttaaagcaattttcaaatgtactcaaagtctctaggcttcggtacccagggttgcttcaagtatttgttcatgacacgtcaactcgatgattaaaatccttcaacacttctcattcacaataagaataaaatctacatcccttaccattcagtatgcaaaacttaaaatacataactttacccttaaatattttttctttctctgacttcataagtataggttatacctctataagaaagaaggtaaaaaactctcaacaatcccttctttcagagagaactactgttaacattttaacagacaacttcattcttttcctattcttttttataatgcttacaggaatgttaaatacttagacagatcttaagtacactagaattatctgtccctgaaataagttaggttgccctgccgcagaatttgtatctatagtttatttggattatttttgaaaaaagtaaaataacaatacccttacgaattttttggtgcatagcatctcagcttcttttatcattaaagatgtatgtataaaaaaaaaatgagtgtatatcaagttgttcatttcttagtttctggggtcttcttaaccagtacatagaactctttatgaattaactttagcttatgtttgaagtagtagtttgtttatagtgtcatggattttaaaatcaaactcagtttttatttcttcactaaaacctattttcatatgatatacatgttaaatttcccttttattttggtcatgcatcaaaataaatttactaagtactaaagagccaacattattttataagtgcctggccataggtattcactagttgaatagtttaatttgaaatgaattaattttaaatgggagttgttcaaaactatgccactttatttttcttttgtcctttgtgttattaaaatttaattgataattgtgtatattatatatatggagtacaatgtgatgttttgatatatgtttacagtgtagaatgattaaatcaatgtaataaatttattgcctcataccattttttgtggtaaaaaaaccacttaaaatctactcttaatatttttgaaatgtacaatgcattatttattatactcaccattctgtgtaatagatcagtaaagtttattcctcttgtctaactg

SEQ ID NO: 19717 - DNA, 1443 bp, Homo sapiens
atccgtctgccacgggtcacgtgcttaggagccatattgtcgctagtggccgctggggctgggaggggtgtgctagagaggcgcagcttctctgggcgtggtttttatcctgggggaaggatcggtggaatgtgaggggaggtggaggagatggcggcgacggcccgggaagatggcgccagcggtcaagagcgaggtcagcggggctgcgagcactatgacagaggatgtctcctaaaggcaccttgctgtgacaagctttatacttgccgcttgtgtcatgataacaatgaagatcatcaactagatcgctttaaagtgaaggaagtgcagtgcataaactgtgaaaaaattcaacatgcccaacagacttgtgaagaatgtagcacattgtttggagaatattattgcgatatatgccatttgtttgacaaagataagaagcagtatcactgtgaaaactgtggaatttgtaggattggtccaaaggaagattttttccattgtttgaaatgtaacttatgcctagctatgaatcttcaaggaagacacaagtgtattgaaaatgtgtcccgacagaattgtccaatatgtttggaggacattcacacatcccgtgttgttgctcatgtcttgccatgtggacatcttttacatagaggctacagatgtccattatgtatgcactctgctttagatatgaccaggtattggagacagctggatgatgaagtagcacagactcctatgccatcagaatatcagaacatgactgtggatattctctgcaatgactgtaatggacgatccactgttcagtttcatatattaggcatgaaatgtaagatttgtgaatcctataatactgctcaagctggaggacgtagaatttcactggatcagcaatgacgagcctacacagtactggagaacttggcattttctgatatagaaaaaggctttccttggtatcgtgttatcatgtgtcgtcatctatgcattagagttgatgtgttttgtactagtgtcacagcataaaatcatattacaagtacgtaaggattcagggtctcttgatagacttatcatagctctatattgaatgaaagccactgtgcttgtgttttgattggaaattcctttagtgtcagttttttggaagccaatgatgtttgccactgatacattcatagaagtgtattatattttcatgaagctttgctttaagtgacactacgcgtgcagttcatttctagttcttgatagaactgcacttaattttcagtagtagtcttgactttttaagggctgtgttatattaagttctcccttactgttaaaacctaattaaatatgctttagaattttctaagacagtcctctggatcctctaaatgtgaattttgatgtaataactgctaataaaattatattgaaacagtg

SEQ ID NO: 19718 - DNA, 4374 bp, Homo sapiens
atccgtctgccacgggtcacgtgcttaggagccatattgtcgctagtggccgctggggctgggaggggtgtgctagagaggcgcagcttctctgggcgtggtttttatcctgggggaaggatcggtggaatgtgaggggaggtggaggagatggcggcgacggcccgggaagatggcgccagcggtcaagagcgaggcaccttgctgtgacaagctttatacttgccgcttgtgtcatgataacaatgaagatcatcaactagatcgctttaaagtgaaggaagtgcagtgcataaactgtgaaaaaattcaacatgcccaacagacttgtgaagaatgtagcacattgtttggagaatattattgcgatatatgccatttgtttgacaaagataagaagcagtatcactgtgaaaactgtggaatttgtaggattggtccaaaggaagattttttccattgtttgaaatgtaacttatgcctagctatgaatcttcaaggaagacacaagtgtattgaaaatgtgtcccgacagaattgtccaatatgtttggaggacattcacacatcccgtgttgttgctcatgtcttgccatgtggacatcttttacatagaggctacagatgtccattatgtatgcactctgctttagatatgaccaggtattggagacagctggatgatgaagtagcacagactcctatgccatcagaatatcagaacatgactgtggatattctctgcaatgactgtaatggacgatccactgttcagtttcatatattaggcatgaaatgtaagatttgtgaatcctataatactgctcaagctggaggacgtagaatttcactggatcagcaatgacgagcctacacagtactggagaacttggcattttctgatatagaaaaaggctttccttggtatcgtgttatcatgtgtcgtcatctatgcattagagttgatgtgttttgtactagtgtcacagcataaaatcatattacaagtacgtaaggattcagggtctcttgatagacttatcatagctctatattgaatgaaagccactgtgcttgtgttttgattggaaattcctttagtgtcagttttttggaagccaatgatgtttgccactgatacattcatagaagtgtattatattttcatgaagctttgctttaagtgacactacgcgtgcagttcatttctagttcttgatagaactgcacttaattttcagtagtagtcttgactttttaagggctgtgttatattaagttctcccttactgttaaaacctaattaaatatgctttagaattttctaagacagtcctctggatcctctaaatgtgaattttgatgtaataactgctaataaaattatattgaaacagtgttttatagaaagttttttccaaagttttctatgtttggctcaattagggcagtatcatcagttctataatgtaaaagaaattttctttcttttgaggtattccataaaagtagttgggaaaattattatgtaaaataataagactcttccaaagccttaataaaaacatcaacattgaaaacagttttttttaggttgcccaaaattatttcttcaaagagtcattcattccttcatttagcaagtatttattgagcaactgctatgtggcagatatgtttctagatgctgtagagacaacagtgaacaataaagataaaagtccttgtcctcacagcagtacattctattgttcatcatatttgatcaatgtactcatttttctttatgcaaggagtggatgtcttattgtaaatgaatagaatatttcttccctaagcgtgtgaaaataggggatggatgagtgggaagggcatgggatattcctggcaagatctctgatttcataatacttttttgggctcatgtagtggaattaaatatacctcttacttcaggaacaaagttaacaaatatgtttgatgatccagccgactttgacactgttatctccgtaatagctttaccattaggctaggatgtaaaatgtacatttatcagttgataagtacctattgagcaccagttgtatttccaactttgagctatttgaatcttctttgaataaggaagttagccttttaactagaaagcctaagagttctggcacatttatttcttctttgttgaaatttattcacctagataaaggcagcagtttgggactcagatctttattttatcccaccttcttgtcttctgtattccactcttcttatgttctttcccttcatctgtttccttggcctggccagagcagcagtgctgatcttcatttgggaaaggatgttcctgggtattaccaattagtatacagataagtaaagactagttttccagatctaatacttttttttgaagtggttttgctctgtcatttaggctagagtgtagtgaagtgatcgtagctcactgcagccttgacttcctgggctgaactgatccttccacctcagcctcctgagtagctgggactacaggtgtgtgccaccatgcccagctaatttttaattgttttgtagaaacaaagtccaggctggtcttgaactcctgggctcaagcatttctcctacctcggccttccaagggctaggattacaggcatgagccactgtgcttggtccagatgtattactttttatgtttggtattattctgccaaaccaatcatgttattgtttttaatcattgaatcattggatctttaaataggagtgagtatataataataaggctcttctgttttcaacatctgtgctgggtcatgcattagcattaattactacaatgattctgtggggtaagtgttgtcctcatagacaagaaagctgaggtttagaggttaaaatgacacattgggggtaaataacagacactatatgttggagttgggaatcagatccaagtttgactccaaacccacttttaccacattgcttttgatctaaacttctattttgctaaaatacccctcacagctagtcatccatatcattgaagcgctcatgatttgatagattaacctttcatttttttaggtgactctagttagaaagtcttatttcacaatctgattgtttctttaacttaggatccaaacatgtccaaaataatgcagagtacatatgcaatcactcgtttatgctgtctagtcatgcacttaaagcaattttcaaatgtactcaaagtctctaggcttcggtacccagggttgcttcaagtatttgttcatgacacgtcaactcgatgattaaaatccttcaacacttctcattcacaataagaataaaatctacatcccttaccattcagtatgcaaaacttaaaatacataactttacccttaaatattttttctttctctgacttcataagtataggttatacctctataagaaagaaggtaaaaaactctcaacaatcccttctttcagagagaactactgttaacattttaacagacaacttcattcttttcctattcttttttataatgcttacaggaatgttaaatacttagacagatcttaagtacactagaattatctgtccctgaaataagttaggttgccctgccgcagaatttgtatctatagtttatttggattatttttgaaaaaagtaaaataacaatacccttacgaattttttggtgcatagcatctcagcttcttttatcattaaagatgtatgtataaaaaaaaaatgagtgtatatcaagttgttcatttcttagtttctggggtcttcttaaccagtacatagaactctttatgaattaactttagcttatgtttgaagtagtagtttgtttatagtgtcatggattttaaaatcaaactcagtttttatttcttcactaaaacctattttcatatgatatacatgttaaatttcccttttattttggtcatgcatcaaaataaatttactaagtactaaagagccaacattattttataagtgcctggccataggtattcactagttgaatagtttaatttgaaatgaattaattttaaatgggagttgttcaaaactatgccactttatttttcttttgtcctttgtgttattaaaatttaattgataattgtgtatattatatatatggagtacaatgtgatgttttgatatatgtttacagtgtagaatgattaaatcaatgtaataaatttattgcctcataccattttttgtggtaaaaaaaccacttaaaatctactcttaatatttttgaaatgtacaatgcattatttattatactcaccattctgtgtaatagatcagtaaagtttattcctcttgtctaactg

SEQ ID NO: 19719 - DNA, 3842 bp, Homo sapiens
acctgaggaccctacctaaatggctgtctgcgatgatgcagcatctttgacatagaacgtgtgatgacgaaatgtggagaagaaggctacagatgtccattatgtatgcactctgctttagatatgaccaggtattggagacagctggatgatgaagtagcacagactcctatgccatcagaatatcagaacatgactgtggatattctctgcaatgactgtaatggacgatccactgttcagtttcatatattaggcatgaaatgtaagatttgtgaatcctataatactgctcaagctggaggacgtagaatttcactggatcagcaatgacgagcctacacagtactggagaacttggcattttctgatatagaaaaaggctttccttggtatcgtgttatcatgtgtcgtcatctatgcattagagttgatgtgttttgtactagtgtcacagcataaaatcatattacaagtacgtaaggattcagggtctcttgatagacttatcatagctctatattgaatgaaagccactgtgcttgtgttttgattggaaattcctttagtgtcagttttttggaagccaatgatgtttgccactgatacattcatagaagtgtattatattttcatgaagctttgctttaagtgacactacgcgtgcagttcatttctagttcttgatagaactgcacttaattttcagtagtagtcttgactttttaagggctgtgttatattaagttctcccttactgttaaaacctaattaaatatgctttagaattttctaagacagtcctctggatcctctaaatgtgaattttgatgtaataactgctaataaaattatattgaaacagtgttttatagaaagttttttccaaagttttctatgtttggctcaattagggcagtatcatcagttctataatgtaaaagaaattttctttcttttgaggtattccataaaagtagttgggaaaattattatgtaaaataataagactcttccaaagccttaataaaaacatcaacattgaaaacagttttttttaggttgcccaaaattatttcttcaaagagtcattcattccttcatttagcaagtatttattgagcaactgctatgtggcagatatgtttctagatgctgtagagacaacagtgaacaataaagataaaagtccttgtcctcacagcagtacattctattgttcatcatatttgatcaatgtactcatttttctttatgcaaggagtggatgtcttattgtaaatgaatagaatatttcttccctaagcgtgtgaaaataggggatggatgagtgggaagggcatgggatattcctggcaagatctctgatttcataatacttttttgggctcatgtagtggaattaaatatacctcttacttcaggaacaaagttaacaaatatgtttgatgatccagccgactttgacactgttatctccgtaatagctttaccattaggctaggatgtaaaatgtacatttatcagttgataagtacctattgagcaccagttgtatttccaactttgagctatttgaatcttctttgaataaggaagttagccttttaactagaaagcctaagagttctggcacatttatttcttctttgttgaaatttattcacctagataaaggcagcagtttgggactcagatctttattttatcccaccttcttgtcttctgtattccactcttcttatgttctttcccttcatctgtttccttggcctggccagagcagcagtgctgatcttcatttgggaaaggatgttcctgggtattaccaattagtatacagataagtaaagactagttttccagatctaatacttttttttgaagtggttttgctctgtcatttaggctagagtgtagtgaagtgatcgtagctcactgcagccttgacttcctgggctgaactgatccttccacctcagcctcctgagtagctgggactacaggtgtgtgccaccatgcccagctaatttttaattgttttgtagaaacaaagtccaggctggtcttgaactcctgggctcaagcatttctcctacctcggccttccaagggctaggattacaggcatgagccactgtgcttggtccagatgtattactttttatgtttggtattattctgccaaaccaatcatgttattgtttttaatcattgaatcattggatctttaaataggagtgagtatataataataaggctcttctgttttcaacatctgtgctgggtcatgcattagcattaattactacaatgattctgtggggtaagtgttgtcctcatagacaagaaagctgaggtttagaggttaaaatgacacattgggggtaaataacagacactatatgttggagttgggaatcagatccaagtttgactccaaacccacttttaccacattgcttttgatctaaacttctattttgctaaaatacccctcacagctagtcatccatatcattgaagcgctcatgatttgatagattaacctttcatttttttaggtgactctagttagaaagtcttatttcacaatctgattgtttctttaacttaggatccaaacatgtccaaaataatgcagagtacatatgcaatcactcgtttatgctgtctagtcatgcacttaaagcaattttcaaatgtactcaaagtctctaggcttcggtacccagggttgcttcaagtatttgttcatgacacgtcaactcgatgattaaaatccttcaacacttctcattcacaataagaataaaatctacatcccttaccattcagtatgcaaaacttaaaatacataactttacccttaaatattttttctttctctgacttcataagtataggttatacctctataagaaagaaggtaaaaaactctcaacaatcccttctttcagagagaactactgttaacattttaacagacaacttcattcttttcctattcttttttataatgcttacaggaatgttaaatacttagacagatcttaagtacactagaattatctgtccctgaaataagttaggttgccctgccgcagaatttgtatctatagtttatttggattatttttgaaaaaagtaaaataacaatacccttacgaattttttggtgcatagcatctcagcttcttttatcattaaagatgtatgtataaaaaaaaaatgagtgtatatcaagttgttcatttcttagtttctggggtcttcttaaccagtacatagaactctttatgaattaactttagcttatgtttgaagtagtagtttgtttatagtgtcatggattttaaaatcaaactcagtttttatttcttcactaaaacctattttcatatgatatacatgttaaatttcccttttattttggtcatgcatcaaaataaatttactaagtactaaagagccaacattattttataagtgcctggccataggtattcactagttgaatagtttaatttgaaatgaattaattttaaatgggagttgttcaaaactatgccactttatttttcttttgtcctttgtgttattaaaatttaattgataattgtgtatattatatatatggagtacaatgtgatgttttgatatatgtttacagtgtagaatgattaaatcaatgtaataaatttattgcctcataccattttttgtggtaaaaaaaccacttaaaatctactcttaatatttttgaaatgtacaatgcattatttattatactcaccattctgtgtaatagatcagtaaagtttattcctcttgtctaactg

SEQ ID NO: 19720 - DNA, 1320 bp, Homo sapiens
cttcctagcaaggaaggaaactcccagagactctgaatagggtggtcaggatggaagttcgactgcagggacagagggtgatgatggctgaagctgcaagacacactcatcttagatgaggaagggagatggcagcgtggctggggaaaacaagcatgacacctagttttccaaacgagggaggggaagcaaccagtagaaatgaagcagtgggacattctagagggaaagcaagaacaagatctcccagggattgggaagaaacagaatgaaggttcaaagcattgccctcagagagaagatgggcccctccctgtctgagagacacaatgccaggcacagcagggtgtgtggggctggccagactggtcacccctgctcagaatgtgacagttgttccagtctttccaatggattgtggtcacctatcctggagtgtccataaattagatcagacttttcagtcttgaagaggggcagagagaagcgagaaagtgattgcttggttttcccactccagttaagacacaagtcgccctctcttagattccagaattgtggaaagccaaatcttctaaaaaggtctggtgagctttagagtgaggaacggggaagctatttcggaagaactagtctctgcatgactgatgggcaggacgtttcctcgtcaattttctggggcaagaccgatttggatttgctttgattccaccacgtcatgggttctcacgacagaggaaagaatagtcaatccaaaccctcacattagccggagttccaattttagacagatgttccaacccacttcccacaaacccgcttctcttaagaattctagcaagtggaaaattgaatttcattttctctgctgtccctctcctggggatgacagaaactgggttttgaaggagaaaaaagggtcccaggtaattcacccagagcagtgaccacatagttgagggttaagaacaaactgatccccacaactcaacacctgttgggtagctccacctggtaccagcaagaaaagggggggctggcaagcaagcattcaagggtattttccctgctctaacaaggtatgtttaattctacaagaaaactgttatttctctgcatcattttccctcttgacttcacctttaatgcacactctatagacgtcctgttgtttaactttgtgcttgcagttaagtgttagcattttgaacaaattaatgctgacttcctcttttcctataaaggctgcaccctctggatgtatttcagtgattatactaattcctgcatcaataaaatagaattacttttacttaaacg

SEQ ID NO: 19721 - DNA, 427 bp, Homo sapiens
aatgacatgctcatggtcacacaaatagtggcattgtctactgactggccatcacgctgctacttatctttatttttaggatgagcaaagtaggtcatttgcctctgagatttggtgtaaaggctaagatcatcaggtgcctcaattttggccaatgaatgggcaatttccgaactttcttttcctcattccctgtatttgacactgttgacacctcattctttcttgaaattctctgttctttctgtttctgtggctgcatggtccctgttctccttttagtctgagctttattatttatttccttcaggggacctctttatgttttcactccttaacactgagcctccagaggtctgcccttagcccactgttctttgccctcttcaccttctctttggacaatctcaacatttatttagtgatt

SEQ ID NO: 19722 - DNA, 285 bp, Homo sapiens
gtgaagttattctgtcaattctcaggactctatgggttaaaaacaattgtgctgaagtcttaatcctttttttttttgagacagggtctccctctgttgcctaggctggagtatagtggtgttatcaaagcttattgcaacttcaaactcctaggctcaagaggtccgtcaaccacagcctccccagtagctgggaccacaggcgcacgctaccatgccaagctaattttaaaattttttggaaagatgggccagtagtaagacaaagcaagtagtaagcaagac

SEQ ID NO: 19723 - DNA, 383 bp, Homo sapiens
gtatgtttgcctacctgcatatgtgcgtatatggtagaagtagaccaagttttcaagttacgtgtgacatattttcatagcaatttggaatgatcaaaggaaattgtagaaaatacagtatggtcccagttatttttttaaagaaaacacattatactacaaaaatgatgtactttatatatgcttgtaaaaggttctgaaaggtatttactaaatgttaacagtggttacctgtgaaaattgggagtgtcatttttgaagcaggggagatattgatctttttctgacttatttgacaattttaaatgagaatgattcttgctcagataatttcactatttgtgaaattaaaattaattagtaatgtattgaactaaaaaaaa

SEQ ID NO: 19724 - DNA, 453 bp, Homo sapiens
gtcaggagattgagaccatcctggctaacacagtgaaactctgtctatactaaaaatacaaaaaaattagccgggtgtggtatcaggcgcctgtagtcccagctactcgggaggctgaggcaggagaatggcacgaacccgggaggcagagggagcttgcagtgagctgagatcgtgccactgcactccagcctgggtgacagagccagactctgcctcaaaaaaaaaaaaaattttttttttgttagcgtgggtaacagggagacctcattgctataaaaaaattaaaaagtcagccaggcatggtgacatacacgtgtagtcccagctactcaggcagctgaggtgggaggactgcttgaacctggcaggttgggactgctgtgagctgtatttgtgccactgcattccagcctgggtgacagaatgaggcattgtctcaaaaagagaaaa

SEQ ID NO: 19725 - DNA, 422 bp, Homo sapiens
ctaaaatgtgtttcagtgggatgagatggacttaggggaattggggttagaacttgagggttattttgtgaaacatgaagggacttagagaaaggaaatcaacagctgcataaatgggcatgtctctggctggagaaatgtggagaatggagttctgatacactgttagaaggatcttatgtagcatttttatagctgacctagaagaacacaaaatttccaaggctgtgttataatgcgcttttccaggtaaaccaagaggaatataccccaggaaggttgcataattaggatcaagtgttttcaagttttcatattccaagctttggttctatgcctacactgttcaatccagtagccactagctacatgtgagtatttaaatgaaataaaggtaaacatctagcttgtcaaccgcacaa

SEQ ID NO: 19726 - DNA, 2905 bp, Homo sapiens
aggctgtacggtcgcaagtccttaatcaggagaaaggaagcccttttgtcagatgctgtggccacttcctcttcagaaggctccagccaacctttcggtttgcagagatgactggggcccgccgcggtgccggactgcctgtgcacggggccaccgactgcagcctgggttttattcttggcctggccctgaccgggagctggcccctcggctgcttctctggctcgggggggactttctctggctcagatccggacccctgaactggacctggttgtcgtccccccgcttctcagccccctctggggttcctctctcctctccgcccactctttgctcactgccccatgtccctcggtcagtcggcctgtctgttcctctctatagctcggtcaaggagtgtgatgactggcgagcagatggctgccttccatccatcgtccacccccaacccgctggagaggcccatcaagatgggctggctgaagaagcagaggtccatcgtgaagaactggcagcagaggtactttgtgctgagggcgcagcagctctactactacaaggatgaagaggacacgaagccccagggctgcatgtatctaccaggatgtacaatcaaggagatcgccacaaacccagaagaagctgggaagtttgtctttgaaatcattccagcctcatgggaccagaatcgcatgggacaggactcctatgtcctcatggccagctctcaggcggagatggaggagtgggttaaattcctcaggagagttgctggcacaccctgtggagagtgtttggccagcgcttggatgagactgtggcctatgaacagaaattcggcccccatctggtgcccatcctggtggagaaatgtgcagagttcatcctggagcacggccggaatgaagagggcatcttccgtctgcctgggcaggacaacctggtgaagcagctgagagacgcttttgatgctggggagcggccctcctttgacagagacacagatgtgcacactgtggcttccctgttaaagctctacctccgagacctcccagagcccgtggttccctggagccagtacgaagggttcctgctctgtgggcagctcacgaatgcggatgaggcaaaggctcagcaggagttgatgaagcagctctccatccttcctcgtgacaactatagtctcctgagctacatctgcaggttcctacatgaaatacagctgaactgtgctgttaacaagatgagtgtggacaacctggctactgtgattggtgtgaatctcatcaggtcgaaggtcgaagaccctgccgtgatcatgagagggactcctcagatccaaagagtgatgactatgatgatcagagaccatgaagtcctcttccccaagtccaaggatatacccctgtcaccccctgcccagaaaaatgaccccaagaaagctccagtggcccgaagctctgtaggctgggatgccactgaagacctccgaatttctaggacagacagcttcagtagcatgacaagcgactctgatacaaccagccccaccggacagcagccgagcgatgcgtttccggaggacagcagcaaagtacccagggaaaagccaggagactggaaaatgcaatctcgtaaaaggactcaaacactccctaaccggaaatgtttcttgacatcagcttttcagggtgccaacagcagcaaaatggagatctttaaaaatgaattctggtcgccttcctcagaggctaaggcaggggaagggcacaggagaacgatgtctcaagacttgcgccaactttctgactcccaacggacttccacctacgataacgtcccttccctgccagggtcccctggggaggaagccagtgcactctcttcccaagcctgtgactccaagggagatactcttgccagtccaaactctgaaactgggcctggaaaaaagaactctggagaagaggaaattgattctttgcagaggatggtccaagagctacgaaaggaaatagaaacacagaagcaaatgtatgaggaacagattaaaaaccttgagaaggaaaattatgacgtttgggctaaagtggtgaggctcaatgaagaactggagaaggaaaagaagaagtctgcagccctagagatcagcctccgcaacatggagcgctcccgggaggatgttgagaagaggaacaaggccttggaagaagaagtcaaggaatttgtcaaatccatgaaggaacccaagaccgaggcttaagggtcccaggagtactgcagggacagccccagagaggcccaactctggcccctttctcagtgctatctgatgacggggaaacaaaattattctctgagagggaaaggacatttgagggaaacatcaaatttccccataaataaatgaatggagtttgcaggaaggtgagggtgagcagagatgtgtgtggacatctctgaccatccatcgctgtattcaaatggattgttctattccattctggtctcaggcatgaccacgtccagtgaagacatttgaggcagcacatctcaggacccaggcaatagactggccccaactcaggctggactaaggtgtgattaattctttgttttttgtgtggaacagctcaccttgtcagacagcctcagggcatctctgagacacaggggcagaaaatgacattcatcttttgagtcctcatccatggagtgctgtgtttggggggctgcatctgctgaagcgagaaccccattctgccaccccaccaggatgcccattctccaggacttctccaacttactattagactaaaccagaacaagcaacaaactgtatttatgcaagcaaaattgatgagaaaattatattcaaataaagcaaaaattaaaaaaaaaa

SEQ ID NO: 19727 - DNA, 2586 bp, Homo sapiens
ggcactccttgggtgtgcaggatctggggtacttcggatgatttaaggctacagactacacacaatagctcggtcaaggagtgtgatgactggcgagcagatggctgccttccatccatcgtccacccccaacccgctggagaggcccatcaagatgggctggctgaagaagcagaggtccatcgtgaagaactggcagcagaggtactttgtgctgagggcgcagcagctctactactacaaggatgaagaggacacgaagccccagggctgcatgtatctaccaggatgtacaatcaaggagatcgccacaaacccagaagaagctgggaagtttgtctttgaaatcattccagcctcatgggaccagaatcgcatgggacaggactcctatgtcctcatggccagctctcaggcggagatggaggagtgggttaaattcctcaggagagttgctggcacaccctgtggagagtgtttggccagcgcttggatgagactgtggcctatgaacagaaattcggcccccatctggtgcccatcctggtggagaaatgtgcagagttcatcctggagcacggccggaatgaagagggcatcttccgtctgcctgggcaggacaacctggtgaagcagctgagagacgcttttgatgctggggagcggccctcctttgacagagacacagatgtgcacactgtggcttccctgttaaagctctacctccgagacctcccagagcccgtggttccctggagccagtacgaagggttcctgctctgtgggcagctcacgaatgcggatgaggcaaaggctcagcaggagttgatgaagcagctctccatccttcctcgtgacaactatagtctcctgagctacatctgcaggttcctacatgaaatacagctgaactgtgctgttaacaagatgagtgtggacaacctggctactgtgattggtgtgaatctcatcaggtcgaaggtcgaagaccctgccgtgatcatgagagggactcctcagatccaaagagtgatgactatgatgatcagagaccatgaagtcctcttccccaagtccaaggatatacccctgtcaccccctgcccagaaaaatgaccccaagaaagctccagtggcccgaagctctgtaggctgggatgccactgaagacctccgaatttctaggacagacagcttcagtagcatgacaagcgactctgatacaaccagccccaccggacagcagccgagcgatgcgtttccggaggacagcagcaaagtacccagggaaaagccaggagactggaaaatgcaatctcgtaaaaggactcaaacactccctaaccggaaatgtttcttgacatcagcttttcagggtgccaacagcagcaaaatggagatctttaaaaatgaattctggtcgccttcctcagaggctaaggcaggggaagggcacaggagaacgatgtctcaagacttgcgccaactttctgactcccaacggacttccacctacgataacgtcccttccctgccagggtcccctggggaggaagccagtgcactctcttcccaagcctgtgactccaagggagatactcttgccagtccaaactctgaaactgggcctggaaaaaagaactctggagaagaggaaattgattctttgcagaggatggtccaagagctacgaaaggaaatagaaacacagaagcaaatgtatgaggaacagattaaaaaccttgagaaggaaaattatgacgtttgggctaaagtggtgaggctcaatgaagaactggagaaggaaaagaagaagtctgcagccctagagatcagcctccgcaacatggagcgctcccgggaggatgttgagaagaggaacaaggccttggaagaagaagtcaaggaatttgtcaaatccatgaaggaacccaagaccgaggcttaagggtcccaggagtactgcagggacagccccagagaggcccaactctggcccctttctcagtgctatctgatgacggggaaacaaaattattctctgagagggaaaggacatttgagggaaacatcaaatttccccataaataaatgaatggagtttgcaggaaggtgagggtgagcagagatgtgtgtggacatctctgaccatccatcgctgtattcaaatggattgttctattccattctggtctcaggcatgaccacgtccagtgaagacatttgaggcagcacatctcaggacccaggcaatagactggccccaactcaggctggactaaggtgtgattaattctttgttttttgtgtggaacagctcaccttgtcagacagcctcagggcatctctgagacacaggggcagaaaatgacattcatcttttgagtcctcatccatggagtgctgtgtttggggggctgcatctgctgaagcgagaaccccattctgccaccccaccaggatgcccattctccaggacttctccaacttactattagactaaaccagaacaagcaacaaactgtatttatgcaagcaaaattgatgagaaaattatattcaaataaagcaaaaattaaaaaaaaaa

SEQ ID NO: 19728 - DNA, 2928 bp, Homo sapiens
  misc_feature (82)..(82): n is a, c, g, or t
  misc_feature (341)..(341): n is a, c, g, or t
ctttcgaaaaggagctttgcttcccatgacgcagagggaagtgctcactgggcatatttgctggtaaaactgaaagcaaganaagcagggtgctagcccctgtgggactgagggtggaggctgggggagtttgggtgccatcctccagtgacagatgcgatggacctttcatctaagagaaaggaggagacacgttggcaaatcagcctcaagcctaagattgcttgtgaagcaatcataaggaggaacaaaaacagacacaaaaacagagggaaagagtgaaaagacaagaagggcgcaaactgtgacagactcaccgcttcactaactactcacttaanctggagcaaaatgtccctaaaattgccaaggaacgggatttcacctgaaagtggaggctgcgaaaatagctcggtcaaggagtgtgatgactggcgagcagatggctgccttccatccatcgtccacccccaacccgctggagaggcccatcaagatgggctggctgaagaagcagaggtccatcgtgaagaactggcagcagaggtactttgtgctgagggcgcagcagctctactactacaaggatgaagaggacacgaagccccagggctgcatgtatctaccaggatgtacaatcaaggagatcgccacaaacccagaagaagctgggaagtttgtctttgaaatcattccagcctcatgggaccagaatcgcatgggacaggactcctatgtcctcatggccagctctcaggcggagatggaggagtgggttaaattcctcaggagagttgctggcacaccctgtggagagtgtttggccagcgcttggatgagactgtggcctatgaacagaaattcggcccccatctggtgcccatcctggtggagaaatgtgcagagttcatcctggagcacggccggaatgaagagggcatcttccgtctgcctgggcaggacaacctggtgaagcagctgagagacgcttttgatgctggggagcggccctcctttgacagagacacagatgtgcacactgtggcttccctgttaaagctctacctccgagacctcccagagcccgtggttccctggagccagtacgaagggttcctgctctgtgggcagctcacgaatgcggatgaggcaaaggctcagcaggagttgatgaagcagctctccatccttcctcgtgacaactatagtctcctgagctacatctgcaggttcctacatgaaatacagctgaactgtgctgttaacaagatgagtgtggacaacctggctactgtgattggtgtgaatctcatcaggtcgaaggtcgaagaccctgccgtgatcatgagagggactcctcagatccaaagagtgatgactatgatgatcagagaccatgaagtcctcttccccaagtccaaggatatacccctgtcaccccctgcccagaaaaatgaccccaagaaagctccagtggcccgaagctctgtaggctgggatgccactgaagacctccgaatttctaggacagacagcttcagtagcatgacaagcgactctgatacaaccagccccaccggacagcagccgagcgatgcgtttccggaggacagcagcaaagtacccagggaaaagccaggagactggaaaatgcaatctcgtaaaaggactcaaacactccctaaccggaaatgtttcttgacatcagcttttcagggtgccaacagcagcaaaatggagatctttaaaaatgaattctggtcgccttcctcagaggctaaggcaggggaagggcacaggagaacgatgtctcaagacttgcgccaactttctgactcccaacggacttccacctacgataacgtcccttccctgccagggtcccctggggaggaagccagtgcactctcttcccaagcctgtgactccaagggagatactcttgccagtccaaactctgaaactgggcctggaaaaaagaactctggagaagaggaaattgattctttgcagaggatggtccaagagctacgaaaggaaatagaaacacagaagcaaatgtatgaggaacagattaaaaaccttgagaaggaaaattatgacgtttgggctaaagtggtgaggctcaatgaagaactggagaaggaaaagaagaagtctgcagccctagagatcagcctccgcaacatggagcgctcccgggaggatgttgagaagaggaacaaggccttggaagaagaagtcaaggaatttgtcaaatccatgaaggaacccaagaccgaggcttaagggtcccaggagtactgcagggacagccccagagaggcccaactctggcccctttctcagtgctatctgatgacggggaaacaaaattattctctgagagggaaaggacatttgagggaaacatcaaatttccccataaataaatgaatggagtttgcaggaaggtgagggtgagcagagatgtgtgtggacatctctgaccatccatcgctgtattcaaatggattgttctattccattctggtctcaggcatgaccacgtccagtgaagacatttgaggcagcacatctcaggacccaggcaatagactggccccaactcaggctggactaaggtgtgattaattctttgttttttgtgtggaacagctcaccttgtcagacagcctcagggcatctctgagacacaggggcagaaaatgacattcatcttttgagtcctcatccatggagtgctgtgtttggggggctgcatctgctgaagcgagaaccccattctgccaccccaccaggatgcccattctccaggacttctccaacttactattagactaaaccagaacaagcaacaaactgtatttatgcaagcaaaattgatgagaaaattatattcaaataaagcaaaaattaaaaaaaaaa

SEQ ID NO: 19729 - DNA, 2811 bp, Homo sapiens
  misc_feature (82)..(82): n is a, c, g, or t
  misc_feature (341)..(341): n is a, c, g, or t
ctttcgaaaaggagctttgcttcccatgacgcagagggaagtgctcactgggcatatttgctggtaaaactgaaagcaaganaagcagggtgctagcccctgtgggactgagggtggaggctgggggagtttgggtgccatcctccagtgacagatgcgatggacctttcatctaagagaaaggaggagacacgttggcaaatcagcctcaagcctaagattgcttgtgaagcaatcataaggaggaacaaaaacagacacaaaaacagagggaaagagtgaaaagacaagaagggcgcaaactgtgacagactcaccgcttcactaactactcacttaanctggagcaaaatgtccctaaaattgccaaggaacgggatttcacctgaaagtggaggctgcgaaaatagctcggtcaaggagtgtgatgactggcgagcagatggctgccttccatccatcgtccacccccaacccgctggagaggcccatcaagatgggctggctgaagaagcagaggtccatcgtgaagaactggcagcagaggtactttgtgctgagggcgcagcagctctactactacaaggatgaagaggacacgaagccccagggctgcatgtatctaccaggatgtacaatcaaggagatcgccacaaacccagaagaagctgggaagtttgtctttgaaatcattccagagtgtttggccagcgcttggatgagactgtggcctatgaacagaaattcggcccccatctggtgcccatcctggtggagaaatgtgcagagttcatcctggagcacggccggaatgaagagggcatcttccgtctgcctgggcaggacaacctggtgaagcagctgagagacgcttttgatgctggggagcggccctcctttgacagagacacagatgtgcacactgtggcttccctgttaaagctctacctccgagacctcccagagcccgtggttccctggagccagtacgaagggttcctgctctgtgggcagctcacgaatgcggatgaggcaaaggctcagcaggagttgatgaagcagctctccatccttcctcgtgacaactatagtctcctgagctacatctgcaggttcctacatgaaatacagctgaactgtgctgttaacaagatgagtgtggacaacctggctactgtgattggtgtgaatctcatcaggtcgaaggtcgaagaccctgccgtgatcatgagagggactcctcagatccaaagagtgatgactatgatgatcagagaccatgaagtcctcttccccaagtccaaggatatacccctgtcaccccctgcccagaaaaatgaccccaagaaagctccagtggcccgaagctctgtaggctgggatgccactgaagacctccgaatttctaggacagacagcttcagtagcatgacaagcgactctgatacaaccagccccaccggacagcagccgagcgatgcgtttccggaggacagcagcaaagtacccagggaaaagccaggagactggaaaatgcaatctcgtaaaaggactcaaacactccctaaccggaaatgtttcttgacatcagcttttcagggtgccaacagcagcaaaatggagatctttaaaaatgaattctggtcgccttcctcagaggctaaggcaggggaagggcacaggagaacgatgtctcaagacttgcgccaactttctgactcccaacggacttccacctacgataacgtcccttccctgccagggtcccctggggaggaagccagtgcactctcttcccaagcctgtgactccaagggagatactcttgccagtccaaactctgaaactgggcctggaaaaaagaactctggagaagaggaaattgattctttgcagaggatggtccaagagctacgaaaggaaatagaaacacagaagcaaatgtatgaggaacagattaaaaaccttgagaaggaaaattatgacgtttgggctaaagtggtgaggctcaatgaagaactggagaaggaaaagaagaagtctgcagccctagagatcagcctccgcaacatggagcgctcccgggaggatgttgagaagaggaacaaggccttggaagaagaagtcaaggaatttgtcaaatccatgaaggaacccaagaccgaggcttaagggtcccaggagtactgcagggacagccccagagaggcccaactctggcccctttctcagtgctatctgatgacggggaaacaaaattattctctgagagggaaaggacatttgagggaaacatcaaatttccccataaataaatgaatggagtttgcaggaaggtgagggtgagcagagatgtgtgtggacatctctgaccatccatcgctgtattcaaatggattgttctattccattctggtctcaggcatgaccacgtccagtgaagacatttgaggcagcacatctcaggacccaggcaatagactggccccaactcaggctggactaaggtgtgattaattctttgttttttgtgtggaacagctcaccttgtcagacagcctcagggcatctctgagacacaggggcagaaaatgacattcatcttttgagtcctcatccatggagtgctgtgtttggggggctgcatctgctgaagcgagaaccccattctgccaccccaccaggatgcccattctccaggacttctccaacttactattagactaaaccagaacaagcaacaaactgtatttatgcaagcaaaattgatgagaaaattatattcaaataaagcaaaaattaaaaaaaaaa

SEQ ID NO: 19730 - DNA, 444 bp, Homo sapiens
tgccagtccaaactctgaaactgggcctggaaaaaagaactctggagaagaggaaattgattctttgcagaggatggtccaagagctacgaaaggaaatagaaacacagaagcaaatgtatgaggaacagattaaaaagtaagtcagacagaggggcactgagaggcacttggcttccatctttagagacaagagggattgttcccatccgccagagaagtcacatcataaagcttcaatttggggaagacagtaatctatagcaggcctagaaagaaaagagtaaagggaacaatgagatagctaaattggtgaacactctaaactttaaactagatttaggaaatgtaaatatctagcttaagtagtttaatcaataatttccaaacagtggttcaagaatcaacatgctttaattaatttaaaggaaattaatttttttta

SEQ ID NO: 19731 - DNA, 422 bp, Homo sapiens
agcagaatcaaatttggaaccatgctggtaagaaattctgggagtgtagcttccaggcaatgcagggaaaagtgtataagggggcagagatgatgcagaattgatgagacaattcagaacatttgcaaagaagaatgttaggtaaatattgaggtcatccagatgtttccccacccaatttttatattttgtgttctaagtttgcctgccttaatgccccatatctacacgcagacacacagacacacacacactttcaaccaaaaagaatggctagagaaatattgaaatacaatgaatgtacttaatttttaaagtttatcacctgcatacttaagagataatgctaaagcatgagtcatcgctgacatttagcaccactaattttaaaactatgcagattattgctttgaggaatagca

SEQ ID NO: 19732 - DNA, 697 bp, Homo sapiens
ggaggttgcagtgagctgagattgcaccattgcactccagcctgggtgacaaagcaagactgtctcaccaaaaaaaaaaagaaaagaaaaatgaatccactaaagtaaatgattggacttatgcttgtggaagcatgaagcagatacagttttccctattcctcctgctaaatacatctaaacaccctggatattacatgtaaaaacaagcataagaagactctcaaagatgtaaggaagaaagcagaccacctaaggaccttgtaaccaagtgacctaaaagtagtaagttcagggttttcttttctgcctcgtatacccaaagttggaactgaagaagctggcaacctggaaatgtcaagtacagaccaaagaaagcctcaacaaaaattctgctcccttgacaaaggatcaagagatgggcagcctagcaagacagaaaattttgaaacagtaactgctctactctagccagacaccatagaaaaaactatggccccaccaccacccacattagcaaaggccaagtggggagcctggacttcacccttgccaagctgaagacccctcccctgtcacaggggtatcagagaagacaaagtaggaagctgggactttcatcctagtggggggcagtaatgagcccctctgcccggtggcatcagtggaggccacatggaaagcctagatttccatc

SEQ ID NO: 19733 - DNA, 319 bp, Homo sapiens
tggttccaagtctttgctactgtaaatagtgctgcaataaacatacatgtgcatgtatctttatagtagaatgatttctaatcctttaggtatatacccagtaatgggattgctgggtcaaatagtatttctggttctaggtccttgagaaatccccacactgtcttccacaataactgaactaatttacactcccaccaacagtgtagaagtgctcccatttctccacagctttgccagcatctgttgtttcctgacttttctttttttataagacagagtcttgccctgttgcccaggctggagtgcaatggtgcaa

SEQ ID NO: 19734 - DNA, 328 bp, Homo sapiens
cgagctggctgctgtgacgagaagccacaagtacaataccccgattgtgtccttcaggacctcaaaattgcagttcttacacaaactcagttcttgctgtgagaaaggttttctctgtgcttcttcgcctccaaaagtgagattgaatgctttccttgtgtcaggcttaatcaagcagtggaggcaataacggaagatgcaggaggattaggctcgctcaggcaatcttttccctttggggatcatacttgggcttgttctttggatttaacacagtgaatctcctcttagctgaacaatatagagacgttcattagtttggtcatga

SEQ ID NO: 19735 - DNA, 300 bp, Homo sapiens
cctgatcaatctcaaaccaaggtactcagtcaggagcaagtagcaagccaggctctgggctcctccccagactcttcatgaaggtaccacaaggtgaggaggagagaaaggtggcacgcgctggtctacccagccctgtcacacccacttagcacagatgggactgggagcccacctgtggggaccatcaaggccaacttcggggagcagctgtgacgagggcgatccctggtcccagaccctggcagtgaatctcctcttagctgaacaatatagagacgttcattagtttggtcatga

SEQ ID NO: 19736 - DNA, 413 bp, Homo sapiens
cccctctttgggttcaattaattaattgcagcagctcacagagctcatggaaacactaacttacattttctggtttattacgaatgagaatgcagaggagacagatgaagaggtgcagagggtgaagtatgggaaagaggcacagagctttcattgtcttccctgggtgcaatttcctccaggaacctccatgtgttgagctatctggaagctctccaaaccctgtcctcttgggtttttctggaggcttcattatgtaggcatgattgataaaaccattagccactggtgatcaacttaactttcagcccctctcctggaggtggggactggagttgaaagtctcaaccctttaatcctgccctggtcttcccagtgaccagccccaccctgaagctatcagacaaaagacc

SEQ ID NO: 19737 - DNA, 155 bp, Homo sapiens
ctcttctttgcctttcttccatttcagcctctttccctctcaccctcatcacttgtttctttggatcattgtcattctcttcattgttctcctgcctttcttcagtgtcacctatttgattttccttcaaatctattctctctttgacaccttat

SEQ ID NO: 19738 - DNA, 470 bp, Homo sapiens
caaaagaatagaaattataagtactgaattattctagttcatatagactgaattattacagttaaaatattatctgttccctttgtgaaaacaagcaatccctgctagccagcccggtggatgtgctcggcccactacgctcagcactgcattccggccagtgtttgtgctgtggactgtccaagggcattgttgtctactgccagaagacagggagggtgacaactgggatagagaggaccatggatgagggaaagattaatttgaaagaggggatctgagaaagtaattgtccagtaatagggaaaggaggatgctttgctagccagaagttagaattaagtgcttctcttgcctaataaataatctgttgactgtaggtgctcacagcgtctcacagaaagaggatagtgccagcacatctgggctggctggctttgatagcagtatcttcgtcctcattcacaaaa

SEQ ID NO: 19739 - DNA, 984 bp, Homo sapiens
acaaagggaagacacagtgctacaaaagcccaagagctgcaacctcctgacaggagctgggttgggcttgaaagtgtaacaagaggttaaaatagaagttctagctgaagcacaaagaaagtagaaacaacacatcaaagtgagggatttataaagcaggagactgaaaaccagctggtgactcttgaattcctcacccttattgagagtataaaaggcttatagccctcaccctttcacctcaaatcaagagggaagggttttagaaacacaacttggagagcttaatatgtatccctgaagtttgaggaaaggggacgtagtgtactgacttctgcctggaaagtctaacaggtgggagattaattgactgcaatgaaggagaaagccaatgacaggttgcttcttgactggaattgttcagcactccagaggctgtcagggaaaggatgtgagcatgctgcctggaatctgatgtggctcagctgtaggacaaagatagtgtgttttcttaagttctgaccaaatgaaccaccttaagagacaaagatcactcagcaaggaaagctgaagatgctatgagatgccagaggttggggaaggagcaaacaaccagctggaatggatatgccttttctcaaagaaaattgcaagtggaagaattccagccatggggtctccaaagcatccgtgaaactgttccacaagacaaggatggatgactgaatgccaaacccagagagcagtgaagctaaatcaactcaatcatttcagtgaagaaagaaatctcctgtcctttcctgtccctgaactccatgatgaagggccatgtgctgtaggtagcaaaacaggggagaaagaatttcagttttccttttcccttgaaattttctagctaaatcagtccgaaatgtggaaggaaaaagcatgaagttttttatttttattttttgagactgagtcttgctctgttgcccaggctgg

SEQ ID NO: 19740 - DNA, 977 bp, Homo sapiens
gctaggaaagtcaagaaataggaaggaaatcggtcagttttctatcatcattggttgggcttgaaagtgtaacaagaggttaaaatagaagttctagctgaagcacaaagaaagtagaaacaacacatcaaagtgagggatttataaagcaggagactgaaaaccagctggtgactcttgaattcctcacccttattgagagtataaaaggcttatagccctcaccctttcacctcaaatcaagagggaagggttttagaaacacaacttggagagcttaatatgtatccctgaagtttgaggaaaggggacgtagtgtactgacttctgcctggaaagtctaacaggtgggagattaattgactgcaatgaaggagaaagccaatgacaggttgcttcttgactggaattgttcagcactccagaggctgtcagggaaaggatgtgagcatgctgcctggaatctgatgtggctcagctgtaggacaaagatagtgtgttttcttaagttctgaccaaatgaaccaccttaagagacaaagatcactcagcaaggaaagctgaagatgctatgagatgccagaggttggggaaggagcaaacaaccagctggaatggatatgccttttctcaaagaaaattgcaagtggaagaattccagccatggggtctccaaagcatccgtgaaactgttccacaagacaaggatggatgactgaatgccaaacccagagagcagtgaagctaaatcaactcaatcatttcagtgaagaaagaaatctcctgtcctttcctgtccctgaactccatgatgaagggccatgtgctgtaggtagcaaaacaggggagaaagaatttcagttttccttttcccttgaaattttctagctaaatcagtccgaaatgtggaaggaaaaagcatgaagttttttatttttattttttgagactgagtcttgctctgttgcccaggctgg

SEQ ID NO: 19741 - DNA, 436 bp, Homo sapiens
tccaagacagagtcttgctctgttgcccaggctggagtgtagtggcatgatctaggctcactgtgacctccgcctcctgggttcaagcaattctcctgcttcagcctcctgagtagctgggattataggtgtatgccactatgcccagctaatttttgtatttttagtagagacagggttttaccgtgttggccaggctggtcttgaactcctgaccttgtgatccacccacctcggcctcccaaagtgctggggttacaggcatgagccaccgcgcccggcctgcagttacttttttgtgtatatttcccaatagactgtggcttttttgaaggtgggctattttaatcatctttgtgtcatcagtatgtagtacacagtgggacccagtaaacaatcagatgtgctgtttgtgtagcccagaataaagtgccag

SEQ ID NO: 19742 - DNA, 866 bp, Homo sapiens
atcggttgtctagtttttgattgtttgtgtgtatggtgtgtgctgtctctctgaccagatttcaggttcctgaggcgagcctgcagctcatactgctcatctgtcctctcctatggtgggtgctcagggcctctcactgttagttactccctcctttctgcccagttctgcactcaactagtagaagcagccatcctttccccaagcaggaaattgtagtggtcgcccttaagagcagtgtgagggcagaagattaagggaggggaagagtccctggaactggaagaaggtaaatactttgccttgagagggcgccgaatcattttaccaaaatagtaaatggaaaaagtgtcaaaggttgggactagttttaaaaacacatatagccagtagacacatgggggctgtttaaataaaaacatttttttacccggttctgccatcacacacactagtgacattccaagtactcagtggccatgtggagctagtggccaccacacttgacaccacggatgcagaacttttccatcactgcagaaagctctgttgaacagtactgtgtccagagtgctaattatgaacagcttagaaaccacaattaatacattctcatgaggttaaaagcagacatgggaatagaacataatgcaaatgatgatgaatattttgggtgagaagagaaagctgaggacccatttctaggattctaagatgtaagatttcttaagttctttatcttagtctcatgcattctccacatcacgcgctgtaccatactgtgtagtcagaacagacagtgtgattgaaaagctttgaaaaagttaacacaaaggattatttagcacataggctgtagatacgta

SEQ ID NO: 19743 - DNA, 388 bp, Homo sapiens
attaagaaacatttatcaggccgggcgcagtggctcacgcctgtggtcccaaagcactgggattacaggtatgagccactgtgcctggttaatgtttttatttttattttaaaaatttttttgtgaagacagggtctcactatgttgcccaggctgatcttgaactcctgggctaagtgatcctcctgcgttggcctcccaagaaaaaataacaggttaaaatcagttaatatagtcatctcagttttgaaactcagtaaatgtggtttttaaaagttactttcatttctgataaatttagcctttttgaggccacaatttggccttttctctctagtgggggacaaatcctgacagctggttctttacccctgctgggttggtttct

SEQ ID NO: 19744 - DNA, 417 bp, Homo sapiens
gattttttttttttgccatgtttgcttttctatactattatttgatgattgttttctgtatattaaccttacatcaactcatatttttaaggaaactaggctttactctatataacaaagtacatgaaagcacgtgttcaaaaataaaataaatgagacaaaaacctcacaaagccaaaacctagctagatggtgttgggactgaaggtttgaaagtaaaaagagaaaaaaaaaagatttggagaggcaaataaaatgacagaaaccagtttatatcctgtaaaatcctataattataggaaattaaccaagatgagtgttccatgatattcccaattttataagcactcaaaattcagtctctgagtttggaagttaaaaaaaggcttgctttatagggcatgggaagtaaaaaaa

SEQ ID NO: 19745 - DNA, 366 bp, Homo sapiens
catccacggggctgctgactaaattttcataaaagcaaacccctattcaggcctattcaacatgggggaaccggctctctcccctgagaggagagtgagtgtgatgctgtcctaacagtgttgaaatgggtcataactggcctgtgctcagtgaagcaggcaaaagacggatgatgcacctcaacgtaaattctagccaaaaagcctaaaataactaaaaagagaccaacattgaaacaggagatcaaaaaatatcttaaggcaaatgaaaatggagccacaacataccaaaatgatgggatgcagcaaaagcaggtctaagaaggaatttaatagcaataaatgcctacatgaagaaaaaaaaaa

SEQ ID NO: 19746 - DNA, 509 bp, Homo sapiens
tacttataattcaaaaattaacctatatttacagatgcttacacagtttctttgtgaatccacctatggttttattttaattaattttttattgcaaagcaatgaaatgttgctttgtggagccagatagcattacagcaggtaaatgggtttctgctagatctccacattattggggagatgctcgaagacctcagaatatacacacccttaaggttcaagggctggggttgagctctccataaggaacttttcctcctcccagaagggcgatcattgtgtatatagacatggagacagaaccagaatgacttctgtgggtggaaatagtgccatcagaatcatttattattatgaaataaatattatttatctacattgaaaaaatactactcctcctaaaatcattaacttttcctcagatgattttaagaaatttgagtaatagcacacgaagtggtaaagacccttagtctttctggtatattagaaaagccttttaatcagtc

SEQ ID NO: 19747 - DNA, 262 bp, Homo sapiens
gggcatgagatttgggagaggccaagagtggaatgatatggtttggctctgtgtccccactcaaatctcatgtcaaattgtaataatcccgtgtcaatggagggatctgaggggagtgactggatcatgggggttgttttcctgatcctattttcatgatagcaagtgatttctcatgagatctgagatctcttgctttctctcctgtctctcctgtcttccaccatgattataagtttcctgaggcctcctcggccatgtg

SEQ ID NO: 19748 - DNA, 426 bp, Homo sapiens
catgggaagaattttgactgaaacaagactcaaagttatttaggtagcgtttacagccatgaatctcatgtgttataaagcttgtgtttttgttgatttttcttcccccatattaccaggagaatcatgactgagtatatttgttatggagatgataataaaggtcttattgtttagacaggccctaccttcagagaaagaaaaaactgttagctccttttaggattcccaatttttactataattatccattaattctagcaatcttaacaaattaggcaagaaaatctataaatggtgaatggttgagtgatatataacacttatccaagctttccatttctcattaactgattacagagttggtttgaagacatagctataaccattctctaccatgcttcatagagaccccatctctccaaa

SEQ ID NO: 19749 - DNA, 2135 bp, Homo sapiens
ttgaacagcactgaaatgattaactatggttgtcacagcataaggtgttcaacatacatacctatcagcagtgtgtttagaccaggggtctgcaaactttctgtgaatggacaaagagtaaatactttagtaaatgtcttaggctttgtggcctacatgatctttgttgcaagtactcaactctgccattatagagttaaagcagccatacacaatatataaacaaaatgggcatagttgtatttcagtaaaactttatttacaaagacaggcggtaggccagatttggcttgcatgctgtagagctgtggtctaaattttattcatagactttctttgcaaatacagtgtgagtattgttccatttacagtattattattttttagatacctggtttttagattcttgcctggtaactttttactgaaaatacaagaatttcgtactgcatttgcatctccgagattagggagcacctgtcaggatatgttgttctatcagggttacttctgttgactacctcttagattttgatacagttatattgttgagtttcattttcatatattcttgtagtgtctgcttgcctgtgacttctggtaaaataaaataagcctttgaaaatattttagcatggtatttaacattttctaaatattatggcattttgacatattttagtcagcgaagacatctgcccctttggtgtttctacttgcttatgattgagattttacaagcccttcaaactccgttttaaaggaatttattgtaaaacattaactttaataaattagtgttttcacagatcagatcattatacttggaacttctaaatcatgcaatttctgaataaggacataaggctagattcatttttcttaatagagaaaaaggaaatttctgatttatcacttttctagttgataagtaggattcaaaacgtttgatatgtaagtatttatataagactaatgtaatttaaagttctgtattattgtgattaatcatacagaaattcaggaactgatcagaagtgagattcttttccacatctggttaatgtagtgagttgacaccctgtgggtggtaaagcattataaacatttcatcttgaaccatgatttatacacatctgtgttataagggaggcttgagtacatataccaatgaagagatattcagcatttgtctatttgataaggaattaaatgtcctagtgattataaagtaaaaccacagaccaatttgcaaatgatcttcaatgttaagcacttgctctaagattaaaattccttttctttttaaggttaagggtgtgtacgtatggcagtgatgtctatgttgagattaacttatgtattgaggaaaatttgaagtttattttttcgatgaataaggctgtcaaatgatttagtatagattaatgacatcttttttagaaatattaaagtgagtattcctcattatgtcatcatttctgataattagagtgctaatttgaatgttagataatgtttccacatctatacctatttctttctagggcacttctgaccctggggcttggggatggcctttaggccacagtagtgtctgtgttaagttcactaaatgtgtatttaatgagaaacattcctatgtaaaaatgtgtgtatgtgaacgtatgcatacatttttattgtgcacctgtacattgtgaagaagtagtttggaaatttgtaaagcacaaaccataaaagagtgtggagttattaaatgatgtagcacaaatgtaatgtttagcttataaaaggtcctttctattttctatggcaaagactttgacacttgaaaaataaaaccaatatttgatttatttttgtaagtatttaggatattattttaaataaatgattgtccattatcaatataatagttgtgaaatgatttaagtaaataaactttatgcttctgtgtctgttgattttgatgggtttttagtgggcataaatgcatgtttatttgctgcattaaatagaggagtgaaaatatgtaggtttgtaaagaaaaagtaattgcattcttctaattttgtttttccttttaattttttggggaatgaaaagatatattaaatgatttgggaatatgt

SEQ ID NO: 19750 - DNA, 2521 bp, Homo sapiens
ttaatgaagatttcagttattgcttttaagcataagttgtatttagcttctgctgaaaaattgtatcatataataattttgcttcattgaaaagggatgttgcagtgatgaaacaaggtgggatcagtttgattttgtttacttattaaggagtttatcttgggctcagtttgtggtattcagttcgtttctgcccaaagctcttattttcagaggtgttacttttgaacttttggggtcatttttaaaagttagcacttttgaattttagttgtgttaaatatgtgctgtcgtatatcatagccatgagccatatatgacaatttaaatttaattaattataaactcagtctcttggttgcaccagccacatttcagatgctcaatagccacatgtggctagtgggtaccatattggacagggcagctatagaatatttccatcattgcagaaagttctattggatagtaccataatctttttatagtaacttggaaatactatttgatattagatgttagaccacaaaaagaagaaaaatgttaggactatttcagatataaaaaggaactgaattgtgacataattagcatcttacattccatacagttgaataccttatgctgtgacaaccatagttaatcatttcagtgctgttcaacatacatacctatcagcagtgtgtttagaccaggggtctgcaaactttctgtgaatggacaaagagtaaatactttagtaaatgtcttaggctttgtggcctacatgatctttgttgcaagtactcaactctgccattatagagttaaagcagccatacacaatatataaacaaaatgggcatagttgtatttcagtaaaactttatttacaaagacaggcggtaggccagatttggcttgcatgctgtagagctgtggtctaaattttattcatagactttctttgcaaatacagtgtgagtattgttccatttacagtattattattttttagatacctggtttttagattcttgcctggtaactttttactgaaaatacaagaatttcgtactgcatttgcatctccgagattagggagcacctgtcaggatatgttgttctatcagggttacttctgttgactacctcttagattttgatacagttatattgttgagtttcattttcatatattcttgtagtgtctgcttgcctgtgacttctggtaaaataaaataagcctttgaaaatattttagcatggtatttaacattttctaaatattatggcattttgacatattttagtcagcgaagacatctgcccctttggtgtttctacttgcttatgattgagattttacaagcccttcaaactccgttttaaaggaatttattgtaaaacattaactttaataaattagtgttttcacagatcagatcattatacttggaacttctaaatcatgcaatttctgaataaggacataaggctagattcatttttcttaatagagaaaaaggaaatttctgatttatcacttttctagttgataagtaggattcaaaacgtttgatatgtaagtatttatataagactaatgtaatttaaagttctgtattattgtgattaatcatacagaaattcaggaactgatcagaagtgagattcttttccacatctggttaatgtagtgagttgacaccctgtgggtggtaaagcattataaacatttcatcttgaaccatgatttatacacatctgtgttataagggaggcttgagtacatataccaatgaagagatattcagcatttgtctatttgataaggaattaaatgtcctagtgattataaagtaaaaccacagaccaatttgcaaatgatcttcaatgttaagcacttgctctaagattaaaattccttttctttttaaggttaagggtgtgtacgtatggcagtgatgtctatgttgagattaacttatgtattgaggaaaatttgaagtttattttttcgatgaataaggctgtcaaatgatttagtatagattaatgacatcttttttagaaatattaaagtgagtattcctcattatgtcatcatttctgataattagagtgctaatttgaatgttagataatgtttccacatctatacctatttctttctagggcacttctgaccctggggcttggggatggcctttaggccacagtagtgtctgtgttaagttcactaaatgtgtatttaatgagaaacattcctatgtaaaaatgtgtgtatgtgaacgtatgcatacatttttattgtgcacctgtacattgtgaagaagtagtttggaaatttgtaaagcacaaaccataaaagagtgtggagttattaaatgatgtagcacaaatgtaatgtttagcttataaaaggtcctttctattttctatggcaaagactttgacacttgaaaaataaaaccaatatttgatttatttttgtaagtatttaggatattattttaaataaatgattgtccattatcaa

SEQ ID NO: 19751 - DNA, 2501 bp, Homo sapiens
ttaatgaagatttcagttattgcttttaagcataagttgtatttagcttctgctgaaaaattgtatcatataataattttgcttcattgaaaagggatgttgcagtgatgaaacaaggtgggatcagtttgattttatcttgggctcagtttgtggtattcagttcgtttctgcccaaagctcttattttcagaggtgttacttttgaacttttggggtcatttttaaaagttagcacttttgaattttagttgtgttaaatatgtgctgtcgtatatcatagccatgagccatatatgacaatttaaatttaattaattataaactcagtctcttggttgcaccagccacatttcagatgctcaatagccacatgtggctagtgggtaccatattggacagggcagctatagaatatttccatcattgcagaaagttctattggatagtaccataatctttttatagtaacttggaaatactatttgatattagatgttagaccacaaaaagaagaaaaatgttaggactatttcagatataaaaaggaactgaattgtgacataattagcatcttacattccatacagttgaataccttatgctgtgacaaccatagttaatcatttcagtgctgttcaacatacatacctatcagcagtgtgtttagaccaggggtctgcaaactttctgtgaatggacaaagagtaaatactttagtaaatgtcttaggctttgtggcctacatgatctttgttgcaagtactcaactctgccattatagagttaaagcagccatacacaatatataaacaaaatgggcatagttgtatttcagtaaaactttatttacaaagacaggcggtaggccagatttggcttgcatgctgtagagctgtggtctaaattttattcatagactttctttgcaaatacagtgtgagtattgttccatttacagtattattattttttagatacctggtttttagattcttgcctggtaactttttactgaaaatacaagaatttcgtactgcatttgcatctccgagattagggagcacctgtcaggatatgttgttctatcagggttacttctgttgactacctcttagattttgatacagttatattgttgagtttcattttcatatattcttgtagtgtctgcttgcctgtgacttctggtaaaataaaataagcctttgaaaatattttagcatggtatttaacattttctaaatattatggcattttgacatattttagtcagcgaagacatctgcccctttggtgtttctacttgcttatgattgagattttacaagcccttcaaactccgttttaaaggaatttattgtaaaacattaactttaataaattagtgttttcacagatcagatcattatacttggaacttctaaatcatgcaatttctgaataaggacataaggctagattcatttttcttaatagagaaaaaggaaatttctgatttatcacttttctagttgataagtaggattcaaaacgtttgatatgtaagtatttatataagactaatgtaatttaaagttctgtattattgtgattaatcatacagaaattcaggaactgatcagaagtgagattcttttccacatctggttaatgtagtgagttgacaccctgtgggtggtaaagcattataaacatttcatcttgaaccatgatttatacacatctgtgttataagggaggcttgagtacatataccaatgaagagatattcagcatttgtctatttgataaggaattaaatgtcctagtgattataaagtaaaaccacagaccaatttgcaaatgatcttcaatgttaagcacttgctctaagattaaaattccttttctttttaaggttaagggtgtgtacgtatggcagtgatgtctatgttgagattaacttatgtattgaggaaaatttgaagtttattttttcgatgaataaggctgtcaaatgatttagtatagattaatgacatcttttttagaaatattaaagtgagtattcctcattatgtcatcatttctgataattagagtgctaatttgaatgttagataatgtttccacatctatacctatttctttctagggcacttctgaccctggggcttggggatggcctttaggccacagtagtgtctgtgttaagttcactaaatgtgtatttaatgagaaacattcctatgtaaaaatgtgtgtatgtgaacgtatgcatacatttttattgtgcacctgtacattgtgaagaagtagtttggaaatttgtaaagcacaaaccataaaagagtgtggagttattaaatgatgtagcacaaatgtaatgtttagcttataaaaggtcctttctattttctatggcaaagactttgacacttgaaaaataaaaccaatatttgatttatttttgtaagtatttaggatattattttaaataaatgattgtccattatcaa

SEQ ID NO: 19752 - DNA, 1911 bp, Homo sapiens
ttgaacagcactgaaatgattaactatggttgtcacagcataaggtgttcaacatacatacctatcagcagtgtgtttagaccaggggtctgcaaactttctgtgaatggacaaagagtaaatactttagtaaatgtcttaggctttgtggcctacatgatctttgttgcaagtactcaactctgccattatagagttaaagcagccatacacaatatataaacaaaatgggcatagttgtatttcagtaaaactttatttacaaagacaggcggtaggccagatttggcttgcatgctgtagagctgtggtctaaattttattcatagactttctttgcaaatacagtgtgagtattgttccatttacagtattattattttttagatacctggtttttagattcttgcctggtaactttttactgaaaatacaagaatttcgtactgcatttgcatctccgagattagggagcacctgtcaggatatgttgttctatcagggttacttctgttgactacctcttagattttgatacagttatattgttgagtttcattttcatatattcttgtagtgtctgcttgcctgtgacttctggtaaaataaaataagcctttgaaaatattttagcatggtatttaacattttctaaatattatggcattttgacatattttagtcagcgaagacatctgcccctttggtgtttctacttgcttatgattgagattttacaagcccttcaaactccgttttaaaggaatttattgtaaaacattaactttaataaattagtgttttcacagatcagatcattatacttggaacttctaaatcatgcaatttctgaataaggacataaggctagattcatttttcttaatagagaaaaaggaaatttctgatttatcacttttctagttgataagtaggattcaaaacgtttgatatgtaagtatttatataagactaatgtaatttaaagttctgtattattgtgattaatcatacagaaattcaggaactgatcagaagtgagattcttttccacatctggttaatgtagtgagttgacaccctgtgggtggtaaagcattataaacatttcatcttgaaccatgatttatacacatctgtgttataagggaggcttgagtacatataccaatgaagagatattcagcatttgtctatttgataaggaattaaatgtcctagtgattataaagtaaaaccacagaccaatttgcaaatgatcttcaatgttaagcacttgctctaagattaaaattccttttctttttaaggttaagggtgtgtacgtatggcagtgatgtctatgttgagattaacttatgtattgaggaaaatttgaagtttattttttcgatgaataaggctgtcaaatgatttagtatagattaatgacatcttttttagaaatattaaagtgagtattcctcattatgtcatcatttctgataattagagtgctaatttgaatgttagataatgtttccacatctatacctatttctttctagggcacttctgaccctggggcttggggatggcctttaggccacagtagtgtctgtgttaagttcactaaatgtgtatttaatgagaaacattcctatgtaaaaatgtgtgtatgtgaacgtatgcatacatttttattgtgcacctgtacattgtgaagaagtagtttggaaatttgtaaagcacaaaccataaaagagtgtggagttattaaatgatgtagcacaaatgtaatgtttagcttataaaaggtcctttctattttctatggcaaagactttgacacttgaaaaataaaaccaatatttgatttatttttgtaagtatttaggatattattttaaataaatgattgtccattatcaa

SEQ ID NO: 19753 - DNA, 2745 bp, Homo sapiens
ttaatgaagatttcagttattgcttttaagcataagttgtatttagcttctgctgaaaaattgtatcatataataattttgcttcattgaaaagggatgttgcagtgatgaaacaaggtgggatcagtttgattttgtttacttattaaggagtttatcttgggctcagtttgtggtattcagttcgtttctgcccaaagctcttattttcagaggtgttacttttgaacttttggggtcatttttaaaagttagcacttttgaattttagttgtgttaaatatgtgctgtcgtatatcatagccatgagccatatatgacaatttaaatttaattaattataaactcagtctcttggttgcaccagccacatttcagatgctcaatagccacatgtggctagtgggtaccatattggacagggcagctatagaatatttccatcattgcagaaagttctattggatagtaccataatctttttatagtaacttggaaatactatttgatattagatgttagaccacaaaaagaagaaaaatgttaggactatttcagatataaaaaggaactgaattgtgacataattagcatcttacattccatacagttgaataccttatgctgtgacaaccatagttaatcatttcagtgctgttcaacatacatacctatcagcagtgtgtttagaccaggggtctgcaaactttctgtgaatggacaaagagtaaatactttagtaaatgtcttaggctttgtggcctacatgatctttgttgcaagtactcaactctgccattatagagttaaagcagccatacacaatatataaacaaaatgggcatagttgtatttcagtaaaactttatttacaaagacaggcggtaggccagatttggcttgcatgctgtagagctgtggtctaaattttattcatagactttctttgcaaatacagtgtgagtattgttccatttacagtattattattttttagatacctggtttttagattcttgcctggtaactttttactgaaaatacaagaatttcgtactgcatttgcatctccgagattagggagcacctgtcaggatatgttgttctatcagggttacttctgttgactacctcttagattttgatacagttatattgttgagtttcattttcatatattcttgtagtgtctgcttgcctgtgacttctggtaaaataaaataagcctttgaaaatattttagcatggtatttaacattttctaaatattatggcattttgacatattttagtcagcgaagacatctgcccctttggtgtttctacttgcttatgattgagattttacaagcccttcaaactccgttttaaaggaatttattgtaaaacattaactttaataaattagtgttttcacagatcagatcattatacttggaacttctaaatcatgcaatttctgaataaggacataaggctagattcatttttcttaatagagaaaaaggaaatttctgatttatcacttttctagttgataagtaggattcaaaacgtttgatatgtaagtatttatataagactaatgtaatttaaagttctgtattattgtgattaatcatacagaaattcaggaactgatcagaagtgagattcttttccacatctggttaatgtagtgagttgacaccctgtgggtggtaaagcattataaacatttcatcttgaaccatgatttatacacatctgtgttataagggaggcttgagtacatataccaatgaagagatattcagcatttgtctatttgataaggaattaaatgtcctagtgattataaagtaaaaccacagaccaatttgcaaatgatcttcaatgttaagcacttgctctaagattaaaattccttttctttttaaggttaagggtgtgtacgtatggcagtgatgtctatgttgagattaacttatgtattgaggaaaatttgaagtttattttttcgatgaataaggctgtcaaatgatttagtatagattaatgacatcttttttagaaatattaaagtgagtattcctcattatgtcatcatttctgataattagagtgctaatttgaatgttagataatgtttccacatctatacctatttctttctagggcacttctgaccctggggcttggggatggcctttaggccacagtagtgtctgtgttaagttcactaaatgtgtatttaatgagaaacattcctatgtaaaaatgtgtgtatgtgaacgtatgcatacatttttattgtgcacctgtacattgtgaagaagtagtttggaaatttgtaaagcacaaaccataaaagagtgtggagttattaaatgatgtagcacaaatgtaatgtttagcttataaaaggtcctttctattttctatggcaaagactttgacacttgaaaaataaaaccaatatttgatttatttttgtaagtatttaggatattattttaaataaatgattgtccattatcaatataatagttgtgaaatgatttaagtaaataaactttatgcttctgtgtctgttgattttgatgggtttttagtgggcataaatgcatgtttatttgctgcattaaatagaggagtgaaaatatgtaggtttgtaaagaaaaagtaattgcattcttctaattttgtttttccttttaattttttggggaatgaaaagatatattaaatgatttgggaatatgt

SEQ ID NO: 19754 - DNA, 2509 bp, Homo sapiens
ttaatgaagatttcagttattgcttttaagcataagttgtatttagcttctgctgaaaaattgtatcatataataattttgcttcattgaaaagggatgttgcagtgatgaaacaaggtgggatcagtttgattttgtttacttattaaggagtttatcttgggctcagtttgtggtattcagttcgtttctgcccaaagctcttattttcagaggtgttacttttgaacttttggggtcatttttaaaagttagcacttttgaattttagttgtgttaaatatgtgctgtcgtatatcatagccatgagccatatatgacaatttaaatttaattaattataaactcagtctcttggttgcaccagccacatttcagatgctcaatagccacatgtggctagtgggtaccatattggacagggcagctatagaatatttccatcattgcagaaagttctattggatagtaccataatctttttatagtaacttggaaatactatttgatattagatgttagaccacaaaaagaagaaaaatgttaggactatttcagatataaaaaggaactgaattgtgacataattagcatcttacattccatacagttgaataccttatgctgtgacaaccatagttaatcatttcagtgctgttcaacatacatacctatcagcagtgtgtttagaccaggggtctgcaaactttctgtgaatggacaaagagtaaatactttagtaaatgtcttaggctttgtggcctacatgatctttgttgcaagtactcaactctgccattatagagttaaagcagccatacacaatatataaacaaaatgggcatagttgtatttcagtaaaactttatttacaaagacaggcggtaggccagatttggcttgcatgctgtagagctgtggtctaaattttattcatagactttctttgcaaatacagtgtgagtattgttccatttacagtattattattttttagatacctggtttttagattcttgcctggtaactttttactgaaaatacaagaatttcgtactgcatttgcatctccgagattagggagcacctgtcaggatatgttgttctatcagggttacttctgttgactacctcttagattttgatacagttatattgttgagtttcattttcatatattcttgtagtgtctgcttgcctgtgacttctggtaaaataaaataagcctttgaaaatattttagcatggtatttaacattttctaaatattatggcattttgacatattttagtcagcgaagacatctgcccctttggtgtttctacttgcttatgattgagattttacaagcccttcaaactccgttttaaaggaatttattgtaaaacattaactttaataaattagtgttttcacagatcagatcattatacttggaacttctaaatcatgcaatttctgaataaggacataaggctagattcatttttcttaatagagaaaaaggaaatttctgatttatcacttttctagttgataagtaggattcaaaacgtttgatatgtaagtatttatataagactaatgtaatttaaagttctgtattattgtgattaatcatacagaaattcaggaactgatcagaagtgagattcttttccacatctggttaatgtagtgagttgacaccctgtgggtggtaaagcattataaacatttcatcttgaaccatgatttatacacatctgtgttataagggaggcttgagtacatataccaatgaagagatattcagcatttgtctatttgataaggaattaaatgtcctagtgattataaagtaaaaccacagaccaatttgcaaatgatcttcaatgttaagcacttgctctaagattaaaattccttttctttttaaggttaagggtgtgtacgtatggcagtgatgtctatgttgagattaacttatgtattgaggaaaatttgaagtttattttttcgatgaataaggctgtcaaatgatttagtatagattaatgacatcttttttagaaatattaaagtgagtattcctcattatgtcatcatttctgataattagagtgctaatttgaatgttagataatgtttccacatctatacctatttctttctagggcacttctgaccctggggcttggggatggcctttaggccacagtagtgtctgtgttaagttcactaaatgtgtatttaatgagaaacattcctatgtaaaaatgtgtgtatgtgaacgtatgcatacatttttattgtgcacctgtacattgtgaagaagtagtttggaaatttgtaaagcacaaaccataaaagagtgtggagttattaaatgatgtagcacaaatgtaatgtttagcttataaaaggtcctttctattttctatggcaaagactaaaaaaccaatagagtgattttggaaggattttaggatatattttaaataaaggttgccgaggaaaaaaaaaaaa

SEQ ID NO: 19755 - DNA, 2999 bp, Homo sapiens
ggccctgctcgctcactcgctcgtccccggcttccgagcacagcatggcggtcaaggtgcagacaactaagcgaggggatcctcatgagttaagaaacatatttctacagtatgccagtactgaggttgatggagagcgttacatgaccccagaagactttgttcagcgctatcttggactgtataatgatccaaatagtaacccaaagatcgtgcagctcttggcaggagtagctgatcaaaccaaggatgggttgatctcctatcaagagtttttggcatttgaatctgttttatgtgctccagattccatgttcatagtggctttccagttgtttgacaagagtggaaatggagaggtgacatttgaaaatgtcaaagaaatttttggacagactattattcatcatcatatcccttttaactgggattgtgaatttatccgactgcattttgggcataaccggaagaagcatcttaactacacagaattcacgcagtttctccaggagctgcaattggaacatgcaagacaagcctttgcactcaaagacaaaagcaaaagtggcatgatttctggtctggatttcagtgacatcatggttaccattagatctcacatgcttactccttttgtggaggagaacttagtttcagcagctggaggaagtatctcacaccaggttagcttctcctacttcaatgcatttaactcgttactgaataacatggagcttgttcgtaagatatatagcactctagctggcacaaggaaagatgttgaagtcacaaaggaggaatttgcccagagtgccatacgctatggacaagtcacaccactagaaattgatattctatatcagcttgcagacttatataatgcttcagggcgcttgactttggcagatattgagagaatagccccattggctgagggggccttaccttacaacctggcagaacttcagagacagcagtctcctgggttaggcaggcctatctggctccagattgccgagtctgcttacagattcactctgggctcagttgctggagctgtgggagccactgcagtgtatcctatagatctggtgaagacccgaatgcaaaaccagcgtggctctggctctgttgttggggagctaatgtacaaaaacagctttgactgttttaagaaagtcttgcgttatgagggcttctttggactctacaggggtctgataccacaacttataggggttgctccagaaaaggccattaaactgactgttaatgattttgttcgggacaaatttaccagaagagatggctctgttccacttccagcagaagttcttgctggaggctgtgctggaggctctcaggtcatttttaccaacccattggagatagtgaagattcgtctgcaagtagctggagagatcaccacgggacccagagtcagcgccctgaatgtgctccgggacttgggaatttttggtctgtataagggtgccaaagcgtgtttcctccgagacattcccttctctgcaatctattttcctgtttatgctcattgcaaactacttctggctgatgaaaatggacacgtgggaggtttaaatcttcttgcagctggagccatggcaggtgtcccagctgcatctctggtgacccctgctgatgtcatcaagacaagactgcaggtggctgcccgcgctggccagacgacatacagtggtgtcatcgactgtttcaggaagattctccgggaagaagggccctcagcattttggaaagggactgcagctcgagtgtttcgatcctctccccagtttggtgttaccttggtcacttatgaacttctccagcggtggttttacattgattttggaggcctcaaacccgctggttcagaaccaacacctaagtcacgcattgcagaccttcctcctgccaaccctgatcacatcggtggatacagactcgccacagccacgtttgcaggcatcgaaaacaaatttggcctttatctcccgaaatttaagtctcctagtgttgctgtggttcagccaaaggcagcagtggcagccactcagtgatgagacaactgttgagtgtggcaaaatggcgccttgaagaaagaggcctaggagagcagccctgtaatgtatccagtcagctgcatggtactgactgagctgaggagtcaaactcttctttctgtatgacatatacatatacttgtttataaaataatcatttgcccagggaaaaaaccacaacgctgtttcaagctttagtcttatgtgttgaaatgtttttgtaagccttggcatgaattagtgttctagactctgctttgcacagcttgcacttacagtgattgtacatattgtacatctttgtacagagacatcttggcacctcatcccaacaaatcacatttgtagaaatgtaatgcggttctgagtggcttgaaatgtacagaatgttttgaaagtgttttattaagaatcacacaaaaataaatgtattaaaattaaattcattctcttattggtgacttatggaaataaagcatcaatattggatgtatttaattcctagtttgttttccattctggaataaaaaggtatttgctgataaaaggcataacgagacatagtgctgctaccactgaataagtgatactttggaaagatgcatgccagtggatgccagaggaccaggctaatgacttgtgtgtgctgatgtgtttccatttgtatttaatgtgtgtagaccctcctctgttcatcaatcaaaaagcatttcctaggcagctcctcgcctgtcagtgtgcatatggaaacagggacatctccatcattactggcttagttttgctttcctttgacacagtaaggcaaaggccaagctttcaaaagagtaaaggatactttcacaatttcccttcatatggatatgattccagtcaaaaataaaatgcacaccaaaatgtaaaaaaaaaattgga

SEQ ID NO: 19756 - DNA, 2524 bp, Homo sapiens
ggccctgctcgctcactcgctcgtccccggcttccgagcacagcatggcggtcaaggtgcagacaactaagcgaggggatcctcatgagttaagaaacatatttctacagtatgccagtactgaggttgatggagagcgttacatgaccccagaagactttgttcagcgctatcttggactgtataatgatccaaatagtaacccaaagatcgtgcagctcttggcaggagtagctgatcaaaccaaggatgggttgatctcctatcaagagtttttggcatttgaatctgttttatgtgctccagattccatgttcatagtggctttccagttgtttgacaagagtggaaatggagaggtgacatttgaaaatgtcaaagaaatttttggacagactattattcatcatcatatcccttttaactgggattgtgaatttatccgactgcattttgggcataaccggaagaagcatcttaactacacagaattcacgcagtttctccaggagctgcaattggaacatgcaagacaagcctttgcactcaaagacaaaagcaaaagtggcatgatttctggtctggatttcagtgacatcatggttaccattagatctcacatgcttactccttttgtggaggagaacttagtttcagcagctggaggaagtatctcacaccaggttagcttctcctacttcaatgcatttaactcgttactgaataacatggagcttgttcgtaagatatatagcactctagctggcacaaggaaagatgttgaagtcacaaaggaggaatttgcccagagtgccatacgctatggacaagtcacaccactagaaattgatattctatatcagcttgcagacttatataatgcttcagggcgcttgactttggcagatattgagagaatagccccattggctgagggggccttaccttacaacctggcagaacttcagagacagcagtctcctgggttaggcaggcctatctggctccagattgccgagtctgcttacagattcactctgggctcagttgctggagctgtgggagccactgcagtgtatcctatagatctggtgaagacccgaatgcaaaaccagcgtggctctggctctgttgttggggagctaatgtacaaaaacagctttgactgttttaagaaagtcttgcgttatgagggcttctttggactctacaggggtctgataccacaacttataggggttgctccagaaaaggccattaaactgactgttaatgattttgttcgggacaaatttaccagaagagatggctctgttccacttccagcagaagttcttgctggaggctgtgctggaggctctcaggtcatttttaccaacccattggagatagtgaagattcgtctgcaagtagctggagagatcaccacgggacccagagtcagcgccctgaatgtgctccgggacttgggaatttttggtctgtataagggtgccaaagcgtgtttcctccgagacattcccttctctgcaatctattttcctgtttatgctcattgcaaactacttctggctgatgaaaatggacacgtgggaggtttaaatcttcttgcagctggagccatggcaggtgtcccagctgcatctctggtgacccctgctgatgtcatcaagacaagactgcaggtggctgcccgcgctggccagacgacatacagtggtgtcatcgactgtttcaggaagattctccgggaagaagggccctcagcattttggaaagggactgcagctcgagtgtttcgatcctctccccagtttggtgttaccttggtcacttatgaacttctccagcggtggttttacattgattttggaggcctcaaacccgctggttcagaaccaacacctaagtcacgcattgcagaccttcctcctgccaaccctgatcacatcggtggatacagactcgccacagccacgtttgcaggcatcgaaaacaaatttggcctttatctcccgaaatttaagtctcctagtgttgctgtggttcagccaaaggcagcagtggcagccactcagtgatgagacaactgttgagtgtggcaaaatggcgccttgaagaaagaggcctaggagagcagccctgtaatgtatccagtcagctgcatggtactgactgagctgaggagtcaaactcttctttctgtatgacatatacatatacttgtttataaaataatcatttgcccagggaaaaaaccacaacgctgtttcaagctttagtcttatgtgttgaaatgtttttgtaagccttggcatgaattagtgttctagactctgctttgcacagcttgcacttacagtgattgtacatattgtacatctttgtacagagacatcttggcacctcatcccaacaaatcacatttgtagaaatgtaatgcggttctgagtggcttgaaatgtacagaatgttttgaaagtgttttattaagaatcacacaaaaataaatgtattaaaatta

SEQ ID NO: 19757 - DNA, 807 bp, Homo sapiens
attttagaattggaactggaggagacttttccccttctgacttaaggcaccaaagtagttttaattgctctacaatccaaggaagcagaagcaagtgggtctgctgccaagaacgcttaccacaaagaggaaaaaaataattgtagctctgaattttagctctggcttgtaaaatatgacagtcttttactatctctttttctttcattgagtacctggctgccacatctggctccgcttttttttccaaatgggtttattttgttattttgaatatggctggggtgatcctggaaagactggtctgagaaacaatcttgacatttcagctagaaacaaacccagaggtagattgatctgagacagagtttgggaccatccctctgaacctctccagggttggcctaagtgtcaaactgtcattcccccctgaggaaggaagtttcacctccttcttttcaagatagcaagatgtggaggctttgctggattttccttttttacgctgccagtcgggctctgatgtggaatctgcctgtctcttctcccttgcctacaggctggaggctctcaggtcatttttaccaacccattggagatagtgaagattcgtctgcaagtagctggagagatcaccacgggacccagagtcagcgccctgaatgtgctccgggacttgggaatttttggtctgtataaggtgggtaggtttaggttataatgtactcaataaaatatgaaagaatgtggaaaccagacttcttccctccaagttgaaaagcaatcttgtccagcagggtagtctgt

SEQ ID NO: 19758 - DNA, 2412 bp, Homo sapiens
ggccctgctcgctcactcgctcgtccccggcttccgagcacagcatggcggtcaaggtgcagacaactaagcgaggggatcctcatgagttaagaaacatatttctacagtatgccagtactgaggttgatggagagcgttacatgaccccagaagactttgttcagcgctatcttggactgtataatgatccaaatagtaacccaaagatcgtgcagctcttggcaggagtagctgatcaaaccaaggatgggttgatctcctatcaagagtttttggcatttgaatctgttttatgtgctccagattccatgttcatagtggctttccagttgtttgacaagagtggaaatggagaggtgacatttgaaaatgtcaaagaaatttttggacagactattattcatcatcatatcccttttaactgggattgtgaatttatccgactgcattttgggcataaccggaagaagcatcttaactacacagaattcacgcagtttctccaggagctgcaattggaacatgcaagacaagcctttgcactcaaagacaaaagcaaaagtggcatgatttctggtctggatttcagtgacatcatggttaccattagatctcacatgcttactccttttgtggaggagaacttagtttcagcagctggaggaagtatctcacaccagaggaatttgcccagagtgccatacgctatggacaagtcacaccactagaaattgatattctatatcagcttgcagacttatataatgcttcagggcgcttgactttggcagatattgagagaatagccccattggctgagggggccttaccttacaacctggcagaacttcagagacagcagtctcctgggttaggcaggcctatctggctccagattgccgagtctgcttacagattcactctgggctcagttgctggagctgtgggagccactgcagtgtatcctatagatctggtgaagacccgaatgcaaaaccagcgtggctctggctctgttgttggggagctaatgtacaaaaacagctttgactgttttaagaaagtcttgcgttatgagggcttctttggactctacaggggtctgataccacaacttataggggttgctccagaaaaggccattaaactgactgttaatgattttgttcgggacaaatttaccagaagagatggctctgttccacttccagcagaagttcttgctggaggctgtgctggaggctctcaggtcatttttaccaacccattggagatagtgaagattcgtctgcaagtagctggagagatcaccacgggacccagagtcagcgccctgaatgtgctccgggacttgggaatttttggtctgtataagggtgccaaagcgtgtttcctccgagacattcccttctctgcaatctattttcctgtttatgctcattgcaaactacttctggctgatgaaaatggacacgtgggaggtttaaatcttcttgcagctggagccatggcaggtgtcccagctgcatctctggtgacccctgctgatgtcatcaagacaagactgcaggtggctgcccgcgctggccagacgacatacagtggtgtcatcgactgtttcaggaagattctccgggaagaagggccctcagcattttggaaagggactgcagctcgagtgtttcgatcctctccccagtttggtgttaccttggtcacttatgaacttctccagcggtggttttacattgattttggaggcctcaaacccgctggttcagaaccaacacctaagtcacgcattgcagaccttcctcctgccaaccctgatcacatcggtggatacagactcgccacagccacgtttgcaggcatcgaaaacaaatttggcctttatctcccgaaatttaagtctcctagtgttgctgtggttcagccaaaggcagcagtggcagccactcagtgatgagacaactgttgagtgtggcaaaatggcgccttgaagaaagaggcctaggagagcagccctgtaatgtatccagtcagctgcatggtactgactgagctgaggagtcaaactcttctttctgtatgacatatacatatacttgtttataaaataatcatttgcccagggaaaaaaccacaacgctgtttcaagctttagtcttatgtgttgaaatgtttttgtaagccttggcatgaattagtgttctagactctgctttgcacagcttgcacttacagtgattgtacatattgtacatctttgtacagagacatcttggcacctcatcccaacaaatcacatttgtagaaatgtaatgcggttctgagtggcttgaaatgtacagaatgttttgaaagtgttttattaagaatcacacaaaaataaatgtattaaaatta

SEQ ID NO: 19759 - DNA, 2209 bp, Homo sapiens
gtttaaactacttattccagatataattgatttatttttgttttcccttttaagaaaatgtcaaagaaatttttggacagactattattcatcatcatatcccttttaactgggattgtgaatttatccgactgcattttgggcataaccggaagaagcatcttaactacacagaattcacgcagtttctccaggagctgcaattggaacatgcaagacaagcctttgcactcaaagacaaaagcaaaagtggcatgatttctggtctggatttcagtgacatcatggttaccattagatctcacatgcttactccttttgtggaggagaacttagtttcagcagctggaggaagtatctcacaccaggttagcttctcctacttcaatgcatttaactcgttactgaataacatggagcttgttcgtaagatatatagcactctagctggcacaaggaaagatgttgaagtcacaaaggaggaatttgcccagagtgccatacgctatggacaagtcacaccactagaaattgatattctatatcagcttgcagacttatataatgcttcagggcgcttgactttggcagatattgagagaatagccccattggctgagggggccttaccttacaacctggcagaacttcagagacagcagtctcctgggttaggcaggcctatctggctccagattgccgagtctgcttacagattcactctgggctcagttgctggagctgtgggagccactgcagtgtatcctatagatctggtgaagacccgaatgcaaaaccagcgtggctctggctctgttgttggggagctaatgtacaaaaacagctttgactgttttaagaaagtcttgcgttatgagggcttctttggactctacaggggtctgataccacaacttataggggttgctccagaaaaggccattaaactgactgttaatgattttgttcgggacaaatttaccagaagagatggctctgttccacttccagcagaagttcttgctggaggctgtgctggaggctctcaggtcatttttaccaacccattggagatagtgaagattcgtctgcaagtagctggagagatcaccacgggacccagagtcagcgccctgaatgtgctccgggacttgggaatttttggtctgtataagggtgccaaagcgtgtttcctccgagacattcccttctctgcaatctattttcctgtttatgctcattgcaaactacttctggctgatgaaaatggacacgtgggaggtttaaatcttcttgcagctggagccatggcaggtgtcccagctgcatctctggtgacccctgctgatgtcatcaagacaagactgcaggtggctgcccgcgctggccagacgacatacagtggtgtcatcgactgtttcaggaagattctccgggaagaagggccctcagcattttggaaagggactgcagctcgagtgtttcgatcctctccccagtttggtgttaccttggtcacttatgaacttctccagcggtggttttacattgattttggaggcctcaaacccgctggttcagaaccaacacctaagtcacgcattgcagaccttcctcctgccaaccctgatcacatcggtggatacagactcgccacagccacgtttgcaggcatcgaaaacaaatttggcctttatctcccgaaatttaagtctcctagtgttgctgtggttcagccaaaggcagcagtggcagccactcagtgatgagacaactgttgagtgtggcaaaatggcgccttgaagaaagaggcctaggagagcagccctgtaatgtatccagtcagctgcatggtactgactgagctgaggagtcaaactcttctttctgtatgacatatacatatacttgtttataaaataatcatttgcccagggaaaaaaccacaacgctgtttcaagctttagtcttatgtgttgaaatgtttttgtaagccttggcatgaattagtgttctagactctgctttgcacagcttgcacttacagtgattgtacatattgtacatctttgtacagagacatcttggcacctcatcccaacaaatcacatttgtagaaatgtaatgcggttctgagtggcttgaaatgtacagaatgttttgaaagtgttttattaagaatcacacaaaaataaatgtattaaaatta

SEQ ID NO: 19760 - DNA, 1910 bp, Homo sapiens
aagcttggcacgaggcctcgtgccaaggagaacttagtttcagcagctggaggaagtatctcacaccaggttagcttctcctacttcaatgcatttaactcgttactgaataacatggagcttgttcgtaagatatatagcactctagctggcacaaggaaagatgttgaagtcacaaaggaggaatttgcccagagtgccatacgctatggacaagtcacaccactagaaattgatattctatatcagcttgcagacttatataatgcttcagggcgcttgactttggcagatattgagagaatagccccattggctgagggggccttaccttacaacctggcagaacttcagagacagcagtctcctgggttaggcaggcctatctggctccagattgccgagtctgcttacagattcactctgggctcagttgctggagctgtgggagccactgcagtgtatcctatagatctggtgaagacccgaatgcaaaaccagcgtggctctggctctgttgttggggagctaatgtacaaaaacagctttgactgttttaagaaagtcttgcgttatgagggcttctttggactctacaggggtctgataccacaacttataggggttgctccagaaaaggccattaaactgactgttaatgattttgttcgggacaaatttaccagaagagatggctctgttccacttccagcagaagttcttgctggaggctgtgctggaggctctcaggtcatttttaccaacccattggagatagtgaagattcgtctgcaagtagctggagagatcaccacgggacccagagtcagcgccctgaatgtgctccgggacttgggaatttttggtctgtataagggtgccaaagcgtgtttcctccgagacattcccttctctgcaatctattttcctgtttatgctcattgcaaactacttctggctgatgaaaatggacacgtgggaggtttaaatcttcttgcagctggagccatggcaggtgtcccagctgcatctctggtgacccctgctgatgtcatcaagacaagactgcaggtggctgcccgcgctggccagacgacatacagtggtgtcatcgactgtttcaggaagattctccgggaagaagggccctcagcattttggaaagggactgcagctcgagtgtttcgatcctctccccagtttggtgttaccttggtcacttatgaacttctccagcggtggttttacattgattttggaggcctcaaacccgctggttcagaaccaacacctaagtcacgcattgcagaccttcctcctgccaaccctgatcacatcggtggatacagactcgccacagccacgtttgcaggcatcgaaaacaaatttggcctttatctcccgaaatttaagtctcctagtgttgctgtggttcagccaaaggcagcagtggcagccactcagtgatgagacaactgttgagtgtggcaaaatggcgccttgaagaaagaggcctaggagagcagccctgtaatgtatccagtcagctgcatggtactgactgagctgaggagtcaaactcttctttctgtatgacatatacatatacttgtttataaaataatcatttgcccagggaaaaaaccacaacgctgtttcaagctttagtcttatgtgttgaaatgtttttgtaagccttggcatgaattagtgttctagactctgctttgcacagcttgcacttacagtgattgtacatattgtacatctttgtacagagacatcttggcacctcatcccaacaaatcacatttgtagaaatgtaatgcggttctgagtggcttgaaatgtacagaatgttttgaaagtgttttattaagaatcacacaaaaataaatgtattaaaatta

SEQ ID NO: 19761 - DNA, 2496 bp, Homo sapiens
ggccctgctcgctcactcgctcgtccccggcttccgagcacagcatggcggtcaaggtgcagacaactaagcgaggggatcctcatgagttaagaaacatatttctacagtatgccagtactgaggttgatggagagcgttacatgaccccagaagactttgttcagcgctatcttggactgtataatgatccaaatagtaacccaaagatcgtgcagctcttggcaggagtagctgatcaaaccaaggatgggttgatctcctatcaagagtttttggcatttgaatctgttttatgtgctccagattccatgttcatagtggctttccagttgtttgacaagagtggaaatggagaggtgacatttgaaaatgtcaaagaaatttttggacagactattattcatcatcatatcccttttaactgggattgtgaatttatccgactgcattttgggcataaccggaagaagcatcttaactacacagaattcacgcagtttctccaggagctgcaattggaacatgcaagacaagcctttgcactcaaagacaaaagcaaaagtggcatgatttctggtctggatttcagtgacatcatggttaccattagatctcacatgcttactccttttgtggaggagaacttagtttcagcagctggaggaagtatctcacaccaggttagcttctcctacttcaatgcatttaactcgttactgaataacatggagcttgttcgtaagatatatagcactctagctggcacaaggaaagatgttgaagtcacaaaggaggaatttgcccagagtgccatacgctatggacaagtcacaccactagaaattgatattctatatcagcttgcagacttatataatgcttcagggcgcttgactttggcagatattgagagaatagccccattggctgagggggccttaccttacaacctggcagaacttcagagacagcagtctcctgggttaggcaggcctatctggctccagattgccgagtctgcttacagattcactctgggctcagttgctggagctgtgggagccactgcagtgtatcctatagatctggtgaagacccgaatgcaaaaccagcgtggctctggctctgttgttggggagctaatgtacaaaaacagctttgactgttttaagaaagtcttgcgttatgagggcttctttggactctacaggggtctgataccacaacttataggggttgctccagaaaaggccattaaactgactgttaatgattttgttcgggacaaatttaccagaagagatggctctgttccacttccagcagaagttcttgctggaggctgtgctggaggctctcaggtcatttttaccaacccattggagatagtgaagattcgtctgcaagtagctggagagatcaccacgggacccagagtcagcgccctgaatgtgctccgggacttgggaatttttggtctgtataagggtgccaaagcgtgtttcctccgagacattcccttctctgcaatctattttcctgtttatgctcattgcaaactacttctggctgatgaaaatggacacgtgggaggtttaaatcttcttgcagctggagccatggcaggtgtcccagctgcatctctggtgacccctgctgatgtcatcaagacaagactgcaggtggctgcccgcgctggccagacgacatacagtggtgtcatcgactgtttcaggaagattctccgggaagaagggccctcagcattttggaaagggactgcagctcgagtgtttcgatcctctccccagtttggtgttaccttggtcacttatgaacttctccagcggtggttttacattgattttggaggcctcaaacccgctggttcagaaccaacacctaagtcacgcattgcagaccttcctcctgccaaccctgatcacatcggtggatacagactcgccacagccacgtttgcaggcatcgaaaacaaatttggcctttatctcccgaaatttaagtctcctagtgttgctgtggttcagccaaaggcagcagtggcagccactcagtgatgagacaactgttgagtgtggcaaaatggcgccctgtaatgtatccagtcagctgcatggtactgactgagctgaggagtcaaactcttctttctgtatgacatatacatatacttgtttataaaataatcatttgcccagggaaaaaaccacaacgctgtttcaagctttagtcttatgtgttgaaatgtttttgtaagccttggcatgaattagtgttctagactctgctttgcacagcttgcacttacagtgattgtacatattgtacatctttgtacagagacatcttggcacctcatcccaacaaatcacatttgtagaaatgtaatgcggttctgagtggcttgaaatgtacagaatgttttgaaagtgttttattaagaatcacacaaaaataaatgtattaaaatta

SEQ ID NO: 19762 - DNA, 1717 bp, Homo sapiens
gtagctcatgcctataatctcagcattttgggtggtgggaggatcacttgagaccagttctaaaccagcataagcatagtaagaactcagctctaccaaaacaacaacaacaacaacaaaattaaaaattagccaagtgtggtgatttatgccaggaggctgatgtgggaggattgcttgagtccaggaatttgaggctgtagtgagctatgatcatgccactgcactccagcctgagcaacagagtgagaccctgtctcaaaaacaaaactaaaattgatgctgctgacactggcacactgtcgcagaatttgtacaactttaattttacatgtaagcatttgataattttaaattttatcataagacaaatattttgctgacttgggaaaagcaacagtatgccagaagaggaaatggttggggaattttggttaactgatgttgtctttctaattagggttaatgattttgttcgggacaaatttaccagaagagatggctctgttccacttccagcagaagttcttgctggaggctgtgctggaggctctcaggtcatttttaccaacccattggagatagtgaagattcgtctgcaagtagctggagagatcaccacgggacccagagtcagcgccctgaatgtgctccgggacttgggaatttttggtctgtataagggtgccaaagcgtgtttcctccgagacattcccttctctgcaatctattttcctgtttatgctcattgcaaactacttctggctgatgaaaatggacacgtgggaggtttaaatcttcttgcagctggagccatggcaggtgtcccagctgcatctctggtgacccctgctgatgtcatcaagacaagactgcaggtggctgcccgcgctggccagacgacatacagtggtgtcatcgactgtttcaggaagattctccgggaagaagggccctcagcattttggaaagggactgcagctcgagtgtttcgatcctctccccagtttggtgttaccttggtcacttatgaacttctccagcggtggttttacattgattttggaggcctcaaacccgctggttcagaaccaacacctaagtcacgcattgcagaccttcctcctgccaaccctgatcacatcggtggatacagactcgccacagccacgtttgcaggcatcgaaaacaaatttggcctttatctcccgaaatttaagtctcctagtgttgctgtggttcagccaaaggcagcagtggcagccactcagtgatgagacaactgttgagtgtggcaaaatggcgccttgaagaaagaggcctaggagagcagccctgtaatgtatccagtcagctgcatggtactgactgagctgaggagtcaaactcttctttctgtatgacatatacatatacttgtttataaaataatcatttgcccagggaaaaaaccacaacgctgtttcaagctttagtcttatgtgttgaaatgtttttgtaagccttggcatgaattagtgttctagactctgctttgcacagcttgcacttacagtgattgtacatattgtacatctttgtacagagacatcttggcacctcatcccaacaaatcacatttgtagaaatgtaatgcggttctgagtggcttgaaatgtacagaatgttttgaaagtgttttattaagaatcacacaaaaataaatgtattaaaatta

SEQ ID NO: 19763 - DNA, 1833 bp, Homo sapiens
ggccctgctcgctcactcgctcgtccccggcttccgagcacagcatggcggtcaaggtgcagacaactaagcgaggggatcctcatgagttaagaaacatatttctacagtatgccagtactgaggttgatggagagcgttacatgaccccagaagactttgttcagcgctatcttggactgtataatgatccaaatagtaacccaaagatcgtgcagctcttggcaggagtagctgatcaaaccaaggatgggttgatctcctatcaagagtttttggcatttgaatctgttttatgtgctccagattccatgttcatagtggctttccagttgtttgacaagagtggaaatggagaggtgacatttgaaaatgtcaaagaaatttttggacagactattattcatcatcatatcccttttaactgggattgtgaatttatccgactgcattttgggcataaccggaagaagcatcttaactacacagaattcacgcagtttctccaggagctgcaattggaacatgcaagacaagcctttgcactcaaagacaaaagcaaaagtggcatgatttctggtctggatttcagtgacatcatggttaccattagatctcacatgcttactccttttgtggaggagaacttagtttcagcagctggaggaagtatctcacaccaggttagcttctcctacttcaatgcatttaactcgttactgaataacatggagcttgttcgtaagatatatagcactctagctggcacaaggaaagatgttgaagtcacaaaggaggaatttgcccagagtgccatacgctatggacaagtcacaccactagaaattgatattctatatcagcttgcagacttatataatgcttcagggcgcttgactttggcagatattgagagaatagccccattggctgagggggccttaccttacaacctggcagaacttcagagacagcagtctcctgggttaggcaggcctatctggctccagattgccgagtctgcttacagattcactctgggctcagttgctggagctgtgggagccactgcagtgtatcctatagatctggtgaagacccgaatgcaaaaccagcgtggctctggctctgttgttggggagctaatgtacaaaaacagctttgactgttttaagaaagtcttgcgttatgagggcttctttggactctacaggggtctgataccacaacttataggggttgctccagaaaaggccattaaactgactgttaatgattttgttcgggacaaatttaccagaagagatggctctgttccacttccagcagaagttcttgctggaggctgtgctggaggctctcaggtcatttttaccaacccattggagatagtgaagattcgtctgcaagtagctggagagatcaccacgggacccagagtcagcgccctgaatgtgctccgggacttgggaatttttggtctgtataagggtgccaaagcgtgtttcctccgagacattcccttctctgcaatctattttcctgtttatgctcattgcaaactacttctggctgatgaaaatggacacgtgggaggtttaaatcttcttgcagctggagccatggcaggtgtcccagctgcatctctggtgacccctgctgatgtcatcaagacaagactgcaggtggctgcccgcgctggccagacgacatacagtggtgtcatcgactgtttcaggaagattctccgggaagaagggccctcagcattttggaaagggactgcagctcgggtgttcgatctttcccagttgtgtactggcactatgactc

SEQ ID NO: 19764 - DNA, 1530 bp, Homo sapiens
ggccctgctcgctcactcgctcgtccccggcttccgagcacagcatggcggtcaaggtgcagacaactaagcgaggggatcctcatgagttaagaaacatatttctacagtatgccagtactgaggttgatggagagcgttacatgaccccagaagactttgttcagcgctatcttggactgtataatgatccaaatagtaacccaaagatcgtgcagctcttggcaggagtagctgatcaaaccaaggatgggttgatctcctatcaagagtttttggcatttgaatctgttttatgtgctccagattccatgttcatagtggctttccagttgtttgacaagagtggaaatggagaggtgacatttgaaaatgtcaaagaaatttttggacagactattattcatcatcatatcccttttaactgggattgtgaatttatccgactgcattttgggcataaccggaagaagcatcttaactacacagaattcacgcagtttctccaggagctgcaattggaacatgcaagacaagcctttgcactcaaagacaaaagcaaaagtggcatgatttctggtctggatttcagtgacatcatggttaccattagatctcacatgcttactccttttgtggaggagaacttagtttcagcagctggaggaagtatctcacaccaggttagcttctcctacttcaatgcatttaactcgttactgaataacatggagcttgttcgtaagatatatagcactctagctggcacaaggaaagatgttgaagtcacaaaggaggaatttgcccagagtgccatacgctatggacaagtcacaccactagaaattgatattctatatcagcttgcagacttatataatgcttcagggcgcttgactttggcagatattgagagaatagccccattggctgagggggccttaccttacaacctggcagaacttcagagacagcagtctcctgggttaggcaggcctatctggctccagattgccgagtctgcttacagattcactctgggctcagttgctggagctgtgggagccactgcagtgtatcctatagatctggtgaagacccgaatgcaaaaccagcgtggctctggctctgttgttggggagctaatgtacaaaaacagctttgactgttttaagaaagtcttgcgttatgagggcttctttggactctacaggggtctgataccacaacttataggggttgctccagaaaaggccattaaactgactgttaatgattttgttcgggacaaatttaccagaagagatggctctgttccacttccagcagaagttcttgctggaggctgtgtaagtattactgttaggcgcttcttgtgacaaatacattccgttgacctttttgcacagatataatagatatcttagtggcatttctcttgaactcaagggattctaagcaggttttctcaataatcatatggaataagttttaaattttattgtaaaagctaacgggttttgagtgtag

SEQ ID NO: 19765 - DNA, 735 bp, Homo sapiens
gggtaagtgggaagctactgtgtatttggcctaacatggtttttaaatgctgacaatagagttatctatttttaaatacattgctttcatttttggctgcatgaatatcctattttcttcttttagaaaagatattactgcattaacaatatcacttttaggttttgttttttcttgtcttaaaatagtcaaattgtagctttttcacttgctgtgtgcgctttcaagatttttttttacccgttttcttctctgcagcagtctcctgggttaggcaggcctatctggctccagattgccgagtctgcttacagattcactctgggctcagttgctggaggtgagtgacatgtctgtgtgctgtttgaggcttgtgttaatgtaatattatctcaccagactgaggcagatcagcaaaggtgcagttcattgttcccatgggtcacgacttcagggctttctgaagtgttctttatttttacctatgatcaggagacttgtcgtagcaatggctatgaccatctggctccagtctgtcttcaggacagaacctctgtaatgatgtgaaagtctgggatgcagtgctgcactcaccttaattatactggctaaggccagtatgaaaaaatggaaaatgagactgtgtttatgggacaggttaagaaattgagattcgctattatccttagcaaactaacgcaggaacagaaaaccaaataccacatgttctcattt

SEQ ID NO: 19766 - DNA, 308 bp, Homo sapiens
ggggtgcatgtatgtgtgtgtgtgtgtgtgtgtgtgtgtgtgtgtaacttaaaactgtgtaatcatatagtgcttgggatcaggtgtcttaatattgtgtatctgtgggtctgactttgatcttggactcttacaggaaacctatataacagcccatcttaaaagtaatgttctaatgttctgacctgtgccacagtaggagatgtggagtaaataattaaaattgccatcatgaaaaacattccacagcaggaaaggaataaagaaccttccttgagaagaaaaaaaccactaaatcacacagtgag

SEQ ID NO: 19767 - DNA, 550 bp, Homo sapiens
agttggatgctgttgaccacatctgtgcctaaatgcataatgcgttagcagccctgaaggggtctcctggtccaccagtgagttgtggacagcttaagaagcaaatgagctatatcagaattgcacaaatttcagtgacattggaggaagtttcttagagataatcaacagcaggattgttgggcaagaagttctgaatgtagggagcagaaggtgggtgctgaacgtggagggggccttgtgtactgtgtctgccatcacttttgcattgttggggccttggggagtttctgctgtgctggggtcacagtttttgccttttggcacattatgtcattgtagttgtaattcttataattcatattttaggctttgtgggtaaatatttagtacctaaaaagtttagcatgggtactatgaaaaatttattttctggctggttgtggtagctcacgcctgtaatcccagtgctttgggaggctgacgtgagaggattgattgagcctgggagctcaagaccagagcaacatagtaaaaccctgtctctacc

SEQ ID NO: 19768 - DNA, 368 bp, Homo sapiens
aagcaggacagatgcatatagtcctcatttcaaccacaggaattgactttaaaggtgacactgtccttagtaacacagctgatgccctgtaggggtaaaattagttgtgttttctctgtgcaggtgaaattttaatgaattttttgatactctgtagagcattcactgcaaaatgcgttgtaagctctaaacaccaacagctgattgtgaaagactctttattttttctttgccctaacttaaaaaaaaacagagaatgtttccagagaatctactaaggaaaacatcaggtctgacaacaaaagagaactgagagagcgaagaggaggcagctttctgcactttgcacactgggttgcagttctcac

SEQ ID NO: 19769 - DNA, 531 bp, Homo sapiens
ttcttgctccatacttgttagtttttcattgttcatttggttttacaggtacctagccactcagaaagagggagccttggatagtagtcactgaaaaggactactatttcaaaccctcacttcaaccgtattcctcgttgtcaaacagctttctgcattagtctcatgtgagctggggtagctgagtgtgggtctgttctgttctggggcagtgacaagatccagattcctcaacctattaatacaaaggtgaggccacaatttcatggtgtcagtgacagcaagagggagttcctggagtagcagtgccatggggccaatgccattcatgatggcatggaggctgcagtatcatgctccttggaggaggcagcagtggtatcttgcttggtcctggagtttcatgtgatttagaatgcagatgtattatctttggctgtgtattctcagaatctgggtctttagacctcttgatgaaactgagctacccattccacttacattataataagttcatttttgtctttagtg

SEQ ID NO: 19770 - DNA, 157 bp, Homo sapiens
cttgcggactggcggcgagagccctgctgactgccgggcgggaaatggggacagctaggcgagacaatagccctttaagctattctcaagccccgggtctgggcatatttggagtagagatcaaggttccacttctgaaacgggaagagccagcaat

SEQ ID NO: 19771 - DNA, 110 bp, Homo sapiens
cttacttataagtgggagctaagctatgaggatgcaaaaacatacagagcaatataatggactgtgggaattccaaggtgggaggaggtaggaaagagggtgaagcataa

SEQ ID NO: 19772 - DNA, 448 bp, Homo sapiens
tctgagcctcccaaagtcccatgaaggtgcaggcgattatttctgtgcagctatgtaaagactttcatctagggagagaatccacagcttttatctgatattctcggcctcccaagtggctgggacctcaggcgtgcgccaccatatctggctaattttttgtttattttttgtagagatatgggtctcactatgttgcccgggctggtctcaaactcctgagttcaagtgatcctcctgcctctgcctcccaaaatgttgggatcacaggtgtgaaccaccacgcctggtttatgtgtttttcaaagatgcaaatgccccaggaaggggtcagaacctcagaacttaccctgtgacttaatttcacagaaaaaagaatgaggaaatggaggtgctgagaggggaagcgtctcccagggtcacacagctcaggaccagagatggcaga

SEQ ID NO: 19773 - DNA, 547 bp, Homo sapiens
aggttgtgaataaaacattttaatttttataagaaatcatatacatttcatacattagtacaatttctattttcacagcttatctggatgtcctctcaatgcacaagttatcaaaaagggcaaggtttctgaagaactcatgaccatcaagctcaaagcaactgggggtaagagcacagggctggctgtcaccacctcctgcagggtgtagaccctggctccccaaagcgttccgtgtgtcaaagtattctctaggtgggaagcataattttaatgtacaagaagaaaggtttcctcagatttgaactaaaattataactttgtttaaaaaccaattttttggtgttttccttatttttaaataaggagtgatctccaacagagaaagtcaggcagtggggtatgatggattaagatacacttgtggttggcagggcatgctggctcacgcctgtaatcccagcactttgggagaccaaggatagaggattgcttgaggtcaggagtttgtgaccagcctgggcaacatagccagaccccatctcta

SEQ ID NO: 19774 - DNA, 6334 bp, Homo sapiens
gcccgcttgttcgctcactctcagtgaaaagagttttgaaatgagttctgaatagacagcattttctttgtgcggttggtaaataacacagagcaaagttagcaagttgcagcgcctctgcgttctgattctatggaacctttttgtagggagaagggcaggatgtttttaactgaatgtgacctcaggggaatactagagaaaataataaaatttctgaatggggcagcgtggagaaatcctaagagaaatagcataagagcattttggaacacatccaggaaaagataactttcgacacacctgtagacgttcgccaggtaaaggagtgatggaaactctccagttcagatccagtagcttttagggaaggaactacagttgctgacttaagttgaagaagcatctatttaatgtctggtcaaatcctacaagaaacacagaaatctatgattaaaaagctgagcactttgatatactgcaaagggtagagaaggcaggacggtagaaattttctgcaagaaagaatgaatttcaggatttatcactaaataagacaaagtcatttatttagtccccctgacacagcagggcaaactgagttgacatacaagttacctggagaaaaagagagcaattccaggacttcctcttcagcctaaaagaaggtaccagatctgtgcactggggcgatgtggaagagacctgcttattgcccctgatgtaagctccagtaagaaaagacgtcaagtacaagtactaggaaatcactttatacatctgtttataggtgaatgacctcaggactttgtgttcatgttatagatggatgcagaggctgaagataaaacgctgcgtactcgctctaaaggaaccgaggtgccaatggattcactaatccaggagctcagtgttgcctatgattgctccatggcaaagaagagaacagctgaagatcaggctttgggggttccagtcaacaaaaggaaatccctgctaatgaagccccgacactacagcccaaaagcagactgccaagaagaccgcagtgacaggacagaggacgatggccccttggaaacacatggtcactctaccgcagaggaaatcatgataaaacctatggatgaaagtcttctttcaactgcacaagaaaactccagtaggaaggaagacagatactcttgttatcaagagctcatggtcaagtctttaatgcacttggggaaatttgaaaaaaatgtatctgttcagactgtaagtgaaaatttaaatgacagtggcatccagtctttaaaagcagagagcgatgaagcagacgagtgctttctgattcattctgatgatggaagagacaagattgatgattctcagccacccttctgctcctctgatgacaatgaaagtaactctgaaagtgcagaaaatggctgggacagtggctccaacttctcagaagaaaccaaaccacctagagtcccaaagtatgttttaacagatcataaaaaagacctattggaagttcctgaaataaaaactgaaggtgacaaatttatcccttgtgagaacaggtgtgattctgaaacagaaaggaaagacccgcagaatgctctcgcagaacccctggatggcaatgcccagccctcattccctgacgttgaggaggaagatagcgagagcctggcagtaatgacggaagagggtagtgacctggaaaaggccaaggggaatttaagtttgctggagcaggcaattgctctgcaggctgagcgaggttgtgttttccataacacctacaaagagctggataggttcctgctggagcacctagcaggggaaaggaggcaaaccaaagttatcgacatgggtggaagacaaatctttaacaataaacattcaccaaggcctgaaaagagggagaccaagtgcccgatccctggatgtgatggcacgggacacgtgacagggctctacccgcaccaccgcagcctttcggggtgcccccacaaagtgcgggttcccctggaaattcttgccatgcatgaaaatgtgctcaagtgtcccacgccgggatgcacaggaaggggtcatgtgaacagcaaccgcaacacccacaggagtctttctggttgtccaattgctgcagctgaaaaattggcaatgtcccaggataaaaatcagcttgattctccccaaactgggcagtgtcctgaccaggcccacaggacaagtttggtgaagcaaattgaattcaatttcccgtcacaagccatcacctctcccagagccacagtgtcaaaagaacaagagaagtttggaaaagtaccatttgattatgccagttttgatgcccaagttttcggtaaacgccctctcatacaaacagtgcaaggacgaaaaacaccaccatttcctgaatcaaagcattttccaaatccagtgaaatttcctaatcgactgcctagtgcaggcgcccacacccagagccctggccgtgccagctcttatagctacggtcaatgtagtgaagacacccacatagcagcagctgctgccatcctgaacctttccacccgctgcagggaagccacagacatcctctccaacaagccacagagtctgcatgccaagggagccgaaatagaagtggatgaaaatggcacattggacttaagcatgaaaaaaaatcgaatcctggacaagtctgcacccctaacttcctctaacacttctattccaactccttcctcttccccattcaaaacaagcagcattctggtcaatgcagcattctatcaggctctttgtgaccaagagggctgggacactcctatcaactatagcaaaactcacgggaagacagaggaggagaaagagaaagacccagtgagctctctagaaaatttagaggaaaaaaagtttcctggagaggcctctataccaagccctaaacccaagcttcatgcaagagatctcaaaaaggaactaatcacctgtccaacaccaggatgtgatggaagtggccacgtgacaggaaactatgcatctcatcgcagtgtttctggatgtcctttagcagataagactctaaaatccctcatggctgccaactctcaggagcttaagtgtccaaccccaggctgcgatggctcggggcacgtgactggaaactatgcttcccacagaagcttgtccggatgccctcgtgcaaggaaaggtggtgtcaaaatgacccctaccaaggaagaaaaagaagaccctgaactgaaatgtcctgtgatagggtgtgatggccaaggtcacatatcaggtaaatacacatcacaccgcacagcttctggctgtcctctggctgccaagagacagaaggagaatcctctcaatggagcctccctctcctggaaactgaacaaacaagagctaccacattgtcccttgccaggctgcaatgggctgggccatgtaaataatgtttttgtcacccaccgaagcttatctggatgtcctctcaatgcacaagttatcaaaaagggcaaggtttctgaagaactcatgaccatcaagctcaaagcaactgggggaatagagagtgatgaagaaattaggcatttggatgaagaaataaaggaactgaatgaatccaaccttaaaattgaagcagatatgatgaaacttcagacccagatcacatctatggagagcaacttaaagacgatagaggaggagaacaaactcatagaacagaacaatgaaagtctgctgaaagagctggcaggtctaagccaagctctcatttcaagccttgctgacatccagcttccacagatgggacctatcagtgagcagaattttgaagcatatgtaaatacactcacagatatgtacagcaatctggaacgggactattccccggaatgcaaagctctactggaaagtatcaaacaggcagtgaagggtatccatgtgtaggatcacagcgctgccgggcaacagaagttaccaacagcagtaaactccagatggatctgttagaggttcatgtactgctaaggcgtggaggttgccgtactgcatttacaatttgcaacattgcactaattttattttccccagctgatataaaaaggaaagaaaaactatgatagacttcttggattaaaagcaatgcagtcaattattagatcttatttattttcatatgtttttcttttatttcttcattgtactcttcttttgtaaagtatatgtaaaataaatgtgacatttttataatttatttattactaatcaaagagttttttatcttttaactgcattttgaagtctgccgtatttttacaagtgtgtttattaatttattttccaataggatttaaatagaaatgctattctcaagtcatctttcttgctgggttttaatgaggaaacaggaaagggtgaaggaaatccttgtctaaggactgcactatagttgagtttgatttttattgcacacttcttcccccacctttcactgatttttgtatttataaatgaatttgcggtaaggtgagctgcacggaaggaataagaagacaaatggcgcccactagtggggaatccgcactcacaaaagcacaggatgctggaaaacagcctgctcagaatttgttagcaataattaaatatagcaatcagcaaagtattcgacttggctggacggttttcgttaatatgaattatttatttgaaatgttttaaagaaacataagcctttttagtgatgcagatttgtctgtttgtttttcaagtcatatcagatcgttggcaactcgtatcccaagatgaaaaataagacttggtgtgaccagccaggctttcctgccatatgttggtacaatatacaagtgacaatattggtgtagatttgtacttagcaaatacaaacacatccaaatgaaaaattttgtagataccatatcccctgaaatagcatttatcttactgggttgactggaaaggaatggaaaatatagtaacacatgaaaaaatgctactccaatctgaatgattacttcaaacactggcaccttgggtctcacccaccataggaaacaagacaacattcaatttgatagaaatcttgccacaaaacttcaaatgctacaaaatatacacacacactcacacacacaggcatactcacacacagacacacacacacacacacacacagacgatccacacttcaaattgagcccacaatcttgaatttctgaacggatcagagtttcatagtttctatagtaaaggcaatgtctatttcagggattgtaaagtagttaagcattgtttcaaaagtttttttatatttattttttttaaggaaaaggtatagacaaccagctaaactgcctttttggtgtgcacacacatttcatgtgcagacgtgcctctgtgtaaatgtacacatgaacttcatgtgggcttaattttctgtgctataaacaaaagtgtttattttttattaacctcatggatatttagatggaaagtgatggcattcacaggcttgatgtattccactgttattactgttacctgcacaaatgaaaaacaatactcaacagtaattccactcccatgaaactttggtcattgttatgcattaagtggggcttatctttggtttggagttcatttgaactcttgaaccttagtttagtgaagatgaactgtctgttcttaggtagaaacggtgtttatttaaaaatcagttttaaaaaatgagctaccatatgtgctgtctattataaatgggacaccaaacaaaattttctattacagttgtgtacttgcaaacattttgctatacagtacttcatagatgcatacaaatgagctcacttattacaaagacaaacgtttaatttgctaaatattttaacaagtttgttatatattttatttaatttaaaagaaatctcttaccaacctacatatttattactataatttgctatgacttcaggttaatttatttgtgtttgcatagtttgagcaggatgttttgtgaagtatgtttgtatttatttgcctactttgtacttgatgtgttttgtaatgtgcactgaatttgttttcttttcaactatgttaatgatcaatactgtaaattgggtcttttgtaaacaaaaaggcaatgatgtatgcattttttttaatttgaggtagtttgtttgtatactgtttctccaaacacttaatatttcttacatcaaagcaacaaaattgtgttcagtgctgtacatttggtgtatggtaggaaataaaaattgataacgaaaaaaaaaaa

SEQ ID NO: 19775 - DNA, 399 bp, Homo sapiens
  misc_feature (19)..(19): n is a, c, g, or t
  misc_feature (380)..(380): n is a, c, g, or t
ggtcgctctccggatcctngtccgctcggacgatccacacttcaaattgagcccacaatcttgaatttctgaacggatcagagtttcatagtttctatagtaaaggcaatgtctatttcagggattgtaaagtagttaagcattgtttcaaaagtttttttatatttattttttttaaggaaaaggtatagacaaccagctaaactgcctttttggtgtgcacacacatttcatgtgcagacgtgcctctgtgtaaatgtacacatgaacttcatgtgggcttaattttctgtgctataaacaaaagtgtttattttttattaacctcatggatatttagatggaaagtgatggcattcacaggcttggtccgagcgacnagatcctgcagagtcgacc

SEQ ID NO: 19776 - DNA, 875 bp, Homo sapiens
agcccccaattttgtgagtgtccctgaagcattgtgacaattccattttatgtgtctgcgtgctcatatcaagactaaggagtgatggaaactctccagttcagatccagtagcttttagggaaggaactacagttgctgacttaagttgaagaagcatctatttaatgtctggtcaaatcctacaagaaacacagaaatctatgattaaaaagctgagcactttgatatactgcaaagggtagagaaggcaggacggtagaaattttctgcaagaaagaatgaatttcaggatttatcactaaataagacaaagtcatttatttagtccccctgacacagcagggcaaactgagttgacatacaagttacctggagaaaaagagagatggatgcagaggctgaagataaaacgctgcgtactcgctctaaaggaaccgaggtgccaatggattcactaatccaggagctcaggccagacctgaacattagaatccaagaaactgacaccttcaagaaaacccttttacctataagccactttgagagggactcaagactgatcacccaagaagctgatgataaaaattaatttagaagagaagtgtccctccagggtgtggcagaggcatctgtagggttcagccaccccggcatcggccttgtccatgcctctgtgtgatggaggggctccgtgtggaacatgaggctggaggcctcacaccaacagaagcattccagagattattttatgtttactgtactgttcttactagggcagaaaagtgtcttaaaatatattggggaagctttcaataagaataaaaacaaaaaaagactttgtaatttaacaagtaaagccgatgaactctaatg

SEQ ID NO: 19777 - DNA, 1280 bp, Homo sapiens
gcccgcttgttcgctcactctcagtgaaaagagttttgaaatgagttctgaatagacagcattttctttgtgcggttggtaaataacacagagcaaagttagcaagttgcagcgcctctgcgttctgattctatggaacctttttgtagggagaagggcaggatgtttttaactgaatgtgacctcaggggaatactagagaaaataataaaatttctgaatggggcagcgtggagaaatcctaagagaaatagcataagagcattttggaacacatccaggaaaagataactttcgacacacctgtagacgttcgccaggtaaaggagtgatggaaactctccagttcagatccagtagcttttagggaaggaactacagttgctgacttaagttgaagaagcatctatttaatgtctggtcaaatcctacaagaaacacagaaatctatgattaaaaagctgagcactttgatatactgcaaagggtagagaaggcaggacggtagaaattttctgcaagaaagaatgaatttcaggatttatcactaaataagacaaagtcatttatttagtccccctgacacagcagggcaaactgagttgacatacaagttacctggagaaaaagagagcaattccaggacttcctcttcagcctaaaagaaggtaccagatctgtgcactggggcgatgtggaagagacctgcttattgcccctgatgtaagctccagtaagaaaagacgtcaagtacaagtactaggaaatcactttatacatctgtttataggtatggatgcagaggctgaagataaaacgctgcgtactcgctctaaaggaaccgaggtgccaatggattcactaatccaggagctcaggccagacctgaacattagaatccaagaaactgacaccttcaagaaaacccttttacctataagccactttgagagggactcaagactgatcacccaagaagctgatgataaaaattaatttagaagagaagtgtccctccagggtgtggcagaggcatctgtagggttcagccaccccggcatcggccttgtccatgcctctgtgtgatggaggggctccgtgtggaacatgaggctggaggcctcacaccaacagaagcattccagagattattttatgtttactgtactgttcttactagggcagaaaagtgtcttaaaatatattggggaagctttcaataagaataaaaacaaaaaaagactttgtaatttaacaagtaaagccgatgaactctaatg

SEQ ID NO: 19778 - DNA, 1052 bp, Homo sapiens
agcccccaattttgtgagtgtccctgaagcattgtgacaattccattttatgtgtctgcgtgctcatatcaagactaaggagtgatggaaactctccagttcagatccagtagcttttagggaaggaactacagttgctgacttaagttgaagaagcatctatttaatgtctggtcaaatcctacaagaaacacagaaatctatgattaaaaagctgagcactttgatatactgcaaagggtagagaaggcaggacggtagaaattttctgcaagaaagaatgaatttcaggatttatcactaaataagacaaagtcatttatttagtccccctgacacagcagggcaaactgagttgacatacaagttacctggagaaaaagagagcaattccaggacttcctcttcagcctaaaagaaggtaccagatctgtgcactggggcgatgtggaagagacctgcttattgcccctgatatggatgcagaggctgaagataaaacgctgcgtactcgctctaaaggaaccgaggtgccaatggattcactaatccaggagctcagaatcagtgtgcccgtggacatgaggccacttacctggtgagggacaccagagtcctttaaaggaaccaagtcattcagagaaaaaaaggccagacctgaacattagaatccaagaaactgacaccttcaagaaaacccttttacctataagccactttgagagggactcaagactgatcacccaagaagctgatgataaaaattaatttagaagagaagtgtccctccagggtgtggcagaggcatctgtagggttcagccaccccggcatcggccttgtccatgcctctgtgtgatggaggggctccgtgtggaacatgaggctggaggcctcacaccaacagaagcattccagagattattttatgtttactgtactgttcttactagggcagaaaagtgtcttaaaatatattggggaagctttcaataagaataaaaacaaaaaaagactttgtaatttaacaagtaaagccgatgaactctaatg

SEQ ID NO: 19779 - DNA, 992 bp, Homo sapiens
gcccgcttgttcgctcactctcagtgaaaagagttttgaaatgagttctgaatagacagcattttctttgtgcggttggtaaataacacagagcaaagttagcaagttgcagcgcctctgcgttctgattctatggaacctttttgtagggagaagggcaggatgtttttaactgaatgtgacctcaggggaatactagaggtaaggagagaaaaataattgaggtaactgtgggtgttttacatctcggaaaccatggcttttaataaggccacatgaagagagaagctggcatcatcccacgcaaaaaccagtgcctggcagagttgtggaaggtgctattcacattggcttggcatttgtgtagctttgattgaaaatcaatggttttcttatgataattttcacatcatattttttttcttctttagaaaataataaaatttctgaatggggcagcgtggagaaatcctaagagaaatagcataagagcattttggaacacatccaggaaaagataactttcgacacacctgtagacgttcgccaggtaaaggaaatccaggcccttgagcaatgtattgatgaattggggtggaaatggaggaggatggaaacgatggcggcactggactgttttccagaaaccatttacacaggctcaccagaagagggcagcgcagagcaatgaactctccgaggagtttccaaacagatgtcttgaaacttaaagtgaaaatctctgcatgaaagtagccgtttttggacagcgtcctccaccaaaaccatatatctctaaaataataataaaactccccaaacatgctaatctcgaaatgggtccctcaacatggaaggattgagttgcaagggacaaaattttacttccctgtcagagatgttttcacttcgattatccttttgatttattttattataaaagactatgtgaagtctagtattagtcatgtgcacaaatattcattatgcag

SEQ ID NO: 19780 - DNA, 1148 bp, Homo sapiens
  misc_feature (19)..(19): n is a, c, g, or t
ggtcgctctccggatcctngtccgctcggacgatccacacttcaaattgagcccacaatcttgaatttctgaacggatcagagtttcatagtttctatagtaaaggcaatgtctatttcagggattgtaaagtagttaagcattgtttcaaaagtttttttatatttattttttttaaggaaaaggtatagacaaccagctaaactgcctttttggtgtgcacacacatttcatgtgcagacgtgcctctgtgtaaatgtacacatgaacttcatgtgggcttaattttctgtgctataaacaaaagtgtttattttttattaacctcatggatatttagatggaaagtgatggcattcacaggcttgatgtattccactgttattactgttacctgcacaaatgaaaaacaatactcaacagtaattccactcccatgaaactttggtcattgttatgcattaagtggggcttatctttggtttggagttcatttgaactcttgaaccttagtttagtgaagatgaactgtctgttcttaggtagaaacggtgtttatttaaaaatcagttttaaaaaatgagctaccatatgtgctgtctattataaatgggacaccaaacaaaattttctattacagttgtgtacttgcaaacattttgctatacagtacttcatagatgcatacaaatgagctcacttattacaaagacaaacgtttaatttgctaaatattttaacaagtttgttatatattttatttaatttaaaagaaatctcttaccaacctacatatttattactataatttgctatgacttcaggttaatttatttgtgtttgcatagtttgagcaggatgttttgtgaagtatgtttgtatttatttgcctactttgtacttgatgtgttttgtaatgtgcactgaatttgttttcttttcaactatgttaatgatcaatactgtaaattgggtcttttgtaaacaaaaaggcaatgatgtatgcattttttttaatttgaggtagtttgtttgtatactgtttctccaaacacttaatatttcttacatcaaagcaacaaaattgtgttcagtgctgtacatttggtgtatggtaggaaataaaaattgataacgaaaaaaaaaaa

SEQ ID NO: 19781 - DNA, 4344 bp, Homo sapiens
gcccgcttgttcgctcactctcagtgaaaagagttttgaaatgagttctgaatagacagcattttctttgtgcggttggtaaataacacagagcaaagttagcaagttgcagcgcctctgcgttctgattctatggaacctttttgtagggagaagggcaggatgtttttaactgaatgtgacctcaggggaatactagaggtaaggagagaaaaataattgaggtaactgtgggtgttttacatctcggaaaccatggcttttaataaggccacatgaagagagaagctggcatcatcccacgcaaaaaccagtgcctggcagagttgtggaaggtgctattcacattggcttggcatttgtgtagctttgattgaaaatcaatggttttcttatgataattttcacatcatattttttttcttctttagaaaataataaaatttctgaatggggcagcgtggagaaatcctaagagaaatagcataagagcattttggaacacatccaggaaaagataactttcgacacacctgtagacgttcgccaggtaaaggagtgatggaaactctccagttcagatccagtagcttttagggaaggaactacagttgctgacttaagttgaagaagcatctatttaatgtctggtcaaatcctacaagaaacacagaaatctatgattaaaaagctgagcactttgatatactgcaaagggtagagaaggcaggacggtagaaattttctgcaagaaagaatgaatttcaggatttatcactaaataagacaaagtcatttatttagtccccctgacacagcagggcaaactgagttgacatacaagttacctggagaaaaagagagcaattccaggacttcctcttcagcctaaaagaaggtaccagatctgtgcactggggcgatgtggaagagacctgcttattgcccctgatgtaagctccagtaagaaaagacgtcaagtacaagtactaggaaatcactttatacatctgtttataggtgaatgacctcaggactttgtgttcatgttatagatggatgcagaggctgaagataaaacgctgcgtactcgctctaaaggaaccgaggtgccaatggattcactaatccaggagctcagtgttgcctatgattgctccatggcaaagaagagaacagctgaagatcaggctttgggggttccagtcaacaaaaggaaatccctgctaatgaagccccgacactacagcccaaaagcagactgccaagaagaccgcagtgacaggacagaggacgatggccccttggaaacacatggtcactctaccgcagaggaaatcatgataaaacctatggatgaaagtcttctttcaactgcacaagaaaactccagtaggaaggaagacagatactcttgttatcaagagctcatggtcaagtctttaatgcacttggggaaatttgaaaaaaatgtatctgttcagactgtaagtgaaaatttaaatgacagtggcatccagtctttaaaagcagagagcgatgaagcagacgagtgctttctgattcattctgatgatggaagagacaagattgatgattctcagccacccttctgctcctctgatgacaatgaaagtaactctgaaagtgcagaaaatggctgggacagtggctccaacttctcagaagaaaccaaaccacctagagtcccaaagtatgttttaacagatcataaaaaagacctattggaagttcctgaaataaaaactgaaggtgacaaatttatcccttgtgagaacaggtgtgattctgaaacagaaaggaaagacccgcagaatgctctcgcagaacccctggatggcaatgcccagccctcattccctgacgttgaggaggaagatagcgagagcctggcagtaatgacggaagagggtagtgacctggaaaaggccaaggggaatttaagtttgctggagcaggcaattgctctgcaggctgagcgaggttgtgttttccataacacctacaaagagctggataggttcctgctggagcacctagcaggggaaaggaggcaaaccaaagttatcgacatgggtggaagacaaatctttaacaataaacattcaccaaggcctgaaaagagggagaccaagtgcccgatccctggatgtgatggcacgggacacgtgacagggctctacccgcaccaccgcagcctttcggggtgcccccacaaagtgcgggttcccctggaaattcttgccatgcatgaaaatgtgctcaagtgtcccacgccgggatgcacaggaaggggtcatgtgaacagcaaccgcaacacccacaggagtctttctggttgtccaattgctgcagctgaaaaattggcaatgtcccaggataaaaatcagcttgattctccccaaactgggcagtgtcctgaccaggcccacaggacaagtttggtgaagcaaattgaattcaatttcccgtcacaagccatcacctctcccagagccacagtgtcaaaagaacaagagaagtttggaaaagtaccatttgattatgccagttttgatgcccaagttttcggtaaacgccctctcatacaaacagtgcaaggacgaaaaacaccaccatttcctgaatcaaagcattttccaaatccagtgaaatttcctaatcgactgcctagtgcaggcgcccacacccagagccctggccgtgccagctcttatagctacggtcaatgtagtgaagacacccacatagcagcagctgctgccatcctgaacctttccacccgctgcagggaagccacagacatcctctccaacaagccacagagtctgcatgccaagggagccgaaatagaagtggatgaaaatggcacattggacttaagcatgaaaaaaaatcgaatcctggacaagtctgcacccctaacttcctctaacacttctattccaactccttcctcttccccattcaaaacaagcagcattctggtcaatgcagcattctatcaggctctttgtgaccaagagggctgggacactcctatcaactatagcaaaactcacgggaagacagaggaggagaaagagaaagacccagtgagctctctagaaaatttagaggaaaaaaagtttcctggagaggcctctataccaagccctaaacccaagcttcatgcaagagatctcaaaaaggaactaatcacctgtccaacaccaggatgtgatggaagtggccacgtgacaggaaactatgcatctcatcgcagtgtttctggatgtcctttagcagataagactctaaaatccctcatggctgccaactctcaggagcttaagtgtccaaccccaggctgcgatggctcggggcacgtgactggaaactatgcttcccacagaagcttgtccggatgccctcgtgcaaggaaaggtggtgtcaaaatgacccctaccaaggaagaaaaagaagaccctgaactgaaatgtcctgtgatagggtgtgatggccaaggtcacatatcaggtaaatacacatcacaccgcacagcttctggctgtcctctggctgccaagagacagaaggagaatcctctcaatggagcctccctctcctggaaactgaacaaacaagagctaccacattgtcccttgccaggctgcaatgggctgggccatgtaaataatgtttttgtcacccaccgaagcttatctggatgtcctctcaatgcacaagttatcaaaaagggcaaggtttctgaagaactcatgaccatcaagctcaaagcaactgggggaatagagagtgatgaagaaattaggcatttggatgaagaaataaaggaactgaatgaatccaaccttaaaattgaagcagatatgatgaaacttcagacccagatcacatctatggagagcaacttaaagacgatagaggaggagaacaaactcatagaacagaacaatgaaagtctgctgaaagagctggcaggtctaagccaagctctcatttcaagccttgctgacatccagcttccacagatgggacctatcagtgagcagaattttgaagcatatgtaaatacactcacagatatgtacagcaatctggaacgggactattccccggaatgcaaagctctactggaaagtatcaaacaggcagtgaagggtatccatgtgtaggatcacagcgctgccgggcaacgttacacaagacgctaatcccaatggattgtaaaggtcctgtacaggcaagggtaaggttgcaactggttccattggaactccaatttattcccgagtttataacaaccccgggcggcggact

SEQ ID NO: 19782 - DNA, 896 bp, Homo sapiens
gcccgcttgttcgctcactctcagtgaaaagagttttgaaatgagttctgaatagacagcattttctttgtgcggttggtaaataacacagagcaaagttagcaagttgcagcgcctctgcgttctgattctatggaacctttttgtagggagaagggcaggatgtttttaactgaatgtgacctcaggggaatactagaggtaaggagagaaaaataattgaggtaactgtgggtgttttacatctcggaaaccatggcttttaataaggccacatgaagagagaagctggcatcatcccacgcaaaaaccagtgcctggcagagttgtggaagaaaataataaaatttctgaatggggcagcgtggagaaatcctaagagaaatagcataagagcattttggaacacatccaggaaaagataactttcgacacacctgtagacgttcgccaggtaaaggaaatccaggcccttgagcaatgtattgatgaattggggtggaaatggaggaggatggaaacgatggcggcactggactgttttccagaaaccatttacacaggctcaccagaagagggcagcgcagagcaatgaactctccgaggagtttccaaacagatgtcttgaaacttaaagtgaaaatctctgcatgaaagtagccgtttttggacagcgtcctccaccaaaaccatatatctctaaaataataataaaactccccaaacatgctaatctcgaaatgggtccctcaacatggaaggattgagttgcaagggacaaaattttacttccctgtcagagatgttttcacttcgattatccttttgatttattttattataaaagactatgtgaagtctagtattagtcatgtgcacaaatattcattatgcag

SEQ ID NO: 19783 - DNA, 509 bp, Homo sapiens
caaagggaaattctcccataattctactctgctcaactcaattgaaattactatcctcaagggtttgtgactaaactggaattactattgtaaagcagtggataagatggaatgagaagctcagtcctatagataagttatcatgcgatttactatcccaggcaagagatcagtggggctttgaataaggcctaggaggagaccgaaaaggggcggccactgagagatatggagactatagaacaggtcagactgtggtaaagggaaggcgatagggggattctaaggggctctgaggtttctggaatggctaacagcctgaatactggtgtcattaagcatgtaggaatacggtgggaagatcatatggttaaggacatgtcaactttgaggtacccagggggatatctgtgtgaagatgtctgtaaggctgctggaaatttaaaagtggaatctaggagtgagttggaatttaggaatatagatttggaaaccacagatacatgaaa

SEQ ID NO: 19784 - DNA, 384 bp, Homo sapiens
gctggaaatttaaaagtggaatctaggagggagttggaatttaggaatacagattcggaaaccacagacacacgaattcgaaaaggggcggccactgagagatatggagactatagaacaggtcagactgtggtaaagggaaggcgatagggggattctaaggggctctgaggtttctggaatggctaacagcctgaatactggtgtcattaagcatgtaggaatacggtgggaagatcatatggttaaggacatgtcaactttgaggtacccagggggatatctgtgtgaagatgtctgtaaggctgctggaaatttaaaagtggaatctaggagtgagttggaatttaggaatatagatttggaaaccacagatacatgaaa

SEQ ID NO: 19785 - DNA, 294 bp, Homo sapiens
ctgtcatatgatctgtcactctgtgagctgtagcaaagattttgaaatcaagaaagagaaatctttgagctcctgaatgtggaacaacttaatgggagggaagaagaaaaattgggggctttgaaaggagaacagcgtgagaaaaattatgagtgcaggaaggtgtaagacaaatgaacaggggaatgagtgttcagtgtagcaggtgtgatgatctgttaccacaatatctcacactatgaccaaggattaacaaaaagtataagtagatggaaccatgatatataattatat

SEQ ID NO: 19786 - DNA, 269 bp, Homo sapiens
gggaaccaggtcggagcctgcttgcagagaatgtagcatcgtggcagagaggaaaaggaactaagggaagcggaagtatcagtaaggagcctccgacagaaatggtaggctggcaacatcctgatcagcagcagaagtgattttcccgtgtccccgtgtccctgctcaccacccacgctcccgagagctcccaggccaggcctcacagggctccttccctgtgggagcggaggtttgccgcgagccatcgcccggcacgggacacgtct

SEQ ID NO: 19787 - DNA, 472 bp, Homo sapiens
tcctaactagagctgtgccttagtttgctcaactatagaatcggaaaaatgacgcattcttcttagagttacctctcagattgtgcttctgatgcatgtcaagcccagtgggggcacaccgttagtaatgagacatcttagcaccaatatgtgcttttcacattgggcaggtgtcaggagaggcctggggtcataggaccagactgcaaacaacacaatcccagaataaatcctattaatttggcataattgatgaaaatgaagattagatatttgaccagagatgagaaattcatgggcatgaatgctgcagctctgattactttgcatgtgaatgtgtggtaagaggcaacatttcttttgtttaaaaccctgtgcacctaattcacattcagagaaaggttgtagaatcattcaggctcattgaaaacaaggaaccaggatgccagccgagccctatgcagtctcagaa

SEQ ID NO: 19788 - DNA, 1001 bp, Homo sapiens
gagctcagtgacataaatgctgaagagacaggcattgttttccgtgctgtgtcctctgccatttaaagatgtttgtagcttgtacattttctgagctgtcagacattttgttattgataccttaaaggtcacctaccacaaattgatggctagagcaagaccttttaaatttggatgaatctcccatcatcccatcccttaacccctttttacagaaattttagttacaatctgagtaagctagaacacacatccaatctgttaccagcaagcagcatgaaagtagaaacgaagaagcagatggagaggtcccattacctgcaaagaaagggcactcaggcagccctttgcaatcgcgatggcagccactagatatcactctcaacttgtcattctgccatgccctgaagaaaaccaacattgaatctttcatttgtttgtcgttgattgtttttgttttgtttcgattctgttttgttcatctgttcgagcagaggggcagttgaagtctcgtcctggtctctgccctggcatggactggcacagaggtgttctgtagttgaataggaagagcctgtctaaaaaactactgccccacttcaaattgcagtgttctgtcacctaggcatcatctcttcctgcccctagtatttgattacaaggaaccaggggaaaaaaactttcttagacacactggcaccaaggtaagaggtggggctgcccaggcaaagtcagtgaacatgaaaactcagacaaagcagagatggaaataatgcgcctcttgaggagaaaagcaataatgaataaaaggactttcctacaataacttcactgaggactcacgttaccaattttcatacttactaaagggattgtaaaaaacaccccagcattttaggtgtcttggttccatttacagcactgaggtaatctttctgctgtttgttgtcctgcttggttgagtaccacaattaaagattatgctcccctttaaaaaaaaa

SEQ ID NO: 19789 - DNA, 502 bp, Homo sapiens
ctgacagtgctgaaagtgaagactgagattcaggagctgaggtgcccctgtgatccaggtcttccaccctgaaaccccatcctccatcaaggtcctgcctgtagagtctaccttgcaaagcctcctgctcctacccatgctacaggccaggaaccagagcccatcatctcagaggcccctggatgtccttcgaaggaaccaggaccctcagagcccagcatccatctctgtcatcatcttcatcacacccaaagaagagccagccttgcaggagggtttacatctccagggaagatgggctgccagcaactgcagaggatgcagccacctgcttaactgtgctgtccagccagccagccagctgcagggcctcttgctgcttaaggagctgatgggccgggcatgtttggctcacacctgtgagcacagtactgagaaatgggagcacagtactgggaacttgggagcacagtactgggaaatgggagcacagtacctggga

SEQ ID NO: 19790 - DNA, 208 bp, Homo sapiens
atgacttaaactttagtaaatattcaggagacaaaattgtatattcagttttttgttgctatgtaaaaattgggaaattgattggatggacacgcaccaaatcttaaaaatgattatatctggaagtaaaattatgaatgatttttttttcttgtagttttccatgttacattttttacaataaatatatattattttttaatcagaa

SEQ ID NO: 19791 - DNA, 1072 bp, Homo sapiens
ggagcacaaagacagcgattgttacccaataagcagtagtcacacacttctaccaatcgccttaggagggctggttaccatggaatccaccatctgttcactccccaccggaatgtgattatccttgctgggctgggaagtggggaaagcaggggagcctgtgctgggtgagattatctgcaatggaccgggttaatgggaggcttgctttggctcgctggaagaacaaatgaagggagttttacttcaaccatttgtgacttctggccaagaggaataaattcagcttttataaggcagcagtacctgtccaaagatcgctttagttccaccttgctccacaagcagcacaaccacactggttggtgagaatgtatctgaagaagaggctcagggaataaatgggaacaggccagcaaaacactcagctgcaagtccaaagccacaagtgcctccaaagccattacacctgcagaattcaccttcgtccaatatacaccaaacccccaggcataaagctttacctagtgcaaaaccaaggatggaggaaattaaacctgcctctgcttcttgtgtctcaaaagaaaaacccagtaaggtatcagatctcatcagtcgctttgaaggaggcagctcattatcaaattatagtgatttgaagaaagagtctgctgtgaacctaaatgctcctagaaccccaggaaggcatggattgacaaccacacctcaacaaaaactcctctcccagcacttgccacagaggcagggaaatgatacagataagactcagggtgcacagacttgtgtggccaacggtgtaatggcagcacaaaaccagatggaatgtgaggaggagaaagctgccactcttagctcagatacttctattcaagcttctgaacccttgcttgatacgcacatagtgaatggagaaagagatgaaactgccacagctcctgcatcacccacaacagacagctgtgatggaaatgcttctgacagtagctacaggactccaggcataggcccagtgctccccctagaagaaagaggggcagaaacagaaaccaag

SEQ ID NO: 19792 - DNA, 888 bp, Homo sapiens
ggagcacaaagacagcgattgttacccaataagcagtagtcacacacttctaccaatcgccttaggagggctggttaccatggaatccaccatctgttcactccccaccggaatgtgattatccttgctgggctgggaagtggggaaagcaggggagcctgtgctgggtgagattatctgcaatggaccgggttaatgggaggcttgctttggctcgctggaagaacaaatgaagggagttttacttcaaccatttgtgacttctggccaagaggaataaattcagcttttataaggcagcagtacctgtccaaagatcgctttagttccaccttgctccacaagcagcacaaccacactggttggtgagaatgtatctgaagaagaggctcagggaataaatgggaacaggccagcaaaacactcagctgcaagtccaaagccacaagctcattatcaaattatagtgatttgaagaaagagtctgctgtgaacctaaatgctcctagaaccccaggaaggcatggattgacaaccacacctcaacaaaaactcctctcccagcacttgccacagaggcagggaaatgatacagataagactcagggtgcacagacttgtgtggccaacggtgtaatggcagcacaaaaccagatggaatgtgaggaggagaaagctgccactcttagctcagatacttctattcaagcttctgaacccttgcttgatacgcacatagtgaatggagaaagagatgaaactgccacagctcctgcatcacccacaacagacagctgtgatggaaatgcttctgacagtagctacaggactccaggcataggcccagtgctccccctagaagaaagaggggcagaaacagaaaccaag

SEQ ID NO: 19793 - DNA, 444 bp, Homo sapiens
tttccataccaatgttttcatgcttcctttgtattttatcttttagctcattatcaaattatagtgatttgaagaaagagtctgctgtgaacctaaatgctcctagaaccccaggaaggcatggattgacaaccacacctcaacaaaaactcctctcccagcacttgccacagaggcagggaaatgatacagataagactcagggtgcacagacttgtgtggccaacggtgtaatggcagcacaaaaccagatggaatgtgaggaggagaaagctgccactcttagctcagatacttctattcaagcttctgaacccttgcttgatacgcacatagtgaatggagaaagagatgaaactgccacagctcctgcatcacccacaacagacagctgtgatggaaatgcttctgacagtagctacaggactccaggcataggcccag

SEQ ID NO: 19794 - DNA, 185 bp, Homo sapiens
agagctgacactttagggctgtttgttactgcagaacagcttagctatcctgactggtgaaataagaaaccacactctaaagtcgaagttgtctaagcatggaaaggactacttgaggaagtgttaggttccatggactggaagtactcgatatagctatactaccagtttggaggatgttaaag

SEQ ID NO: 19795 - DNA, 458 bp, Homo sapiens
tcccttgtggcctagaccttggggccacatggagacaagaaacaaagtctagagacccaacaatgagggaaattagattggaaactcccacataaaaccaggaccactgaaagatcacattctcagcgagtgaaccaggaaaaacccatcccgcagggcaatatagggatacttaccagtgttggccttggttctcgggggagggaaagacagtgtcttctttaagagccataagcccaatctcacaagagtttggagttggaattcacattatctgtgtgacttgaaaaacagaatacttataatttagttcaaagctgttctaagttgttggtgttcccagacacatgacagaagcaaacacagttcttctctgacaaaatgaactttaagcctggaacactaagaattcctaccaatgaagatccaaagggtagtcttagccagagcaatcaggc

SEQ ID NO: 19796 - DNA, 623 bp, Homo sapiens
gtgaaaagcttgaattctaaggcagatttacatcactttctcatgattcaggcttatatatactgcaccaagcagttctgtgactgtgttttattgtatttgatataaccatctaaaaattggcacttttaataatatactcagacaataatgtggcttaaaacttaaactaattggctgctctgtaggccagtctagtttttgaaaggtttgagatgtaatttctgaaaaaattgctgtgggaagagaaagcctatttgccaccccaacctgagttcttgctgggtgggaaggagggctcctcccctctccttgcctgctccaagttaggtagaacaacatgactggacacaggctctagctggtgggaactagcaagtttcagcaaaatatgaaatgggtgacctttgagaaatgtaaggaagttaaagaattgaggtgtacattcttttccaagaattcttggtatgttaaatggttttacttaacaaacagctttgtagactatttggaaagtttggaaaaatagaatgataaaaaatctcaatttcactacttactattattattattattttggagacagagtctcactccagcctgagtgacagtgagactcctca

SEQ ID NO: 19797 - DNA, 1748 bp, Homo sapiens
tatctgttccagagactttaacttgactttgcttcattcacaaagaacagagttcaagaagcagtgcatcctgtgagaagtgtgaagtgtttgtacatcactttaaatatattacttaatatattctaagttgctgtgtggagcagtatactgttgttttaaaaatgcaagattcagacaaattttaatattgtctcattaaaataatttaaataatggtataaaatatctatatcattaaaataattttccatagtgtttagaaaccatgaaaaagaaaacatagcaggagaaaatatgacaggaaaagaaaacctaacaaagcccagaacccacagttaaccaaactagactgactttgttattacccattctttgttagtattggatagggaattaggataatgagccattaggcagttctgaaatggaaagccctgaaatttagtgcaatgtaactttaaaactgaaattatataaagagtagaagtttaatcatgtttaattacaaccaaaagcctgttgcctttttgtacagaaatctccttaatttcaggacatgtagatagcttatagaaacatccttttaaatagtttgtgagctcttcctcttcagtggaattgaggaatacagaatgctttatttcatcatcccctgacaggtgacttaggctttgcacagcagatttatttttctctgcgttttttaaaaattgtttttcttgtatcttttttcttcaaaaatatctatatttgagaatatgtacataacaactttccaaagtctctgtggccaaaacctctccagggataagactgagcaagaatataatacttcaaaaaatgtacagctactgtttaagttttaaacagacaccatcacagtttgtggatgaaatagttttaagccatatactttctgtctttttttccccatattaatattggggggcggataatatcactttgatgtacattgatattaaagtttggtaatgcagcttttactgtctacatggtactgtacattagtttttaagcagaaacacaagaaaaatgggtataatttcaaagtagttcttggcagatggctagagaatactgcaagtgaccctgtatcccgaatacacagatatccctctattacaagtttgggattagccataattctgacatggtgtgttcaggtatgggtatatgttgtcagtctacacttgtggaagcaaatatcttgtttaatcaagatgatgtctagtgtcacctaaataatgcaaaaagtttaattctggatgaattcagctttactcaagatccacatattcaagtatcattccacagatattcacagaacacagaaatatctgtgttctgccttatgcctgtggctaagggatgcaaagtagaattgctttacattgactatatatgtgacatgtacgttgctgttttttttaaaataactttatcatgatattcaggtagatcctgggttctagaatatttaaaacaaaaggataaaatgataaaccaaagagtcaacttgttaacttttcttttttaagagatgggttttcactagtatgcccagtctggactccaagtcctgggctcaaacgatcctccagcctcaggttcctgagtagctcaacattttatgtatgtacgatattataaagaaatattcttccaaatgaacttttgtttttagatcaataaatgaataataaataattttgtacaaacatcaa

SEQ ID NO: 19798 - DNA, 1590 bp, Homo sapiens
  misc_feature (687)..(687): n is a, c, g, or t
ttttttttttttaacttgaattgatagttggtttataatcctggagttgtatatgttagggtttgctattgagaagtataggagtgtattaactctgataaatgaagtgggctaattagtatttcagtttaattttctgcaattgcatttaagtttgtgatcagttcttttctcctcactgtataactttttcctgaagatttgtataattattagtggtaaaaactccatcttagttgcttatgattttaatgtcaatttgaggaagatatcaccatatagaaaatacttagaagtagcttattttaaaaatattcatttgcttttcttccaaacacgtggtcacttagcaagcagtgattcaattattcatagtcctcagtatttatgtaatgccaaagaagtggaagaaggggaagtgaagtgagaaaggaaattaggcagacaagtgaatcagagggcaagagaaatgagtaatgcaaaaggggaaggaaatgatggtcagagcacacatgccttgcagcatgagcaaagaaaatgtgctaaacaaaactacagtcagaatcatagaaaggataaggttttagagaggttttgttgttttttaaacattcatgtgagctaaatataatgcaggtattgaaatgattactgcagatatgccagatgaccttgatatctattttnatgttaatcttctgttatttgttgttgttgaattgttacccccacgttttacctgtgtaagtgaattgaaatatttcaaggccagatacagtgtcttacgcatgtaatttcagcagtttggaaggatgatcacacgaacggatggatcacttgagcccaagagttccagacaagcctgggcaacatagtgagaccccatctctctaaaaataaaaaaaaaattagccgagcatgctgatgtacacctgtggtcccaactactttggagactgaggtcagaggatcccaggaggtcaaggctgcagtaagccctgatcacgccactgcactccagcctgggcaacagagtgagaccttgcctcaataaaaacaagacaaacaaaaaaccagacatttcaataatacatgcatggtgctgtgttacaagttgtaacatgaataaaaatgtttaggatatcttaaatataaaaaatcaagaaatatcttcttttggggggaaggggtttttgtaatgagtcaattaaaatgttggtgctaaatcttcccttgctatattgaagtttgctgatttcaatatagattttcagtgtttcataatgccttttaaaaaagataattgaggtggccaggcgcagtggctcacgcctgtaatcccaacactttgggagaccaaggtgggtggatcacgaggtcaggaaatagagaccatcctggctaacatggtgaaacccaactctactaaaaatacaaaaaattagccgggcgtggtggtgggcacctgtagtcccagctacttgggaggctgaggcaggagaatggtgtgaacccaggaggcagagcttgcagtgagctgagactgcgccactgcactctggcctgggcgacagagcaagactccatctc

SEQ ID NO: 19799 - DNA, 346 bp, Homo sapiens
ttaatttgtactaaatctctagattatttatataaacagaagataaagattgagtgaatagtgaaaatgggtaaatcagcctttatgtgtcattctgacatattctacttgtatatattaagatagaattataaataaataaattataattattgtattactctttataaaaatattcttatagaaggtttacagaaatacaacaaacatcaggtattcactatatagaattgatgaatgttaatacatatatatcatatacactttgcatatatatgtgtttatgtgtatagacgtagacatatatactttaaaacccttttttaagaagcaacaataatacatc

SEQ ID NO: 19800 - DNA, 394 bp, Homo sapiens
cgtcagtcgccactgcgtgtttcctacattctctctctctccacgatgctgcaggggtgttgataaaccctgtgtttaccttcggatcatgccatcttcacaatcccagctactccacgagataagcatggcgggttgtggttgtctcacggtcttctctcttgataaaagcctgagagaggtgggtgtagtaggagatggttatctcttggcttggggtgcgttttctgttcatccgtgcaccttacctcacctcttcaaaggcaggaaggtgtggaagagagaggcacatggcagagggggtggctgagagtggcaggatgggtggaggagaccgacacttcagctcagagtctgcaggctctgctctggaggggaagctagacccaacgtg

SEQ ID NO: 19801 - DNA, 1195 bp, Homo sapiens
acccttgaaatttcctgagtggtaagagtaattaggatgacaagcccctttaaccacacctgagtttatgttaatgggattacttttggaaagacagaaccacaggatgggggctagttgcctcgagaaccaaccatgtgattagagggtggaactttcagatcaaccccaccttaccttgacctctgagaggagagaggctggagactgaattcagtcaccagtggccagtgatttaatcattcatgcctacgtgatgtagccttcataaaaaactgaaggacaggattcagagagcttccaggttgaacttgttgaggtactaggagggtggtgtacctagggagggcatggaagctcagtgttcttcccacacaccttgccttatgcatctctttcatctggctgatccttagttgtgttcttttacaagaatctagtaaataaacttttcctacattctatgagtcattctagctaatgctgaaactcaaagaggggattgtaggaaccttggatttatagccagttggtcagaagcaccagtgaaaacatggacatgagattggtgtccaaaactgacacaattggtgtcagttgtagaactgagcccttaacctgaagcatctatgttgatctgattccaggtagatagcttcaaaatttaattacaggcacttagtgggtgtccacagaaaattggagaattgtttggtttggggaaacctcatacacatctggtgtcagaaatgttgtgagtatagagaagacaataagtttttcctatacagtagctaaagtacctacatcattaatttgtatagtatattctgtgtaaaaataagactttctgatatttttttcaagtggcaacatttatcagacttttttgatttctgacatacatactgaaaacaggcaacatacatgcaaagttttccactgaaaaatagaaatagtttgaaaaaataaaaaattcaaattgtctttctggtattaacaatttgataagttctgctactaaaagtactacaaagttgtttcctttgattatcccctataattgtctaattaatattttaatttagcagacattgttaaattctattccttaggagtgtaatgctaaggcaaggccttttgggaggttttgtagtacattaaaagaatatactatctcttccaaaaaaaaaaa

SEQ ID NO: 19802 - DNA, 870 bp, Homo sapiens
aggtgatctagaggatcccgtcaattctacacctcagtgttcttcccacacaccttgccttatgcatctctttcatctggctgatccttagttgtgttcttttacaagaatctagtaaataaacttttcctacattctatgagtcattctagctaatgctgaaactcaaagaggggattgtaggaaccttggatttatagccagttggtcagaagcaccagtgaaaacatggacatgagattggtgtccaaaactgacacaattggtgtcagttgtagaactgagcccttaacctgaagcatctatgttgatctgattccaggtagatagcttcaaaatttaattacaggcacttagtgggtgtccacagaaaattggagaattgtttggtttggggaaacctcatacacatctggtgtcagaaatgttgtgagtatagagaagacaataagtttttcctatacagtagctaaagtacctacatcattaatttgtatagtatattctgtgtaaaaataagactttctgatatttttttcaagtggcaacatttatcagacttttttgatttctgacatacatactgaaaacaggcaacatacatgcaaagttttccactgaaaaatagaaatagtttgaaaaaataaaaaattcaaattgtctttctggtattaacaatttgataagttctgctactaaaagtactacaaagttgtttcctttgattatcccctataattgtctaattaatattttaatttagcagacattgttaaattctattccttaggagtgtaatgctaaggcaaggccttttgggaggttttgtagtacattaaaagaatatactatctcttccaaaaaaaaaaa

SEQ ID NO: 19803 - DNA, 514 bp, Homo sapiens
accacaattaacttttttagaggtcatgtcataaacagatcatctttcattttaaaaagctatactaagccaggcatggtggtttacgcctataatcccagcactctgggaggccaaggcaggcagattgcttgaggttgggagttcaagaccagtctagccaacatggtgaaaccccatctctacaaaatatacaaaacttggccgggtatggtggtgcactccggtagtcccagctactcaggagtgtgaggcaggagaatcacttgaacccaggaggtggaggttgcaatgagccgagatcacatcactgtgatgagatggagtgagactccatctccaaataaataaataaataaataaataaataagccatactagttaactttttgggggggcaaactttaggaagtgtctttaatttttttaattaatttattttagattcagagggtacatgtgtatgtttgttacactggtatactgtgtaatggtggggactggacttatacac

SEQ ID NO: 19804 - DNA, 1086 bp, Homo sapiens
aggtaggtagataaatagatagatgatagatagatagatagatagatagatagataagatagattttcctactggcatgtttcaccattttcttgactcacatattctggtttccatctggctccttcggtctgtgctctcctcactgaagtaaggcctttaatgattacttcattataagtccatgagtaatatggtttggctacgtccccaaccaaatctcatcttgaattgtagttcccataatccccacgtgttgtgggagggacctggtgagaggtaattgaatcatggggttggtttcctccatgctattctcatgatactgagtaagttctcatgagatctgatggttttataagaggtgtcccccttcacttggctctcatttttctccttcctgctgccatatgaagaaggatgtgtttgcttccccttccaccacgactgtaagtttcctgaggcctcgccagccatgctaaactgtgagtcaattaaatctctttcctctataaattactcagtctcaggtatatcttcatagcagtgtgagaatggactaatactttgggtattacactttttagattttacgtatttgaaaaagcacttgctttttatacctgaataaagtttatttgttcacagaaaaaaaaaagagcttcaactcaagatgctttttatactcagccttaattccccttcacttcctattaaactaagcacagagcagaatctgggtatctttgctgttgcctcttctgccttcaaacatgatttaccacccacagacttgcctatgctgtcaaatcttttttaaaaaaatacattatctctaataatgttaagtgcatttttctttactcccagttggcatcacttacatgattgtggcctgaagaccatcgtctcactttcgtaggatagttagacagtttttcaatagcaccgatcctttctacattaaaagttaagtggaaagtttaggttctcagcggttcaaatgctctctctcattactatttacaggattaaacacgtgcataattttctaaaattctatttcaaataaatagcataaaaacc

SEQ ID NO: 19805 - DNA, 430 bp, Homo sapiens
attgtttccgtgcaaagtgacaaacgaggtaacatgaaccttccaaagccaactgggttgtctttgtctttccgtgccaggtaagaagaagaggacaagccctgcccagtcccaagaagtgttaacaggcgctggagctttatctgcggctgcactcgcttctccctcctgcagacattcttgctgctttccggtcccacgggacggctcccaggctcccgcctcacggcaagaaaaataaaggcctccccgcacagccagccagcttcgttcattcacgtcaccgacaaacactcctagcaggcgttgttaaacgttcagggagcgcccgggacctagccgaggccccctcctggctgtgccgcggggggatgcgcagcccctcgcaccgactgcgggaaggagagtgtgggtggccggcgcgcccggt

SEQ ID NO: 19806 - DNA, 366 bp, Homo sapiens
tttatgtattgtgagctgttgtcagggctaactgggtgccattgtggctgaagatgttgcgcaaattgaggcagatggctcagattcagacacgtgtcatatagaaaggggcaaggggattggccctgcaaagtggggtcacagcaggtcacagacctgctctacacttgttagtgttttcaaaagctcatgtgcagcaactttgtttttctccagtcatccctgcaatcaaaccccctcccccaaaaagtgtgtggaacatgcttcatgtggaaaagggaggcttgggaggttcctgtcctcttccttcatgaccctgaggctcaactgtgcatgcagaatgaattagcaggattgacagaagtt

SEQ ID NO: 19807 - DNA, 394 bp, Homo sapiens
tgaaaatccaggaccccagcatagtataaaatggaccaatggtgaattgaaaccaattaaatagagctgaggcatcctgagcaagagcacaagctctgggagctgcaaatgagcctcacccctgccacttactaattgtgggactgtgcgagagttatttaacctttctgaacttcactgaacaggtgtgatttctgtgaggattaaatagaaaatgtaggtaaagtgcccaaaattacaactcttatcaactttattagtattatttataaaaataactatgttaactatagttacaaaataaaaattagaatttagttttaaaaataatattttgagaaataacaatataagaaattgcctatataatacaagactaaattggtaatgacaa

SEQ ID NO: 19808 - DNA, 279 bp, Homo sapiens
gttccgctgggtactgagatcagactgaaatcccgatcactggtcgcgacccccgccacttgactttctatcctctctccacttgagagtcgtgaatgtctttttcggttcctcggggagtgagttctgcattgacttttacacccggagtttttcatgcgcgacatattcctccctgctcccccgccccattcaccatctcagtatcagctgggttggttaatacgatggctattacatgtaagataacccgtgcatgcattgtgagcgatatcggat

SEQ ID NO: 19809 - DNA, 233 bp, Homo sapiens
ggagagagagggaatgagggaagctttgccagacacctccaacctatgctggagggaacacaaaagctggaaatcaactctcacctttgttgtccccagtcccgttccctcttctggtgcatccagatgggagaaggcaaaagccaagtattctaaccaggaaatcacagggtagtgccttacatgaagttaagaggaccagttttccaagctgcctttagagaaaagagtca

SEQ ID NO: 19810 - DNA, 336 bp, Homo sapiens
atagtaaacgcagggtagataaacatgggtaattacagagaaatagtcatagccattgatgataatggaaatgacagtagtgccaggcgcctttggtggtttctggcctggtggcaggcaggtggctcagcagcaactgggaaggtgcgcaggtgagcacagtctccctttgcaggtggcttctggctctcagccctgtagcttcgactagcttcgactctgtggcacaaccagtggatcacttgtggtcctgcgagcgcagacagcagctgccagcatgggaacacggagggcatcagttcatcacttgtggtcctgcgagcgcagacggcagct

SEQ ID NO: 19811 - DNA, 437 bp, Homo sapiens
catatggaagacaaagtggattaagagagaggactggcattgggtttgcccaatcctctgcagtttagccttagacatgagggccgaaccctaagcaaagtctggtaattgattatggtgttttaaaaggtattaatctttaggatgaagtccaaacaggatgaaaatttctacaaatgtttgtttcctatgtcatgtgtgagaaaaaaaaatgtgagtgttgcagcacattttgtttgcttagtttggcatcttcaatcaatttctcaattatttaggttgaaaatagcttttaataaatatttggaaggaaaaaactcccccttgggatggggggaagcaaaccccctctctaattttggtgaataagaattgctttcttagctctcagagtttttaggaacattgaaataattcatagccatcagtttagaaaa

SEQ ID NO: 19812 - DNA, 84 bp, Homo sapiens
tctaccctcacaattccaccaaaactagtatcacaaccatcacgttgtgatggtatcccgagcatccacattgctcagttgaat

SEQ ID NO: 19813 - DNA, 450 bp, Homo sapiens
gttgggaggctgcgtcgacgggagaaagagaaattattgaactcccattccgtatatgacattatagtcagcattcttggggaaacagagatgactaagtaagattattgccttctaggaggttatagtctagcaggaggactgtgaaccctcccagcctgccgctcgctagctggagtgccctgatgtcaggtggaaggcaggagggactggaagaagggggtccagaaggaggccctaacagtggtgtgggagaaacctgctgctttggggtcggcgctcagatggtggtggaatgtgaaggagaagtaggaggtgtaagattattgacagttcttgtcacctgactgttaagaatagtgagagaaggccaggtgcagtggctcacacccgtaatcccagcactttgggaggccgaggcaggcagattacttgagcccagaagttcaa

SEQ ID NO: 19814 - DNA, 436 bp, Homo sapiens
aggccttgacaatgttgaatgatcctgcaccaccttgaaagacattttctaatatggtttgtcaggcaaagtggttagtagtcatttgtggcctgaggtagaagtcctcagaaatcagcagacttcactgataaaatgctgacttgcccctggactgggctctgtgagagtggccttctgcactgtgcacagtaggtgtgaacacaccacacctacagggaccacgtggtgggctgtggactagcggccaagctccctgcaggcccactaatagaattcagcttttagcatgggctgtttcatactgttctgatgaaactgatttggtttctttcctccataccccttctgcatttcagtgtttttgtttagttttcctggtttttaattataactacaaaataaaatctttaggctattcaccttagcttagtaa

SEQ ID NO: 19815 - DNA, 434 bp, Homo sapiens
accttacaagagtccttcataaactcactgagaaaatgattgtcatgtgccaggcaatcatttgttcatccttttaatgaaaccatttgttgaacatctacactttccagtgcactgcgcttaggatatccggggagaaacagcagcaatccctgctctctaggaggccatagtctcatggaagaaataagtaagcagataattataacaagggacaccaaattgaaacaggttgtagtagagttggcattgagttgagtcttaaaaggaatcaggcatattgcaccagataaaaagcaagaaaagcatgaagaaaagagttccaagcacagagagaagcatgtgttaaggcacagacagatgaaagcatgtcacatgcatgagctgcaggcactctggcatgggtggaacatggagtgtgaggaagccagtgt

SEQ ID NO: 19816 - DNA, 391 bp, Homo sapiens
ctcggtattattgctatggaagatgagggtcatcgattttggtgggaaagtagcagcctctccctcagagggagtaacaattgtctacctagcagaagaacaccagcccaatccacactaaacggagatgtaaagaatatgcttccaaatgtggagatgatcaaataacatatcaatgatattttcttggaagaaaagtctgtaaaaattctttggggctttctactttcaaactgaattatgaacgattctcataatttctgtctctttcactagagatgagagaaggaaatatgacctttttctagtcaccaaaacatctacatatttacttattccatgagaacaaagttggcagaataacaatgtgatcacagaataaattaacctc

SEQ ID NO: 19817 - DNA, 464 bp, Homo sapiens
tgacagcaacctcgaattgacttcagttgccaagagcattgggcacttcccccacaaggtgaaaagatcatcctgtgtccactgctctgtggcttggcatgcctcgatgctggcttctcagacaggccctgcacgggtggctcttcttgccaactttaccccattctctgaagggcactgggagatggaggggaagaggttggtgcttgaaaaagaaaagattgggaggccagatgtgcaccccaaaataggacttcccaggaaatgggtctcagtgagcatattaacatccagcatcttcatctactccatgctcacctaagacctctggggtcaggggaaggggctatggagtcagtgggaagtgggccagtagcagacaggagagttgcctggcataggcagtaggtgtgaatgcaagctgtgatatttcagcagagacctggaattcagtcataaacaga

SEQ ID NO: 19818 - DNA, 581 bp, Homo sapiens
gtggaggctgcagtgagctgtgatcgcgccactgcactccagcctgggtgacagagcgagactctgtctccaataaatagataaataaataaatggctctgaaagctgaaaaccagctttgtgccagaatactttaaaatatgctgatttttttcagaaaatgggacatatttacagtaggaaaaagtttaaaacagagggtcagacagaggaggcttcgtggtggaggtgacttctgcactgagacctgagggacagagttaactgagaccagagagaaggacattctagtccaagttggagcatgtgttgaggccccatatccagattcaggccccatatccagattctgaggcttatttggggaacaaagagtcatttctcacaatagctgcactctggagtgaagtgtctggagaactcagcagtatccatgtcatgaaggtgatgaaggctacaaatatgttttgagcatgagagggacagggtcagatggtgttaggatgactcctctggaaccctgtgtaggacagatctgcggcgagggatccagggacgaggccagtgcagcagcagcctgg

SEQ ID NO: 19819 - DNA, 705 bp, Homo sapiens
gcacctcccaccccctcccactctcttgcttctgcttttgcctttgccatgtgagaggacttctccccttgctgtgattgtaagcttcctaaggcctccccagaagctgcgcaggtggcagcaccatgcttcctgcacagcctgccaaatcgtaagccaattaaacactcttttctttataaattactcagcctcagataattctttatagcaacacaagaacaggttagtgcaggctctgtgtttattacagcagttacataaatgtttttgtagtgaaactaaaaaactacctgttggctactgtgcttattaactgggtgacaaaataatctgtacgccaaactgccacgacacacaatttacctagataacaaacctgcacatggactcctgaacctaacataaaagttttttgaaaaagtaaataagatattaaaaaaagaaaacaaaagagaatggcaattccatattaaaaacctgcataatttaggctgggcacggtggctcacatctgtaatcccagcactttgggaggccaaggtgggtgggtcacgtgaggccaggagttctagaccaccctggccaacaagacaaaaccctgtctctactaaaaatacaaaaattagctgggcgtggtggcacatgcctgtaatcccagtttctcgggaggctgaggcacgagaattgcctgaacctgggtgg

SEQ ID NO: 19820 - DNA, 798 bp, Homo sapiens
gcgtatcacatggtgagagcaggagcaagagagagaggaggggggtgctacacttcttcaaacaatcagatctcatgtgaattcagagtgagaactcactcattaccatgaggatagacccgcccctatgcaccaaacacctcccaccaggccccacctccaacattgggagttagatttcaacatgagatttggaggggacaaatgtccaaactgtatcagaaaggtaataacagagttcaaatgaagaagaaattacttcaggaaaggcaatcacatgatgaattgtagcagttagaacttgatgagatgcaagtgacagaaaatacaatcaaacaggtaaaaaaaaaaaaaaaaggaatttattgattcatataacagtaaagaccaggggtagaactagcttggggtgcgaatagttttagggcttaaacaatgttatcagggctttgctctgccttctgctcacgctgatattactcttaggctcttcctagtatctcctagtacttctaggtgaacatcacaacaccaagttccgaagaaaagaaagtctggtatcacaaagtcttggaattgagacttgtcttgactttcctcatataggtcattgtatctgtgaacattattgctctggggaatagaatgtgctgatgagcttagctttgtacatgtgctccatctgtttcacagatgttgattttgtgattgttattaattaaggtattcatttttgttttgtgaacttgtccatatatttgttatattttgcaataaagttttttttaaaaaagctaa

SEQ ID NO: 19821 - DNA, 201 bp, Homo sapiens
cacagcggctgtgcaccaactctttattttaataaaccttctaccatgtagaagtgaaataaatgatcgtatttagtaattatcatttttttctctacaatttaccttatctaaaaaggtaggattttccattttatttcccatttttgatgtgactttgcctaattttgtaatagatgattttaaaaatatgttttgtca

SEQ ID NO: 19822 - DNA, 660 bp, Homo sapiens
ctagcactttgggaggctaaggtaggaagatcgcttgaactcaggaattcaagccaacctgggcaacatagcaagacctcacctccactaaagggaaaaaacaatccatgttccttttcttccaacccaacagatctgtggctgggcagcagctgctgagctcaactacaattccagcctgctttacagttaggcttgtccacaggaccaagttctcagtgacagagtaagagcaggcctgtgataggagcctcttctgtacctcggcctccaagctgcctagaatctggctgtggcagtgcccaaggggaggcgagcagcaggagagaagggtcctggggtttggggggaccaggaggagcagagctgctgctcagctcagatccataacctgagaaagaaagagggatggcacattttatgtgttaacttaaatatctggctacatcgctcagatatttgattagacactattctagatgtttttatgaaggtattgattaattgattgattgattgagacagtctcactctgttgccccactgcattgcagcctgggtgtcagagtgagactctgtctcaataaataaatttaaaaaattaaatacatatgaatacataaaaattaaatgcataaatacataaaaataaaaaaatac

SEQ ID NO: 19823 - DNA, 1574 bp, Homo sapiens
  misc_feature (1284)..(1284): n is a, c, g, or t
  misc_feature (1332)..(1332): n is a, c, g, or t
agtagaatcagatatggaggacgagactacagcttggatgaatttgaagccaacaaaatcctgcaccagcacctcggggcccctgaagagcggcttgctcttcacatcctcaggactcaggggctggtccctgagcacgtggaaacaaggactttgcacagcaccttccagcccaacatttcccagggaaaacttcagatgtgggtggatgttttccccaagagtttggggccaccaggccctcctttcaacatcacaccccggaaagccaagaaatactacctgcgtgtgatcatctggaacaccaaggacgttatcttggacgagaaaagcatcacaggagaggaaatgagtgacatctacgtcaaaggctggattcctggcaatgaagaaaacaaacagaaaacagatgtccattacagatctttggatggtgaagggaattttaactggcgatttgttttcccgtttgactaccttccagccgaacaactctgtatcgttgcgaaaaaagagcatttctggagtattgaccaaacggaatttcgaatcccacccaggctgatcattcagatatgggacaatgacaagttttctctggatgactacttgggtttcctagaacttgacttgcgtcacacgatcattcctgcaaaatcaccagagaaatgcaggttggacatgattccggacctcaaagccatgaacccccttaaagccaagacagcctccctctttgagcagaagtccatgaaaggatggtggccatgctacgcagagaaagatggcgcccgcgtaatggctgggaaagtggagatgacattggaaatcctcaacgagaaggaggccgacgagaggccagccgggaaggggcgggacgaacccaacatgaaccccaagctggacttaccaaatcgaccagaaacctccttcctctggttcaccaacccatgcaagaccatgaagttcatcgtgtggcgccgctttaagtgggtcatcatcggcttgctgttcctgcttatcctgctgctcttcgtggccgtgctcctctactctttgccgaactatttgtcaatgaagattgtaaagccaaatgtgtaacaaaggcaaaggcttcatttcaagagtcatccagcaatgagagaatcctgcctctgtagaccaacatccagtgtgattttgtgtctgagaccacaccccagtagcaggttacgccatgtcaccgagccccattgattcccagagggtcttagtcctggaaagtcaggcaacaagcaacgttgnatcatgtatctcttaagtattaaaagttttattttctaaagttaatcntgttttcaaatattttcaaggtggctggttccattttaaaaatcatcttttatatgtgtctcgggttctagacttcaggctttggggaaattgggtaattagaattcaaaaatctctgcattcctgaaggtggatatacttcatatttggtaatcaagtgaaagagttgtgctttataaagtcagtttggaataagttggaacaattctttatttatgcccaaaagcaatggtatatatagg

SEQ ID NO: 19824 - DNA, 892 bp, Homo sapiens
  misc_feature (826)..(826): n is a, c, g, or t
  misc_feature (828)..(828): n is a, c, g, or t
agtagaatcagatatggaggacgagactacagcttggatgaatttgaagccaacaaaatcctgcaccagcacctcggggcccctgaagagcggcttgctcttcacatcctcaggactcaggggctggtccctgagcacgtggaaacaaggactttgcacagcaccttccagcccaacatttcccagggaaaacttcagatgtgggtggatgttttccccaagagtttggggccaccaggccctcctttcaacatcacaccccggaaagccaagaaatactacctgcgtgtgatcatctggaacaccaaggacgttatcttggacgagaaaagcatcacaggagaggaaatgagtgacatctacgtcaaaggctggattcctggcaatgaagaaaacaaacagaaaacagatgtccattacagatctttggatggtgaagggaattttaactggcgatttgttttcccgtttgactaccttccagccgaacaactctgtatcgttgcgaaaaaagagcatttctggagtattgaccaaacggaatttcgaatcccacccaggctgatcattcagatatgggacaatgacaagttttctctggatgactacttgggtttcctagaacttgacttgcgtcacacgatcattcctgcaaaatcaccagagaaatgcaggttggacatgattccggacctcaaagccatgaacccccttaaagccaagacagcctccctctttgagcagaagtccatgaaaggatggtggccatgctacgcagagaaagatggcgcccgcgtaatggctggcctctcgtcggcctccttcncnttgaggatttccaatgtcatctccacgtcgagcggccgcgaacttagtagtagtaggcggctgc

SEQ ID NO: 19825 - DNA, 447 bp, Homo sapiens
cgaacccaacatgaaccccaagctggacttaccaaagtgagaggccttctttgttctcccactccccaaacacctgcaggctgagagccccccttcccattggcttaatgggatggattagcttttgtggtcctcctaatctggtatttaatagtggtgggtgggggtggagaggttggtgatctggcttcattttaagaattctcctttccaggaaaccaaagttcagcatcttaggaagctgtcataggttaaagagcctttctcagtcaacgaaggggaacagtatcttttcttgaccttattaatgtgattctttattcctgaaactgtgttatgctctggaataaaatatgcatccctcctgagttgggtaggtgatactgtttctttgcaatgcagtcgaccagaaacctccttcctctggttcaccaacccatgcaagac

SEQ ID NO: 19826 - DNA, 583 bp, Homo sapiens
ctctgctcagggcagctcagaactaaaaggaaaacatttcacatccaagggccttgagttgagtggaaattgtgtctgtagatatttcattactttgagtttaaagaactctgtttatgctcatatctttgagaaagaaaacaggagatgctgtgcagtggacggctatttcttcggccattttccttcctaactggaaagactttaaatgtccaccaggctccctttctctaactcaccatttacctgttcaaaatcactgtgtgcctctctcctgacaagaacgttctgttcacttgtgaacaacagctgatccacttgaagctcatttggacttactgttgtttccttggctaggtttcctagaacttgacttgcgtcacacgatcattcctgcaaaatcaccagagaaatgcaggttggacatgattccggacctcaaagccatgaacccccttaaagccaagacagcctccctctttgagcagaagtccatgaaaggatggtggccatgctacgcagagaaagatggcgcccgcgtaatggctgtatgaacatttcctggttctggttgaaaatcgtt

SEQ ID NO: 19827 - DNA, 1614 bp, Homo sapiens
gcaacctccgcctcctgggatcaagcaattctcctgcctcagcctcccaagtagctgggattacaggcatgtgccaccatacccagctaattttgtatttttagtagagacggggtttctccatgttggtcaggctggtttcgaactcccgacttcaggtgatccacccgcctcagcctcccaaagtgctgggattacaggtgtgagccactgcacccagctaatttttgtactttttatttttttttttttttttttttttgcgacggagtctagctctgtcgcccaggctggagtgcagtggcgtgatcttggctcactgcaacctccgcctcccctgtaatcccagccactcaggaggctgaggcggggaggatccattgagcccagcagtccaacctgggcaaaatagtgagagaccctgtatctgaaagtaataataaaaataaaaaatataaatgaggtctcgttgatgttggacaattcaagaattcagacttgaaccttaaacctaggaaaagttactttgtatcaggattctaacaattatgcttcatatttgtgaagtcctttaaaacataattttctcaagttctttctttgagatctcaatctgtcttagcattttgtaactaataactgaaattttattcaaaggaattgtaaaccttaaaccaccaatttatttccatgtgaaaaagtgttacatatgacaagtgttttttgactgtaattgcgttaaatcttttgagaatgtaaatgccgggctaggcaattgcagttaatacatacagaggttagtgaagggcttattaagttgtaggggaagcaagctgggaagaatcagatcagatattttcctgacaaaaaaaaatgaccctacagagagcatcaaaatgtggtgttcttgttaagtaattgatcgtggtcttcgctttaatcttagttccgccaggcacggtggctcacacctgtaatcccagcactttgggaggccaaggcgggcggatcagctgaggtcaggagttggagaccagcgtggccaacatggtgaaaccccgtctctactaaagataaaaaaattagctgagtgtgttggtgggtgcctgtaatccagctacttgggagactgaggcaggagaattgcttgaacccaggaggcagaggttgcagtgagctgagattgtgccactgcactccagcctgggcaacaaagcaagactctgtctcaaaaaaataaaaataaaaaaaaaatcttagttccatggaattttaagcattgttccccctctaacctgtgtctaaagaattaaaagaatttggccgggtgcggcagctcatgcctgtaatcccaacactttgggaggctgaggcaggcggatcacgaggtcaggagatcgagaccatcctggccaacacggtgaaacctcgtctccactaaaaataccaaaaaaattagctgggcatggtggcacacacctgtagtcccctgtagtcccagctactcgggaggctgaggcaggagaatcgtttgaacctgggaggtggaggttgcagtgagccaagatcatgtcactgcattccagcctgggcaacagaggaagactccgtctc

SEQ ID NO: 19828 - DNA, 2546 bp, Homo sapiens
tccgctctctacccccccctcctctctctcccccctcgccccttcatggccggctcctaccctgaaggtgcacctgcagtcctcgccgataagaggcagcagttcggaagccggttcctgagagatccggcgcgcgtcttccaccacaatgcctgggacaatgtggagtggtcggaagagcaagccgcggcggcggagagaaaagtccaggagaacagtatccagcgggtgtgccaggagaaacaagttgattatgagatcaatgcccacaaatactggaatgacttctacaaaatccacgaaaatgggtttttcaaggatagacattggctttttaccgaattccctgagctggcacctagccaaaatcaaaatcatttgaaggactggttcttggagaacaagagtgaagtacctgaatgtagaaacaatgaggatggacctggtttaataatggaagaacagcacaagtgttcttcgaagagccttgaacataaaacacagacacctcctgtggaggagaatgtaactcagaaaattagtgacctggaaatttgtgctgatgagtttcctggatcctcagccacctaccgaatactggaggttggctgtggtgtgggaaacacagtctttccaattttacaaacgaacaatgacccaggactctttgtttattgctgtgatttttcttccacagctatagaactggtccagacaaattcagaatatgatccttctcggtgttttgcctttgttcacgacctgtgtgatgaagagaagagttacccagtgcccaagggcagtcttgatattatcattctcatatttgttctttcagcaattgttccagacaagatgcagaaggctatcaacaggctgagcaggcttctgaaacctggcgggatgatgcttctgcgagattacggccgctatgacatggctcagcttcggtttaaaaaaggtcagtgtctatctggaaatttctacgtgagaggtgatggaaccagagtttacttcttcacacaagaggaactggacacgcttttcaccactgctggactggaaaaagttcagaacctggtggatcgccgactgcaggtgaaccgaggaaagcaactgacaatgtaccgggtttggattcagtgcaaatactgcaagccccttctgtccagcaccagctgagaggcacctgctgccaacacgatgcaagcccattgtgtttccgggcttttttaaaaaaaaaattgtagcactgggcgtggtgcatgcctgtaatcccagccactcaggaggctgaggcggggaggatccattgagcccagcagtccaacctgggcaaaatagtgagagaccctgtatctgaaagtaataataaaaataaaaaatataaatgaggtctcgttgatgttggacaattcaagaattcagacttgaaccttaaacctaggaaaagttactttgtatcaggattctaacaattatgcttcatatttgtgaagtcctttaaaacataattttctcaagttctttctttgagatctcaatctgtcttagcattttgtaactaataactgaaattttattcaaaggaattgtaaaccttaaaccaccaatttatttccatgtgaaaaagtgttacatatgacaagtgttttttgactgtaattgcgttaaatcttttgagaatgtaaatgccgggctaggcaattgcagttaatacatacagaggttagtgaagggcttattaagttgtaggggaagcaagctgggaagaatcagatcagatattttcctgacaaaaaaaaatgaccctacagagagcatcaaaatgtggtgttcttgttaagtaattgatcgtggtcttcgctttaatcttagttccgccaggcacggtggctcacacctgtaatcccagcactttgggaggccaaggcgggcggatcagctgaggtcaggagttggagaccagcgtggccaacatggtgaaaccccgtctctactaaagataaaaaaattagctgagtgtgttggtgggtgcctgtaatccagctacttgggagactgaggcaggagaattgcttgaacccaggaggcagaggttgcagtgagctgagattgtgccactgcactccagcctgggcaacaaagcaagactctgtctcaaaaaaataaaaataaaaaaaaaatcttagttccatggaattttaagcattgttccccctctaacctgtgtctaaagaattaaaagaatttggccgggtgcggcagctcatgcctgtaatcccaacactttgggaggctgaggcaggcggatcacgaggtcaggagatcgagaccatcctggccaacacggtgaaacctcgtctccactaaaaataccaaaaaaattagctgggcatggtggcacacacctgtagtcccctgtagtcccagctactcgggaggctgaggcaggagaatcgtttgaacctgggaggtggaggttgcagtgagccaagatcatgtcactgcattccagcctgggcaacagaggaagactccgtctc

SEQ ID NO: 19829 - DNA, 1388 bp, Homo sapiens
tccgctctctacccccccctcctctctctcccccctcgccccttcatggccggctcctaccctgaaggtgcacctgcagtcctcgccgataagaggcagcagttcggaagccggttcctgagagatccggcgcgcgtcttccaccacaatgcctgggacaatgtggagtggtcggaagagcaagccgcggcggcggagagaaaagtccaggagaacagtatccagcgggtgtgccaggagaaacaagttgattatgagatcaatgcccacaaatactggaatgacttctacaaaatccacgaaaatgggtttttcaaggatagacattggctttttaccgaattccctgagctggcacctagccaaaatcaaaatcatttgaaggactggttcttggagaacaagagtgaagtacctgaatgtagaaacaatgaggatggacctggtttaataatggaagaacagcacaagtgttcttcgaagagccttgaacataaaacacagacacctcctgtggaggagaatgtaactcagaaaattagtgacctggaaatttgtgctgatgagtttcctggatcctcagccacctaccgaatactggaggttggctgtggtgtgggaaacacagtctttccaattttacaaacgaacaatgacccaggactctttgtttattgctgtgatttttcttccacagctatagaactggtccagacaaattcagaatatgatccttctcggtgttttgcctttgttcacgacctgtgtgatgaagagaagagttacccagtgcccaagggcagtcttgatattatcattctcatatttgttctttcagcaattgttccagacaagatgcagaaggctatcaacaggctgagcaggcttctgaaacctggcgggatgatgcttctgcgagattacggccgctatgacatggctcagcttcggtttaaaaaaggtcagtgtctatctggaaatttctacgtgagaggtgatggaaccagagtttacttcttcacacaagaggaactggacacgcttttcaccactgctggactggaaaaagttcagaacctggtggatcgccgactgcaggtgaaccgaggaaagcaactgacaatgtaccgggtttggattcagtgcaaatactgcaagccccttctgtccagcaccagctgagaggcacctgctgccaacacgatgcaagcccattgtgtttccgggcttttttaaaaaaaaaattgtagcactgggcgtggtgcatgcctgtaatcccagccactcaggaggctgaggcggggaggatccattgagcccagcagtccaacctgggcaaaatagtgagagaccctgtatctgaaagtaataataaaaataaaaaatat

SEQ ID NO: 19830 - DNA, 2751 bp, Homo sapiens
tccgctctctacccccccctcctctctctcccccctcgccccttcatggccggctcctaccctgaaggtgcacctgcagtcctcgccgataagaggcagcagttcggaagccggttcctgagagatccggcgcgcgtcttccaccacaatgcctgtaatcactctgccccttcgcccggcctgtcgctgaccctctgtcccgccgcctcggagcactccgaaaagcccctgaccgccggccacgagtcaagctgccctacccgaggcactctccaaggggagagaaactcctaggccagcgactcaccctgcccgcagccaggacgtgaggcccctaagctgcccgtttgattttctcagggacaatgtggagtggtcggaagagcaagccgcggcggcggagagaaaagtccaggagaacagtatccagcgggtgtgccaggagaaacaagttgattatgagatcaatgcccacaaatactggaatgacttctacaaaatccacgaaaatgggtttttcaaggatagacattggctttttaccgaattccctgagctggcacctagccaaaatcaaaatcatttgaaggactggttcttggagaacaagagtgaagtacctgaatgtagaaacaatgaggatggacctggtttaataatggaagaacagcacaagtgttcttcgaagagccttgaacataaaacacagacacctcctgtggaggagaatgtaactcagaaaattagtgacctggaaatttgtgctgatgagtttcctggatcctcagccacctaccgaatactggaggttggctgtggtgtgggaaacacagtctttccaattttacaaacgaacaatgacccaggactctttgtttattgctgtgatttttcttccacagctatagaactggtccagacaaattcagaatatgatccttctcggtgttttgcctttgttcacgacctgtgtgatgaagagaagagttacccagtgcccaagggcagtcttgatattatcattctcatatttgttctttcagcaattgttccagacaagatgcagaaggctatcaacaggctgagcaggcttctgaaacctggcgggatgatgcttctgcgagattacggccgctatgacatggctcagcttcggtttaaaaaaggtcagtgtctatctggaaatttctacgtgagaggtgatggaaccagagtttacttcttcacacaagaggaactggacacgcttttcaccactgctggactggaaaaagttcagaacctggtggatcgccgactgcaggtgaaccgaggaaagcaactgacaatgtaccgggtttggattcagtgcaaatactgcaagccccttctgtccagcaccagctgagaggcacctgctgccaacacgatgcaagcccattgtgtttccgggcttttttaaaaaaaaaattgtagcactgggcgtggtgcatgcctgtaatcccagccactcaggaggctgaggcggggaggatccattgagcccagcagtccaacctgggcaaaatagtgagagaccctgtatctgaaagtaataataaaaataaaaaatataaatgaggtctcgttgatgttggacaattcaagaattcagacttgaaccttaaacctaggaaaagttactttgtatcaggattctaacaattatgcttcatatttgtgaagtcctttaaaacataattttctcaagttctttctttgagatctcaatctgtcttagcattttgtaactaataactgaaattttattcaaaggaattgtaaaccttaaaccaccaatttatttccatgtgaaaaagtgttacatatgacaagtgttttttgactgtaattgcgttaaatcttttgagaatgtaaatgccgggctaggcaattgcagttaatacatacagaggttagtgaagggcttattaagttgtaggggaagcaagctgggaagaatcagatcagatattttcctgacaaaaaaaaatgaccctacagagagcatcaaaatgtggtgttcttgttaagtaattgatcgtggtcttcgctttaatcttagttccgccaggcacggtggctcacacctgtaatcccagcactttgggaggccaaggcgggcggatcagctgaggtcaggagttggagaccagcgtggccaacatggtgaaaccccgtctctactaaagataaaaaaattagctgagtgtgttggtgggtgcctgtaatccagctacttgggagactgaggcaggagaattgcttgaacccaggaggcagaggttgcagtgagctgagattgtgccactgcactccagcctgggcaacaaagcaagactctgtctcaaaaaaataaaaataaaaaaaaaatcttagttccatggaattttaagcattgttccccctctaacctgtgtctaaagaattaaaagaatttggccgggtgcggcagctcatgcctgtaatcccaacactttgggaggctgaggcaggcggatcacgaggtcaggagatcgagaccatcctggccaacacggtgaaacctcgtctccactaaaaataccaaaaaaattagctgggcatggtggcacacacctgtagtcccctgtagtcccagctactcgggaggctgaggcaggagaatcgtttgaacctgggaggtggaggttgcagtgagccaagatcatgtcactgcattccagcctgggcaacagaggaagactccgtctc

SEQ ID NO: 19831 - DNA, 1006 bp, Homo sapiens
tccgctctctacccccccctcctctctctcccccctcgccccttcatggccggctcctaccctgaaggtgcacctgcagtcctcgccgataagaggcagcagttcggaagccggttcctgagagatccggcgcgcgtcttccaccacaatgcctgggacaatgtggagtggtcggaagagcaagccgcggcggcggagagaaaagtccaggagaacagtatccagcgggtgtgccaggagaaacaagttgattatgagatcaatgcccacaaatactggaatgacttctacaaaatccacgaaaatgggtttttcaaggatagacattggctttttaccgaattccctgagctggcacctagccaaaatcaaaatcatttgaaggactggttcttggagaacaagagtgaagtacctgaatgtagaaacaatgaggatggacctggtttaataatggaagaacagcacaagtgttcttcgaagagccttgaacataaaacacagacacctcctgtggaggagaatgtaactcagaaaattagtgacctggaaatttgtgctgatgagtttcctggatcctcagccacctaccgaatactggaggttggctgtggtgtgggaaacacagtctttccaattttacaaacgaacaatgacccaggactctttgtttattgctgtgatttttcttccacagctatagaactggtccagacaaattcagaatatgatccttctcggtgttttgcctttgttcacgacctgtgtgatgaagagaagagttacccagtgcccaagggcagtcttgatattatcattctcatatttgttctttcagcaattgttccagacaagatgcagaaggctatcaacaggctgagcaggcttctgaaacctggcgggatgatgcttctgcgagattacggccgctatgacatggctcagcttcggtttaaaaaaggtattttgaaagtgctgaatcctaaccactagagatcatgtcctt

SEQ ID NO: 19832 - DNA, 1593 bp, Homo sapiens
tccgctctctacccccccctcctctctctcccccctcgccccttcatggccggctcctaccctgaaggtgcacctgcagtcctcgccgataagaggcagcagttcggaagccggttcctgagagatccggcgcgcgtcttccaccacaatgcctgtaatcactctgccccttcgcccggcctgtcgctgaccctctgtcccgccgcctcggagcactccgaaaagcccctgaccgccggccacgagtcaagctgccctacccgaggcactctccaaggggagagaaactcctaggccagcgactcaccctgcccgcagccaggacgtgaggcccctaagctgcccgtttgattttctcagggacaatgtggagtggtcggaagagcaagccgcggcggcggagagaaaagtccaggagaacagtatccagcgggtgtgccaggagaaacaagttgattatgagatcaatgcccacaaatactggaatgacttctacaaaatccacgaaaatgggtttttcaaggatagacattggctttttaccgaattccctgagctggcacctagccaaaatcaaaatcatttgaaggactggttcttggagaacaagagtgaagtacctgaatgtagaaacaatgaggatggacctggtttaataatggaagaacagcacaagtgttcttcgaagagccttgaacataaaacacagacacctcctgtggaggagaatgtaactcagaaaattagtgacctggaaatttgtgctgatgagtttcctggatcctcagccacctaccgaatactggaggttggctgtggtgtgggaaacacagtctttccaattttacaaacgaacaatgacccaggactctttgtttattgctgtgatttttcttccacagctatagaactggtccagacaaattcagaatatgatccttctcggtgttttgcctttgttcacgacctgtgtgatgaagagaagagttacccagtgcccaagggcagtcttgatattatcattctcatatttgttctttcagcaattgttccagacaagatgcagaaggctatcaacaggctgagcaggcttctgaaacctggcgggatgatgcttctgcgagattacggccgctatgacatggctcagcttcggtttaaaaaaggtcagtgtctatctggaaatttctacgtgagaggtgatggaaccagagtttacttcttcacacaagaggaactggacacgcttttcaccactgctggactggaaaaagttcagaacctggtggatcgccgactgcaggtgaaccgaggaaagcaactgacaatgtaccgggtttggattcagtgcaaatactgcaagccccttctgtccagcaccagctgagaggcacctgctgccaacacgatgcaagcccattgtgtttccgggcttttttaaaaaaaaaattgtagcactgggcgtggtgcatgcctgtaatcccagccactcaggaggctgaggcggggaggatccattgagcccagcagtccaacctgggcaaaatagtgagagaccctgtatctgaaagtaataataaaaataaaaaatat

SEQ ID NO: 19833 - DNA, 2557 bp, Homo sapiens
gctaccctcgacggttacttgtggtgctgcccgatatgagcgccccatttcggaaacccgccttcgtgaaagatctgcgtgctcgtttccatcacattgtctgccattcctgtgcgagtggtcatgcaccagactcccgcgcgatgtcgtcagaatgcaagacattccacgcacatgcggccatcctgcgtgttgtaccatcgacacactggttcctcatgactctccaggtgcccaacacaactagctgcaatgactttctcatgaaaaatgccctcgatccatgggagtcttccttccaggtgtagactttcgcgccttcggtaagcgatacttaccctgaatctggccacccgtagtcaaaccatcggtccatcttctctggacgcgattgggttccttggaagcactcactacgtgaagtacctgaatgtagaaacaatgaggatggacctggtttaataatggaagaacagcacaagtgttcttcgaagagccttgaacataaaacacagacacctcctgtggaggagaatgtaactcagaaaattagtgacctggaaatttgtgctgatgagtttcctggatcctcagccacctaccgaatactggaggttggctgtggtgtgggaaacacagtctttccaattttacaaacgaacaatgacccaggactctttgtttattgctgtgatttttcttccacagctatagaactggtccagacaaattcagaatatgatccttctcggtgttttgcctttgttcacgacctgtgtgatgaagagaagagttacccagtgcccaagggcagtcttgatattatcattctcatatttgttctttcagcaattgttccagacaagatgcagaaggctatcaacaggctgagcaggcttctgaaacctggcgggatgatgcttctgcgagattacggccgctatgacatggctcagcttcggtttaaaaaaggtcagtgtctatctggaaatttctacgtgagaggtgatggaaccagagtttacttcttcacacaagaggaactggacacgcttttcaccactgctggactggaaaaagttcagaacctggtggatcgccgactgcaggtgaaccgaggaaagcaactgacaatgtaccgggtttggattcagtgcaaatactgcaagccccttctgtccagcaccagctgagaggcacctgctgccaacacgatgcaagcccattgtgtttccgggcttttttaaaaaaaaaattgtagcactgggcgtggtgcatgcctgtaatcccagccactcaggaggctgaggcggggaggatccattgagcccagcagtccaacctgggcaaaatagtgagagaccctgtatctgaaagtaataataaaaataaaaaatataaatgaggtctcgttgatgttggacaattcaagaattcagacttgaaccttaaacctaggaaaagttactttgtatcaggattctaacaattatgcttcatatttgtgaagtcctttaaaacataattttctcaagttctttctttgagatctcaatctgtcttagcattttgtaactaataactgaaattttattcaaaggaattgtaaaccttaaaccaccaatttatttccatgtgaaaaagtgttacatatgacaagtgttttttgactgtaattgcgttaaatcttttgagaatgtaaatgccgggctaggcaattgcagttaatacatacagaggttagtgaagggcttattaagttgtaggggaagcaagctgggaagaatcagatcagatattttcctgacaaaaaaaaatgaccctacagagagcatcaaaatgtggtgttcttgttaagtaattgatcgtggtcttcgctttaatcttagttccgccaggcacggtggctcacacctgtaatcccagcactttgggaggccaaggcgggcggatcagctgaggtcaggagttggagaccagcgtggccaacatggtgaaaccccgtctctactaaagataaaaaaattagctgagtgtgttggtgggtgcctgtaatccagctacttgggagactgaggcaggagaattgcttgaacccaggaggcagaggttgcagtgagctgagattgtgccactgcactccagcctgggcaacaaagcaagactctgtctcaaaaaaataaaaataaaaaaaaaatcttagttccatggaattttaagcattgttccccctctaacctgtgtctaaagaattaaaagaatttggccgggtgcggcagctcatgcctgtaatcccaacactttgggaggctgaggcaggcggatcacgaggtcaggagatcgagaccatcctggccaacacggtgaaacctcgtctccactaaaaataccaaaaaaattagctgggcatggtggcacacacctgtagtcccctgtagtcccagctactcgggaggctgaggcaggagaatcgtttgaacctgggaggtggaggttgcagtgagccaagatcatgtcactgcattccagcctgggcaacagaggaagactccgtctc

SEQ ID NO: 19834 - DNA, 2265 bp, Homo sapiens
acagatgtgttcctggtgtggagaaagtgccagggtggctcagcgaagaaaaaagaattcttgtggtgctatcaagcaaggcttcatttgagggaaaagtaggatttctgtaggtggaaaaagagaagacattgatttgaaactccctggttgttttataaacttcatattagctatgtccacagagcctccaaaaggatataattcaaaagggattttaaccaaaatgaaatatgttgtgactaatagatacagtttatttgaatgaatgatagtttttcccatttgatattttaactgtgctacacaagaatgagagtagacatagctcgatttgtagtctcattgttctgtcttttctgcccatttcagtgacccaggactctttgtttattgctgtgatttttcttccacagctatagaactggtccagacaaattcagaatatgatccttctcggtgttttgcctttgttcacgacctgtgtgatgaagagaagagttacccagtgcccaagggcagtcttgatattatcattctcatatttgttctttcagcaattgttccagacaagatgcagaaggctatcaacaggctgagcaggcttctgaaacctggcgggatgatgcttctgcgagattacggccgctatgacatggctcagcttcggtttaaaaaaggtcagtgtctatctggaaatttctacgtgagaggtgatggaaccagagtttacttcttcacacaagaggaactggacacgcttttcaccactgctggactggaaaaagttcagaacctggtggatcgccgactgcaggtgaaccgaggaaagcaactgacaatgtaccgggtttggattcagtgcaaatactgcaagccccttctgtccagcaccagctgagaggcacctgctgccaacacgatgcaagcccattgtgtttccgggcttttttaaaaaaaaaattgtagcactgggcgtggtgcatgcctgtaatcccagccactcaggaggctgaggcggggaggatccattgagcccagcagtccaacctgggcaaaatagtgagagaccctgtatctgaaagtaataataaaaataaaaaatataaatgaggtctcgttgatgttggacaattcaagaattcagacttgaaccttaaacctaggaaaagttactttgtatcaggattctaacaattatgcttcatatttgtgaagtcctttaaaacataattttctcaagttctttctttgagatctcaatctgtcttagcattttgtaactaataactgaaattttattcaaaggaattgtaaaccttaaaccaccaatttatttccatgtgaaaaagtgttacatatgacaagtgttttttgactgtaattgcgttaaatcttttgagaatgtaaatgccgggctaggcaattgcagttaatacatacagaggttagtgaagggcttattaagttgtaggggaagcaagctgggaagaatcagatcagatattttcctgacaaaaaaaaatgaccctacagagagcatcaaaatgtggtgttcttgttaagtaattgatcgtggtcttcgctttaatcttagttccgccaggcacggtggctcacacctgtaatcccagcactttgggaggccaaggcgggcggatcagctgaggtcaggagttggagaccagcgtggccaacatggtgaaaccccgtctctactaaagataaaaaaattagctgagtgtgttggtgggtgcctgtaatccagctacttgggagactgaggcaggagaattgcttgaacccaggaggcagaggttgcagtgagctgagattgtgccactgcactccagcctgggcaacaaagcaagactctgtctcaaaaaaataaaaataaaaaaaaaatcttagttccatggaattttaagcattgttccccctctaacctgtgtctaaagaattaaaagaatttggccgggtgcggcagctcatgcctgtaatcccaacactttgggaggctgaggcaggcggatcacgaggtcaggagatcgagaccatcctggccaacacggtgaaacctcgtctccactaaaaataccaaaaaaattagctgggcatggtggcacacacctgtagtcccctgtagtcccagctactcgggaggctgaggcaggagaatcgtttgaacctgggaggtggaggttgcagtgagccaagatcatgtcactgcattccagcctgggcaacagaggaagactccgtctc

SEQ ID NO: 19835 - DNA, 1944 bp, Homo sapiens
gcacctgcttctgaggtcgatcttagaggatccccatttttacaagaacaatgacccaggactctttgtttattgctgtgatttttcttccacagctatagaactggtccagacaaattcagaatatgatccttctcggtgttttgcctttgttcacgacctgtgtgatgaagagaagagttacccagtgcccaagggcagtcttgatattatcattctcatatttgttctttcagcaattgttccagacaagatgcagaaggctatcaacaggctgagcaggcttctgaaacctggcgggatgatgcttctgcgagattacggccgctatgacatggctcagcttcggtttaaaaaaggtcagtgtctatctggaaatttctacgtgagaggtgatggaaccagagtttacttcttcacacaagaggaactggacacgcttttcaccactgctggactggaaaaagttcagaacctggtggatcgccgactgcaggtgaaccgaggaaagcaactgacaatgtaccgggtttggattcagtgcaaatactgcaagccccttctgtccagcaccagctgagaggcacctgctgccaacacgatgcaagcccattgtgtttccgggcttttttaaaaaaaaaattgtagcactgggcgtggtgcatgcctgtaatcccagccactcaggaggctgaggcggggaggatccattgagcccagcagtccaacctgggcaaaatagtgagagaccctgtatctgaaagtaataataaaaataaaaaatataaatgaggtctcgttgatgttggacaattcaagaattcagacttgaaccttaaacctaggaaaagttactttgtatcaggattctaacaattatgcttcatatttgtgaagtcctttaaaacataattttctcaagttctttctttgagatctcaatctgtcttagcattttgtaactaataactgaaattttattcaaaggaattgtaaaccttaaaccaccaatttatttccatgtgaaaaagtgttacatatgacaagtgttttttgactgtaattgcgttaaatcttttgagaatgtaaatgccgggctaggcaattgcagttaatacatacagaggttagtgaagggcttattaagttgtaggggaagcaagctgggaagaatcagatcagatattttcctgacaaaaaaaaatgaccctacagagagcatcaaaatgtggtgttcttgttaagtaattgatcgtggtcttcgctttaatcttagttccgccaggcacggtggctcacacctgtaatcccagcactttgggaggccaaggcgggcggatcagctgaggtcaggagttggagaccagcgtggccaacatggtgaaaccccgtctctactaaagataaaaaaattagctgagtgtgttggtgggtgcctgtaatccagctacttgggagactgaggcaggagaattgcttgaacccaggaggcagaggttgcagtgagctgagattgtgccactgcactccagcctgggcaacaaagcaagactctgtctcaaaaaaataaaaataaaaaaaaaatcttagttccatggaattttaagcattgttccccctctaacctgtgtctaaagaattaaaagaatttggccgggtgcggcagctcatgcctgtaatcccaacactttgggaggctgaggcaggcggatcacgaggtcaggagatcgagaccatcctggccaacacggtgaaacctcgtctccactaaaaataccaaaaaaattagctgggcatggtggcacacacctgtagtcccctgtagtcccagctactcgggaggctgaggcaggagaatcgtttgaacctgggaggtggaggttgcagtgagccaagatcatgtcactgcattccagcctgggcaacagaggaagactccgtctc

SEQ ID NO: 19836 - DNA, 1001 bp, Homo sapiens
tccgctctctacccccccctcctctctctcccccctcgccccttcatggccggctcctaccctgaaggtgcacctgcagtcctcgccgataagaggcagcagttcggaagccggttcctgagagatccggcgcgcgtcttccaccacaatgcctgggacaatgtggagtggtcggaagagcaagccgcggcggcggagagaaaagtccaggagaacagtatccagcgggtgtgccaggagaaacaagttgattatgagatcaatgcccacaaatactggaatgacttctacaaaatccacgaaaatgggtttttcaaggatagacattggctttttaccgaattccctgagctggcacctagccaaaatcaaaatcatttgaaggactggttcttggagaacaagagtgaagtacctgaatgtagaaacaatgaggatggacctggtttaataatggaagaacagcacaagtgttcttcgaagagccttgaacataaaacacagacacctcctgtggaggagaatgtaactcagaaaattagtgacctggaaatttgtgctgatgagtttcctggatcctcagccacctaccgaatactggaggttggctgtggtgtgggaaacacagtctttccaattttacaaacgaacaatgacccaggactctttgtttattgctgtgatttttcttccacagctatagaactggtccaggtgagtacaatgggaaattacctattggtaatttccactgattaaagggaaaaggttctcctaaaaatcaaggtctctggctgtgttcttatacagtctgtgttcttacggtctaaaagtaaaagatttactgataacgagcataccttgttttattgcagttcactttatcacactgtatagatgtcgtatctgttcatatattgaaagtttgtggcaacccctgtctctactaaaaatacaaaaaaattacctgggcaacatggggagattttgcctcaagaaaa

SEQ ID NO: 19837 - DNA, 1847 bp, Homo sapiens
tccgctctctacccccccctcctctctctcccccctcgccccttcatggccggctcctaccctgaaggtgcacctgcagtcctcgccgataagaggcagcagttcggaagccggttcctgagagatccggcgcgcgtcttccaccacaatgcctggatgcagaaggctatcaacaggctgagcaggcttctgaaacctggcgggatgatgcttctgcgagattacggccgctatgacatggctcagcttcggtttaaaaaaggtcagtgtctatctggaaatttctacgtgagaggtgatggaaccagagtttacttcttcacacaagaggaactggacacgcttttcaccactgctggactggaaaaagttcagaacctggtggatcgccgactgcaggtgaaccgaggaaagcaactgacaatgtaccgggtttggattcagtgcaaatactgcaagccccttctgtccagcaccagctgagaggcacctgctgccaacacgatgcaagcccattgtgtttccgggcttttttaaaaaaaaaattgtagcactgggcgtggtgcatgcctgtaatcccagccactcaggaggctgaggcggggaggatccattgagcccagcagtccaacctgggcaaaatagtgagagaccctgtatctgaaagtaataataaaaataaaaaatataaatgaggtctcgttgatgttggacaattcaagaattcagacttgaaccttaaacctaggaaaagttactttgtatcaggattctaacaattatgcttcatatttgtgaagtcctttaaaacataattttctcaagttctttctttgagatctcaatctgtcttagcattttgtaactaataactgaaattttattcaaaggaattgtaaaccttaaaccaccaatttatttccatgtgaaaaagtgttacatatgacaagtgttttttgactgtaattgcgttaaatcttttgagaatgtaaatgccgggctaggcaattgcagttaatacatacagaggttagtgaagggcttattaagttgtaggggaagcaagctgggaagaatcagatcagatattttcctgacaaaaaaaaatgaccctacagagagcatcaaaatgtggtgttcttgttaagtaattgatcgtggtcttcgctttaatcttagttccgccaggcacggtggctcacacctgtaatcccagcactttgggaggccaaggcgggcggatcagctgaggtcaggagttggagaccagcgtggccaacatggtgaaaccccgtctctactaaagataaaaaaattagctgagtgtgttggtgggtgcctgtaatccagctacttgggagactgaggcaggagaattgcttgaacccaggaggcagaggttgcagtgagctgagattgtgccactgcactccagcctgggcaacaaagcaagactctgtctcaaaaaaataaaaataaaaaaaaaatcttagttccatggaattttaagcattgttccccctctaacctgtgtctaaagaattaaaagaatttggccgggtgcggcagctcatgcctgtaatcccaacactttgggaggctgaggcaggcggatcacgaggtcaggagatcgagaccatcctggccaacacggtgaaacctcgtctccactaaaaataccaaaaaaattagctgggcatggtggcacacacctgtagtcccctgtagtcccagctactcgggaggctgaggcaggagaatcgtttgaacctgggaggtggaggttgcagtgagccaagatcatgtcactgcattccagcctgggcaacagaggaagactccgtctc

SEQ ID NO: 19838 - DNA, 662 bp, Homo sapiens
  misc_feature (643)..(643): n is a, c, g, or t
tccgctctctacccccccctcctctctctcccccctcgccccttcatggccggctcctaccctgaaggtgcacctgcagtcctcgccgataagaggcagcagttcggaagccggttcctgagagatccggcgcgcgtcttccaccacaatgcctgggacaatgtggagtggtcggaagagcaagccgcggcggcggagagaaaagtccaggagaacagtatccagcgggtgtgccaggagaaacaagttgattatgagatcaatgcccacaaatactggaatgacttctacaaaatccacgaaaatgggtttttcaaggatagacattggctttttaccgaattccctgagctggcacctagccaaaatcaaaatcatttgaaggactggttcttggagaacaagagtgaagtacctgaatgtagaaacaatgaggatggacctggtttaataatggaagaacagcacaagtgttcttcgaagagccttgaacataaaacacagacacctcctgtggaggagaatgtaactcagaaaattagtgacctggaaatttgtgctgatgagtttcctggatcctcagccacctaccgaatactggagttggctgtgtgtgggcgtcttccattttaccgaacatganccaggctcttgttttggcg

SEQ ID NO: 19839 - DNA, 2269 bp, Homo sapiens
atcgtatctgggacctcgaactctcagcatgagtcgatctaagaattggaaacgatcatgaaatgagtgacccacaggggaaaaaaacattcgtaaggagagaggcagcacatactttaaataagcacgcggtggctcatgcctttaatcccagcactttgggaggccacggtgggtggatcacctgaggtgaggagtttgagaccagcctggccaacatggtgaaaccctgactctactaaaaatacaaaaaattagctgggcatggtggtgggaacctgtaatcccagctacttgggaggctgaggcaggagaatcacttgaacctgggaggcagaggttgcagtgatccgaggtcacgccattgcacccagcctaggcaacaagagcgaaactccgtctcaaaataaataaataaataaaaagtttgtgctgttaatttaatggggttgggagagtgaacaagttgttttcatcaaacaattctagagttttggagtggggtgcttaggaacgtcatgttttctgacattgtgacttactcctgttgagctgctcttcccgaagcactgaggcaggagtgctctccacccaacaaactgacctcccagttaacattccttagcaatgcgagtcaaagaagtgcttttaagtgtctctgatttttaacacatcactctgcaggtcagtgtctatctggaaatttctacgtgagaggtgatggaaccagagtttacttcttcacacaagaggaactggacacgcttttcaccactgctggactggaaaaagttcagaacctggtggatcgccgactgcaggtgaaccgaggaaagcaactgacaatgtaccgggtttggattcagtgcaaatactgcaagccccttctgtccagcaccagctgagaggcacctgctgccaacacgatgcaagcccattgtgtttccgggcttttttaaaaaaaaaattgtagcactgggcgtggtgcatgcctgtaatcccagccactcaggaggctgaggcggggaggatccattgagcccagcagtccaacctgggcaaaatagtgagagaccctgtatctgaaagtaataataaaaataaaaaatataaatgaggtctcgttgatgttggacaattcaagaattcagacttgaaccttaaacctaggaaaagttactttgtatcaggattctaacaattatgcttcatatttgtgaagtcctttaaaacataattttctcaagttctttctttgagatctcaatctgtcttagcattttgtaactaataactgaaattttattcaaaggaattgtaaaccttaaaccaccaatttatttccatgtgaaaaagtgttacatatgacaagtgttttttgactgtaattgcgttaaatcttttgagaatgtaaatgccgggctaggcaattgcagttaatacatacagaggttagtgaagggcttattaagttgtaggggaagcaagctgggaagaatcagatcagatattttcctgacaaaaaaaaatgaccctacagagagcatcaaaatgtggtgttcttgttaagtaattgatcgtggtcttcgctttaatcttagttccgccaggcacggtggctcacacctgtaatcccagcactttgggaggccaaggcgggcggatcagctgaggtcaggagttggagaccagcgtggccaacatggtgaaaccccgtctctactaaagataaaaaaattagctgagtgtgttggtgggtgcctgtaatccagctacttgggagactgaggcaggagaattgcttgaacccaggaggcagaggttgcagtgagctgagattgtgccactgcactccagcctgggcaacaaagcaagactctgtctcaaaaaaataaaaataaaaaaaaaatcttagttccatggaattttaagcattgttccccctctaacctgtgtctaaagaattaaaagaatttggccgggtgcggcagctcatgcctgtaatcccaacactttgggaggctgaggcaggcggatcacgaggtcaggagatcgagaccatcctggccaacacggtgaaacctcgtctccactaaaaataccaaaaaaattagctgggcatggtggcacacacctgtagtcccctgtagtcccagctactcgggaggctgaggcaggagaatcgtttgaacctgggaggtggaggttgcagtgagccaagatcatgtcactgcattccagcctgggcaacagaggaagactccgtctc

SEQ ID NO: 19840 - DNA, 354 bp, Homo sapiens
cctacccagagattatgcttcccagactcacttgcagctaggtatggccatgtgaccaagatttgaccaatgggatgtgagtggaagtaacacatgcaacttccaggtcatttccttaaaaggaaactgtttgcccttcccctcctcgttctccttggacttggtcgtggtaatagcttcaaccatgtggaagagaacaattccatatgggatgatggagtactaagatattaggaaccagggtgctcaggtaactttacggagcagagccaccctgatcggcctgcctgcctacctctggacttgtatgtgcaagagaaataaatgtttatctttttgcgtctcttgttttac

SEQ ID NO: 19841 - DNA, 460 bp, Homo sapiens
ggagtcagaacagattattccaatgtttgaaagacaggtggttcctgtaagttttatgcaaggtgtttcctgaatgtgtgcatagccaagctgctcctggaactattctgtgtttaccttagattttgtgtttgccctatttgacatatattaagtacagggacaaactaaaggctaaagttgtttacatcatccttttaagccctctctcgtgggtgcacaaaactcatatcacagacttcccagtgacaaccatagaatgtctgtttttgctttatgcccaacaggggacatccccacctagatccatcccactgacttagcaataaaggcatagtctcaggtcctctctctgctttgtggtctctgcttgtgacagagtttcatgtggccccctgtggcatgccatgaccctcatttctggggagaattgtaacattaaactttcttttcaatggca

SEQ ID NO: 19842 - DNA, 948 bp, Homo sapiens
ggagtcagaacagattattccaatgtttgaaagacaggtggttcctgtaagttttatgcaaggtgtttcctgaatgtgtgcatagccaagctgctcctggaactattctgtgtttaccttagattttgtgtttgccctatttgacatatattaagtacagggacaaactaaaggctaaagttgtttacatcatccttttaagccctctctcgtgggtgcacaaaactcatatcacagacttcccagtgacaaccatagaatgtctgtttttgctttatgcccaacaggggacatccccacctagatccatcccactgacttagcaataaaggcatagtctcaggtcctctctctgctttgtggtctctgcttgtgacagagtttcatgtggccccctgtggcatgccatgaccctcatttctggggagaattgtaacattaaactttcttttcaatggcattgatctctccatgtcctctctgtcacctttataaattaagatttaaaacaagaatgcatgcatagctgcttgtcagggggctggagggtgagaatgggtagctgctgctgatcagagagctgaaattcgctgaaattaaacactatttaccatctaagccttccagtagacccttcaaaagattgaggtgtccaatcttttggcttccctgggccacattggaagaagaattgtcttgggccacacataaaataccctaacaatagctgagaatctgggtaggccaagatggctagagtggaaggctgagtaccagagagaatagagaaagaactccaggtatctgcagagggacctccttgagaaactactggaagatagggaaataaacatctgaaaagatttgaaggaacaatacctgactcattcaagaccaagaatagtgtctttctaccagctggactggaaaacctcataatttatgggg

SEQ ID NO: 19843 - DNA, 259 bp, Homo sapiens
taagccaggtggagcaggcagagcgatcagtaaaagcccaaggacatagaggctttcacagactgacaaagaatgtttacttttttcattcacctgaatagctactgcaaagaaagtgatgttacagccacatctctatcaagattacaaccttcttcaggagcacattacagcagagaattcctactatgtgccagaagttacagccaccatcttccatttgaatagtgaactcattttatctttggaaaaaaaaaag

SEQ ID NO: 19844 - DNA, 142 bp, Homo sapiens
aggcaccaagttcccaggctgcaaccagcaaggggattctgggcccagccacaaaaccactttttcctcttaaacctccaggcctgtgaatgtcggggggatgtgatgaagacctctgacatgccctgaagactccatctca

SEQ ID NO: 19845 - DNA, 256 bp, Homo sapiens
ctctagtagccactcttctgggggcttgtcccttaaatgattagtccttaccgacctattttctgtccactttatctgtttttgagagagggtctcactctgttgcctaggctggagtgcagtggcatgaatatgggtcactgcagcctccacctcctgggctcaagtgatcttcctgcctcagcctgccatgccatgtaactggggccacaggcatgtgccaccatgtccagctaatttcttgatttttttttgg

SEQ ID NO: 19846 - DNA, 422 bp, Homo sapiens
aatggataggctgtgcaccttattggctctagttcttcatgccgaggcgaggctcattaggagggcctggctcattctctagatccccttagatggaaacctaggaacaaacaggtggccaattagggccaggaagaatgcaagtcacaaattaagctgggtgtagtagctcatgcctgtaattccagaagccgaggcaggaggattacttgaggccaggaggttgagaccagcctgggcaacatagcaagaccccatctttacaaaaaaaaaattagccaggcatagtcatacacacctgtaatctcagctactcagaaggctgaggtgggagaatcatctgaacctaagagtttgagcctgcagtgagctatgatcatgccactgcactccagcctaggtgatacagcaagactctatct

SEQ ID NO: 19847 - DNA, 255 bp, Homo sapiens
attatttttgtagacattgggtctcactatgttgtccagactggtctcaaataaaactcgcacctcagactcctgagtatcagttttttaatacagtatttttcctatttcttcttggcctgatttctccctgtcctccatcttcaacacaaatctccataccaatcacatcacatcacgtcacgtcatgcaagcaaggtaacacttgcttgtgttgtcctaatgttcattcttccatgtttctcttcatttcat

SEQ ID NO: 19848 - DNA, 400 bp, Homo sapiens
gtaagaatagaagtaagaagaataattagggagctactgaagtcattcaagcaaaaactgatggtagcctggataagactgttcaaaagagaaggtgaaaagtcattagattcaggatatattctggatgttaaaccaaccagatttattggcagattggatgtaaagattgaggggaagaagagaatcatgaaaaacccctaggtttttggcctgaagagctgtggttctgtggttttggtagacagaatgatgctccccacacccccaagatgaccctgttctaatcccttggacctgtcaatatattactttgcatgaccaaaaggattttacaggtgtgattaagttaagagccttgagctggggagatttgagccaaggaatgcaagcagaatcc

SEQ ID NO: 19849 - DNA, 357 bp, Homo sapiens
gaaaacaaaccctgagttttaaacaaattgaaacttgtaaaaatgtagcccatgggtaaactgggcattttctgagaattttgtttcataaaatatgtatataagaacttagagtttcaatttctttaacttgtctgggtatgaagttcagcagtctccatctcttagaagtagaaaccaggcagggtgcagtggctcatgcctgtaatcccagcacttccagaggccgaagtgggaggatggcttgagtccaggagtccaagaccagtctgtgcaatatagtgaaaccccatctctacaaaaaaatatataaaaagtagccaggcatagtggcgtgtgcctatagtcctagctacc

SEQ ID NO: 19850 - DNA, 431 bp, Homo sapiens
cgtcagccaccacacctggcccctcatggcagttcgaacaatgatactattacaaccttgtggcctccccaccccggtactcagtttatagatggggaaactgaggcacaggaaagttaggcaaggtgcctattaaactcaaacagggccaggcgccggggctcatgcctgtaatcctaacactttgggaggccaaggcagaaggatcgcttgagcccaggagtttgagaacagcctgggcaatatggtgtaaccccgtctctacaaaatatacaaaaattagctgggtgtggtggcatgcgcctgtagttccagctactctggaggctgaggcgagaggatcgtttgagctggggaggttgaggccgcaatgagtcatattcttgccactgcactccagcctgggtgacaaagtgagaccctgtctcaaa

SEQ ID NO: 19851 - DNA, 416 bp, Homo sapiens
agacagagaagcgaggcagaggtctagaatctcagggcagaagggacttggggagaactggggtccatttctttcttcttccaataatagctatttttatttttaaaaaataagagaccatttgatcaagcatctattttatgtggggcatttttgtgcctgacagcaattctggctggtttttttgttggtttgtttgtttgttttgagacggaaattttgctcttgttgcccaggctgttgtgaaatggcatgatctcggctcactgcaacctccgtctcctgggttcaagcgattctctactctggaggctgaggcgagaggatcgtttgagctggggaggttgaggccgcaatgagtcatattcttgccactgcactccagcctgggtgacaaagtgagaccctgtctcaaa

SEQ ID NO: 19852 - DNA, 398 bp, Homo sapiens
ttttgcttgtttgctttttcttgagacggagtctcactctgtcgcccaggctggagtgcagtggtgcaatcttggctcactgcaagctccacctcccgggttcaagcgattctcttgcctcagccaaccaagtagctggaactacaggtgccggccaccacaccaggctaatttttgtatttttagtagagatggggtttcaccatattggccaggctggtctctaactcctgacctcgtgatcctcccgccttggcctcccaaagtgctgggattacaggagtgagccaccgcgcccaacctatcttgttataatactcaaaatcagacccaaaggtggagatttaacaggctaatgagacacgtggctcatgaactgcaccggtgtgaaaagttcc

SEQ ID NO: 19853 - DNA, 5240 bp, Homo sapiens
  misc_feature (2582)..(2582): n is a, c, g, or t
gacagacatggcgcttcagctgtcttcagaataatgtcacccggcctcctctcctgtcttctgcagtcttaaaagacctagtccctaactgaggtctggcttttcctcagccctggatgaagtggagaagacctatttggagactgcttcctgtcaccataaaatcctgaacatttgtcttgaacatgaacactccaaaagaagaattccaggactggcccatagtcagaatagcagctcatttaccagacctcattgtctatggacatttctccccagagcgaccctttatggattattttgacggagtcctgatgtttgttgatatttcaggttttactgcaatgactgagaagttcagcagtgccatgtacatggacagaggggctgagcagttggtggagatcctcaactaccacataagtgcaatagtggagaaagtgttgatttttggaggagacatcctgaaatttgcaggtgatgcactgctagccctgtggagggtggagcgaaagcagctgaaaaacattatcacagtggtaattaaatgtagcctggagatccatggattgtttgagacccaggagtgggaagaaggcctagacatccgagtcaagataggactggctgctggccacatcagcatgttggtctttggagatgaaacacacagccactttctggtgattggtcaggcagtggacgatgtgcgccttgcccagaacatggctcagatgaatgatgttattctgtcaccaaactgctggcagctctgtgaccggagcatgattgaaattgagagtgttccagatcagagagcagttaaggttaacttcttaaaaccaccccccaattttaattttgatgaatttttcacaaagtgtacgaccttcatgcattattatccttctggtgagcacaaaaacctcctgaggcttgcatgcacgctgaagcctgatcctgaactggagatgtccctacaaaagtatgtgatggaaagcattttgaagcagattgataacaaacagcttcagggctatttatctgagcttcgcccagtgacgattgtgtttgtgaacctgatgtttgaagaccaagacaaagcagaagagataggcccagccatccaggatgcctatatgcacatcacttctgtcctgaagatcttccaaggccaaatcaataaagtcttcatgtttgacaagggctgctctttcctctgtgtctttggcttccctggggaaaaggtacctgacgagctcactcatgctctggaatgtgctatggatatatttgacttctgctctcaagtccacaaaatccaaactgtatccatcggtgttgccagtgggattgtcttctgtgggatcgttggacacactgtgagacacgagtacacagtcattggtcaaaaagtcaacttagctgccaggatgatgatgtactacccaggaattgtgacctgcgactctgtcacctacaatgggagcaacctaccagcgtacttttttaaagagcttccaaagaaagttatgaaaggtgttgcagattctggaccattgtatcagtattggggccgtactgagaaagtcatgtttggtatggcgtgcctcatctgcaacagaaaggaggattaccctttgctgggacgtaataaagagatcaactacttcatgtatactatgaagaaatttttgatatctaacagcagccaagtcttaatgtatgagggattaccaggatatggaaaaagccagatacttatgaaaattgagtacctggcccaaggtaagaatcacaggattattgccatttcattgaataagatcagcttccatcaaactttctataccatccagatgttcatggccaatgtcctaggcctagacacttgtaaacattataaagaacgacagaccaaccttcgaaataaagtcatgacactgttggatgaaaagttctactgtcttcttaatgacattttccatgttcagttccctatttctcgggagatttccaggatgagcaccttgaaaaagcaaaaacaattggaaatattgtttatgaagatcttgaagctgatagtgaaagaggaaaggattatttttatcattgatgaggcccagtttgtggattcgacctcctggagatttatggagaagcttatccggactcttcctatcttcatcattatgtccctgtgtcccttcgttaacattccctgtgcagctgccagggccgtaataaagaacaggaacaccacctacattgtcgttggtgcagtacagcctaacgacatctccaacaagatctgtcttgacctcaatgtgagctgcatctccaaagaactggactcgtacctgggggagggaagctgtgggattccattttactgtgaagaattgcttaaaaacctggaacatcatgaggtactcgttttccaacaaacggagtctgaggaaaagacaaataggacctggaataacctgttcaagtattccattaagctaacagagaagttaaacatggttactctccatagtgataaggaaagtgaagaagtctgtcacctcacaagtggngtcagactgaaaaacctgtcacctccaacgtcattaaaagaaatctctctgatccagctggatagcatgagactttcccaccaaatgctggtgagatgtgctgccatcattggcctgaccttcaccactgagttgttgtttgagattctcccctgttggaatatgaagatgatgatcaagaccctggcaaccctagtggaatctaacattttttattgtttccggaatggcaaggagcttcaaaaggccctgaaacagaatgatccctcatttgaggtgcactatcgttccttgtctctgaagcccagtgaagggatggatcacggtgaagaggaacagcttcgtgaactggagaatgaggtgatcgagtgccacaggattcgattctgtaaccctatgatgcagaaaacagcctacgagctgtggctcaaggaccagagaaaagccatgcacttgaaatgtgcccgctttttagaagaagatgcccacagatgtgaccactgccgaggcagggacttcattccctatcatcacttcacagtgaatattcggctcaacgctttagacatggatgccattaaaaagatggctatgtctcatggatttaaaactgaagaaaagcttatcttgtccaactcagagattcctgagacatctgcattttttcctgaaaatcgcagtcctgaagaaataagagaaaagatcttgaatttctttgaccacgttttaacaaaaatgaagacatctgacgaagacattatccctctggaatcttgccagtgtgaagaaatcctagagattgtcatcttgcctctggcccaccattttctggctttgggagaaaatgacaaagccttatattacttcttagaaattgcatctgcttatctcatcttttgtgataactacatggcatacatgtatttgaatgaaggacagaagttgctaaaaactctcaagaaggacaaatcttggagccagacatttgagtctgccaccttttacagcctcaaaggtgaggtctgtttcaatatgggccagatagtgcttgccaagaaaatgctgaggaaggcactgaagctcctcaaccgaatctttccttacaacttaatctccttgtttctccatatccatgtcgagaaaaacagacactttcattatgtgaatcggcaggcccaagagagcccacctccagggaagaagaggctggcacaactttaccggcaaactgtctgcctttccttgctgtggcgcatctatagctacagttatctttttcactgcaagtattatgcccacctggcagttatgatgcaaatgaatactgcactggaaactcaaaattgtttccagatcattaaggcttacctagactattcgctataccaccacctggctggctacaaaggtgtgtggttcaaatatgaagtcatggccatggagcacatcttcaacctccccctgaaaggcgagggcattgaaatcgtggcatacgtggctgagacactggtcttcaacaagctcataatgggacacctggatttggccattgagttaggctcccgagcccttcagatgtgggcactgctccagaatcccaaccgacattatcagtccctctgcagacttagcagatgtctccttctgaacagcagatacccgcaattgatccaggtgctggggcggctgtgggagctttctgtaacacaggaacacatcttcagcaaggcatttttctattttgtctgcttggacatcctgctttattctggttttgtttatagaacatttgaagaatgtttggaattcatacaccaatacgaaaacaacagaatcctcaagttccacagtggactcctcctgggactttattcctctgtagctatctggtatgccagacttcaggaatgggacaacttttacaaattttccaatagagctaaaaatcttttgccaagaagaaccatgacacttacttactatgacggaatatctaggtacatggaggggcaagttcttcaccttcaaaaacaaatcaaagaacagtcagagaatgcccaagccagtggggaggagctactcaagaacttggagaatctggtggctcaaaataccactggccctgtcttttgcccaaggctctaccacctgatggcttacgtctgtatattaatgggagatgggcagaaatgtggcctcttcctgaacacagccttgcggctctctgaaacacaggggaatatactggagaaatgctggctgaacatgaacaaagaatcatggtactcaacctctgagttaaaagaagaccaatggcttcagacgatcttgagtctcccatcatgggaaaaaattgtagcaggcagggtaaacattcaggatcttcaaaaaaacaaattcctgatgagagctaataccgtggacaatcatttctaacatgtcaaagaaaaaagattttaataagcactatgtccttgtgattatctattattgacctttctccgtggctggcccactccaggttcctacataatctcttctgttccagacacagaaacagacatgttgatttcttctctttctggagggcctacaagggtcaggagtgtcatggtttacttcttcctaatgttacaaaaaattgcttttaccattcat

SEQ ID NO: 19854 - DNA, 5236 bp, Homo sapiens
  misc_feature (2582)..(2582): n is a, c, g, or t
gacagacatggcgcttcagctgtcttcagaataatgtcacccggcctcctctcctgtcttctgcagtcttaaaagacctagtccctaactgaggtctggcttttcctcagccctggatgaagtggagaagacctatttggagactgcttcctgtcaccataaaatcctgaacatttgtcttgaacatgaacactccaaaagaagaattccaggactggcccatagtcagaatagcagctcatttaccagacctcattgtctatggacatttctccccagagcgaccctttatggattattttgacggagtcctgatgtttgttgatatttcaggttttactgcaatgactgagaagttcagcagtgccatgtacatggacagaggggctgagcagttggtggagatcctcaactaccacataagtgcaatagtggagaaagtgttgatttttggaggagacatcctgaaatttgcaggtgatgcactgctagccctgtggagggtggagcgaaagcagctgaaaaacattatcacagtggtaattaaatgtagcctggagatccatggattgtttgagacccaggagtgggaagaaggcctagacatccgagtcaagataggactggctgctggccacatcagcatgttggtctttggagatgaaacacacagccactttctggtgattggtcaggcagtggacgatgtgcgccttgcccagaacatggctcagatgaatgatgttattctgtcaccaaactgctggcagctctgtgaccggagcatgattgaaattgagagtgttccagatcagagagcagttaaggttaacttcttaaaaccaccccccaattttaattttgatgaatttttcacaaagtgtacgaccttcatgcattattatccttctggtgagcacaaaaacctcctgaggcttgcatgcacgctgaagcctgatcctgaactggagatgtccctacaaaagtatgtgatggaaagcattttgaagcagattgataacaaacagcttcagggctatttatctgagcttcgcccagtgacgattgtgtttgtgaacctgatgtttgaagaccaagacaaagcagaagagataggcccagccatccaggatgcctatatgcacatcacttctgtcctgaagatcttccaaggccaaatcaataaagtcttcatgtttgacaagggctgctctttcctctgtgtctttggcttccctggggaaaaggtacctgacgagctcactcatgctctggaatgtgctatggatatatttgacttctgctctcaagtccacaaaatccaaactgtatccatcggtgttgccagtgggattgtcttctgtgggatcgttggacacactgtgagacacgagtacacagtcattggtcaaaaagtcaacttagctgccaggatgatgatgtactacccaggaattgtgacctgcgactctgtcacctacaatgggagcaacctaccagcgtacttttttaaagagcttccaaagaaagttatgaaaggtgttgcagattctggaccattgtatcagtattggggccgtactgagaaagtcatgtttggtatggcgtgcctcatctgcaacagaaaggaggattaccctttgctgggacgtaataaagagatcaactacttcatgtatactatgaagaaatttttgatatctaacagcagccaagtcttaatgtatgagggattaccaggatatggaaaaagccagatacttatgaaaattgagtacctggcccaaggtaagaatcacaggattattgccatttcattgaataagatcagcttccatcaaactttctataccatccagatgttcatggccaatgtcctaggcctagacacttgtaaacattataaagaacgacagaccaaccttcgaaataaagtcatgacactgttggatgaaaagttctactgtcttcttaatgacattttccatgttcagttccctatttctcgggagatttccaggatgagcaccttgaaaaagcaaaaacaattggaaatattgtttatgaagatcttgaagctgatagtgaaagaggaaaggattatttttatcattgatgaggcccagtttgtggattcgacctcctggagatttatggagaagcttatccggactcttcctatcttcatcattatgtccctgtgtcccttcgttaacattccctgtgcagctgccagggccgtaataaagaacaggaacaccacctacattgtcgttggtgcagtacagcctaacgacatctccaacaagatctgtcttgacctcaatgtgagctgcatctccaaagaactggactcgtacctgggggagggaagctgtgggattccattttactgtgaagaattgcttaaaaacctggaacatcatgaggtactcgttttccaacaaacggagtctgaggaaaagacaaataggacctggaataacctgttcaagtattccattaagctaacagagaagttaaacatggttactctccatagtgataaggaaagtgaagaagtctgtcacctcacaagtggngtcagactgaaaaacctgtcacctccaacgtcattaaaagaaatctctctgatccagctggatagcatgagactttcccaccaaatgctggtgagatgtgctgccatcattggcctgaccttcaccactgagttgttgtttgagattctcccctgttggaatatgaagatgatgatcaagaccctggcaaccctagtggaatctaacattttttattgtttccggaatggcaaggagcttcaaaaggccctgaaacagaatgatccctcatttgaggtgcactatcgttccttgtctctgaagcccagtgaagggatggatcacggtgaagaggaacagcttcgtgaactggagaatgaggtgatcgagtgccacaggattcgattctgtaaccctatgatgcagaaaacagcctacgagctgtggctcaaggaccagagaaaagccatgcacttgaaatgtgcccgctttttagaagaagatgcccacagatgtgaccactgccgaggcagggacttcattccctatcatcacttcacagtgaatattcggctcaacgctttagacatggatgccattaaaaagatggctatgtctcatggatttaaaagatgcatgagactgggagatactgcctcaccttattatattcttcaagtctgatcttaccttggtgtgcacacgtgctaagatttgcctaatgatgttgggaggtgaagctgaagtgatgagagttgtgcagggacttacttcctcatccacctcccaaaatgaccctggcaaaggaagtgggggtgattcataattcatttaaaaactgaagaccaacttctcacagatgtggggatgctgttcaaggcatacatgtatttgaatgaaggacagaagttgctaaaaactctcaagaaggacaaatcttggagccagacatttgagtctgccaccttttacagcctcaaaggtgaggtctgtttcaatatgggccagatagtgcttgccaagaaaatgctgaggaaggcactgaagctcctcaaccgaatctttccttacaacttaatctccttgtttctccatatccatgtcgagaaaaacagacactttcattatgtgaatcggcaggcccaagagagcccacctccagggaagaagaggctggcacaactttaccggcaaactgtctgcctttccttgctgtggcgcatctatagctacagttatctttttcactgcaagtattatgcccacctggcagttatgatgcaaatgaatactgcactggaaactcaaaattgtttccagatcattaaggcttacctagactattcgctataccaccacctggctggctacaaaggtgtgtggttcaaatatgaagtcatggccatggagcacatcttcaacctccccctgaaaggcgagggcattgaaatcgtggcatacgtggctgagacactggtcttcaacaagctcataatgggacacctggatttggccattgagttaggctcccgagcccttcagatgtgggcactgctccagaatcccaaccgacattatcagtccctctgcagacttagcagatgtctccttctgaacagcagatacccgcaattgatccaggtgctggggcggctgtgggagctttctgtaacacaggaacacatcttcagcaaggcatttttctattttgtctgcttggacatcctgctttattctggttttgtttatagaacatttgaagaatgtttggaattcatacaccaatacgaaaacaacagaatcctcaagttccacagtggactcctcctgggactttattcctctgtagctatctgggagtgtgaagcaggggtaggcaggagactacacacttccagagacccaggtatgccagacttcaggaatgggacaacttttacaaattttccaatagagctaaaaatcttttgccaagaagaaccatgacacttacttactatgacggaatatctaggtacatggaggggcaagttcttcaccttcaaaaacaaatcaaagaacagtcagagaatgcccaagccagtggggaggagctactcaagaacttggagaatctggtggctcaaaataccactggccctgtcttttgcccaaggctctaccacctgatggcttacgtctgtatattaatgggagatgggcagaaatgtggcctcttcctgaacacagccttgcggctctctgaaacacaggggaatatactggagaaatgctggctgaacatgaacaaagaatcatggtactcaacctctgagttaaaagaagaccaatggcttcagacgatcttgagtctcccatcatgggaaaaaattgtagcaggcagggtaaacattcaggatcttcaaaaaaacaaattcctgatgagagctaataccgtggacaatcatttctaacatgtcaaagaaaaaagattttaataagcactatgtccttgtgattatctattattgacctttctccgtggctggcccactccaggttcctacataatctcttctgttccagacacagaaacagacatgttgatttcttctctttctggagggcctacaagggtcaggagtgtcatggtttacttcttcctaatgttacaaaaaattgcttttaccattcat

SEQ ID NO: 19855 - DNA, 1862 bp, Homo sapiens
ctggcctaaagatattttaatatcaaaagtgatactgtataagttactattatttatttctgcatatggacagtcctgaagaaataagagaaaagatcttgaatttctttgaccacgttttaacaaaaatgaagacatctgacgaagacattatccctctggaatcttgccagtgtgaagaaatcctagagattgtcatcttgcctctggcccaccattttctggctttgggagaaaatgacaaagccttatattacttcttagaaattgcatctgcttatctcatcttttgtgataactacatggcatacatgtatttgaatgaaggacagaagttgctaaaaactctcaagaaggacaaatcttggagccagacatttgagtctgccaccttttacagcctcaaaggtgaggtctgtttcaatatgggccagatagtgcttgccaagaaaatgctgaggaaggcactgaagctcctcaaccgaatctttccttacaacttaatctccttgtttctccatatccatgtcgagaaaaacagacactttcattatgtgaatcggcaggcccaagagagcccacctccagggaagaagaggctggcacaactttaccggcaaactgtctgcctttccttgctgtggcgcatctatagctacagttatctttttcactgcaagtattatgcccacctggcagttatgatgcaaatgaatactgcactggaaactcaaaattgtttccagatcattaaggcttacctagactattcgctataccaccacctggctggctacaaaggtgtgtggttcaaatatgaagtcatggccatggagcacatcttcaacctccccctgaaaggcgagggcattgaaatcgtggcatacgtggctgagacactggtcttcaacaagctcataatgggacacctggatttggccattgagttaggctcccgagcccttcagatgtgggcactgctccagaatcccaaccgacattatcagtccctctgcagacttagcagatgtctccttctgaacagcagatacccgcaattgatccaggtgctggggcggctgtgggagctttctgtaacacaggaacacatcttcagcaaggcatttttctattttgtctgcttggacatcctgctttattctggttttgtttatagaacatttgaagaatgtttggaattcatacaccaatacgaaaacaacagaatcctcaagttccacagtggactcctcctgggactttattcctctgtagctatctggtatgccagacttcaggaatgggacaacttttacaaattttccaatagagctaaaaatcttttgccaagaagaaccatgacacttacttactatgacggaatatctaggtacatggaggggcaagttcttcaccttcaaaaacaaatcaaagaacagtcagagaatgcccaagccagtggggaggagctactcaaggaatcatggtactcaacctctgagttaaaagaagaccaatggcttcagacgatcttgagtctcccatcatgggaaaaaattgtagcaggcagggtaaacattcaggatcttcaaaaaaacaaattcctgatgagagctaataccgtggacaatcatttctaacatgtcaaagaaaaaagattttaataagcactatgtccttgtgattatctattattgacctttctccgtggctggcccactccaggttcctacataatctcttctgttccagacacagaaacagacatgttgatttcttctctttctggagggcctacaagggtcaggagtgtcatggtttacttcttcctaatgttacaaaaaattgcttttaccattcat

SEQ ID NO: 19856 - DNA, 429 bp, Homo sapiens
atggattattttgacggagtcctgatgtttgttgatatttcaggcaagtgcaaaagggatgtttgtttaatgtggatgagcaacaggctcgcgtgggaattcacatgcagagcttgattgcagagtagggaggccattctggagcccttgggctgtcacagcagatgtgctccactgagaacacaagagggaggaaatagcttgtggccctggctctctctcatcctcccttactcaggactgccagtcataggcatatctttaacatgctcaagtcccattctttgctccagtatctctgccccaacttcactgactcatcctctccagccccaagccccatacacatcccagtcaaaattgacctcaggaaatgatctccctagatgatgtttacatcttactaataaacttgccacctcttcagaa

SEQ ID NO: 19857 - DNA, 132 bp, Homo sapiens
aagtgttgatttttggaggagacatcctgaaatttgcaggtatgggggcttactaagatagaaggggtaagaaaggagtgctgaggtgcctgtgcttctgtgttggggacaaaggaggcatcctagagaagg

SEQ ID NO: 19858 - DNA, 580 bp, Homo sapiens
ctgtcctgatgatagctgcgttcctccaacccatacgagatgttcagcgggaaagtgaaggagagaagaaatcagtacctttctggtccactttactgtcgactttcaagctatatagagataaacgtctgtgcctcttaattctgctgccgctgtacagtggattgcagcaaggattcctctccagcgaatacacaaggtcctatgtcacctgcaccctgggcatccagttcgtcggctacgtgatgatctgcttctcggccactgacgcgctgtgctccgtgttgtatggaaaggtctcgcagtacacgggcagggctgtgctgtacgtgctgggcgcggtgacccacgtgtcctgcatgattgccctactgctgtggagacctcgtgctgaccatctggcagtgttcttcgtattctctggcctgtggggcgtggcagatgccgtctggcagacacaaaacaatgctctctacggcgttctgtttgagaagagcaaggaagctgccttcgccaattaccgcctgtgggaggccctgggcttcgtcattgccttcgggtacagcatgtttttgtgcgt

SEQ ID NO: 19859 - DNA, 667 bp, Homo sapiens
tttttaaggaaagatgattaagacctagcctcaggacacagacaaaactaagggcacgttaaagtctctaaaggaattaagacacccccacctcgccctaccctaaccctagtaaatccttttagttgagcaaaattgctacaggaaaagtgattagtgacatggtctcacagaaacctgataagctcaaagtggcctgtaattaaatccagaaggagagatatgtctggtaaatagttacctcaaaagaggtgtaggtgtggctactggcccagggagtaactaaaatcaaatggaaataaaaattgatcattgtttagcatgaatgatatccccaaaagagacaccagcctggtctaaaagagactgtgaccacaggggacctaaaacaacttttggcaccccaaattgctataagcaggaagtagcctgagaaagctaccaagtccccaatgaagatacattctctaatactttttcaggtgtgtccgaacaggatgatcaaaaaggaaaaatctcccagagggagaagtcaaaagtcagagagaggccaggcgcggtggctcacacctgtaatcccagcaccttgggaggccaaggcgggtggatcacgaggtcaggagttcgagaccagcctggccaacatagtgaaaccccgtctctacta

SEQ ID NO: 19860 - DNA, 252 bp, Homo sapiens
ttttcccctaattttatattccctgatgctaactatttgatactgagcagagaatagtatttagttgcagctgtagtactttcgaatgttgtgtcatctttctctgacacccagactaacaagtaagttctttaacagcattactcagcattatccagttttgacttgtgttcacctgtgttcatgttaacagcatcagtgttttcacaggcaatttttttaaacctaaattatagttaaaatcagttttac

SEQ ID NO: 19861 - DNA, 796 bp, Homo sapiens
atctgtcatttgacaattgacctctttgtgggatggactcattaagtatgctctcagagactggtatattaccagaatgcctattaattttcagtgagaggcaacaggtattaagtagaacagaatgctcaggttggcagattagaacgatctttcaggagacaaagcaagttttaatcagttgtttggttaataagtatggggtgttcgctgtgatagggccccgccagcttctggctcttgtggacctcaaaagtatcaggtggttttgcaagtggtggtcctttcccctgccccaccccaataggttccccatctgtctagtttgatttttgtagacctttgttttctctagttagaaaatcaggtacactgaatatggttttcatgtaacacctcttctctggagataggggtatgttttcctacccttctagtggagaatcctacttgaggatgacctttcctctcttactaaataatattagtaaatagtgggcaatatattctgctttcagattttgatttgttgagatgtaaaagttgtttggggcttaccaaatctcaagactctctttagctcctgcaggattgtattgcttttcttactggatatttttcctgggtaagcatctttgtggcttcatctcttccccctgtggttttcagtgtatttagtcgagacctctctgctgagcttgcaacctgtttattcacatggcctgccatgccacttggaggtttctgattactcccaaacctgctggttctttatgtctttctcagcgaataattc

SEQ ID NO: 19862 - DNA, 508 bp, Homo sapiens
cagacctaggagaacaatattttcccttctgtcgttttgataattacatcctctgtgctcagtggtggcctattaactcacatgaataccatgggcttgcaaaatggcctcaaatttccatatattggaactgtgagaactttctataatggtgctttagcaataatgatggaggtgcaggcatttcctgaggattaatgaccagctgggaggaaccagtggcccttggctctgcctcccagccagccattaattctaaggaaatgtcttttgctgaggtcgttactgctattataagcttaaaatggaaaaacataataggcatatgagttatttttatgggttgatgcagtttccaatggtgtgtactaatttgagaaaatgaatgtgtatacatacaagagtaagtcagattgttagactcatccctcagtattccatatgttttgtgactgattttacagttctctctacctttctcatttacaaaaaaaaaaaagaaaagaaa

SEQ ID NO: 19863 - DNA, 2411 bp, Homo sapiens
caaagtgctgggattacaggcgtgagccgccatgcccggccaattttcaactggcccatactttatagtgatggaaagcgcataaactacttgtaaatcattaaaatagggtgataactgtgataatagtgtttcttgcattctagaaaattattttattaactacattcaaaacccagcatttcacaggttccatcattagaaacagtatagttctagttaacatgattggagagtttcaggggaaaggtttacattttctgaaactgtatttggtatgtgactcaatgtggtatttcagtcttgttagtcacttacatgactgacgtttgcaaggatttattgccaagtaaaatttgaccagagtgcactgagaatagctacataaggggaaatctctcaaaattccttctgttcatttaatttggagcatattgtttaaatcattttaaacatatgtaaaaagttgaagcattaaaaaatcttcaagaaacaatgaaaaaatagaaattagcaaacataagtttcttaatgcaaaattaatagtgaataaaatatagcctacattaaaagccagaggctttgctataaatataagagtttagaaaaacagtgtgcttcaattaaggactaaattatcaaaactgcatgtttgttttttcttttcttttcttttttttttgagatgaagtctcactctgttgcccaggctggagtgcagtggtgcgatcttggctcactgcaacctctgcttcccaggttcaagcgattctcgtgcctcaccatcccgagtagctgggattacaggtgcaccacaccatgcccagttaatttttgtatttttagtagagacagggtttcattatttggccaggctggtctcgagctcctgatcttaagtgatccactcgcctcggcctcccaaagtgctgggattatacacatgagccactgtgcccagcctaaaactacatgttgaagcttccggtcatttccattattatccttcttttgaaattcaagttagtgctttttaaccaaataaaagaagaaccagctcttgggatatgtgactctgcctctgtataaagtgactggaattttgttaaaaccgtgtttccacttctgaaccctgttaccattccccctcacaaatccccacccaacacctggattttaaagatcctccagtgtcaagggaagccacagagtctattaaagaggcagttctgaaccaattaatttttgtccttataatttagagcattaaatagctaatatatttaatggcactaattgttgttcacggctttcatcatacttttaaacagaatccaaagtattcaaaggaaagtaagcgaagttatccaaagccaactttgtttcaggtgtgtcccctgccccaaatagattttagggcagaaatagaaaactgagtttacacagaactatttttggaaaagctgcactggagtagatggattcttcttcagcatacttttttgtttgtttgtttgagatggagtcttgctttgtcacccaggctggagtgcagtggtgtgatctccactcactgcaacctccacctcccagcttcaagtgattctcctgcctcaaccttccaagtagcttggattacaggcgtgcgccaccacagctggctaatatttgtattgttagtagagacagggtttcaccatgttgtccaggcttgtcgaacttctgacctcacgtgatccacctgcctcagcctcccaaagtgctagattataggcgtgaaccactgcgcccggccagcatgcattttaaaagtggcttagatttagttttaaatattttggggtgaaaggcaggaacagttctgtttttgacatacaggttttctttgggattgttttcattttcaagtatagattcatgtcagaatggccaacttaacgtgggtttctgtattccctggtgttgctcttaacctgaactcataatcagttgccatactgaggcaagagcactcagggtgaacatagtcaagttactttaaaagtgataaaagtgtttttccatggtgaaaccttcagtatttggctgaatgtaaagtatgttgaagtggtatattgatggtaagttgttaatcactaaccttgtttgcacttttgtacaccactgcttgcactaggatcttggtgtgaattttcaattgttttacagtgtatacagattattaaggataatttatataaagatgtttctgtttaactttgtgtgttttacaacaaagagctataatagatggttaaacgtttttgaattgtgtttatatgttagtttgattatgttctattatcttttcacctgccatgaatttgagtgttaggaagggaaaaataaaatactaatctggtcttgaagaa

SEQ ID NO: 19864 - DNA, 2436 bp, Homo sapiens
caaagtgctgggattacaggcgtgagccgccatgcccggccaattttcaactggcccatactttatagtgatggaaagcgcataaactacttgtaaatcattaaaatagggtgataactgtgataatagtgtttcttgcattctagaaaattattttattaactacattcaaaacccagcatttcacaggttccatcattagaaacagtatagttctagttaacatgattggagagtttcaggggaaaggtttacattttctgaaactgtatttggtatgtgactcaatgtggtatttcagtcttgttagtcacttacatgactgacgtttgcaaggatttattgccaagtaaaatttgaccagagtgcactgagaatagctacataaggggaaatctctcaaaattccttctgttcatttaatttggagcatattgtttaaatcattttaaacatatgtaaaaagttgaagcattaaaaaatcttcaagaaacaatgaaaaaatagaaattagcaaacataagtttcttaatgcaaaattaatagtgaataaaatatagcctacattaaaagccagaggctttgctataaatataagagtttagaaaaacagtgtgcttcaattaaggactaaattatcaaaactgcatgtttgttttttcttttcttttcttttttttttgagatgaagtctcactctgttgcccaggctggagtgcagtggtgcgatcttggctcactgcaacctctgcttcccaggttcaagcgattctcgtgcctcaccatcccgagtagctgggattacaggtgcaccacaccatgcccagttaatttttgtatttttagtagagacagggtttcattatttggccaggctggtctcgagctcctgatcttaagtgatccactcgcctcggcctcccaaagtgctgggattatacacatgagccactgtgcccagcctaaaactacatgttgaagcttccggtcatttccattattatccttcttttgaaattcaagttagtgctttttaaccaaataaaagaagaaccagctcttgggatatgtgactctgcctctgtataaagtgactggaattttgttaaaaccgtgtttccacttctgaaccctgttaccattccccctcacaaatccccacccaacacctggattttaaagatcctccagtgtcaagggaagccacagagtctattaaagaggcagttctgaaccaattaatttttgtccttataatttagagcattaaatagctaatatatttaatggcactaattgttgttcacggctttcatcatacttttaaacagaatccaaagtattcaaaggaaagtaagcgaagttatccaaagccaactttgtttcaggtgtgtcccctgccccaaatagattttagggcagaaatagaaaactgagtttacacagaactatttttggaaaagctgcactggagtagatggattcttcttcagcatacttttttgtttgtttgtttgagatggagtcttgctttgtcacccaggctggagtgcagtggtgtgatctccactcactgcaacctccacctcccagcttcaagtgattctcctgcctcaaccttccaagtagcttggattacaggcgtgcgccaccacagctggctaatatttgtattgttagtagagacagggtttcaccatgttgtccaggcttgtcgaacttctgacctcacgtgatccacctgcctcagcctcccaaagtgctagattataggcgtgaaccactgcgcccggccagcatgcattttaaaagtggcttagatttagttttaaatattttggggtgaaaggcaggaacagttctgtttttgacatacaggttttctttgggattgttttcattttcaagtatagattcatgtcagaatggccaacttaacgtgggtttctgtattccctggtgttgctcttaacctgaactcataatcagttgccatactgaggcaagagcactcagggtgaacatagtcaagttactttaaaagtgataaaagtgtttttccatggtgaaaccttcagtatttggctgaatgtaaagtatgttgaagtggtatattgatggtaagttgttaatcactaaccttgtttgcacttttgtacaccactgcttgcactaggatcttggtgtgaattttcaattgttttacagtgtatacagattattaaggataatttatataaagatgtttctgtttaactttgtgtgttttacaacaaagagctataatagatggttaaacgtttttgaattgtgtttatatgttagtttgattatgttctattatcttttcacctgccatgaatttgagtgttaggaagggaaaaataaaatactaatctggtcttgaagaaaaaacaacacaacgacacaaaaaca

SEQ ID NO: 19865 - DNA, 2398 bp, Homo sapiens
caaagtgctgggattacaggcgtgagccgccatgcccggccaattttcaactggcccatactttatagtgatggaaagcgcataaactacttgtaaatcattaaaatagggtgataactgtgataatagtgtttcttgcattctagaaaattattttattaactacattcaaaacccagcatttcacaggttccatcattagaaacagtatagttctagttaacatgattggagagtttcaggggaaaggtttacattttctgaaactgtatttggtatgtgactcaatgtggtatttcagtcttgttagtcacttacatgactgacgtttgcaaggatttattgccaagtaaaatttgaccagagtgcactgagaatagctacataaggggaaatctctcaaaattccttctgttcatttaatttggagcatattgtttaaatcattttaaacatatgtaaaaagttgaagcattaaaaaatcttcaagaaacaatgaaaaaatagaaattagcaaacataagtttcttaatgcaaaattaatagtgaataaaatatagcctacattaaaagccagaggctttgctataaatataagagtttagaaaaacagtgtgcttcaattaaggactaaattatcaaaactgcatgtttgttttttcttttcttttcttttttttttgagatgaagtctcactctgttgcccaggctggagtgcagtggtgcgatcttggctcactgcaacctctgcttcccaggttcaagcgattctcgtgcctcaccatcccgagtagctgggattacaggtgcaccacaccatgcccagttaatttttgtatttttagtagagacagggtttcattatttggccaggctggtctcgagctcctgatcttaagtgatccactcgcctcggcctcccaaagtgctgggattatacacatgagccactgtgcccagcctaaaactacatgttgaagcttccggtcatttccattattatccttcttttgaaattcaagttagtgctttttaaccaaataaaagaagaaccagctcttgggatatgtgactctgcctctgtataaagtgactggaattttgttaaaaccgtgtttccacttctgaaccctgttaccattccccctcacaaatccccacccaacacctggattttaaagatcctccagtgtcaagggaagccacagagtctattaaagaggcagttctgaaccaattaatttttgtccttataatttagagcattaaatagctaatatatttaatggcactaattgttgttcacggctttcatcatacttttaaacagaatccaaagtattcaaaggaaagtaagcgaagttatccaaagccaactttgtttcaggtgtgtcccctgccccaaatagattttagggcagaaatagaaaactgagtttacacagaactatttttggaaaagctgcactggagtagatggattcttcttcagcatacttttttgtttgtttgtttgagatggagtcttgctttgtcacccaggctggagtgcagtggtgtgatctccactcactgcaacctccacctcccagcttcaagtgattctcctgcctcaaccttccaagtagcttggattacaggcgtgcgccaccacagctggctaatatttgtattgttagtagagacagggtttcaccatgttgtccaggcttgtcgaacttctgacctcacgtgatccacctgcctcagcctcccaaagtgctagattataggcgtgaaccactgcgcccggccagcatgcattttaaaagtggcttagatttagttttaaatattttggggtgaaaggcaggaacagttctgtttttgacatacaggttttctttgggattgttttcattttcaagtatagattcatgtcagaatggccaacttaacgtgggtttctgtattccctggtgttgctcttaacctgaactcataatcagttgccatactgaggcaagagcactcagggtgaacatagtcaagttactttaaaagtgataaaagtgtttttccatggtgaaaccttcagtatttggctgaatgtaaagtatgttgaagtggtatattgatggtaagttgttaatcactaaccttgtttgcacttttgtacaccactgcttgcactaggatcttggtgtgaattttcaattgttttacagtgtatacagattattaaggataatttatataaagatgtttctgtttaactttgtgtgttttacaacaaagagctataatagatggttaaacgtttttgaattgtgtttatatgttagtttgattagtattttatttttcccttcctaacactcaaattcatggcaggtgaaaagataatagaacataatc

SEQ ID NO: 19866 - DNA, 2358 bp, Homo sapiens
caaagtgctgggattacaggcgtgagccgccatgcccggccaattttcaactggcccatactttatagtgatggaaagcgcataaactacttgtaaatcattaaaatagggtgataactgtgataatagtgtttcttgcattctagaaaattattttattaactacattcaaaacccagcatttcacaggttccatcattagaaacagtatagttctagttaacatgattggagagtttcaggggaaaggtttacattttctgaaactgtatttggtatgtgactcaatgtggtatttcagtcttgttagtcacttacatgactgacgtttgcaaggatttattgccaagtaaaatttgaccagagtgcactgagaatagctacataaggggaaatctctcaaaattccttctgttcatttaatttggagcatattgtttaaatcattttaaacatatgtaaaaagttgaagcattaaaaaatcttcaagaaacaatgaaaaaatagaaattagcaaacataagtttcttaatgcaaaattaatagtgaataaaatatagcctacattaaaagccagaggctttgctataaatataagagtttagaaaaacagtgtgcttcaattaaggactaaattatcaaaactgcatgtttgttttttcttttcttttcttttttttttgagatgaagtctcactctgttgcccaggctggagtgcagtggtgcgatcttggctcactgcaacctctgcttcccaggttcaagcgattctcgtgcctcaccatcccgagtagctgggattacaggtgcaccacaccatgcccagttaatttttgtatttttagtagagacagggtttcattatttggccaggctggtctcgagctcctgatcttaagtgatccactcgcctcggcctcccaaagtgctgggattatacacatgagccactgtgcccagcctaaaactacatgttgaagcttccggtcatttccattattatccttcttttgaaattcaagttagtgctttttaaccaaataaaagaagaaccagctcttgggatatgtgactctgcctctgtataaagtgactggaattttgttaaaaccgtgtttccacttctgaaccctgttaccattccccctcacaaatccccacccaacacctggattttaaagatcctccagtgtcaagggaagccacagagtctattaaagaggcagttctgaaccaattaatttttgtccttataatttagagcattaaatagctaatatatttaatggcactaattgttgttcacggctttcatcatacttttaaacagaatccaaagtattcaaaggaaagtaagcgaagttatccaaagccaactttgtttcaggtgtgtcccctgccccaaatagattttagggcagaaatagaaaactgagtttacacagaactatttttggaaaagctgcactggagtagatggattcttcttcagcatacttttttgtttgtttgtttgagatggagtcttgctttgtcacccaggctggagtgcagtggtgtgatctccactcactgcaacctccacctcccagcttcaagtgattctcctgcctcaaccttccaagtagcttggattacaggcgtgcgccaccacagctggctaatatttgtattgttagtagagacagggtttcaccatgttgtccaggcttgtcgaacttctgacctcacgtgatccacctgcctcagcctcccaaagtgctagattataggcgtgaaccactgcgcccggccagcatgcattttaaaagtggcttagatttagttttaaatattttggggtgaaaggcaggaacagttctgtttttgacatacaggttttctttgggattgttttcattttcaagtatagattcatgtcagaatggccaacttaacgtgggtttctgtattccctggtgttgctcttaacctgaactcataatcagttgccatactgaggcaagagcactcagggtgaacatagtcaagttactttaaaagtgataaaagttggtatattgatggtaagttgttaatcactaaccttgtttgcacttttgtacaccactgcttgcactaggatcttggtgtgaattttcaattgttttacagtgtatacagattattaaggataatttatataaagatgtttctgtttaactttgtgtgttttacaacaaagagctataatagatggttaaacgtttttgaattgtgtttatatgttagtttgattatgttctattatcttttcacctgccatgaatttgagtgttaggaagggaaaaataaaatactaatctggtcttgaagaa

SEQ ID NO: 19867 - DNA, 226 bp, Homo sapiens
tagaggctgaagctttaaggaggatgggaggggaggcttcacccggaaggagcttttggagcaagggcctgaaggaaattggggagagagcctgagtatctttggtaactgggaagagagcattccaagcaaagggaaaagaagagaggctgtcagacaagtgtgcacccaccatgtctgggcacatcgagaaggaccctgtggctggaggggaggaaggagggga

SEQ ID NO: 19868 - DNA, 308 bp, Homo sapiens
ttgcttcctcaccctatttgtgatatgaaaataaacaaatcatttgcttccaactaaaggtagtggacagaactcacctgtttttatctctactccctgaggaagtcccatcaaaatgaaagtaaggaaattgaaaaaggcatgaaccagtggtttttaaccttggctgaacttttgaaatagcagcagagatttttaaaaatcctagtgtccagcctgtagcccagataaattgaatcagaacctctgcagatgagactcaggcatcaagatttttatactatatattttttcaaagaaaataagag

SEQ ID NO: 19869 - DNA, 293 bp, Homo sapiens
ccacccttggtcaagctgcatcatctcacctgaattattgcactggcctcttatttggcctttgtcctccaatcttaactcctctaattcgtttccactccttcagtagctagactgaccctttaaaacactaagaaatttttaaattccctgattaaaaaacttaattgggtgggcctgccacagtggctcatgcctgtaatcccagtgctttgggtgactgaggtaggaggattgctgaggctaggagttcaagatcagcctgggcaacatagtaagaccccatctctacc

SEQ ID NO: 19870 - DNA, 286 bp, Homo sapiens
atgagatagtcaacactttattatgaaataggcctcgtgttagatgatttgcccaactataggctaatgtaactgttctgaacacatttagggtaagtcaggctaagctaccatgtttgacaggttaggtgttataaccattttctacttatgatatttttcaacttacaattccaggacaaaaacctttggtaaatcaaggagcatctgtataaggattaggtcatggggaaaagcaaaaaaacagcattttcacacacaaaaaaatcacttaggtgattaaggg

SEQ ID NO: 19871 - DNA, 209 bp, Homo sapiens
agatcatgccactgcactccagcctgggcgacagagcgagactccgtctcaaaaaaaagaggaatggaagagattagaaaagatgtgaacaaaccttatagagcttccaggaaaggaagaaaggtaaaaacattgagatttggaatgttgagtaatgggatagtataaacagtatagcagtatagagatgtcactaatgttttagaaac

SEQ ID NO: 19872 - DNA, 376 bp, Homo sapiens
tctcatacagaattaccgttacctgacattatagatttgtttatttgttctttttttcttctcatatgttatggactgcatgtttgtgtacccccaaattcctatgttgaaatcctaatccctaatgggatggtattaggaagtggggcctctgggagtgcttaggtcatgaagatggagtcctcttgatgggattagtgcccttataaggagagacaccagagagcttgcttctctctgcaatctgctatgtgaggatacaagaagatagtggtctgcaaaccagaaagagtgactcatcagacactgaatgggctggcaccttgctcttggacttgccagcctccagaactgggagaaataaatgtctgttgtt

SEQ ID NO: 19873 - DNA, 408 bp, Homo sapiens
gataactcgatcttggacttcccagtcttcagaactgcgagaaataaatttcttttatttatgaattacccagtctgtggtatttggttatagcagcacaagtggactaagatacaccctctgtcctacctcttatgctctgtacccccttcattgtgttgcatttctctacaacatttaccattccatatcctttatatattgttaatctctctgtccctagcttgagtgtaagttcagttaatgcaaggaattttccctgctttgtctgtttgctttttgtttctcctagtgctgtttttccaatactcagaacagggcttgatatataatggaagctcagtaaatatttattgaatgaatgagtgaataaaaggtatgttcacaaggaccttctgctatgacatc

SEQ ID NO: 19874 - DNA, 1918 bp, Homo sapiens
cactctggtcaccttgtttgctctgggtctggctgaattttctgccctgagatctgggcataaagtggatgaaacttgaaagaccttcagtgtagatccagatggccaacctgtccttgttaagttacttgcttcttgggaatcagtgtcccctgctgagctgaaaaggaaatggattccaatctcttccaacctttaaggtgatagatagtttgagcaagactggagaatggacaacactatgaagctgtggctagaaagggactgtcatgtcccatcctttggccagattgactggggatgtccggacagatgcctgcatgggtggtgagggccacatctgcacacgagccagtggctgcttgcagttcactgctgtgatgccagagtgtgttcaaaggtgactctcctgctcttctggactcttctctcaggcaagaaaggctgcaggctgcctgctatgtgatgcctgagcacaaagccaaggaactgaactaagtctttctgttaagtcctgagtttgtcattggcaggtttacttgtggccagctctctctgcccttgggtgtctgagcaggcagaccagaagaccaggcactggacctgcatgccaaagggactggtcatctcctgaggacctgtaaatgaccctgtggactgttccgcacgatccggaacccactttttattcactccccatgtctttggccttcctcttctttctctttccctctgccatcctgacactgatagtttgtcatataaattccccgggttgtgtttttttttctagaaaaaaattaaaagggaaaacaaaaccaaaaaaaccagaaaccacgaataagaatggaaatgacaatggctgcctgtcatttttctgtcacgattttcctgatttggtttgttccctttgtctcagagaagcaggagatgttgatgaggctgtatttttttttctttttcttgtttttgagacaagagtctcgctctgtcacccgggctggagtgtaacgtggcatgatctcagctcactgcaacctctgcctcctgggttcaagcgattatcctgcctcagcctcctgagtagctgggattacaggcatgcgccactatgcccagataatttttttgtatttttagtagagacagggtttcaccatgttggccaggctggtctggaactcctaacctcaggttatccacccaccttggcctcccaaagtgctgggattataggcatgaaccaccgtgcctggccaaagatgtaatttaaaatagttagaagggacttggcatgggccagctccgtgcatggcattttcacccccagagcttcctaatcctgttttcacacaggaagtttctaggtctttctagaacagctagaaatagtagctgactcccgcccaaggcccaaccttcaaaccctgagctcttcaggctgcatcctctggtgagctatagaggagaacgtggctcctaaactctagccatcctgtgggaggaaatagacttctttgggctgtggcttgcagaacaaactacactttttttccctctattgtttaaattttatttaataatttgtgtgtttttctgtctttattttctgtatttcacgtgttccttcactccctagaaactgcactttctttgaaaccataggtaatgaatcttactaggagaggcatggggatagagacagttctgggagtgtgacctgtaagcctcctgtagggcagtgccaggccttgattgcccacgttctctccgttccttcttccttcatacatttgatcacacagcctacacccagccccgagtgtgcatcacggtaaaagagctgagggctctcttcagggagcagcccatttaggtctcttttgttgttgttagggagaatacacatctttcttgg

SEQ ID NO: 19875 - DNA, 1022 bp, Homo sapiens
cactctggtcaccttgtttgctctgggtctggctgaattttctgccctgagatctgggcataaagtggatgaaacttgaaagaccttcagtgtagatccagatggccaacctgtccttgttaagttacttgcttcttgggaatcagtgtcccctgctgagctgaaaaggaaatggattccaatctcttccaacctttaaggtgatagatagtttgagcaagactggagaatggacaacactatgaagctgtggctagaaagggactgtcatgtcccatcctttggccagattgactggggatgtccggacagatgcctgcatgggtggtgagggccacatctgcacacgagccagtggctgcttgcagttcactgctgtgatgccagagtgtgttcaaaggtgactctcctgctcttctggactcttctctcaggcaagaaaggctgcaggctgcctgctatgtgatgcctgagcacaaagccaaggaactgaactaagtctttctgttaagtcctgagtttgtcattggcaggtttacttgtggccagctctctctgcccttgggtgtctgagcaggcagaccagaagaccaggcactggacctgcatgccaaagggactggtcatctcctgaggacctgtaaatgaccctgtggactgttccgcacgatccggaacccactttttattcactccccatgtctttggccttcctcttctttctctttccctctgccatcctgacactgatagtttgtcatataaattccccgggttgtgtttttttttctagaaaaaaattaaaagggaaaacaaaaccaaaaaaaccagaaaccacgaataagaatggaaatgacaatggctgcctgtcatttttctgtcacgattttcctgatttggtttgttccctttgtctcaggaggctgaggcaggagaattgcttgaacccgggaagtggaatttgcagtgagctgaaattgtgccgctgcactccaacctgggggacagagcgggactgtagc

SEQ ID NO: 19876 - DNA, 202 bp, Homo sapiens
ctcctgggttcaagtgatcctcccaccttgacctcccaaagtgctgggattacagacatgagccactgtgtgtggctgtgttttttctttcttctaaattctcatagaattttagttttgtggataaagcacaataatcttttttcttttgaaaagaaaatcggcaggcaagaactatgtgttctgtggactatgatttata

SEQ ID NO: 19877 - DNA, 559 bp, Homo sapiens
ctttctccttccttctgtgcattcttattgggatccagagagtgcatggtgtttttttctacctgccagaggcacaaatgtttgtgtcttcattcagaggtgagcagctgtcaggcacgaggtgcataagcatccagcccctgctcccctggggctggctaagcccaagtcctttgcacttctaggaaaaactcctgctccttgtgtgtactttcctctcaatgctcattcccgtgcccatctttctaaacggcatcactagatcaagatttggcctcccgtggccactctggggtacatttgatttaaacaaaattcctcaattgagaggtgccttaacaagaaaggaaataagatttctcaggcccagtgagtagtagttgttggttggtacgcagaggattccaaatgacatttggaataaaaaatcttctcattagtccaggtacagtggctcatacctggacagccagcattttgggaagctaaggcacaaaaatcgcttcaagtcagttttagtccagcctggacaacataggaagatccagtccttaccaaa

SEQ ID NO: 19878 - DNA, 470 bp, Homo sapiens
agcgcacctggccagtaataacattaaatgtgaatagattaaactatcaaaagacacagattgtcaaagtggtgataaaaaaaaatccaaccatgtacagaagacatacatacatactcaaagatacaattggattagaagtaaaggatggaaaaagatataaaacgcaaacagcaaccataataaatctccagtggctttctaatatcagacacaatagagtttaaaacaaaagttttactagagataaagaaaagtattttgtaaagataagtcatcaagaagatgtaacaattataaatagacaattgggattacatcaagctgggaagcttccatactgccgaggaaataacaaaataaagagacaacccacagattgggagaaaatatttgcaaactatccatttgacaaggggttaattgccagaatatacagggagctcaaacaactctatagcaaaaacaaa

SEQ ID NO: 19879 - DNA, 845 bp, Homo sapiens
tagacagagtcttgctctgttgcggaggctggagtgcagtgatctcagctcactggaagctccgcctcctgggttcaagcgattctcctatctcaacctcccaagtgtgccaccacacctgccgaatgtttgtgtttttagtagggatggggttcgccatgttgggcaggctggtctcaaactcctgacctcaagtgatctgcccgcctcggcctcccagagtgctgggattataggcgtgagccaccatgcctggacatgaccctgtctctaaaacaatgtaatgaactgcagctcattcttgtgtgcacttttctgcaccccctttcccttaacacttactattgtctggcatgctacgtgttttcttgatctcattagcctctcccaccccaactgccacactgcactatcagagggcagcacttatcactgctgtagaacaaagtcctgcactgagccgatggcccagaaattttctttttatttatttatttatttttttttttgagacagagtcttactctgtcgctcaggctggagtgtagtggcgcgatctcagctcactgcaacctctgcctcctggtttcaagcaattctccttcctcagcctccagagtagctgggattacacgcgcctgccaccgcgcctggctaatttttgtatttttagtagagatggggtttcaaccatgttggccaggctggtctcaaactcctgacctcaggtgatcctgcccacctaagcctcccaaaatgctggtattacaggcatgagccaccgtgcccggcctaaatatttaataaaataatggacgatgggtgccttctactgagctcccggt

SEQ ID NO: 19880 - DNA, 548 bp, Homo sapiens
ggtagccagctgaacctccagttataactgagggtgccaagagtgagctgttgagagcagcgaggacagaggttttcccagccaggattgcggtactgagacatgcacacacgtgcatacacatgcacagacatgtacactcacaccctaaattgcttgtgctatgtgggaaattttgacccacatattcctatgtttaattgaaggcactgttaacttcttaacaatgctacatctctgatgattttaggaggaattagactgcgtaaacatctcaaaacagggaggtgaagctaggaagcataaatgccccagtgatggctgcaactaggtctcttaacttattgtaatctaaaccttgggtgagggagaaagaaaaaaagagcagctttttaaagtccactgaagacttcagatgtggcaaaaataatcattttttttctggccatgagaaattgtctgagtagagggtggaaaatttcatccttatcaggaagttaatcatagtaatttatgtggaacttccaggtggttacttagtcaatctt

SEQ ID NO: 19881 - DNA, 462 bp, Homo sapiens
gaacttgagaccattgtcacacacagggagaaaagcactggaatggactagaagtctgcctggggaaacatgtggcatgcacttacagagtgttacatgtctgtcatccttgaggagtcattgtggactctcaagggtccatgataggcatccacttgcctctctagcctgaagaatgtcatctgcagccttgctcctcaaagtgggaaccttgcttttcaaagcagcgtcttcagaacagcagcatcagcatcacaccggagcttattaaaaatacagactctcagccccacccctttcccccacactacccaatcagattctgcattttaacaagattcccaggggatttgtatgcacataaacaatggagacggctaggagaggtggcgcatgtctgtaatcccagcactttgggaggctgagggaggagaagcttgagcccaggagttcgagaccagc

SEQ ID NO: 19882 - DNA, 885 bp, Homo sapiens
gccataccaaggtcattgtcctagttaggaatgtgggacccttacactgggatggggacatctggatcgatactctagaactctagaaaacctggacaccccagccccgccaccctcccccacaccctgaaacctctaagcccactcctccctgttaagggccggtgctttgctcttgtttgaaggtcatgcccaggcctctgccacctccccttaggatctgtgctcaccacccctcctggcccctggaccaagaaggtcagcaggagggtgctgggcctgccagagaagaaagaagatgagctgcctggggggagcaggagtgtgcctgagacaagggcatggccatatggggctctgctatgacctaggactcagcacccttgcagagcccccaggaagcagtgcccgtaggctgccagctcggtcggctctctgaaacttcccaggaagccatggcccacaaggaagagaatagcaacctaggggcaaccgtggcagctctgcaagaagcgaagggaatagagtaccctaggcctttgggaagtgtaagtggaggagtgactgtgaccttgagagagatgttgcgggggttataggtgatacctcggagaaagataatgaaaagctgatcatgactaatcactagaaaagacacgatgtgagatccgttagaggcctccttggcagccaggcaagagggtggacacagctgaagggatcaggcatggggttgttactaaggcttcagagctccaagaaggtagaactttcaacctagccgagagtggaaatgcagctgacccctgaacaacgcaggtctcaactgcctggggccacttacatgtgggtttttcaataaatatattggaaattttttttgaa

SEQ ID NO: 19883 - DNA, 644 bp, Homo sapiens
gccataccaaggtcattgtcctagttaggaatgtgggacccttacactgggatggggacatctggatcgatactctagaactctagaaaacctggacaccccagccccgccaccctcccccacaccctgaaacctctaagcccactcctccctgttaagggccggtgctttgctcttgtttgaaggtcatgcccaggcctctgccacctccccttaggatctgtgctcaccacccctcctggcccctggaccaagaaggtcagcaggagggtgctgggcctgccagagaagaaagaagatgagctgcctggggggagcaggagtgtgcctgagacaagggcatggccatatggggctctgctatgacctaggactcagcacccttgcagagcccccaggaagcagtgcccgtaggctgccagctcggtcggctctctgaaacttcccaggaagccatggcccacaaggaagagaatagcaacctaggggcaaccgtggcagctctgcaagaagcgaacgaacgcccagagaagcgggtgtgggagagtggaaatgcagctgacccctgaacaacgcaggtctcaactgcctggggccacttacatgtgggtttttcaataaatatattggaaattttttttgaa

SEQ ID NO: 19884 - DNA, 248 bp, Homo sapiens
tccttagagagacagggtctcgctatgttacccagactggagcacagtggctgttcatgggcgctttgtggctcatgcagcctcaaacccctgggctcaagcgatcctcctgcctcagtcccccaggtagctgggactacaggctcacaccactgcactcagcttacatttgaatgtatttaagtaactccagtcagcctcagctcagatgaactcaaattttatttctgcaactttatattaaaata

SEQ ID NO: 19885 - DNA, 325 bp, Homo sapiens
cagagtaagaaaaaatccgtttgctttttaaaatccaaagatggttttgagaacctgaaaccaagttagagcaagttcgttttccttccaaaaaaactgggctctgccgggcgcagtggctcacgcctgtaatcacagcactttgggaggctgaggccggcagatcacgaggtcaggagttcgagaccagcctgaccaacatggtgaaaccccgtctttactaaaaatacaaaaaattagcccgacgtggtggtgcgcacctgtagtcccagctacttgggaggctgaggcaggagaatcacctgaacccaggaggcagaggtta

SEQ ID NO: 19886 - DNA, 188 bp, Homo sapiens
gggagacaagagtgaaactccatctcaaaaagaaaaaaaaaagcccttttcacttattaggtttcactgtgccaagtattcccttctgttggtttgtaaaaagcaatgacagtgaagaattctccttggaaataatgtatagatctatttccctcttaaatctattttgtaatatatctaattttata

SEQ ID NO: 19887 - DNA, 315 bp, Homo sapiens
acatggactggaattcttccataggtaatgaaaatggcagatattaagaagctctagaaaggagtgaagcttttaccttttgtccggtcataaattacacgtttgaccttggataggatgaatacaagcatgattcaattcacttcaactcaactcaaggaaaaactagttatatatatgtatgtatagttatacatatttacatttactgcaggcacagatatgtgctacagcccaagaagaagatggtgaaattccaatttcatacctctctcttcttctttctctagaactttgtatataaagcaacaaagc

SEQ ID NO: 19888 - DNA, 280 bp, Homo sapiens
caacatatgtgagctctgtacctgcggagatgagatgttgtcatgtattgatctcaacccagagcagaggctccgccaagtgcctgtgccagagcccaacacccacaatggcaccttcaccatcttgtaagaatcacttttcctcaattgtcctctgtgtcctgcctgacatggcagccttttcctggaggccttcctgggccttctttatctccccaagccatatggacaactgactttctgctttcacctttgcttgtcaactctcccttctcctcat

SEQ ID NO: 19889 - DNA, 340 bp, Homo sapiens
aaaatttgaagtgtgcataggcttttgaccaaatagttccatttctagaaatttagctacaaaaaaaattctcacacatgtgcacaaagacctacgaacaaagatcttgaatctttcagtttgcaatagtgtccacagaagaatggttaaataaagtacagtacatccgtactatcaaattttatgcaatgttagaaagaacaagataactaacatattgacatggaaagctctccatggaaatttgtgggacctctggattatgcagctggaacatagcctcttaattgcagcatgtcccacattgttacctcgcttttacttatttcagttaggtttc

SEQ ID NO: 19890 - DNA, 341 bp, Homo sapiens
cacacatacattatatttcaactatttctagtatacggaataacataaatttttaaaattatactagtaatgccaagaaagaccaattttaagattggaagtgttggcccggcgctgtggatcattcctctaatcccagcactttgggaggccgaggtgggcagatcacttgaggttaggagttcgagaccagtctggccaacatggtgaaaccccatctctactaaaaatacaaagttagccaggcatggtgttgggtgcctgtaatcccagctactcgggaggctgaggcaggagaatcccttgaacccagagggcagaggttgcagtgaactgaaatc

SEQ ID NO: 19891 - DNA, 285 bp, Homo sapiens
gtgtgacgagcccttggctccctttcatgtccttcccttcagttcttccctcaatcatgctcctccagccatgcaggcccttttgccattcctcatgcacaccaggccctcccctcctcaggacctttgcacctgctgtcctctctgcctgagatgttcaccatctaaatgagctcatccacagctcacttcctcatttcattcaagtctttgctcaagcgtcacctctgcaaagacattctctgtgcaccctatgtaaagaggctcacccttttcattgatttt

SEQ ID NO: 19892 - DNA, 478 bp, Homo sapiens
cctgtataaattcaaggtgcaaaggcaacatttcctggctgggagtttactggcagggcggcctgtgcagagcatctactcttgctgttgaagtaactgagggaaaggtgctgatcttgctaaggagaacacaagccctaatcaagccaagctcacctctatttgagtgcttttggtgcagtttgtggcttttttccaatatggtaagtttcctttggaatatatttagagcaaaattgccattgtcatggtatttttgttttgtacaagcttcaaaattactactttggaatgagaggtatagttgagttggctggctgtgagtttaccatttgtttctctttagccaagagatcattattataatgtttcaaataattttccacttaaattataccattttctctaaatccaactgcttagtatatgcttagtaaaccaaaggattggtatgaggtgtaataaagtacattaaaat

SEQ ID NO: 19893 - DNA, 385 bp, Homo sapiens
tttttttggaaatggagtcttgctctgtcacccaggctggagtgcagtggcacgatctcggctcactgcaacctccatctccggggttcaagtgattgtcctgcctcagcctcctgagtagccgggactaaggtgcctgccaccacacccaactaatttttgtatttttagtagagacggggtttcaccaggctggtcctgtgcatgaccacttccaacatggcacaaaaaaatgatgcaatagcaactgcaggtagctgtggataaataagcctggaacaacatcgtggtttcctgtggccagtccttttcatgcacaggatccacatatgcccccagggaatggatacagaagtgttaagaggcttggggttgtttttttttt

SEQ ID NO: 19894 - DNA, 386 bp, Homo sapiens
attatgagtatagttttacattcatgctttatattcatgtccatatttgagtggcttgtttctgagctttatatattccgttccactgttctctttgtctttgattcaataccatactccctagtagttgagactattcgccaccacacccaactaatttttgtatttttagtagagacggggtttcaccaggctggtcctgtgcatgaccacttccaacatggcacaaaaaaatgatgcaatagcaactgcaggtagctgtggataaataagcctggaacaacatcgtggtttcctgtggccagtccttttcatgcacaggatccacatatgcccccagggaatggatacagaagtgttaagaggcttggggttgtttttttttt

SEQ ID NO: 19895 - DNA, 282 bp, Homo sapiens
ggcagatgcaaccacagatacagcaaagattcaaaaagataaaagaatataacaaacacttaatcccgttagtttttaaatctggcaatctaagggtgattttacaactaccatattgaaaaattaaagaggaaaatcttatggtcttttcaatagaagaaggaaaatcatttgacacaatttaacatccatttgctaaaaacttttagcaaaaaaaaaaagcaatagaacagaatagaactttcttaattgaaacatattttccaaaaccatgcggcaaac

SEQ ID NO: 19896 - DNA, 755 bp, Homo sapiens
ttcctgttcttcactttttgaaataaacataagttacatctcttgctcgcaaaagctggaattagttgtacttgtttctgtacttattctctctatggtgtaagctcccaggggcaagatacacatttatcacttcttttgcatgttcctacagaatctactacaggactctgtcacagcagtcttttagtaaagtgctggactggctgcctaaccacagtgtctcagctggtgctataatccacataagcaactccttctgagggtgtgatctgtaactatgatggcagactatacaataagattacaactttaatcggccatgattatgaaatatttctgaagatccttctcgaggggggtgcttggaagcagacacaggtatgaggaataaatgccagcccacctgctggcgggagaggcaatgggaccatctcttcagacagatgagcaagcaggaaaacagagaatacaacttgtcttggaagctagcagcaagatgaggcagtaaaacccatcagcatacatcatcctatcattgcccagtgtcatccccagcctctattagccctcgctgcatcagcgcaagtcccagacactttatcctgtttataattgctgatgagcagtaataaggcctccatgcctcagctccgtctgttccacttcggcacccacctattatgtaataacttttatttacagccttgcttgatgcgctgttctattagtagagccaggaactgagtggggca

SEQ ID NO: 19897 - DNA, 483 bp, Homo sapiens
cgtaattctcaaacttctctgcacattggaattacttggggagcttcaaaaaatcctgaagcctttttcccacccttagagatgtgtggcctgagatttggaatttttttttaatccccagtaattctagtgccctagggctaacaattttagaacttgccctccctacttcacctctgaataacaaggtttccacgtctccatccagtcaaagaaggaatggtaagcaagtgtctatcatgtacactttattaatcgtgattattaatttctacattatttctaatcatggcacctagtgttgagtagactctttaggaaagaattctgtcttcagttatggatgctgccaatggcagggcaaagggggagagtggcagtgcaggtgccacgtatttgtaagccctgattagaatatgaagaagaaatgggaatatagcagcaaaaagaaaaagaataaaaatcactttgaaaatttaatgt

SEQ ID NO: 19898 - DNA, 161 bp, Homo sapiens
aaaagaatatggttcatattaagtattattgtaatggacatttggattttgttccttttaactctgtgttggtgttctgggaagtgtgttgaactagacaaatgtatatgtgtagtggagcagttcagttttttttaatgacagtctaagtgttgggctac

SEQ ID NO: 19899 - DNA, 474 bp, Homo sapiens
attatttctaccaccctacatccctttagttttccttctcggggtatttggtgtgaccctaagaacttggtcccgtttaaacgactcatgtccatcccccctccattcgagcagtaccacatgcttgatatataaatgttacagctgagcgtttgcagtagccttgagatctgagtctagtatcagcccaaatgaggtgcgagtgacttctgatttcagggggataccattcttcattgagctggtagatggacctagtcacactttgtgggatttttgttgtttatattcaagtatagaaaatattccacagtaaatacttcattccttaagccctttttatgtgcataatactgtatttgggcaatgcaaaattgaattggatatagaatctgccctctaggagcttgactgtagtaaggcagagaaagcatgttcaaaattaagttaaacagaatagagcatgagtgccag

SEQ ID NO: 19900 - DNA, 277 bp, Homo sapiens
aacggagagtttatatatggacacctaccaagcctgggaatagtctctggttgggtccagtgcaaacatctttaatccccagagcaaaggggtcctgccgctcatgcccactccagggcaggagcctggctgggaaggcaaaacaatccctgatagctgttcccatcgccagggagaaatcctaaatttggcaacctcaggaagtgaacaagtttcctttttttcccccagggtcagagacctggcatagaagtataagaggctgcggagtttttaa

SEQ ID NO: 19901 - DNA, 743 bp, Homo sapiens
tagtgtctggaattaaaatgtttgaggtttaggtttgccattgtctttccaaaaggccaaataattcagatgtaaccacaccaagtgcaaacctgtgctttctatttcacgtactgttgtccatacagttctaaatacatgtgcaggggattgtagctaatgcattacacagtcgttcagtcttctctgcagacacactaagtgatcataccaacgtgttatacactcaactagaagataataagctttaatctgagggcaagtacagtcctgacaaaagggcaagtttgcataatagatcttcgatcaattctctctccaaggggcccgcaactaggctattattcataaaacacaactgaagaggggattggttttactgttaaatcatgtgttgctaaatcattttctgaacagtgtgttctaaatcagtcattgatttagtgtcagccacgtggagcacctcggcttaaagcagctccacaaaacctgacacaacacacacaccaattaaatggattttgttgagaatttaatcattcaatttggtcaaccagaatgacttcctgtggaactctgttttatgacagataatagttttccaacttgattgagtctctgtataccctgggatattgtattttttaatgaagggcattttcaaacttgtcaacttctcttttcagcacttgaaatgaaggcttatggaattctgactgtgaaatgaatttttctattgggaa

SEQ ID NO: 19902 - DNA, 718 bp, Homo sapiens
gatattttgtctcctcacccccctgtctccaacatcctgtttcatcacaaatgtttatcattttactcattggttctccacccgtcttgtgggctgctgtggttgctgtcacccagccaagaggctggggaatgcctgtccacaagcagtaaggggcatctggctagggtgctcagaagttcctgagcattgtagtatcagcattgtgaggccattgagatagggagagaacaagcctatttaaatagctgccagaacaatcaatacaagcaccattgttgctagtcatagtggaaatatacacactgtctttagcaaagaaaaaactgaagtgtacaccatttgaagatgtcatactgaggtgttctgaaagcatcaaaagagaagaagaaaaattcctatctaaacaatattactatcttaaaaaggctattctatttgagtggttgttaactgttttaaagaatggtttggtttgcctgagaagtttatttggtattaattagctactcactttaaaaatatttaatatgacacaagatacaatatgatagtaccatggcacagtctacttgtttcagatggaattgacattttggaagagtatgggccaggaattttgtagtctgggcttatgggttttgggggcagaataccaccaggcgaggttcccatctcatcacattatgttaggaattgtgtcacatcaacatgcctt

SEQ ID NO: 19903 - DNA, 540 bp, Homo sapiens
tccaccgttgatcaccggtggattggatgaagaaatggtggattggtacatgtatatcatggaatactgtgcagccgtagaatcaaatcatgacctttgtagcaacatggatacagctgaaggcgattatcctaaatgaattaacatgggaatagaaaaccaaataccacattttctcacttataagttggagctaaatattgggtactcatggatataaagatgacagcaatagaaactggggactactggaagtgggaaaagggctgaaaaattaactattgggtactatgctcagtacctgggtgatgggatcattcatacctcaaacctgagcatcgtgcagtatacccaggtaacaaacctgcgcatgtaccccctgaatctaaaataaaagttgaaaaaggaaaacggaacaacaataagcccattttccatagtggtaaagatacaggtgtcatacatctattttaaaaagaaaaaaaattgaaattaatgagctaagcagtcatttgaagaatggtgaaaataataaatcca

SEQ ID NO: 19904 - DNA, 1770 bp, Homo sapiens
cgtttccatggctgcgagaactgacgctccccaaccgtcccgcaactgtcctgtcccagactttggcaccgtcggggtccgtcgtccccgaatgtgacagcatccccaccccggctgctgcccaggatccgccggaccccggcctcgatatgggagacctggaactgctgctgcccggggaagctgaagtgctggtgcggggtctgcgcagcttcccgctacgcgagatgggctccgaagggtggaaccagcagcatgagaacctggagaagctgaacatgcaagccatcctcgatgccacagtcagccagggcgagcccattcaggagctgctggtcacccatgggaaggtcccaacactggtggaggagctgatcgcagtggagatgtggaagcagaaggtgttccctgtgttctgcagggtggaggacttcaagccccagaacaccttccccatctacatggtggtgcaccacgaggcctccatcatcaacctcttggagacagtgttcttccacaaggaggtgtgtgagtcagcagaagacactgtcttggacttggtagactattgccaccgcaaactgaccctgctggtggcccagagtggctgtggtggcccccctgagggggagggatcccaggacagcaaccccatgcaggagctgcagaagcaggcagagctgatggaatttgagattgcactgaaggccctctcagtactacgctacatcacagactgtgtggacagcctctctctcagcaccttgagccgtatgcttagcacacacaacctgccctgcctcctggtggaactgctggagcatagtccctggagccggcgggaaggaggcaagctgcagcagttcgagggcagccgttggcatactgtggccccctcagagcagcaaaagctgagcaagttggacgggcaagtgtggatcgccctgtacaacctgctgctaagccctgaggctcaggcgcgctactgcctcacaagttttgccaagggacggctactcaagcttcgggccttcctcacagacacactgctggaccagctgcccaacctggcccacttgcagagtttcctggcccatctgaccctaactgaaacccagcctcctaagaaggacctggtgttggaacagatcccagaaatctgggagcggctggagcgagaaaacagaggcaagtggcaggcaattgccaagcaccagctccagcatgtgttcagcccctcagagcaggacctgcggctgcaggcgcgaaggtgggctgagacctacaggctggatgtgctagaggcagtggctccagagcggccccgctgtgcttactgcagtgcagaggcttctaagcgctgctcacgatgccagaatgagtggtattgctgcagggagtgccaagtcaagcactgggaaaagcatggaaagacttgtgtcctggcagcccagggtgacagagccaaatgagggctgcagttgctgagggccgaccacccatgccaagggaatccacccagaatgcacccctgaacctcaagatcacggtccagcctctgccggagccccagtctccgcagtggagagcagagcgggcggtaaagctgctgaccgatctccctcctcctcaccccaagtgaaggctcgagacttcctgccccacccagtgggtaggccaagtgtgttgcttcagcaaaccggaccaggagggccagggccggatgtggggaccctcttcctctagcacagtaaagctggcctccagaaa

SEQ ID NO: 19905 - DNA, 1755 bp, Homo sapiens
cgtttccatggctgcgagaactgacgctccccaaccgtcccgcaactgtcctgtcccagactttggcaccgtcggggtccgtcgtccccgaatgtgacagcatccccaccccggctgctgcccaggatccgccggaccccggcctcgatatgggagacctggaactgctgctgcccggggaagctgaagtgctggtgcggggtctgcgcagcttcccgctacgcgagatgggctccgaagggtggaaccagcagcatgagaacctggagaagctgaacatgcaagccatcctcgatgccacagtcagccagggcgagcccattcaggagctgctggtcacccatgggaaggtcccaacactggtggaggagctgatcgcagtggagatgtggaagcagaaggtgttccctgtgttctgcagggtggaggacttcaagccccagaacaccttccccatctacatggtggtgcaccacgaggcctccatcatcaacctcttggagacagtgttcttccacaaggaggtgtgtgagtcagcagaagacactgtcttggacttggtagactattgccaccgcaaactgaccctgctggtggcccagagtggctgtggtggcccccctgagggggagggatcccaggacagcaaccccatgcaggagctgcagaagcaggcagagctgatggaatttgagattgcactgaaggccctctcagtactacgctacatcacagactgtgtggacaggcagtggtcagtctcccagcccccacagctggctcacttgaagagaattcaacgtctgcacccagtgtgctggttcctctccccaggcaagctgcagcagttcgagggcagccgttggcatactgtggccccctcagagcagcaaaagctgagcaagttggacgggcaagtgtggatcgccctgtacaacctgctgctaagccctgaggctcaggcgcgctactgcctcacaagttttgccaagggacggctactcaagcttcgggccttcctcacagacacactgctggaccagctgcccaacctggcccacttgcagagtttcctggcccatctgaccctaactgaaacccagcctcctaagaaggacctggtgttggaacagatcccagaaatctgggagcggctggagcgagaaaacagaggcaagtggcaggcaattgccaagcaccagctccagcatgtgttcagcccctcagagcaggacctgcggctgcaggcgcgaaggtgggctgagacctacaggctggatgtgctagaggcagtggctccagagcggccccgctgtgcttactgcagtgcagaggcttctaagcgctgctcacgatgccagaatgagtggtattgctgcagggagtgccaagtcaagcactgggaaaagcatggaaagacttgtgtcctggcagcccagggtgacagagccaaatgagggctgcagttgctgagggccgaccacccatgccaagggaatccacccagaatgcacccctgaacctcaagatcacggtccagcctctgccggagccccagtctccgcagtggagagcagagcgggcggtaaagctgctgaccgatctccctcctcctcaccccaagtgaaggctcgagacttcctgccccacccagtgggtaggccaagtgtgttgcttcagcaaaccggaccaggagggccagggccggatgtggggaccctcttcctctagcacagtaaagctggcctccagaaa

SEQ ID NO: 19906 - DNA, 275 bp, Homo sapiens
cgtttccatggctgcgagaactgacgctccccaaccgtcccgcaactgtcctgtcccagactttggcaccgtcggggtccgtcgtccccgaatgtgacagcatccccaccccggctgctgcccaggatccgccggaccccggcctcgatatgggagacttcctgccccacccagtgggtaggccaagtgtgttgcttcagcaaaccggaccaggagggccagggccggatgtggggaccctcttcctctagcacagtaaagctggcctccagaaa

SEQ ID NO: 19907 - DNA, 1920 bp, Homo sapiens
cgtttccatggctgcgagaactgacgctccccaaccgtcccgcaactgtcctgtcccagactttggcaccgtcggggtccgtcgtccccgaatgtgacagcatccccaccccggctgctgcccaggatccgccggaccccggcctcgatatgggagacctggaactgctgctgcccggggaagctgaagtgctggtgcggggtctgcgcagcttcccgctacgcgagatgggctccgaagggtggaaccagcagcatgagaacctggagaagctgaacatgcaagccatcctcgatgccacagtcagccagggcgagcccattcaggagctgctggtcacccatgggaaggtcccaacactggtggaggagctgatcgcagtggagatgtggaagcagaaggtgttccctgtgttctgcagggtggaggacttcaagccccagaacaccttccccatctacatggtggtgcaccacgaggcctccatcatcaacctcttggagacagtgttcttccacaaggaggtgtgtgagtcagcagaagacactgtcttggacttggtagactattgccaccgcaaactgaccctgctggtggcccagagtggctgtggtggcccccctgagggggagggatcccaggacagcaaccccatgcaggagctgcagaagcaggcagagctgatggaatttgagattgcactgaaggccctctcagtactacgctacatcacagactgtgtggacagcctctctctcagcaccttgagccgtatgcttagcacacacaacctgccctgcctcctggtggaactgctggagcatagtccctggagccggcgggaaggaggcaagctgcagcagttcgagggcagccgttggcatactgtggccccctcagagcagcaaaagctgagcaagttggacgggcaagtgtggatcgccctgtacaacctgctgctaagccctgaggctcaggcgcgctactgcctcacaagttttgccaagggacggctactcaagcttcgggccttcctcacagacacactgctggaccagctgcccaacctggcccacttgcagagtttcctggcccatctgaccctaactgaaacccagcctcctaagaaggacctggtgttggaacagatcccagaaatctgggagcggctggagcgagaaaacagaggcaagtggcaggcaattgccaagcaccagctccagcatgtgttcagcccctcagagcaggacctgcggctgcaggcgcgaaggtgggctgagacctacaggctggatgtgctagaggcagtggctccagagcggccccgctgtgcttactgcagtgcagaggcttctaagcgctgctcacgatgccagaatgagtggtattgctgcagggagtgccaagtcaagcactgggaaaagcatggaaagacttgtgtcctggcagcccagggtgacagagccaaatgagggctgcagttgctgagggccgaccacccatgccaagggaatccacccagaatgcacccctgaacctcaagatcacggtccagcctctgccggagccccagtctccgcagtggagagcagagcgggcggtaaagctgctgaccgatctccctcctcctcaccccaagtgaaggctcgagacttcctgccccacccagtgggtaggccaagtgtgttgcttcagcaaaccggaccaggagggccagggccggatgtggggaccctcttcctctagcacagtaaagctggcctccagaaaaaaaaatattattattgtctttcttaattatccctttataatcttatggttgattttaagtctctattttttttattaaaccttgggggggggcgggggccccataccccctattaggggggatattacccccccctctggcgcgtgttt

SEQ ID NO: 19908 - DNA, 1661 bp, Homo sapiens
cgtttccatggctgcgagaactgacgctccccaaccgtcccgcaactgtcctgtcccagactttggcaccgtcggggtccgtcgtccccgaatgtgacagcatccccaccccggctgctgcccaggatccgccggaccccggcctcgatatgggagacctggaactgctgctgcccggggaagctgaagtgctggtgcggggtctgcgcagcttcccgctacgcgagatgggctccgaagggtcccaacactggtggaggagctgatcgcagtggagatgtggaagcagaaggtgttccctgtgttctgcagggtggaggacttcaagccccagaacaccttccccatctacatggtggtgcaccacgaggcctccatcatcaacctcttggagacagtgttcttccacaaggaggtgtgtgagtcagcagaagacactgtcttggacttggtagactattgccaccgcaaactgaccctgctggtggcccagagtggctgtggtggcccccctgagggggagggatcccaggacagcaaccccatgcaggagctgcagaagcaggcagagctgatggaatttgagattgcactgaaggccctctcagtactacgctacatcacagactgtgtggacagcctctctctcagcaccttgagccgtatgcttagcacacacaacctgccctgcctcctggtggaactgctggagcatagtccctggagccggcgggaaggaggcaagctgcagcagttcgagggcagccgttggcatactgtggccccctcagagcagcaaaagctgagcaagttggacgggcaagtgtggatcgccctgtacaacctgctgctaagccctgaggctcaggcgcgctactgcctcacaagttttgccaagggacggctactcaagcttcgggccttcctcacagacacactgctggaccagctgcccaacctggcccacttgcagagtttcctggcccatctgaccctaactgaaacccagcctcctaagaaggacctggtgttggaacagatcccagaaatctgggagcggctggagcgagaaaacagaggcaagtggcaggcaattgccaagcaccagctccagcatgtgttcagcccctcagagcaggacctgcggctgcaggcgcgaaggtgggctgagacctacaggctggatgtgctagaggcagtggctccagagcggccccgctgtgcttactgcagtgcagaggcttctaagcgctgctcacgatgccagaatgagtggtattgctgcagggagtgccaagtcaagcactgggaaaagcatggaaagacttgtgtcctggcagcccagggtgacagagccaaatgagggctgcagttgctgagggccgaccacccatgccaagggaatccacccagaatgcacccctgaacctcaagatcacggtccagcctctgccggagccccagtctccgcagtggagagcagagcgggcggtaaagctgctgaccgatctccctcctcctcaccccaagtgaaggctcgagacttcctgccccacccagtgggtaggccaagtgtgttgcttcagcaaaccggaccaggagggccagggccggatgtggggaccctcttcctctagcacagtaaagctggcctccagaaa

SEQ ID NO: 19909 - DNA, 1632 bp, Homo sapiens
cgtttccatggctgcgagaactgacgctccccaaccgtcccgcaactgtcctgtcccagactttggcaccgtcggggtccgtcgtccccgaatgtgacagcatccccaccccggctgctgcccaggatccgccggaccccggcctcgatatgggagacctggaactgctgctgcccggggaagctgaagtgctggtgcggggtctgcgcagcttcccgctacgcgagatgggctccgaagggtggaaccagcagcatgagaacctggagaagctgaacatgcaagccatcctcgatgccacagtcagccagggcgagcccattcaggagctgctggtcacccatgggaaggtcccaacactggtggaggagctgatcgcagtggagatgtggaagcagaaggtgttccctgtgttctgcagggtggaggacttcaagccccagaacaccttccccatctacatggtggtgcaccacgaggcctccatcatcaacctcttggagacagtgttcttccacaaggagctgcagaagcaggcagagctgatggaatttgagattgcactgaaggccctctcagtactacgctacatcacagactgtgtggacagcctctctctcagcaccttgagccgtatgcttagcacacacaacctgccctgcctcctggtggaactgctggagcatagtccctggagccggcgggaaggaggcaagctgcagcagttcgagggcagccgttggcatactgtggccccctcagagcagcaaaagctgagcaagttggacgggcaagtgtggatcgccctgtacaacctgctgctaagccctgaggctcaggcgcgctactgcctcacaagttttgccaagggacggctactcaagcttcgggccttcctcacagacacactgctggaccagctgcccaacctggcccacttgcagagtttcctggcccatctgaccctaactgaaacccagcctcctaagaaggacctggtgttggaacagatcccagaaatctgggagcggctggagcgagaaaacagaggcaagtggcaggcaattgccaagcaccagctccagcatgtgttcagcccctcagagcaggacctgcggctgcaggcgcgaaggtgggctgagacctacaggctggatgtgctagaggcagtggctccagagcggccccgctgtgcttactgcagtgcagaggcttctaagcgctgctcacgatgccagaatgagtggtattgctgcagggagtgccaagtcaagcactgggaaaagcatggaaagacttgtgtcctggcagcccagggtgacagagccaaatgagggctgcagttgctgagggccgaccacccatgccaagggaatccacccagaatgcacccctgaacctcaagatcacggtccagcctctgccggagccccagtctccgcagtggagagcagagcgggcggtaaagctgctgaccgatctccctcctcctcaccccaagtgaaggctcgagacttcctgccccacccagtgggtaggccaagtgtgttgcttcagcaaaccggaccaggagggccagggccggatgtggggaccctcttcctctagcacagtaaagctggcctccagaaa

SEQ ID NO: 19910 - DNA, 1718 bp, Homo sapiens
ccacagaggtgttgggagcagctggtaatgaaggtccaaggtgcaagagagaagtcaggaaggatactcatgggtctggaatagtttaggggcccagcagtgtttggggatatcagggttgagctgagccggggatgggagggttgccaggcaaaggtaggcccatctcatccctgtcctttaccctacccttcaaaggtcccaacactggtggaggagctgatcgcagtggagatgtggaagcagaaggtgttccctgtgttctgcagggtggaggacttcaagccccagaacaccttccccatctacatggtggtgcaccacgaggcctccatcatcaacctcttggagacagtgttcttccacaaggaggtgtgtgagtcagcagaagacactgtcttggacttggtagactattgccaccgcaaactgaccctgctggtggcccagagtggctgtggtggcccccctgagggggagggatcccaggacagcaaccccatgcaggtgggttgaggttacctagggttgtgaaagcctaggtctgggttccccaaggcctgcgcaggtgagggtggcccagcgtgaacactgtgtgacctcccaggagctgcagaagcaggcagagctgatggaatttgagattgcactgaaggccctctcagtactacgctacatcacagactgtgtggacagcctctctctcagcaccttgagccgtatgcttagcacacacaacctgccctgcctcctggtggaactgctggagcatagtccctggagccggcgggaaggaggcaagctgcagcagttcgagggcagccgttggcatactgtggccccctcagagcagcaaaagctgagcaagttggacgggcaagtgtggatcgccctgtacaacctgctgctaagccctgaggctcaggcgcgctactgcctcacaagttttgccaagggacggctactcaagcttcgggccttcctcacagacacactgctggaccagctgcccaacctggcccacttgcagagtttcctggcccatctgaccctaactgaaacccagcctcctaagaaggacctggtgttggaacagatcccagaaatctgggagcggctggagcgagaaaacagaggcaagtggcaggcaattgccaagcaccagctccagcatgtgttcagcccctcagagcaggacctgcggctgcaggcgcgaaggtgggctgagacctacaggctggatgtgctagaggcagtggctccagagcggccccgctgtgcttactgcagtgcagaggcttctaagcgctgctcacgatgccagaatgagtggtattgctgcagggagtgccaagtcaagcactgggaaaagcatggaaagacttgtgtcctggcagcccagggtgacagagccaaatgagggctgcagttgctgagggccgaccacccatgccaagggaatccacccagaatgcacccctgaacctcaagatcacggtccagcctctgccggagccccagtctccgcagtggagagcagagcgggcggtaaagctgctgaccgatctccctcctcctcaccccaagtgaaggctcgagacttcctgccccacccagtgggtaggccaagtgtgttgcttcagcaaaccggaccaggagggccagggccggatgtggggaccctcttcctctagcacagtaaagctggcctccagaaa

SEQ ID NO: 19911 - DNA, 619 bp, Homo sapiens
agtccgactgggcctgggcctactgtggagggctggaagaccgggcctgtagcctgcctctactcacctccttcacaacgtccctgcccctagcctctctctcagcaccttgagccgtatgcttagcacacacaacctgccctgcctcctggtggaactgctggagcatagtccctggagccggcgggaaggaggtagggtcctcccccaccagcctaagccccaggctactgcttcagggtatctttttgatagaggggggcagcttgcacacacgaagacaaaccctgtccccaagcccactgaggataccaggatgcctcagccaaggttggcctagacctgagctctgcagcaggccaggcccatgtgtccactactgaggctcaccctgctctggggtcagcagccctatagcctgggcaagtcctgcagcccaggttctcccattcccaggcagtggtcagtctcccagcccccacagctggctcacttgaagagaattcaacgtctgcacccagtgtgctggttcctctccccaggcaagctgcagcagttcgagggcagccgttggcatactgtggccccctcagagcagcaaaagctgagcaagttggac

SEQ ID NO: 19912 - DNA, 665 bp, Homo sapiens
ctggccgcccctttgggcggagaggggacctcaccagtttttttagtatcgcccacgcccagttccctggccgagtccgcagggccctcctagagccaggtgggagtggggagcgacccgcagctgctcactccaccttgcgcggcccatactgggcgtgtgcatctgaatcccgctggagagcaaacacgaacttctgttccctgcaaaatggttagaaagaaacagctggattacgttcctctaaaaaccacctgaacgtaaccttcgcagggcgtcaagtcatcttttcttgccttcggttgtggcttctgtggctttcccgatttgcacatgtcctggggtactatgaacgtgagtggggtattttgttctggcattaaaagaaaaacaagcaagcaaacaaaaacacagcctccgatgccaaacatgttcccccttcttcacttccttggaactggaagtattattcctaagtctagtgcaaaatgcttctactctctgtgtcttcctgatagggatgtttaatgtaagtaggatattaatttcagaacattgatttcttatctgtgtgtctgacgtgccatctttaatgttaaaattaaggtgttaaaattaagcctagttatatagacgaaataaaatgctaagtcactaaaaaacat

SEQ ID NO: 19913 - DNA, 648 bp, Homo sapiens
taacacttactggcctcttgttagtgattttattaatattctttctcatcaaagtgtggccaagagatttttggaggatcacggtttgttagttacatggatgaactttgtatctttctttcaaggtatgaacttaaacaagcgagaactaaacgagcatgtggaatttgagtctcagacctactatgctgcctttgctgctgaacttgaggcctgtgcacagccaatgtgggggcttttatcacattgtaaagttagggaaactcaagagtatacccgaaatgttgttagatattgccttgaagctcttcaagactggtttgatgctattaacttcgtagacgagccagcacctaaccaagtcacttttcatctgccactacatcgttactatgctatgtttttgagtaaggctgtgaaatgtcaagaactagatttggattctgttttaccagatcaggaaatgttaatgaaactaatgattcacccactccaaattcaagcaagtcttgcagaaatccacagcaatatgtgggtaagaaatggtctgcaaatcaaaggacaagccatgacgtatgtccagtctcatttctgtaattccatgattgatcctgacatttacctgttacaggtaagccagctagataa

SEQ ID NO: 19914 - DNA, 466 bp, Homo sapiens
ctgatggtcagcgtttaccgggtccatgttgacactatgtagcttgctactgtgccccaagaagggcacaagctcgttactgtgttgttcttgccagaattgcataacctcaatctagtaatgaggaaatactagacaaacccaaatggaagtttctgtaaaacaactgaccagtggggaaacaaagactggccacacttagagaatggaggagaccaaagagatgtgacaggcaggatcctgggccaagaaaagagcatcggtgaagttgaagtttcacttcaaacttgtgaagtttcagtaaggcctgttgatgaattaatagtaatatgtccatgttagtttcaataattatacagttatgtaaggtgttaacattaggggaagctggataaagggcatataggaactctgtgtactcattttgtaacccttttgttagtgtaaaattattttttaaaagtct

SEQ ID NO: 19915 - DNA, 404 bp, Homo sapiens
tacttttgaatattttatcaacatttttatccaaaagaataagggcagaatcatcaagtaaggcatggaagaggacagggaggacatagaaaaaataggcagtgtcaaaatcagactctgaaaaccagcagcccaataactgaacctatagacatgtactgtttggccagcacagtagtggcccacttgttgattttaattttttaagttattggctgatatgtacaaatcagggtttttcataggaactcagatttctaatttgtagttaaaatgttgtagtgtactccaggtatctggcaatgctgagccaccttttcccagtccctgatcagcgggattccctggagaaggagcctctcactccccacatacattctccttctgaaatgtacagtacctcc

SEQ ID NO: 19916 - DNA, 203 bp, Homo sapiens
agaaatcactcactatcatgagaacagcagcctgggggtaactgctcccatgattcatttacctccccactgagttcctcccacaacatgtggggattatggcaactaaaattaaagacgagatttgggtggggatatagccaaacaatatcaatgtccaaaagactaggaaaggataggaaatgaaaaagtaatctataatc

SEQ ID NO: 19917 - DNA, 432 bp, Homo sapiens
tgtcctgaaatggttaattcactgtccaaaaatagctttcagaatgcattagaagtaataaatagagtaagcttaagaaacacttgagtatgacaaattagcaagctatattaactcaattcaggtaatatcagtaaatctcatacaatttaagaatgacagcccaggcagtagctggacagaaatggccttggtgaaattaagaacaagggcataagtgacacaagaaagctctgggaagatatttcagatggtattttagtgggttgaatctgggatgggatagggaagggataaggaatgacatgggatggtcagttggccattacattcagtctccagggatgtttgccatttctcataggcaaagctattcccgaaggtatattgattatgatttttttttcagattgggtttggagaggccgtgtg

SEQ ID NO: 19918 - DNA, 647 bp, Homo sapiens
cgatggagcttccgaggggaaacggctgggtatcttataagtcctgagggccttcactccccaccatgtcttttgtacattttttttttccttttagagacaggatgtcactctgctgcctaggctggagtatagtggtgggatcatagctcactgcaagctcgacctcctggattcaagtgaacttactgccttgacctcccaaatagctgggactacaggcgtgcaccaccatgctcggctaatttttaaaatgtttatggagatggggtcttgctctgttgctcaggcttgtctcaaactcctggcctcagatgatcctcctgcttttgggtcccaaagtgctgggattgcagatgtggctcaccacgcccagcctgaacatcgtctttcttaggtgacttcctccacatagttatttgtgaattgtaatattgtgtggcaatattatccaaaaagtatttgtttttattgtattttgcaatccctaggacatattaaatagctcaagtgatgggatgttcttcttaaaattcgatctcatagtctaaaatggtgacttgcacatgagttagcctcattaagtcctggacgaatggcaaatgctataatttcctgtctcacttctggatatcacagtgtcatct

SEQ ID NO: 19919 - DNA, 197 bp, Homo sapiens
gttagggaggcactgatccagtgaagtcctcagatcaaccttgtgagctttttacaagtacctgtcactgttaaactgctgatgaaatgtgaaacgacttcacaggttttcagtctgataagctctcctgtgtcactgtcccttaccttgttagtaaaggtcaatggttctcaaagttccgggcacatcccctgggg

SEQ ID NO: 19920 - DNA, 261 bp, Homo sapiens
caggagttgaagaccaatctgggcagtgtagcaagacccctgcctctacaaaaaattttaaaattagctgggcatggtggtgcatgcctatagtcccagctactcaagaggctacagtgggagaattgcttgagcccaaaaggtcaaagctgcagtgagccacgattgcaccactgcaaaaaaagaaaaaagaaaaagcaggccgggcgcattggctcacgtctgtaatcccagcacttgggaggctaatcacgaggtcag

SEQ ID NO: 19921 - DNA, 423 bp, Homo sapiens
gactgagaaggggcacaagggtatctcctggagtgacagaaacattctatatcttcatctgggtggttacacagttgtgtgtgtataacaagttattaaaatacagactttggagtcatgcattttactgtgattacacctcagtaaaaatcgttttaaatacccaagagctatgacttctcatcaataacttaggctcactagttatcctgattctagtgcttcctagatgtataaccacggcagactagcaactgaactattctgtgctactcttattacctatgttttaaagaacagtagcatagagcagttcaattacttgtctcccagcgttaccaggattacacctcagggcatgctgggaaggttatatgagaagtgtatgcggcatttcaaagtgtcaggcacacgatgaatgct

SEQ ID NO: 19922 - DNA, 447 bp, Homo sapiens
acacttcctaggagttgaaggatgcaaagcaactcagtcaacattccctgtcctcaagaaattgacaatccaataaatttcctagaacagcagttctcaaccagaggtgggcaactgttccccagggcatttttggttgtcacggctggacctgagggaaggggctgctactggcatctaatgggtagacgccaggaatgctgttaagcatcctacaatgcacacggcacacctcccacaacaaagaattattcagtccaaaatgttaataggtttgtggttgagaaattctctcctagaatgatcacaactagaacacgaaaatgtccgcaactaggatggatctcttgtatctttccaatggagcatcaaaaacatatgtcctaaggatctccttattcccagagcccagaattcgcccatgagtttcccttaattccaccatcc

SEQ ID NO: 19923 - DNA, 377 bp, Homo sapiens
atggactaggaagtctgccttggaaattagggcttattctttgaaaaaccacagatgtatttattatttgagacaaatgtgtagtatgggatcttttctccctccgataatattaaatgctgtgttctcacttgtaagtgggagccaaacaatggttacacatggacatacatagggaaataatagacactggggactctaaaagcggggagagtgagaagaggatgaagattgaaaaattgcctattgagtacaatcttcactattatggttacaggtatgctagaagcccaaacctcaccatcacacaatatatctatgtaacagacctacacatgtaccctctgaatcaataaaaataatatgaaatgctgtat

SEQ ID NO: 19924 - DNA, 336 bp, Homo sapiens
gtggaagggaggctgtatgcatatagaatgttattattggaactttattattgtcacattgatgttacatttctcaggaaatatatgctaatgtgtttctacttgctttttttaaggccttgagtagatgtgctgaatattgaagctatttggctgcctagaaaatatatcttacaatttataagctgtatgttattatttaaaaaaaaaatcaataatctcccagaattttgcatgaataatatagagatagaaacttaggtgatttacgtcttgtggtattcagtttttaagatacgtacagatgacataccaggcaaccaataaaaaactata

SEQ ID NO: 19925 - DNA, 597 bp, Homo sapiens
caggatttctggcctctctagtgtgagcagctgctctgtcctcaaaatctcattggccccctactgcctcctcctaaaggatgctctcaagtacctccccaacatgtagggccaggtctgaaagggccttgatcctcggctgctggtgacttttcaaagcaactgtctttccctccttaccttgcccgtggtccgttgtgccctttctttgctccttctgcctaatgcagtagtcacaagacaagggagctttctgtcaactggcaggacttgagcacaagcagctgtgtgccgtggggaggaaatcttgtgttattacacacccaggacctctgagtccacacagcttatcgtataccttatccacacctctggctccactggtttttgtttttgtttagaacatttccttctccctaaatctgccttggatcctaggcccttttttgcagtagtgcctgatctcctgactcaaaaacccattttatgcaagggaaatggttgcagatttaggaaaccgctttaaaaaacagttaactaaaaatttcaaggtgcctaaaaatctaaaataaaatcaaatatttttgtccagcaatc

SEQ ID NO: 19926 - DNA, 244 bp, Homo sapiens
tgcctcaccctccccagtagctgggactactggcatccaccaccaagctcgactaacttttttttgtatttttagtagagacagggtttcgccgtgttggccgggctggtcttgaactcctgacctcaggtgatctgcccaccttggtctcaaagtcctgggattataggcgtgagccacccagcccatgccctgcaaattttaaaatgctgcatgttttacaggaaagggtctggccccggga

SEQ ID NO: 19927 - DNA, 341 bp, Homo sapiens
cgtgccaccctgcccagctaatttttgtatttttatgtagagatgcggtcacactatatttcctatgctactcttaaaatcctggtctcaagtgatcctcctgcctcgggctcccgaagcactaggattacaggtgtgagccactgtgcctcaggcctttacagtatccacttttaaaaattacatttggaagctgggcatagtggcacatgcctgtattcccaactactcaggaggaaggatcgcatcagcccaggagttcaagggtattgtgagtgataattgtgcctgtgaatagcccctgcactcctgcctgggcaacatagcaggaccctatgttt

SEQ ID NO: 19928 - DNA, 421 bp, Homo sapiens
gcatgttttaaaaaggctggaacctcttctcttttcaacaaagaaaaatttattgtagccacatgagccaaacacatgataaggaacttatgtgcaaagaaatgatttgggccatatatccttcagtggaaactttaagagcatctaatcacctacatattttagttaaatcatagtaaacatcaagcatctgcatatttgagagatgcaaacatgctgagttttgtatttttgtctgagtatttggagtcacacaggttcatttcaatgactgaatacagagctatacctaagaagccctcataactggtcaagaatgactctagctcttcattctcaccacccgtattccccggaaaatttccatattgttcagatctccacgaagccaattctcttatttgaggaaggtatatttccc

SEQ ID NO: 19929 - DNA, 363 bp, Homo sapiens
gtgtcccccaggcctcctgacagggcaggtgtagatggagtgtggcgacctggccactctgggctttccaccactcatggtgcttgtaatccagtgacatcaggattgaaaaaatagggccaggcacggtggcttatgcctataattccagcactctgggaggccgaggtgggtgcatcacttgaggtcaggagtttgagactaccctgcaacatgctatctctactaaatgtacaaaaattagccagatttggtggtgagcgcctgtaaccccagctactcgggaggctgaggtgggaggatcgcttgaacccgggaggcggaagttgcagtgagccaagatcgcaccactgcactccagcc

SEQ ID NO: 19930 - DNA, 615 bp, Homo sapiens
taattcacaacattttcatcactccaaaaagaaaccctatacccgataagtagtcactgtaagttcttttttagttcattatatcaggactgctggtatgccatgtgatgactcaattttctcaccatttttctgcattcaaggcactgagaaactcactgataatgtaatttcgctttcacttggtaggatgcgtcatttacatattaggttcacctctgctcctttttatttagtcctcaacgattaaattataactacttgacactagtacacccctaaacaggaatgtgaaaaccaaacatgatgcagtactagatatgaaggtgatcagccagatgattccgaatacccttatattaactttttaacagtcataagaatgaaaatacatcattaaaaaaaaaatgtcatagagaactcatggagcactgagactatctcaagatcccagattgagaaacgttatttatgattcttgagtttttatgtgtgctgtttaatgagaatgaggagcctgggcattttaaatctcttattatacttttaaatgtttagaataattgcccttctgtctgaaaattatctttttgggaaagtcttattcatatctca

SEQ ID NO: 19931 - DNA, 283 bp, Homo sapiens
ttcccagaaaataaggaaatgctcaaaaaagggtatagatatatagaaaggacaccagacccaaccgaagcagctcccagtggctgaagctgaaacaatttgaacaataaaattagtgacagtgtgggattatcacctagagaataaaataaatatccaaactgctataagtaattgaataaatacctaaatggagggagaagggacagatcttccttacagatgagtcacactacactctagcctgagcaatacagcaagactccatcttcaacaaccaaaa

SEQ ID NO: 19932 - DNA, 366 bp, Homo sapiens
tttgacggagtctcgctctgttgcccaggctggagtgcagtggcatgatctccgctcactgcaagctccacctcccgggttcaggccattctcctgcctcagcctcctgagtagttgggactaccagcgtccaccaccacgcctggctaattttttgtatttttagtagagacggggtttcacagtgttaaccaggatggtcgcgatttcctgacctcgtgatccacccgcctcagcctcccaaagtgctgggattacaggcgtgagccactgtgcctggccaatgacaaaccagcttcttaagtgatcataaaccagcaccaggcagattaaagacaaaatgggcagattctgtacttaaaagca

SEQ ID NO: 19933 - DNA, 551 bp, Homo sapiens
cacggtgtcttggaaaatggaaagaattgggagccttcctaccgctggtgaaatctaggagtggcagttgagggcttctgttcacaaagtctggccatgtttctgtagggctgctgtactttgctgggcttcttctccagttcctagtctccttggattttccagtacctggagctatcaccagtgaaggctgtgaaacagcaaagatgtcagcctgcctcttcctctgggagctccggcccagcgaggcacagacctgttgccagcccaaatgcgcctgcaggacaaggctggagaccctggttgggaggtctcacccagtcaggaggaacgggatcagggaactgcttaaagaagcagtctgtccatgctttcacagatcagctgtgctgtgctggggcactgcttccacccctggttggtgtgggctccccaaagcctggaggccggaacagctaagtcgcccaaacagcaaagatggtggcccctccctctccgggagctctgtcccagggagaattcaaatctctgtcagccagagaacaccagta

SEQ ID NO: 19934 - DNA, 426 bp, Homo sapiens
gcaatagtaaatccttccctatcagtaattactttaaatgtaaatggtttaaattccccaatcaaaagacataaagtggatgaatggattcaaaaaagcaagatccagcaatgtgttgtctataagagattcactttaaatttaaggacacatataggctgaaagtaaaaggatagaaaaagatattctgtgcaaatggtaactaaaccagaaaagggtggctatagttatatcagacaagataggctttaagtaagaaactgtcacaagagacaaagaaagatgccatataatgatgaaagggtcaatccacccaaaatatataacaattataaatatatatgcacccaacattagagcacctaaatatataaagtaagcattgacagaactgaagggagacacagacagcaatacttaatagta

SEQ ID NO: 19935 - DNA, 902 bp, Homo sapiens
ggatattgaatgttcctaacacaaagaaatgataaatgtttgagatggtggatgtactaattgccctgatctgatgactatacattatatatattgaaacatcagtatgtaccccatgaatatgtacaattatatgtcaacttaaacacatttaaaagtaaaaaaaaaaaaatccaaaacacgcaaggaactgagccagcacgaataagaattagcaaaatcttcaaacctcaagaccagactcacaaggacttcagatacagaaattttaaataaaaattataaaatgagtatgttaaaatgtttaaagaaataaaggaaggcattggtatatgatacagaaataaaagaccatcaaaaataatttggatgacatgaaaacaatcaaatagacattctggaaataaaacatatataatggacaggagtgaatgtccctaggctcctgacctctctgcatttgcaagtagtctgagccagaaaacgctgaaagacctcagaagccaagtggaagccccacagtgaagccaggagggccttcatttcagactcagcagctgcccacggtggtggctgacacactgctgtagcatgtgtgctgcctgaacactcactggccacccccacagcccagagcactggcatcatctgtactatcggcctagtttcctgattggtggaaatgttgatgattaagtctggaattaatatggcttgtctgaacttacgagtaccacgcagagaccatcaggaatgtgtgcacaactatggaaagccttgcttctgaccccaatctctagcggctagttgctgtggctctggacactaacgggcctgagatctgaactgggctcacacagagcagtgtccccatggaggtggagctgaagaagggagccacc

SEQ ID NO: 19936 - DNA, 436 bp, Homo sapiens
aaatactcagatttaaaattactttaaagtcctggtacttaacaggctaacgtagataaacaccttaataatctcagttaatactgtatttcaaaacacatttaactgttttctaatgctttgcattatcagttacaacctagagagattttgagcctcatatttctttgatacttgaaatagagggagctagaacacttaatgtttaatctgttaaacctgctgcaagagccataactttgaggcattttctaaatgaactgtggggatccaggatttgtaatttcttgatctaaactttatgctgcataaatcacttatcggaaatgcacatttcatagtgtgaagcactcatttctaaaccttattatctaagggtaatatatgcacctttcagaaatttgtgttcgagtaagtaaagcatattagaataatt

SEQ ID NO: 19937 - DNA, 1843 bp, Homo sapiens
gaatttagtactatttatgtagtcctcagttgtgatgggcagacagttgaaccttgtacaccatatttagaaaaaaaacacaaaaaaccttttggccaggcgtggtggctcatgcctataatcccagcactttgggaggccaaggtgggcagatcacctgaggtcaggagaacatgacgaaacctcgtctctactaaaaatacgaaaattagccaggcgtggtggcagatgcctgtaatcccagctcctagggaggctgaggcaggggaatcgtttgaacctcagaggtggaggctgcagtgagccaagatctcaccactgcactccagcatggatgcccagcctggatgacagagcaagactccatctcaaaaacaaacaaccaacctactttttgtataggtatagtttgaacctagtattcagaccagtaaaatgaaaaccttgcagtaaatgcttcccagtctttattgggctaaaataggccacgtgtgcttttagaaagatggccgcataataacatgtttattgaatgcctttttacctaacatgcaggttctactttattttcccactttgtacaagacaagcagtttttgttcttataagtagtgaggaagtcaatatagtagatttacgacattgcattttcaagccactgggtgtaaaaataaaattactcaaaatatgtaaaaccactgaaaacaatgatttaattgaaccagtcaaacattatttaaaattgagagctggtgtcccatccaggtaggccacttttaaaagacagattttaagtttagtctttaaagttttcaggctgtaccatgttgtccttccattagatgtctgaaaacttgaaaaactgccgtatcatctcacagtgatgcttttttgtggtgtgggcagggaatttcaggcacacttttgccaatcccacaccagggaaagctatagtctttggttgcctgtggttaaggaattgagttaaaagtttcctttttatctcagggatttgcaggagttatttattcattcatcagatatttacttaactcttaactcatgccagaggcacttgaagatacctgattcctgtcctcaggaagtttagagttgagatgtggggaaacggagaagtaaataagtacagcagagggctaaaagtgctgttttaatagaagtttgcacaacccaaaggagacagaggtctatataggtccatcatgggaatcagaggttgaggatgcccaggttgatgaagcttaaattgagcttcccctttagaagagagctgccaccagtaaagacacagaagtgcaagacattaaaaagctattctagccagtagggtagagtagaagcaaggactttgtggtcagatgtgggtttgtttctggctagtggtttgtaacccctaggcaagttacttaatcttgctaagtaaaccttagtttcctcatctgtaaagccaggatgataataacacctccctcaaagttgttaattcattttgcaattcacgtgttgagtactttttaagggactgggaatacagcaatgaacagcacaggtctgaatgaggaaggtaggaccgggtcacgaaggtatgccaccagttaacaaagacactctcaaaacaggaaggatggcaagtcgttaaaataacatccagggctccatttttacctgaagaagaatagatgataagaattattttaggtgattaggttaagaatgagtttgcgctggtccgagtgcagtggtgtttacaactaattgatcacaactagttacagattatttgttccttctccactctcactgcttcacttgactagcttta

SEQ ID NO: 19938 - DNA, 1726 bp, Homo sapiens
aaacacccctgctgagtacctactgtatgtgagtcactgtgcaggcactagaaatataaagcaaaaaaaacagattctacccaccgggagctcctagtccagtggtgaagaggtgtattaaccctcaaggccctaagaaaatccccaatagggctctgcacaagccgggctctgataggaggtgccagtgcttttcttcttccagtttcagagccccagcgatcccaggatgaaggagagcccatttgcaaccctcttctgtctccctaagcattcaacaaacacttagtgaccatctgtcttgtgcaaaaagcttggggagtgataaaaacaaatcaaattcacattttaatttagggagtttaggagatacatcctagtgtggatttcacatggtcaatgatttgctttccttgaatttgccctctgcaaccaacacctgttcgtgctatgagactgaagtcctcctagaccgccccattcatctgagtagttagggctctggatgaaggagcaaatggacaaaataagccccctcttgctcaggacctgactaacatttcagaactgcggtcacccattttatacaaaccaaagcacttctgacagacctctgaatttgcattaaaaagagcacgtctacagctcctaacaatcaaaaacaactatgaacactgcttgcttcagtgatacaaacagacattttcttgttacatgtgtggtgatctgagaatggtgactttggacccagtttgactggttagcgtttaaataaaacttaacagactaggcaactaaaggaactcagtaaaagatcaaaagcaatgctcaaagggagtgcctgggtaaccatgatgtaattgcagattgacacatctttgggtttttcattattgtttctaaaaactagatattattgctttattattatgttgatgatgattattgaaagcacgatagcaatgtttaagtggtgagaatgactctaagcctcttttgttgctgtgactgacagaactaaagggagtttgctctcacattcacaataccaactctgccatcttatggaaaatattggaagtacctagggcatttcattatatttcaaaggcacaggttgctggtaagagggacagaaagacaagaacatagtaccttctatttctactacatgtttttaatctttaacatttttaccagcagaaatcattttttttttaaatctctcaatcttcaaataattcttagattgcttgccagcaaagatgtctcttgatcttgacactggaattcaatgtaaaaatcttgaatgatattttgtactgatatgaatttctactgtcccataacactgtgtagtgacttcactgtatattaacttcttttctacagatgtttgacttatgagatgaattaattgaaaaagtcaaagcctatcaggagctatcttatatgatgttggtagcctgtgaaaaaataaatgtcttttttcttatacaaactgataacaagacttgctttcacaattactatttacatttttgtgcatataatgcctgtatattatactcatatttgaaagtgatcagaaagtgttatttaacagaaactacatacattttttatgtctctctggaccctttgattctaagtaaatttacagtaagttagcagtaatagactattcttttcaactatgaataaaatgtacactgaagtacaagat

SEQ ID NO: 19939 - DNA, 395 bp, Homo sapiens
tatatagaaaatgtttctcacaaggttgctgtatttaggtttgtgccttattgcaaatgctatcatgtttacacataaaaatggaatatgggccgggtgtggtggctcacgcctgtaatcccaacactttgggaggcccaggcaggtggatcatgaggtcaggagatcgagaccatcctggccaatgtggtgaaaccccgtctctactaaaaatacaaaaattagctgggtgtggtggcacatgcctgtagtctcagctactcaggaggctgaagcaggagaatcgcttgaacccgggaggtggaggttgcagtgaaccaagatcgcaccactgcattccaggctgggtgaccaagtgagactccgtcttgaaaaaaaaaaacatggaatatgta

SEQ ID NO: 19940 - DNA, 207 bp, Homo sapiens
ctgactattgccacttagcagatatcagattccccatgtttgtaccacttaattacaaagaccaattgatgagagcaaaacaatagtttctactagcaaagggagtagagtgagtacgcagaaataagaatcaggacaaaaccagattgggccaggaaccagattcagttcacacaatttaagaattatctgctgaatggagaaact

SEQ ID NO: 19941 - DNA, 526 bp, Homo sapiens
gaaaattttatattctataaaaatatttttcaaatctcttcctgacatttattggagaagattaaagtctttaatcctcaagctaatttctatgtggtcctcataaaattccactataattccattatcgggaggctggccatagaggaaacttgagtcttcaacctaatgtaaaaatctgcctttagacagatgtgtagatttttcttaatgtcaaaaactagttaccggtaggccaggtgcagtggctcacacctgtaatccctcctgcactttgggaggccaagatgggcagatcacttgaggtcaggagttcgagaccagcctagctaacatggtaaaaccctgtctggactaaaaatacaaaaattagccaggtgtggtggcagatgcctgtagtcccagctactcaggaggctgaggcaggagaattgcttgaacccgggaggtggaggttgcagtgagccgagatcacaccactgcacactgcactccagcctgggtgacagagcaagactccgtttca

SEQ ID NO: 19942 - DNA, 482 bp, Homo sapiens
gcacagtgtatctccaagtacagctcgtaggccctgggtggcagcaactgcaggttcccaggccccaaccaggacgtgctgattctgagtctcagtggacaaggcctgggaatcggcatttttagccagtctctccaggtgattctcgcaactcatgtgataccacatcccggaatccgcggctgactatacgtgcttggtttggtgggcgccgtgttgatcttctgtttttagagtgagactttctacattgtctcctgccaggtgggtggatccaaataccccagcccacgaggtttccagaaatggaatttctcccggtgctttcagtgtttttcttttaaaattaacattcaattctggcaggacacagtggctcacacctgtaatcccaacactttaggaggccgaggcaggaggattgtttgaacccaagagtttcagaccagcctgggcaccacaggaagaccctgtctcaatga

SEQ ID NO: 19943 - DNA, 1280 bp, Homo sapiens
  misc_feature (1260)..(1260): n is a, c, g, or t
catgaaagacctgctgggctggatttactctcccatttgtcagataagaaaattgagtctcagaaaagttcagagacttttccatggtgtcttggctaatgcagcttgagagtaggtgccgttacaaagatatttaatggagaaaagaacccacacatctcagagtagggtcatttctggtcactgaaaagtgagtccacttggatccaggttgccagggaggaacaaacgtacagcacatgcgtggatgggatatccccacacaagaaaacgagcgcctcatgctgcttcccagaggttctctctgacctgaatggaaaagaagttggtctgagatcgaaggtactaaacagatcatcagactgaactctccacatgtcacctcatcatggtcatcatagtctcttagtttggaaacaaccttggctgcagggatgacctcagtggagagtcacaagaaggactgaggcgtcttctgcaagatactgccagccaggacagaggggtctcagcagagctcagtgggcttcattcagcaagtgccagcattaccatcctttcccaagggcaaggccatgcagagcttcattgggcctccatccctctctgagatttatcagtggaaacttggacccacttgatatcgttccactgagctgcctctaatcttgcattggacaggagctttggacaaagaagggaatattaagattgtgtgtacaaatggcacttaactgtgaaggaccacctaggagcaagatcttggaccattctgctcaacctaacagtgcagaatgctaagtaaggggaaaaccaggccacctgaagaatatctttaatgatggtattcttggtgatgggaccaacaagctccagaattactacaggtactatcttggaagccacttgattctgaaactgaggcaggttcaggtttggggtcactgattctaagacatttacagaagttcgtgcatgtgtttcagccatgatccccaagattgaggctattgagacatggcactatcaacaggtgaaattgattctcagagactcacaggtctcatgaaggggcagtgcagaaaatggcccttacctgctgcaccctagtgcacaggacttgcaatgttgcttgagagacatatcccaagtccttcttagaggcatggagtataacaacttcagtggaattgcacttccagtttggtaaccttagtaaatcttgtgttgttgtttaaaacctgcagcccgggaaatccnctgggtcttcagtacgcagt

SEQ ID NO: 19944 - DNA, 1787 bp, Homo sapiens
catgaaagacctgctgggctggatttactctcccatttgtcagataagaaaattgagtctcagaaaagttcagagacttttccatggtgtcttggctaatgcagcttgagagtaggtgccgttacaaagatatttaatggagaaaagaacccacacatctcagagtagggtcatttctggtcactgaaaagtgagtccacttggatccaggttgccagggaggaacaaacgtacagcacatgcgtggatgggatatccccacacaagaaaacgagcgcctcatgctgcttcccagaggttctctctgacctgaatggaaaagaagttggtctgagatcgaaggtactaaacagatcatcagactgaactctccacatgtcacctcatcatggtcatcatagtctcttagtttggaaacaaccttggctgcagggatgacctcagtggagagtcacaagaaggactgaggcgtcttctgcaagatactgccagccaggacagaggggtctcagcagagctcagtgggcttcattcagcaagtgccagcattaccatcctttcccaagggcaaggccatgcagagcttcattgggcctccatccctctctgagatttatcagtggaaacttggacccacttgatatcgttccactgagctgcctctaatcttgcattggacaggagctttggacaaagaagggaatattaagattgtgtgtacaaatggcacttaactgtgaaggaccacctaggagcaagatcttggaccattctgctcaacctaacagtgcagaatgctaagtaaggggaaaaccaggccacctgaagaatatctttaatgatggtattcttggtgatgggaccaacaagctccagaattactacaggtactatcttggaagccacttgattctgaaactgaggcaggttcaggtttggggtcactgattctaagacatttacagaagttcgtgcatgtgtttcagccatgatccccaagattgaggctattgagacatggcactatcaacaggtgaaattgattctcagagactcacaggtctcatgaaggggcagtgcagaaaatggcccttacctgctgcaccctagtgcacaggacttgcaatgttgcttgagagacatatcccaagtccttcttagaggcatggagtataacaacttcagtggaattgcacttccagtttggtaaccttagtaaatcttgtgttgttgtttaatcgtgccttgcaaatcatcctttaaacactatgactgtggtttcttgtggtggagtccctcatcatagtgaccctcatagcaacctctgaggttagcagagaaggtattattatctcgatctcaatgaggagaacaaggcttaatgaggtttagtgacttctcaaagccacatggttagtcaggggagaacctaatcccttatttcttatcttattctgattctggccatgctacaaacatgttctcacctgccccccatgcttctaccccaacagcaataaaaactgtaaagcaggaactctctagtacattgtgttgtccctaaactgatgggctaggaattgtgtctcattatggcttagtctttgtgggttttccccagtgagttgagagtggagatagacctagtaggatgattatattcaggtcagagaccagctcctctcaagagagttctttccacagatggaaaagatacgttaaaattgccaaataaattaggaaatacttggcagaacctggaagagcctccagactggcgttacata

SEQ ID NO: 19945 - DNA, 1536 bp, Homo sapiens
catgaaagacctgctgggctggatttactctcccatttgtcagataagaaaattgagtctcagaaaagttcagagacttttccatggtgtcttggctaatgcagcttgagagtaggtgccgttacaaagatatttaatggagaaaagaacccacacatctcagagtagggtcatttctggtcactgaaaagtgagtccacttggatccaggttgccagggaggaacaaacgtacagcacatgcgtggatgggatatccccacacaagaaaacgagcgcctcatgctgcttcccagaggttctctctgacctgaatggaaaagaagttggtctgagatcgaaggtactaaacagatcatcagactgaactctccacatgtcacctcatcatggtcatcatagtctcttagtttggaaacaaccttggctgcagggatgacctcagtggagagtcacaagaaggactgaggcgtcttctgcaagatactgccagccaggacagaggggtctcagcagagctcagtgggcttcattcagcaagtgccagcattaccatcctttcccaagggcaaggccatgcagagcttcattgggcctccatccctctctgagatttatcagtggaaacttggacccacttgatatcgttccactgagctgcctctaatcttgcattggacaggagctttggacaaagaagggaatattaagattgtgtgtacaaatggcacttaactgtgaaggaccacctaggagcaagatcttggaccattctgctcaacctaacagtgcagaatgctaagtaaggggaaaaccaggccacctgaagaatatctttaatgatggtattcttggtgatgggaccaacaagctccagaattactacaggtactatcttggaagccacttgattctgaaactgaggcaggttcaggtttggggtcactgattctaagacatttacagaagttcgtgcatgtgtttcagccatgatccccaagattgaggctattgagacatggcactatcaacaggtgaaattgattctcagagactcacaggtctcatgaaggggcagtgcagaaaatggcccttacctgctgcaccctagtgcacaggacttgcaatgttgcttgagagacatatcccaagtccttcttagaggcatggagtataacaacttcagtggaattgcacttccagtttggtaaccttagtaaatcttgtgttgttgtttaatcgtgccttgcaaatcatcctttaaacactatgactgtggtttcttgtggtggagtccctcatcatagtgaccctcatagcaacctctgaggttagcagagaaggtattattatctcgatctcaatgaggagaacaaggcttaatgaggtttagtgacttctcaaagccacatggttagtcaggggagaacctaatcccttatttcttatcttattctgattctggccatgctacaaacatgttctcacctgccccccatgcttctaccccaacagcaataaaaactgtaaagcagga

SEQ ID NO: 19946 - DNA, 1758 bp, Homo sapiens
catgaaagacctgctgggctggatttactctcccatttgtcagataagaaaattgagtctcagaaaagttcagagacttttccatggtgtcttggctaatgcagcttgagagtaggtgccgttacaaagatatttaatggagaaaagaacccacacatctcagagtagggtcatttctggtcactgaaaagtgagtccacttggatccaggttgccagggaggaacaaacgtacagcacatgcgtggatgggatatccccacacaagaaaacgagcgcctcatgctgcttcccagaggttctctctgacctgaatggaaaagaagttggtctgagatcgaaggtactaaacagatcatcagactgaactctccacatgtcacctcatcatggtcatcatagtctcttagtttggaaacaaccttggctgcagggatgacctcagtggagagtcacaagaaggactgaggcgtcttctgcaagatactgccagccaggacagaggggtctcagcagagctcagtgggcttcattcagcaagtgccagcattaccatcctttcccaagggcaaggccatgcagagcttcattgggcctccatccctctctgagatttatcagtggaaacttggacccacttgatatcgttccactgagctgcctctaatcttgcattggacaggagctttggacaaagaagggaatattaagattgtgtgtacaaatggcacttaactgtgaaggaccacctaggagcaagatcttggaccattctgctcaacctaacagtgcagaatgctaagtaaggggaaaaccaggccacctgaagaatatctttaatgatggtattcttggtgatgggaccaacaagctccagaattactacaggtactatcttggaagccacttgattctgaaactgaggcaggttcaggtttggggtcactgattctaagacatttacagaagttcgtgcatgtgtttcagccatgatccccaagattgaggctattgattctcagagactcacaggtctcatgaaggggcagtgcagaaaatggcccttacctgctgcaccctagtgcacaggacttgcaatgttgcttgagagacatatcccaagtccttcttagaggcatggagtataacaacttcagtggaattgcacttccagtttggtaaccttagtaaatcttgtgttgttgtttaatcgtgccttgcaaatcatcctttaaacactatgactgtggtttcttgtggtggagtccctcatcatagtgaccctcatagcaacctctgaggttagcagagaaggtattattatctcgatctcaatgaggagaacaaggcttaatgaggtttagtgacttctcaaagccacatggttagtcaggggagaacctaatcccttatttcttatcttattctgattctggccatgctacaaacatgttctcacctgccccccatgcttctaccccaacagcaataaaaactgtaaagcaggaactctctagtacattgtgttgtccctaaactgatgggctaggaattgtgtctcattatggcttagtctttgtgggttttccccagtgagttgagagtggagatagacctagtaggatgattatattcaggtcagagaccagctcctctcaagagagttctttccacagatggaaaagatacgttaaaattgccaaataaattaggaaatacttggcagaacctggaagagcctccagactggcgttacata

SEQ ID NO: 19947 - DNA, 1754 bp, Homo sapiens
catgaaagacctgctgggctggatttactctcccatttgtcagataagaaaattgagtctcagaaaagttcagagacttttccatggtgtcttggctaatgcagcttgagagtaggtgccgttacaaagatatttaatggagaaaagaacccacacatctcagagtagggtcatttctggtcactgaaaagtgagtccacttggatccaggttgccagggaggaacaaacgtacagcacatgcgtggatgggatatccccacacaagaaaacgagcgcctcatgctgcttcccagaggttctctctgacctgaatggaaaagaagttggtctgagatcgaaggtactaaacagatcatcagactgaactctccacatgtcacctcatcatggtcatcatagtctcttagtttggaaacaaccttggctgcagggatgacctcagtggagagtcacaagaaggactgaggcgtcttctgcaagatactgccagccaggacagaggggtctcagcagagctcagtgggcttcattcagcaagtgccagcattaccatcctttcccaagggcaaggccatgcagagcttcattgggcctccatccctctctgagatttatcagtggaaacttggacccacttgatatcgttccactgagctgcctctaatcttgcattggacaggagctttggacaaagaagggaatattaagattgtgtgtacaaatggcacttaactgtgaaggaccacctaggagcaagatcttggaccattctgctcaacctaacagtgcagaatgctaagtaaggggaaaaccaggccacctgaagaatatctttaatgatggtattcttggtgatgggaccaacaagctccagaattactacaggtactatcttggaagccacttgattctgaaactgaggcaggttcaggtttggggtcactgattctaagacatttacagaagttcgtgcatgtgtttcagccatgatccccaagattgaggctattgagacatggcactatcaacaggtgaaattgattctcagagactcacaggtctcatgaaggggcagtgcagaaaatggcccttacctgctgcaccctagtgcacaggacttgcaatgttgcatggagtataacaacttcagtggaattgcacttccagtttggtaaccttagtaaatcttgtgttgttgtttaatcgtgccttgcaaatcatcctttaaacactatgactgtggtttcttgtggtggagtccctcatcatagtgaccctcatagcaacctctgaggttagcagagaaggtattattatctcgatctcaatgaggagaacaaggcttaatgaggtttagtgacttctcaaagccacatggttagtcaggggagaacctaatcccttatttcttatcttattctgattctggccatgctacaaacatgttctcacctgccccccatgcttctaccccaacagcaataaaaactgtaaagcaggaactctctagtacattgtgttgtccctaaactgatgggctaggaattgtgtctcattatggcttagtctttgtgggttttccccagtgagttgagagtggagatagacctagtaggatgattatattcaggtcagagaccagctcctctcaagagagttctttccacagatggaaaagatacgttaaaattgccaaataaattaggaaatacttggcagaacctggaagagcctccagactggcgttacata

SEQ ID NO: 19948 - DNA, 314 bp, Homo sapiens
ctattcataatcagctccatagccatttcagttgtatagtaaaaatggaagctgtaattctccttaatatattttattctgtggttcatcacttccccaggcctccccatctctgcatctttttcctttccttttccttcccactgcagcagaagcacaagagtattcattaatcctgacccctaaaaagcaaacaaaagagagcccacacaaattcatcagttgaagtggaaggcaatttacccagagcaagagcccaccccattgttgccagatgaatggtgctggtagctggagccgaaggaggctgccac

SEQ ID NO: 19949 - DNA, 106 bp, Homo sapiens
agatgagttgtgcgcggtgatggccgcctgtagtcgcggctactcgggaggctgagacgaggagaagatcacttgaggccccacaggtcgaggcttcggtcggccg

SEQ ID NO: 19950 - DNA, 487 bp, Homo sapiens
ctctgaaatcaagctgtgtctgtctgcccaggggctctgagaacatggaaaatagacagagcttagagttattagaaaaataaaagcaaatgaatttgcaaagaaaaaccagtgaggagaaggatttgattcatcttccaagggtccatagctgttaacccaagccattcttgggggatatccagtctcttgagtggctgggactccataccccctttccttctttaataggtctgtcaaaggcagttcccacaaaagctggctaaaaaactgatacccagctccagcgtctgagggttcatgaagatgtggaggtttttttgtttgtttgttttggttttttgttatgtttgtttttgagacaaagtctcaccttgctgcccaggctgagccgggaggattgcttgaacccagaaggcagaggttacagtgaaccgagatcatgccactgcattctagcctgggtgacagagcaagactccatctc

SEQ ID NO: 19951 - DNA, 420 bp, Homo sapiens
gcgcgcgccaccacgcctggctaaggtgtgtgtgtgtgtgtgtgtgtgtgtgtctccaaagtagcgaggactacgggtgtgtgtgtgtgtgtgtgtctccaaagtagcgaggactacaggctcccgccactacgccaggctaaggtagggtgtgtatgtgtgttaactttttgtagagatgggatctccctttgtaacacgggcgcccgccactaagccaggctaaggtggtgaatgtgtgtgtgtgtgtgtgttaactttttgtagagatgggatctcgcttcgtaacccgggctggtatcgaactcctgtcttcaaggaatcctcccgtctggactcctcccatgggattacgggcatgagccacggcacctggctattttttttttctaagcatttaaataagctggggcttgattt

SEQ ID NO: 19952 - DNA, 246 bp, Homo sapiens
atttatttcactcttttttgccaaccttctgtgaggaacttcactgggatattttgtttaatgctccttgaaagcatcggctgccctaaaattgtctttttcagagaaggtctttctttttttttttttttttaagtccttagctctgtagaaagaagggggaaaactcctgctacacctttacattcccttattaccaaaacgaaatatttaccaaaacaatagcacaaaggagttctaggagtt

SEQ ID NO: 19953 - DNA, 212 bp, Homo sapiens
agctctgtgacattggacaacacatttggcctctgtttccttgtctgtaaaatagggataataattgtaccgactttatgtggttattatgggatttaagtgagttgggtgcttaaaactgccacacatacagtaaatacctcagaggttttagcccccaacaaaaaaaacttggagattttctagctagcatatctctagcgtttaaccag

SEQ ID NO: 19954 - DNA, 313 bp, Homo sapiens
agaaaaagaaaaattaactcaaaatgtatcataaacctaaatgtaaaatacaaaagtgtgaacctcctagaagataacttaggagaaaacctagatggccttgggtttggtgatgactttttaaatatgacaccaaaggcatgatccatgaagtaaataattgataagctggatttcactaaaggtaaatatttcttctctgcagatgatagtcaagagattgaaaacacaacccacagactgggagacaatatttgtaaaagatatatctgatttaaaagaaacattatcccaaaatacaaagaatcttaaa

SEQ ID NO: 19955 - DNA, 609 bp, Homo sapiens
tcaattgcaggaggtagagtagtgataacagcatatttcttttgaaatataaaggtgtaaacttctgaaacagtttaaagtcttaggaagtgctctaggtctgtctttgtcttcgaattatattaattacggagagaatagaaagtggtatttctcttaaggctcctctaaatatcttagtaactgtaaagtgattgtcataaaaacatgtcttccttactcaaatctttccagtttcatcaatatctgtacactcaatatatggcatcctctttacaaatggcaccgctggaggctcaacatttaggtatacgtattaggtgtcctagaagcgctccttgttcagcatgtttgtaaggtaaaggagaaataagacatagcaaatatatgcatatggctagaaataccagtggtggagcattttgaaattgaaagtggtctataaaatcctaatccatttttgtgttggggtttagtactagatggtgaagtgaatgtattcttaacccagagataactagagaaatagaagaaaaacctgaaaataagactcatgatacaatgtttgttgaatttgttgaggtcagcagttgttacattagtgtaaaa

SEQ ID NO: 19956 - DNA, 693 bp, Homo sapiens
tcttattcagaaaacacagctgtgaaacaaaaataatgttttaagcaaggacctaattaacctgctgatgagacatatcatctatctctaagccaaacattaggaacttggcacctctactgcccccagcctattcattcttaacacgatttcaaaatgcttttttatttggtttcaagactgcagcaagatggagaatggggaccactggagtcaggcattgttaagaatgagcagcagcagatccgttcatctttcagaacaaagaaaatcaatgagcatcaacactaatccaaacaccgcactttggggccatttagggtagaattaaacagcctgatatacctcgaatgacctaaaagatgtcaccgaattatttttaaaattgattattatcatgacccttaattgctgtggaaggtggcattatgtttagtgtcctgattgtgagtggtataagccactttagaaaggctttttattcaaaattgttattaaaaaaaaaaatctggtgctttaaggtatatgcctccaactatccaatattaaagtgttgttatatgttacttttcgtagttatctaaggggttggtaatagtgagggcttgtgattaatttgtctatatcatcaaaaggatagagggccatgtggtatgatattatcaagaataaaaatcactaacatttaaaaaa

SEQ ID NO: 19957 - DNA, 497 bp, Homo sapiens
caggtccccgcatccgcctgcctttgcacttgggggtgggagagccaccttgtgacgccccttctgcctctcaccagcttccccctttctccccgttctgtacggttccccctggagccagaaggaagcccggtgccagccagccttcctgaaagaccaagcccgcgccatccggcttcctccagtggacgcctgcaggacccaggtgagacacggaaccggttggggacgcgagccagggatcctgaccggttgggggcggcgagcaagggatcctgacttgggggcgttgcctcccggaatccaagcggccttttgcccgggtctcccgagatgcatcgaaattgagctcgtccacacagccccctgactgcgtgatgcccttttctgacttaaaacattccttgtacctttatttacacgatccaagttgcagtgtgcctagattttcctccaaggacaaaaatgtgaataaagcaatattttagccaaacaaa

SEQ ID NO: 19958 - DNA, 1067 bp, Homo sapiens
cgtgaggcgctgctataccccctcgtggggaaggtagaaggtggggtctgccggacgcgtgttcctgccaccaggtgcccgctccccgcgaggccggctcaggagcagaaggaagcccggtgccagccagccttcctgaaagaccaagcccgcgccatccggcttcctccagtggacgcctgcaggacccaggaatgtttttcttgaaggcatccagcatctccagttagcagtactgattttttttccccccaacaaaggaacactacatcaacactgttggcggggacctggacacagaagactcctgtttcaagaaaatacaatcatctctcaaaggctgtaatttatatgcattttaaaactctaggcattgaaaaccacccaagtgtcccaaatagaagggtaatatataatcaatcactcagtgtaatattatacatcctttaaaaatgttattgggaaatgttttatgatctgtaagtccaaggaatcctctcccaccatttctttccccccgctgttcccccatacccacacttctttgttccaattggcatgtaaatttggttttcccgccaaatgagtcagtcatgatgggaacctcaactgatttgaacagatgtgtgtcaatgttacttggaaaactagatgtcaataaccagggtcacagaaaaaggcagtggtcacaactctgtaaaaatgtatgcatgcacacagacaagaactaaagtggaaccccacacaggaaaacagtgggctgtactccagtgctgggacattgaatgactgtatgctgcttttgatttccgttaatatgggcaactgtccaattaaaaaaaaaactcctaaggactctgcagtgcaaattgttttgctgattgttttaaaacaccatacctatcaactcatcaaggcaaatggggcagcgggggactgggttcgttccctgaatcctggactgctatagagctcagggcaacatttgcagaaaacctgagcctatgagatgggagttataggcagctttcctgaggctgtgtaagatgaaaataaaactaggttca

SEQ ID NO: 19959 - DNA, 836 bp, Homo sapiens
gaagattgcaattcgttccagactataaattctctttaacaactccctaaggtattcttttaaattgtttttcagcgttgctaaatgtgcatcataatgtgtgggagacttgtataaagtgaatcaatttatactcagctgattaattgacccgatgttaccacctccaaggaggcacctttccactattttctcattttttccccaacacatgttatttgttagtgaggaagctgcgtgcacgtggcattgtataaagtttattagacagacgtggcccttaaactaggaagagcttagtctaactctaaatctaaaattcgacatttcggtaagttgtgagacaagatacccaggttgtttgataaaccagaattgaacataattttttaaaaatttaaatcacaggaatgtttttcttgaaggcatccagcatctccagttagcagtactgattttttttccccccaacaaaggaacactacatcaacactgttggcggggacctggacacagaagactcctgtttcaagaaaatacaatcatctctcaaaggctgtaatttatatgcattttaaaactctaggcattgaaaaccacccaagtgtcccaaatagaagggtaatatataatcaatcactcagtgtaatattatacatcctttaaaaatgttattgggaaatgttttatgatctgtaagtccaaggaatcctctcccaccatttctttccccccgctgttcccccatacccacacttctttgttccaattggcatgtaaattggaacaaagaagtgtaagtccaaggaatcctctcccaccatttccctcgtgcc

SEQ ID NO: 19960 - DNA, 699 bp, Homo sapiens
  misc_feature (18)..(18): n is a, c, g, or t
aaacctttgggccttttnaaaaaaatggtatgggcaaaggtgtgggcggctcacgcatgtaaccctagcactttgggagaacgagttgggcagatcacatgaggtcaggagttgaaaccaccctggccaacatggtgaaacccgtctctacaaaaaatgcaaaaaagttaggcagccgaggtgcaggcaccggtaatcccagctactccggaggctgagtcagtcatgatgggaacctcaactgatttgaacagatgtgtgtcaatgttacttggaaaactagatgtcaataaccagggtcacagaaaaaggcagtggtcacaactctgtaaaaatgtatgcatgcacacagacaagaactaaagtggaaccccacacaggaaaacagtgggctgtactccagtgctgggacattgaatgactgtatgctgcttttgatttccgttaatatgggcaactgtccaattaaaaaaaaaactcctaaggactctgcagtgcaaattgttttgctgattgttttaaaacaccatacctatcaactcatcaaggcaaatggggcagcgggggactgggttcgttccctgaatcctggactgctatagagctcagggcaacatttgcagaaaacctgagcctatgagatgggagttataggcagctttcctgaggctgtgtaagatgaaaataaaactaggttca

SEQ ID NO: 19961 - DNA, 1397 bp, Homo sapiens
cgtgaggcgctgctataccccctcgtggggaaggtagaaggtggggtctgccggacgcgtgttcctgccaccaggtgcccgctccccgcgaggccggctcaggagcaggtaggtgggcgggggctcgcgtctctgtttccggtgggtcctcgcccttgtccacgcagcagggctgtagtccggggagggcagtattcctggctaggctggggcgcataggcggtgcgagtcgaggagagacgcggtgcccgcgctcagccgtgccctagcagcgggaacagttctgcagtgagcgatcggtgctctggggtattgtttccgctgcccagggtaagtctgggactgccgttcgggcctacccagcaggtaagtcttaggccatcgcctgcggtgtcggccccgggagcagcgagacccaagattgcatcaaacgtttgccccgtctctgcatatgtgactggacgtgaatgatgcttcattttggcaccccctttccctgctcaggtagaatgtaaacaattgaaaaaaatcccttcccaatcagaataccacccacaggacaacgaagaaaacctatcttcagtccccacccacgaaatgctggggggtggggaggactggaaaaggagtaaggggagaggaagggtgagcagctgcaagaagtctttacacctctctgcggttcctggtaaacgcgctcatgtcctgggtatggaagggacttaagaattcaggaaagatcaaaataacgggcctcttccccactccctcgccctcccttccccgctgctggggggttagggaggctccgtggagctccagcactctagaaggatcgggtgaggcgcgaggccttgcgggcgggtgaacccaaggtggggtggaaggctccaacccgcccaatctgagcccgaggcctgctgagaagcatgggggccttgggatagttccagaatgaggatgtgcgtttctagctgctttgcgccctcctcccccaaaaatctgctaccacaattccaccccggcggcacgcccccaagactcctttgtcgccccaggggcgggacctgagctgtcggtttcaggagcccttcgtgacttcaaaagtcctgggcactgttgctcatgagtgctgcacaactgtcgccctctaaagccacctccatccctcactgggctggcctcctgagccttcggtgaggaaacggggttccgagttgcccgcctgagagcttaacagtctgactagaaaagggctaattcgctttctgtgcaaatctcttgagctaattatttaatctgaaacatggacaggtaaaggaccattggcgggcgtggggagggaggtgtggaatctttcccacactttttgtcaccttaaagaaaaaaaaaagaca

SEQ ID NO: 19962 - DNA, 2155 bp, Homo sapiens
cgtgaggcgctgctataccccctcgtggggaaggtagaaggtggggtctgccggacgcgtgttcctgccaccaggtgcccgctccccgcgaggccggctcaggagcaggtaggtgggcgggggctcgcgtctctgtttccggtgggtcctcgcccttgtccacgcagcagggctgtagtccggggagggcagtattcctggctaggctggggcgcataggcggtgcgagtcgaggagagacgcggtgcccgcgctcagccgtgccctagcagcgggaacagttctgcagtgagcgatcggtgctctggggtattgtttccgctgcccagggtaagtctgggactgccgttcgggcctacccagcaggtaagtcttaggccatcgcctgcggtgtcggccccgggagcagcgagacccaagattgcatcaaacgtttgccccgtctctgcatatgtgactggacgtgaatgatgcttcattttggcaccccctttccctgctcaggtagaatgtaaacaattgaaaaaaatcccttcccaatcagaataccacccacaggacaacgaagaaaacctatcttcagtccccacccacgaaatgctggggggtggggaggactggaaaaggagtaaggggagaggaagggtgagcagctgcaagaagtctttacacctctctgcggttcctggtaaacgcgctcatgtcctgggtatggaagggacttaagaattcaggaaagatcaaaataacgggcctcttccccactccctcgccctcccttccccgctgctggggggttagggaggctccgtggagctccagcactctagaaggatcgggtgaggcgcgaggccttgcgggcgggtgaacccaaggtggggtggaaggctccaacccgcccaatctgagcccgaggcctgctgagaagcatgggggccttgggatagttccagaatgaggatgtgcgtttctagctgctttgcgccctcctcccccaaaaatctgctaccacaattccaccccggcggcacgcccccaagactcctttgtcgccccaggggcgggacctgagctgtcggtttcaggagcccttcgtgacttcaaaagtcctgggcactgttgctcatgagtgctgcacaactgtcgccctctaaagccacctccatccctcactgggctggcctcctgagccttcgaaggaagcccggtgccagccagccttcctgaaagaccaagcccgcgccatccggcttcctccagtggacgcctgcaggacccaggaatgtttttcttgaaggcatccagcatctccagttagcagtactgattttttttccccccaacaaaggaacactacatcaacactgttggcggggacctggacacagaagactcctgtttcaagaaaatacaatcatctctcaaaggctgtaatttatatgcattttaaaactctaggcattgaaaaccacccaagtgtcccaaatagaagggtaatatataatcaatcactcagtgtaatattatacatcctttaaaaatgttattgggaaatgttttatgatctgtaagtccaaggaatcctctcccaccatttctttccccccgctgttcccccatacccacacttctttgttccaattggcatgtaaatttggttttcccgccaaatgagtcagtcatgatgggaacctcaactgatttgaacagatgtgtgtcaatgttacttggaaaactagatgtcaataaccagggtcacagaaaaaggcagtggtcacaactctgtaaaaatgtatgcatgcacacagacaagaactaaagtggaaccccacacaggaaaacagtgggctgtactccagtgctgggacattgaatgactgtatgctgcttttgatttccgttaatatgggcaactgtccaattaaaaaaaaaactcctaaggactctgcagtgcaaattgttttgctgattgttttaaaacaccatacctatcaactcatcaaggcaaatggggcagcgggggactgggttcgttccctgaatcctggactgctatagagctcagggcaacatttgcagaaaacctgagcctatgagatgggagttataggcagctttcctgaggctgtgtaagatgaaaataaaactaggttca

SEQ ID NO: 19963 - DNA, 1283 bp, Homo sapiens
gaagattgcaattcgttccagactataaattctctttaacaactccctaaggtattcttttaaattgtttttcagcgttgctaaatgtgcatcataatgtgtgggagacttgtataaagtgaatcaatttatactcagctgattaattgacccgatgttaccacctccaaggaggcacctttccactattttctcattttttccccaacacatgttatttgttagtgaggaagctgcgtgcacgtggcattgtataaagtttattagacagacgtggcccttaaactaggaagagcttagtctaactctaaatctaaaattcgacatttcggtaagttgtgagacaagatacccaggttgtttgataaaccagaattgaacataattttttaaaaatttaaatcacaggaatgtttttcttgaaggcatccagcatctccagttagcagtactgattttttttccccccaacaaaggaacactacatcaacactgttggcggggacctggacacagaagactcctgtttcaagaaaatacaatcatctctcaaaggctgtaatttatatgcattttaaaactctaggcattgaaaaccacccaagtgtcccaaatagaagggtaatatataatcaatcactcagtgtaatattatacatcctttaaaaatgttattgggaaatgttttatgatctgtaagtccaaggaatcctctcccaccatttctttccccccgctgttcccccatacccacacttctttgttccaattggcatgtaaatttggttttcccgccaaatgagtcagtcatgatgggaacctcaactgatttgaacagatgtgtgtcaatgttacttggaaaactagatgtcaataaccagggtcacagaaaaaggcagtggtcacaactctgtaaaaatgtatgcatgcacacagacaagaactaaagtggaaccccacacaggaaaacagtgggctgtactccagtgctgggacattgaatgactgtatgctgcttttgatttccgttaatatgggcaactgtccaattaaaaaaaaaactcctaaggactctgcagtgcaaattgttttgctgattgttttaaaacaccatacctatcaactcatcaaggcaaatggggcagcgggggactgggttcgttccctgaatcctggactgctatagagctcagggcaacatttgcagaaaacctgagcctatgagatgggagttataggcagctttcctgaggctgtgtaagatgaaaataaaactaggttca

SEQ ID NO: 19964 - DNA, 1012 bp, Homo sapiens
caggtccccgcatccgcctgcctttgcacttgggggtgggagagccaccttgtgacgccccttctgcctctcaccagcttccccctttctccccgttctgtacggttccccctggagccagaaggaagcccggtgccagccagccttcctgaaagaccaagcccgcgccatccggcttcctccagtggacgcctgcaggacccaggaacactacatcaacactgttggcggggacctggacacagaagactcctgtttcaagaaaatacaatcatctctcaaaggctgtaatttatatgcattttaaaactctaggcattgaaaaccacccaagtgtcccaaatagaagggtaatatataatcaatcactcagtgtaatattatacatcctttaaaaatgttattgggaaatgttttatgatctgtaagtccaaggaatcctctcccaccatttctttccccccgctgttcccccatacccacacttctttgttccaattggcatgtaaatttggttttcccgccaaatgagtcagtcatgatgggaacctcaactgatttgaacagatgtgtgtcaatgttacttggaaaactagatgtcaataaccagggtcacagaaaaaggcagtggtcacaactctgtaaaaatgtatgcatgcacacagacaagaactaaagtggaaccccacacaggaaaacagtgggctgtactccagtgctgggacattgaatgactgtatgctgcttttgatttccgttaatatgggcaactgtccaattaaaaaaaaaactcctaaggactctgcagtgcaaattgttttgctgattgttttaaaacaccatacctatcaactcatcaaggcaaatggggcagcgggggactgggttcgttccctgaatcctggactgctatagagctcagggcaacatttgcagaaaacctgagcctatgagatgggagttataggcagctttcctgaggctgtgtaagatgaaaataaaactaggttca

SEQ ID NO: 19965 - DNA, 1572 bp, Homo sapiens
cgtgaggcgctgctataccccctcgtggggaaggtagaaggtggggtctgccggacgcgtgttcctgccaccaggtgcccgctccccgcgaggccggctcaggagcaggtaggtgggcgggggctcgcgtctctgtttccggtgggtcctcgcccttgtccacgcagcagggctgtagtccggggagggcagtattcctggctaggctggggcgcataggcggtgcgagtcgaggagagacgcggtgcccgcgctcagccgtgccctagcagcgggaacagttctgcagtgagcgatcggtgctctggggtattgtttccgctgcccagggtaagtctgggactgccgttcgggcctacccagcaggtaagtcttaggccatcgcctgcggtgtcggccccgggagcagcgagacccaagattgcatcaaacgtttgccccgtctctgcatatgtgactggacgtgaatgatgcttcattttggcaccccctttccctgctcaggtagaatgtaaacaattgaaaaaaatcccttcccaatcagaataccacccacaggacaacgaagaaaacctatcttcagtccccacccacgaaatgctggggggtggggaggactggaaaaggagtaaggggagaggaagggtgagcagctgcaagaagtctttacacctctctgcggttcctggtaaacgcgctcatgtcctgggtatggaagggacttaagaattcaggaaagatcaaaataacgggcctcttccccactccctcgccctcccttccccgctgctggggggttagggaggctccgtggagctccagcactctagaaggatcgggtgaggcgcgaggccttgcgggcgggtgaacccaaggtggggtggaaggctccaacccgcccaatctgagcccgaggcctgctgagaagcatgggggccttgggatagttccagaatgaggatgtgcgtttctagctgctttgcgccctcctcccccaaaaatctgctaccacaattccaccccggcggcacgcccccaagactcctttgtcgccccaggggcgggacctgagctgtcggtttcaggagcccttcgtgacttcaaaagtcctgggcactgttgctcatgagtgctgcacaactgtcgccctctaaagccacctccatccctcactgggctggcctcctgagccttcgaaggaagcccggtgccagccagccttcctgaaagaccaagcccgcgccatccggcttcctccagtggacgcctgcaggacccaggtgagacacggaaccggttggggacgcgagccagggatcctgaccggttgggggcggcgagcaagggatcctgacttgggggcgttgcctcccggaatccaagcggccttttgcccgggtctcccgagatgcatcgaaattgagctcgtccacacagccccctgactgcgtgatgcccttttctgacttaaaacattccttgtacctttatttacacgatccaagttgcagtgtgcctagattttcctccaaggacaaaaatgtgaataaagcaatattttagccaaacaaa

SEQ ID NO: 19966 - DNA, 1096 bp, Homo sapiens
cgtgaggcgctgctataccccctcgtggggaaggtagaaggtggggtctgccggacgcgtgttcctgccaccaggtgcccgctccccgcgaggccggctcaggagcaggtaggtgggcgggggctcgcgtctctgtttccggtgggtcctcgcccttgtccacgcagcagggctgtagtccggggagggcagtattcctggctaggctggggcgcataggcggtgcgagtcgaggagagacgcggtgcccgcgctcagccgtgccctagcagcgggaacagttctgcagtgagcgatcggtgctctggggtattgtttccgctgcccagggtaagtctgggactgccgttcgggcctacccagcaggtaagtcttaggccatcgcctgcggtgtcggccccgggagcagcgagacccaagattgcatcaaacgtttgccccgtctctgcatatgtgactggacgtgaatgatgcttcattttggcaccccctttccctgctcaggtagaatgtaaacaattgaaaaaaatcccttcccaatcagaataccacccacaggacaacgaagaaaacctatcttcagtccccacccacgaaatgctggggggtggggaggactggaaaaggagtaaggggagaggaagggtgagcagctgcaagaagtctttacacctctctgcggttcctggtaaacgcgctcatgtcctgggtatggaagggacttaagaattcaggaaagatcaaaataacgggcctcttccccactccctcgccctcccttccccgctgctggggggttagggaggctccgtggagctccagcactctagaaggatcgggtgaggcgcgaggccttgcgggcgggtgaacccaaggtggggtggaaggctccaacccgcccaatctgagcccgaggcctgctgagaagcatgggggccttgggatagttccagaatgaggatgtgcgtttctagctgctttgcgccctcctcccccaaaaatctgctaccacaattccaccccggcggcacgcccccagcttgggggcccgggggggaccgacaggcgaacggagccccgggcgccgggcgggccc

SEQ ID NO: 19967 - DNA, 1708 bp, Homo sapiens
cgtgaggcgctgctataccccctcgtggggaaggtagaaggtggggtctgccggacgcgtgttcctgccaccaggtgcccgctccccgcgaggccggctcaggagcaggtaggtgggcgggggctcgcgtctctgtttccggtgggtcctcgcccttgtccacgcagcagggctgtagtccggggagggcagtattcctggctaggctggggcgcataggcggtgcgagtcgaggagagacgcggtgcccgcgctcagccgtgccctagcagcgggaacagttctgcagtgagcgatcggtgctctggggtattgtttccgctgcccagggtaagtctgggactgccgttcgggcctacccagcaggtaagtcttaggccatcgcctgcggtgtcggccccgggagcagcgagacccaagattgcatcaaacgtttgccccgtctctgcatatgtgactggacgtgaatgatgcttcattttggcaccccctttccctgctcaggtagaatgtaaacaattgaaaaaaatcccttcccaatcagaataccacccacaggacaacgaagaaaacctatcttcagtccccacccacgaaatgctggggggtggggaggactggaaaaggagtaaggggagaggaagggtgagcagctgcaagaagtctttacacctctctgcggttcctggtaaacgcgctcatgtcctgggtatggaagggacttaagaattcaggaaagatcaaaataacgggcctcttccccactccctcgccctcccttccccgctgctggggggttagggaggctccgtggagctccagcactctagaaggatcgggtgaggcgcgaggccttgcgggcgggtgaacccaaggtggggtggaaggctccaacccgcccaatctgagcccgaggcctgctgagaagcatgggggccttgggatagttccagaatgaggatgtgcgtttctagctgctttgcgccctcctcccccaaaaatctgctaccacaattccaccccggcggcacgcccccaagactcctttgtcgccccaggggcgggacctgagctgtcggtttcaggagcccttcgtgacttcaaaagtcctgggcactgttgctcatgagtgctgcacaactgtcgccctctaaagccacctccatccctcactgggctggcctcctgagccttcgaaggaagcccggtgccagccagccttcctgaaagaccaagcccgcgccatccggcttcctccagtggacgcctgcaggacccaggaatgtttttcttgaaggcatccagcatctccagttagcagtactgattttttttccccccaacaaaggaacactacatcaacactgttggcggggacctggacacagaagactcctgtttcaagaaaatacaatcatctctcaaaggctgtaatttatatgcattttaaaactctaggcattgaaaaccacccaagtgtcccaaatagaagggtaatatataatcaatcactcagtgtaatattatacatcctttaaaaatgttattgggaaatgttttatgatctgtaagtccaaggaatcctctcccaccatttctttccccccgctgttcccccatacccacacttctttgttccaattggcatgtaaattggaacaaagaagtgtaagtccaaggaatcctctcccaccatttccctcgtgcc

SEQ ID NO: 19968 - DNA, 1106 bp, Homo sapiens
cgtgaggcgctgctataccccctcgtggggaaggtagaaggtggggtctgccggacgcgtgttcctgccaccaggtgcccgctccccgcgaggccggctcaggagcaggtaggtgggcgggggctcgcgtctctgtttccggtgggtcctcgcccttgtccacgcagcagggctgtagtccggggagggcagtattcctggctaggctggggcgcataggcggtgcgagtcgaggagagacgcggtgcccgcgctcagccgtgccctagcagcgggaacagttctgcagtgagcgatcggtgctctggggtattgtttccgctgcccagggtaagtctgggactgccgttcgggcctacccagcaggtaagtcttaggccatcgcctgcggtgtcggccccgggagcagcgagacccaagattgcatcaaacgtttgccccgtctctgcatatgtgactggacgtgaatgatgcttcattttggcaccccctttccctgctcaggtagaatgtaaacaattgaaaaaaatcccttcccaatcagaataccacccacaggacaacgaagaaaacgagtaaggggagaggaagggtgagcagctgcaagaagtctttacacctctctgcggttcctggtaaacgcgctcatgtcctgggtatggaagggacttaagaattcaggaaagatcaaaataacgggcctcttccccactccctcgccctcccttccccgctgctggggggttagggaggctccgtggagctccagcactctagaaggatcgggtgaggcgcgaggccttgcgggcgggtgaacccaaggtggggtggaaggctccaacccgcccaatctgagcccgaggcctgctgagaagcatgggggccttgggatagttccagaatgaggatgtgcgtttctagctgctttgcgccctcctcccccaaaaatctgctaccacaattccaccccggcggcacgcccccaagactcctttgtcgccccaggggcgggacctgagctgtcggtttcaggagcctcgggaatcgccgggccgggccatagtgtgccactgggctctaagcacacacctgggggcacgactcgg

SEQ ID NO: 19969 - DNA, 999 bp, Homo sapiens
cgtgaggcgctgctataccccctcgtggggaaggtagaaggtggggtctgccggacgcgtgttcctgccaccaggtgcccgctccccgcgaggccggctcaggagcagaaggaagcccggtgccagccagccttcctgaaagaccaagcccgcgccatccggcttcctccagtggacgcctgcaggacccaggaacactacatcaacactgttggcggggacctggacacagaagactcctgtttcaagaaaatacaatcatctctcaaaggctgtaatttatatgcattttaaaactctaggcattgaaaaccacccaagtgtcccaaatagaagggtaatatataatcaatcactcagtgtaatattatacatcctttaaaaatgttattgggaaatgttttatgatctgtaagtccaaggaatcctctcccaccatttctttccccccgctgttcccccatacccacacttctttgttccaattggcatgtaaatttggttttcccgccaaatgagtcagtcatgatgggaacctcaactgatttgaacagatgtgtgtcaatgttacttggaaaactagatgtcaataaccagggtcacagaaaaaggcagtggtcacaactctgtaaaaatgtatgcatgcacacagacaagaactaaagtggaaccccacacaggaaaacagtgggctgtactccagtgctgggacattgaatgactgtatgctgcttttgatttccgttaatatgggcaactgtccaattaaaaaaaaaactcctaaggactctgcagtgcaaattgttttgctgattgttttaaaacaccatacctatcaactcatcaaggcaaatggggcagcgggggactgggttcgttccctgaatcctggactgctatagagctcagggcaacatttgcagaaaacctgagcctatgagatgggagttataggcagctttcctgaggctgtgtaagatgaaaataaaactaggttca

SEQ ID NO: 19970 - DNA, 689 bp, Homo sapiens
cgtgaggcgctgctataccccctcgtggggaaggtagaaggtggggtctgccggacgcgtgttcctgccaccaggtgcccgctccccgcgaggccggctcaggagcaggtagaatgtaaacaattgaaaaaaatcccttcccaatcagaataccacccacaggacaacgaagaaaacctatcttcagtccccacccacgaaatgctggggggtggggaggactggaaaaggagtaaggggagaggaagggtgagcagctgcaagaagtctttacacctctctgcggttcctggtaaacgcgctcatgtcctggaaggaagcccggtgccagccagccttcctgaaagaccaagcccgcgccatccggcttcctccagtggacgcctgcaggacccaggtgagacacggaaccggttggggacgcgagccagggatcctgaccggttgggggcggcgagcaagggatcctgacttgggggcgttgcctcccggaatccaagcggccttttgcccgggtctcccgagatgcatcgaaattgagctcgtccacacagccccctgactgcgtgatgcccttttctgacttaaaacattccttgtacctttatttacacgatccaagttgcagtgtgcctagattttcctccaaggacaaaaatgtgaataaagcaatattttagccaaacaaa

SEQ ID NO: 19971 - DNA, 1608 bp, Homo sapiens
ttgccctgcccagtaatggcctggaagcagcagcctctcactctggcctggtaggcagcgatgctgagactgaagagccaggcagaggggctggcagcatgaggagggagcagaagaggctgtggctcaggagtctgacagtgatgacatggatctagaggcgaccccccaggaccccaactcagctgcacctgttgtgttcagaagcccaggtggtgtacactggggctatgaagagaccaagacttaccttgcaattcttagtgagacccagttttatgaagccctccggaactgtcaccgcaacagccagctgtatggagcagtggctgagaggttatgggaatatggctttcttaggaccccagaacagtgtcggaccaagtttaaaagcctgcaaaccagctatcggaaagttaagaatggccaggcaccagagacctgtcccttctttgaagagatggatgctttggtgagtgtccgggttgctgccccacccaatgatggccaggaagagactgcttcttgccccgtccaggggaccagtgaggctgaagctcagaagcaagctgaggaagcagacgaggccacagaggaagattctgatgatgatgaagaggatactgagatacccccaggggctgtcataacccgtgctccagtgttattccaaagcccccgtggttttgaagctggatttgagaatgaagataattcaaaacgggatatttctgaggaagtacaactgcataggacattacttgcaagatctgaaaggaaaattccccggtatcttcatcagggtaaaggcaatgagagtgactgtagatcaggaagacagtgggcaaagacctcaggggagaaaagaggaaaactgacactcccggagaagagcttaagtgaagtcctaagtcaacagagaccttgcttgggagagagaccctataaatatctcaaatacagcaaaagctttggtccaaactcccttctcatgcatcaggtatcccaccaggtggaaaatccatataaatgtgctgattgtgggaaaagcttcagtcggagtgcacgactcattagacaccggagaatccacactggagagaaaccttataaatgtcttgactgtggaaaaagtttccgtgacagttcaaatttcatcacccataggagaatccacacaggagagaaaccttatcaatgtggtgagtgtgggaaatgcttcaatcagagctcaagccttatcattcaccagagaacccacacaggagaaaagccctatcaatgtgaagagtgtggaaaaagcttcaataacagttctcattttagtgcacatcggaggatacacacaggagagagaccccatgtgtgtcctgactgtggaaagagtttcagtaagagttctgacttacgtgcacatcatagaacccacacaggagagaaaccctatgggtgtcatgactgtggtaagtgcttcagtaaaagctctgcccttaataagcacggagaaatccatgcacgggaaaagcttctgacacagtcagctcccaagtaagcccctgaggatatataacggaaagaggctcaataaatgtattgtttagaaagtct

SEQ ID NO: 19972 - DNA, 1328 bp, Homo sapiens
ttgccctgcccagtaatggcctggaagcagcagcctctcactctggcctggtaggcagcgatgctgagactgaagagccaggcagaggggctggcagcatgaggagggagcagaagaggctgtggctcaggagtctgacagtgatgacatggatctagaggcgaccccccaggaccccaactcagctgcacctgttgtgttcagaagcccaggtggtgtacactggggctatgaagagaccaagacttaccttgcaattcttagtgagacccagttttatgaagccctccggaactgtcaccgcaacagccagctgtatggagcagtggctgagaggttatgggaatatggctttcttaggaccccagaacagtgtcggaccaagtttaaaagcctgcaaaccagctatcggaaagttaagaatggccaggcaccagagacctgtcccttctttgaagagatggatgctttggtgagtgtccgggttgctgccccacccaatgatggccaggaagagactgcttcttgccccgtccaggggaccagtgaggctgaagctcagaagcaagctgaggaagcagacgaggccacagaggaagattctgatgatgatgaagaggatactgagatacccccaggggctgtcataacccgtgctccagtgttattccaaagcccccgtggttttgaagctggatttgagaatgaagataattcaaaacgggatatttctgaggaagtacaactgcataggacattacttgcaagatctgaaaggaaaattccccggtatcttcatcagggtaaaggcaatgagagtgactgtagatcaggaagacagtgggcaaagacctcaggggagaaaagaggaaaactgacactcccggagaagagcttaagtgaagtcctaagtcaacagagaccttgcttgggagagagaccctataaatatctcaaatacagcaaaagctttggtccaaactcccttctcatgcatcaggtatcccaccaggtggaaaatccatataaatgtgctgattgtgggaaaagcttcagtcggagtgcacgactcattagacaccggagaatccacactggagagaaaccttataaatgtcttgactgtggaaaaagtttccgtgacagttcaaatttcatcacccataggagaatccacacaggagagaaaccttatcaatgtggtgagtgtgggaaatgcttcaatcagagctcaagccttatcattcaccagagaacccacacaggagaaaagccctatcaatgtgaagagtgtagcaattgaccggggatactcaagatcagcccgg

SEQ ID NO: 19973 - DNA, 528 bp, Homo sapiens
ccacggaagaggatcaggattaattatgtctgtgaggaagaagaaaagcaaatagctcacttgattaaatacattacaataatcactacattctgtcctttagacctgtgctgtccaatagggtagccaccagaccttatggtcactgagcacctaaaatgtgctcctagtacaactgagagactgaattttaaattttacttaattttttaacagttaaatttaaatttaaaagctgattctcagctcaattattggaaaatgttaagtacgcttggaataatttgggtatatacacctatttttttcaattatgaattttatgacatctaaatatagatcacctatttctggtaaaatttagcatctgaattgagatatattgtaggtataaaacacacactggacttcaaagacttagtataaaaaaggaatgtaaaatatctcaataatgtttatattgatgatgtgtcaaaatgataatcttttgtatgtattgggttaaataaaacatattattaaaatgaa

SEQ ID NO: 19974 - DNA, 219 bp, Homo sapiens
aaaatatttttgacaggagccttaataattccacagagaaggagcaggaagtattatcgtaaatttttagcaaaaacgcaaaacttcacagggaacaagaacaaacaaaattacttgggggtaaatgaatgttaaacgatgatgaattcccaagtatatgactgaagcattcataagtttagtgtagaaatttggaccataaacttaaaggccagatgt

SEQ ID NO: 19975 - DNA, 432 bp, Homo sapiens
tgccaggagacactgcattctactcccaggtgggtttctccggcttttaaaaatgcggaatactctctccatcgtgtcgcagggcatgatttctccattcagtgccttctgaaattgcgagtcagagatctggttccgtcgtccgcttccgccagccttggccaagtcattttgtcttttgatgttgggagggacagaggagttccaaggtcctggatctgactgacttaaaaaggggggtgtcatttactgaaatggcaggaggaggagtgggtttgaaagaagcagagaggaagggaggcagccgtggtttggaaatgttagaaaagggcattgtggccgggcacggtggctcacacctctaatcccagcactgtgggaggccgaggctggagaatcacttgaggccagggagtttaagaccagcctggg

SEQ ID NO: 19976 - DNA, 544 bp, Homo sapiens
tcccttccacagctaatctttactgtcatttttctttgaaattgtcttttgatgttgggagggacagaggagttccaaggtcctggatctgactgacttaaaaaggggggtgtcatttactgaaatggcaggaggaggagtgggtttgaaagaagctgtggaagggagggaatactctctccatcgtgtcgcagggcatgatttctccattcagtgccttctgaaattgcgagtcagagatctggttccgtcgtccgcttccgccagccttggccaagtcattttgtcttttgatgttgggagggacagaggagttccaaggtcctggatctgactgacttaaaaaggggggtgtcatttactgaaatggcaggaggaggagtgggtttgaaagaagcagagaggaagggaggcagccgtggtttggaaatgttagaaaagggcattgtggccgggcacggtggctcacacctctaatcccagcactgtgggaggccgaggctggagaatcacttgaggccagggagtttaagaccagcctggg

SEQ ID NO: 19977 - DNA, 250 bp, Homo sapiens
ttgagtgtgagttctgattgtgcgtgtgtgtgagttgtgtgtgtgtaagcgtgcagtcctcgcctccccaacagacacctgtcttcactagtgggccccccttgcctctagttgggagtggggtggtccaggcagggtcctcggcgcccttagatggagccgttgcagctgctttttgagttgccctcggcggtgccagtgagcaaggctctgccttcctccgtttgtgccctgggagcccagggcatgg

SEQ ID NO: 19978 - DNA, 344 bp, Homo sapiens
  misc_feature (50)..(50): n is a, c, g, or t
  misc_feature (52)..(52): n is a, c, g, or t
  misc_feature (97)..(97): n is a, c, g, or t
  misc_feature (100)..(100): n is a, c, g, or t
  misc_feature (102)..(102): n is a, c, g, or t
gggtactctagcggatccttcagaggcacaaggaggagaatgggggatantntgtatgaacatgagggtgtttctcgtgtgaatgagggtttatgtngtnantgtggtgggtgagtgagcccattgtgttgtgtgtgtgtaagcgtgcagtcctcgcctccccaacagacacctgtcttcactagtgggccccccttgcctctagttgggagtggggtggtccaggcagggtcctcggcgcccttagatggagccgttgcagctgctttttgagttgccctcggcggtgccagtgagcaaggctctgccttcctccgtttgtgccctgggagcccagggcatgg

SEQ ID NO: 19979 - DNA, 385 bp, Homo sapiens
ccaccatgcccggccaacacttttggctaaggagaagtaatacagtatgttaaaagttggtggtttatttctctcttggttttatgttttgtcctgttcaaaatttagctataggccagcccggtggctcacgccagcaatcccagcactttgggagactgaggcgggtggatcacttgaggccaggagtttgagaccagcctggccaacatggccaaaccccgtctttatgatacaaaaattagccaggtgtggtggtgcacacctataatcccagctacttaggaggctgagacatgagaatcacttgaacccgggaggccgagcttgcagtgagccgagattgcactactgcactccagcctgggtgacagagtgagactct

SEQ ID NO: 19980 - DNA, 590 bp, Homo sapiens
gagatggagtcttgctctgttgcctaggctggaatgcaagggcgtgatcttggctcactgcaacctccacctcccgggttcaagtcaccctcctgcctcagcctcccaggtagctgggattacaggcatgcaccaccacacccggctaattttttcgtatttttagtagagatggggtttcaccatgatggccaggctggtctcaaactcctgacctcaagtgatcctcccgcttcagcctctcaaagtgctgggattacagacgtgagccactgcgcccagcccagaatgatctttctaaaatacaattttgatggtgtcattcctatgcttgaaaacatgtaatggcttactactgccaacagtggtggttcttaaattatgcacctggggatttttgttgttctgagcattagacaaaggtgtttagggcagctaaaatcaagcagagtgtaatgtcaataaggtcaatcactggaacaaaaaacaattaagagatagatatagctatatcttttcccctatgtgttttataaatatttcagacttgttatagtatgtctattaaatagacttaataggtatcaaaa

SEQ ID NO: 19981 - DNA, 378 bp, Homo sapiens
agatgaaagaacgacagaatgagggattttcaggcacgggggaaggaagggtggttttggggaacagaccgtagctgactggtggggggccggctttggaaatactttgaggggatcctgagattggactctagactctcccctggttcttcccttccctgagttctggccggttcttggaccagacaaggcaaggcccaagaatgtagatcagaattttttagcctttttttcattagttccttccctagtattcttctagatttttttttttcttaatcacatgaaattttaataccgcagatgtactatatatctgtttatgttctgtatatgttctgtgctttatacataaaaaagagtaagatttttttttca

SEQ ID NO: 19982 - DNA, 439 bp, Homo sapiens
ggtgttgggccgcatcgacgccagcaggaaggtggacctcagattcactgagagccctgggcggcagagggagggggattggaaccagcctccccgtgccctgctggtgccatccccagcaaaccccccgcccctgagccggaaaacgacccggtggctcctcacctggctcaggcactttcctcaagcccgacactatggcgcagaagttggtgttgctacagtcctgctcctgggaggggctccaagtgcaaggggttctgagtgggggagtctctgaagagggaactcagctggggtactctaagcaggaggttcccagtggcaggaggcatctggcatctgggaaatggggtggagggttctcgccgccactggccctgccgattcaggcattcccaccgccctatcctcctacagatcctatagaccctagaga

SEQ ID NO: 19983 - DNA, 243 bp, Homo sapiens
gtggtggggggtctccatatctagacttccaacacccaaggtccatataacccaaggtcgaaaaccttcctgcatcattgggtgctttgctacagtttggccactagaggatgctattgggtcagtattaccagtttcagggcaagaactgatatttactaaagagttttggatgtgggcaaacaagatgaggctggtttaataagaatcttcaatgtcatgtcaaatactgtcaatggcttt

SEQ ID NO: 19984 - DNA, 472 bp, Homo sapiens
tctggttagtgtttaccagttcaaataatcacatgatcttacattggatatatataaacttacccatatggtgaagtcttttaggagacgatcatgttaaatgtttctcactgtggcttatttaatgtcatcagtttattgcgtgttactttggatgccccttagaacttggcaccaagacctaccctcttagaataaacctggtcaaaaggatgttgggatggttgctattttatctttagaaatgacctattttgagatgtaataaatgtgtctcaggagactggagaaatgcccaaacctaaaggtgatacttcaggacaagaattaagttgcaatgtgttcattattatatatgctttagattgtttctttgaaggatgttttacattagggcagtgccttcctttttagaggaagggaaatttgataataagttagtgtatgtccactaccatttgggaaaaagaaa

SEQ ID NO: 19985 - DNA, 426 bp, Homo sapiens
tggatagtggacagctggatggatggatagatgatgcctaaactcagcatggaaaatgaaagtcgaatatggatgtgtagtcagggtcagttactagactagatttatagaaaacagccactcacatttggctagagcaagagacccacagtttagggaatctgtggtgagaagttgaggagttaggccagagatgatgctaggagccagagggtttcagactgatgctttccgagacacgtggtaagtggtgactcaggatgacacagctctttggaaatgcctagagcttgtgtccgtgtaccattgggcacaatccttctcaggatggcatcatcttctatttcagaatgagatggatgggccaggagcatggcagcatctactcctggagtaggcattgttggcatttatttttttctttaa

SEQ ID NO: 19986 - DNA, 469 bp, Homo sapiens
gtaggcccaaaatcgaggaagagataggtatcttcagggagaaatgagatatgagctctgacttacctaagcaagaaacatacctatatgaattcagctaaggtggttgttgaatatgcagaatctggcttaatgaactctagtagaagcgggcaaagccctagggataataaataaaaggagatcacactttctttcttagactcatttctccatgaaccccatcacaggttcacaaaaatggttgggagagtctacagaaaatctcccttgtagtgaattgctggaggagaggaaaagaaactgctgtgagaggggtgagaaattctacctggacccttcttgcctacctcccctatgaacaaaagccttaattagtgtgacatgtatgtagaagggagcaaacattatcactctttggatactggtgaaatcccattacatctgagataagggaacagggaaaaaa

SEQ ID NO: 19987 - DNA, 539 bp, Homo sapiens
ttttaaaatcttcttaactaaaaacgcttcacctgaaacgactcatatcattgttctcaatggtatttttggtatgttccaaaggaagtaacttttgggaggaaaatcagtagcctttgtttagttggagatggaagaaatgcattaatcaagagcaaaaggaaaatcagctgcctttggatggagtcataggcattcctggaattttcatggtggaaatattgaatttttgtccatttctggagaacctccacgaagattcacagagactcaagtattaaacgtaatgtgttgaagcacatcagaagaatttgttttctataatatgtttctccctctttttctcactctctccttctccctctctttccctttttctctctccttcccctctctccccgtgtagagcttctaactagtagaaacagaataaaatgtaatctctattaaacataagttataagacaatgttgattctagaaaatgcagggtctcttttggaagaaatatttaaagcataactgttcgataaccaaaaa

SEQ ID NO: 19988 - DNA, 196 bp, Homo sapiens
ctataagatgtgaaaggaaattgttttcttttctcatataatacacatctatttagataaggactagcctctggaatccatacaaaggaatatgctattcctatttcagagcaacctcctctttaaaacatctgttttgaattgaggatttttaacttaaagaacttcaataaacaagaaaaatgagtaagctttt

SEQ ID NO: 19989 - DNA, 366 bp, Homo sapiens
aaagtttaaaggcaaaagcaacaataacgatgactaggaaaacataaaacatattgtgcttacttctgcttggtggaatcatgatatacgtaggagtgggtgattctttttctgtctaagaaatgttctatagggatctacattgtttttaaacttggaattaaccataaataatttttaaaaatgaaaatatgggattataaccaaagccaaatacaagagggtgacacaaaacgtaagaattgcctgagagccaaccaaggtggctcagcctgtaatcccagcattttgggagactaggaggatctcctgagcccaggaattccacgcaagcctgagcgacatagtgagaactcattgctacta

SEQ ID NO: 19990 - DNA, 828 bp, Homo sapiens
tggttataaactatgtacttgacattacacttttgttttccaaaggtaaatttattgacctacaataatttaggataacagccatcagagaactctaattactgtttaagaatacttatttctataaaatatttgatagacctagatttttctttttatagtttatagttgagacacaaatataattttttgttgttgttgtttttgaaacagtctcggcggggtgtggtttctcatccctgtaatcccagcactttgggaggctgaggcaggcggatcagttgaggtcaggaattcaagaccagcctggccaacatagcaaaaccctgtctctactaacaaatacaaaaattactcaggcgttgtagtgcacacctgtgatcccagctacttggaaggctgaggcaggagaatcgcttgaacccaagaggcagaggttacaatgaaccaagattgtgccactgcactctagcctggatgacagagtgagactccatctcaaaaaaaaaaaaacaaaaagaaaacccacgtaagtcaaacacaaaacaaaaaaaaaaatttgtgggccggctggccgagaaattttaaaccacttctgtgggggcggggggccaagagaggtagttaacattggcacaacgtggcccagggagtccgggcagagataggggtgggttctcccaaaaaaaacgccgggagacacgggtgttaacaaatccatgaggtccgcggcgctggtctacacggtcagactgtctacccccccgcggcgggggaagagcagagaaaagaagaaggaaagaacgaaccgaagcaaaggagagaaca

SEQ ID NO: 19991 - DNA, 208 bp, Homo sapiens
ggtgagccgagatcgtgccattgcactccagcctgggcaacaagagcaaaaaactctgccaaaaaaaaagaaaaagaatagtatgggagaagtcatacctattgggtaacactatggttccattgtttatgtcaaggaaaattctggacatattttattgtcagggtctgttttgtgaatactttaattctcttgacttagcctatcc

SEQ ID NO: 19992 - DNA, 817 bp, Homo sapiens
cagagtttcactcttgccacccaggctggagtgcaatagcgtgatctcggctcactgcaacctctgccttctgggttcaagtgattctcctgcctcagcctcccaagtagctgggattacaggcacccaccaccacgcccagctaatttttgtatttttactagacagggtttctccatgttggtcaggctggtctcaaactcccgacctcaggtgagccacccgcctctgcctctcaaagtgcttcgattacaggcgtgagccaccatgcctggccaaattctttagtgaggctttttttttttttttcctctctgtccactggatgccaaggtcaagatatttgctcctcctttctgcgtggtgggttcatgtcttgcttgctgttatactaatgtgccccagctttatgtggggcctcctattagacactttattttggaaatttattttttcttaatgttacatacaataagagtatatcttaacaactgatggtgtttttaaatgaaatgcagtgtggtgttagacagtggcgaaccatctccccttctccatttttcccagggtgctaacactcactggccccaggccatggcttcttacacctaacatatttgcaccaatgtcttagctcaaaattgtgtcctgtagccctctccttccttccaggttcatgtctatttccttggtgcagacttttgtattctttccagctagtgtctggattgctgcctctcaacttctgcacgtctgaaattgtacatcttttgtcctcattcttgaatgacaacgtagcaaaatgtggaattcttgg

SEQ ID NO: 19993 - DNA, 256 bp, Homo sapiens
acatgaataccaccatgagatttgaaagaccatgctacctaggacacaaaacccagaaacaataagaagttgaaagttttgactacataaaaattgaaaatactacatggtgaaaatgccataaactgaattaaaacacaaacagctaattgggaaaatgtttgcatacttaacagataaacagccaacactgccaatatataccaaatttttaggatttggtaagatgatgaagaacgttaagtaaaatcagcaa

SEQ ID NO: 19994 - DNA, 837 bp, Homo sapiens
gagctcaaatgatcatcccacctcagcctcccacagtgctgggattacaggtgtgatataccgtgcccagccaaaatgaacattttaatcctctcttgataaattagagcaacctttctggagaggttatatatttgctgatatatatcaaaagcctgaaaaacatgcatacctttttacctagaaatttgccctccagtaatttatttaaaaaagtgataaggcagattttcaaagatttatagtagtgaaagattggcaacaaccctaaatgttcatcagtggtttgtaagataaacatatttattcaatcatcatttatggagcactttttctgtgccaggccttgttctaggctctaggaacagaataccaaaacctttcattatattgggaatgacacacagtaaactaataaataagaaaatctcaggtatttataagtgctgtgatgaatgtttaattggttactgtgataagaactaaatggggaattactttagattaagtgatcaggaagggctcctctaaggaagcaatgttaagctgagacctaaatgacaggaaggatgctggcatgcaagacatgggaaaagagtattgagcatcttaggcaaaaggaataacctttcgtatagaggaaaccatcagttctgagaagccatgtacttagcggttaagcacacagactgaggagctgtggagctacacagctgccaggtttacagccaggcatctttgtagctccatacgtagttaactgctttgctacttagtgtctgtgtaactttaggcaagctgcttaacatctctctgcctgcatttgcttaattctta

SEQ ID NO: 19995 - DNA, 1008 bp, Homo sapiens
agcctttggactcaggacaccctactcttgtctctcctctcagtttctctgctatgaatctcctgattcatgaacacgttatctgttcacccttctctctaggtcttagttcttagattttccttctgtaaaatgcatgtgatcttattttcccctccacaactttccagatgaactagactgtgaccaagaggtctataaaatcaaagcatcatggaacaggatcttgtatcagaccaaagtgtgccagtttttaaaaatgtgcatcaaaatggaagtctcagagacagagccctctggtggaaagttctagtaggttaggacagtcctgcctgcagacaccttgggctttactgagggactcaactgagaaaatgaggaatgttgcagctcatgattcttagaagaagaaagtgaagcttgtttaaaatatgatttaaaaaatctgtagaacactgtaaactacacaggctatgagggaatagcctggttgggccagcttggaaatcgggcacaggcaggaaggggcctgtctggtttgggccgtgtccacagagagcacttcttaggtcctgcctggagagaaggaatggctgggctatattttcttccagactcattatttttcttctgtttgacttttctctgaatttcccttgatttgtataaattttctcaataattagtgacagtgtctactgattgtaaaatgaagcttgaaggccaggcgcagtggctcatgcctgtaatcctagaattttgggaggccaaggtgggtggatcacaaggagttcgagaccagcctggccaaggttgtgaaaccgcgtctctactaaaaatacaaaaaaattagccggacatggtggcacgtgcctgtagtcccagctactcaggaagctgaggcaacagaatcacttgaacctgggaggtggaggttgcagtgagccgagatcacgccactgcactccagcctgggcgagagagtgagactccgtctcaaaaaaaaaa

SEQ ID NO: 19996 - DNA, 279 bp, Homo sapiens
ttttacagaataacttaataaacaatgtcatacactacatcctttttggaaaggattttacctcttgccctcatcctgtaaacaaggatgggcctctatttaaagaagaggaaaaggaagaggggggaaggatattattcacctggcctagcattttttgagcagatgttttcctcctttcattgttcacagaaaattggtttgaggtcatataaagcaaatgttcaaaaaaactgtgatccataaatcaattcatactattcttttgcttggatagag

SEQ ID NO: 19997 - DNA, 446 bp, Homo sapiens
gcttcctcctgctgggactctctgggaaacaatgtagagcacacacctcacagcgtcccacacaatgggcaaggttgctgaggaatgtctacagcaactcctgagtggtatgaggggtcactgactagtccagggctgctcccagtgggtgccacctctgatgggcacagggtggcagagctggtgctgtgaccatgctgagctctcagatgctgcacccagaagcaaggttcaagtgtaagggctaaggaaatgtgggcaaggcatggcaggtctgacacacaaaggatggtttagaaactgacattattaagccaggaatagagatcactcatgggtgaagaggtctgacctagagtcagaaaattgaaccttgagttttgcttgctgacctcatgagcccgacaagttgctccacctctctgagcatcagtttcctcatctgt

SEQ ID NO: 19998 - DNA, 479 bp, Homo sapiens
ggtggggagctccaagcaggtgggcaggacccaggggcctggtgaccaggacagacccccactgtccatcacctttcctggccctgtcctctgctaaacttcccacaggccttctgcccgatcacacagagtatgcccaaactctctcaggcctctggcagctgaaaaccactgctttaaatccctttaccatttactatgacataaggttattgtaaacaggaaatattctattgatgctacaaatggaaagccaatgcctttaccataaatagaaaaacaaccctaagaagcaagcaaaacaaaaacaaaacaggggctgggtgtggtggctcacgcctgtaatcccagcactttgggaggccgaggtgggcggatcacaaggtcaggagttccagaccagcctggccaatatggtgaaaccctgtctctaataaaatacaaaaattagccgggtgtggtggtgggcgcctgtagtc

SEQ ID NO: 19999 - DNA, 1140 bp, Homo sapiens
ggtggggagctccaagcaggtgggcaggacccaggggcctggtgaccaggacagacccccactgtccatcacctttcctggccctgtcctctgctaaacttcccacaggccttctgcccgatcacacagagtatgcccaaactctctcaggcctctggcagctgaaaaccactgctttaaatccctttaccatttactatgacataaggttattgtaaacaggaaatattctattgatgctacaaatggaaagccaatgcctttaccataaatagaaaaacaaccctaagaagcaagcaaaacaaaaacaaaacaggggctgggtgtgtggctcagtaaatacattttttattatcaaaaaagagtagtgtatggttggcgtattctgtgtagaatgtattttattgatgtctcctatttttataatttctgagttaagtactttttaattaatgctttttagttttgggcagattcagttgactaaagcacctcatttcccagatacgtgaaataaaatatttggcttcttttccaatttcacactgatgttattttgtgaaaatcagtgctttaagataaatcgttatacgttaagataaacatgagaaacttgatctaatatttaatatttattcagttctacactttattaacttctacaccagcagatttagacattatgtaaccatctcaagaagtttcacttggatgtaatgcttcacgcttgtaatcccagcactttaggaggctgaggtgggaggactgcttaaggcaaggagtctgagaccagcctgggcaatacagcaagatcccatctctatttcaaagaaaagtttcactttgggaggccaaggcgggtggatcacaaggtcaggagatcgagaccatcctggccaacatagtaaaaccccatctctactaaaaatataaaaaattagccgggcgtggcggtgggcgcctgtagtcccagctactcgggaggctgaggcagaagaatggcgtgaacccgggaggcagagcttgcagtgagctgagattgcgccactgcactccagcctggacagaaatgcattcataatgcattttaattgcattagcagtgatttaatattatagatgctaacactgtgggtgaag

SEQ ID NO: 20000 - DNA, 1770 bp, Homo sapiens
agtatgtagaatttgaaagtagttcaaatttgaattagaagaatgaagctaggacttatttggaaaaggagatagaaaaaaaatgatcagaaactgtggggccttattacctttgcagtaagttatcttcttcatgatatatgtgaattattttatgtgcagattgtgttttgggattgtcagatctaaacttatattcttgctggctaatgtgctgatagccaggtctgaaacttgatgtgctatccagacacatatgatcagaaaagatctagagtgcaaagaggtgtctgaggagcaaaatgtggttttaatgttgtggaaagatcacttgcaagtatataagactgtataaagaagaggactgtgtgcaagtggggtgaaaaaaaaggatacgcgaatgtgcatatgactgaatagggaggaaggtcagggctagaaaggaggctacataaaaaggggcaatggagagtgcacaggaaagacacaggggaaggtcaagtcgagcaaggtagaaacaggagtagctagagccattgggaatccattttgaaacaagaaggagttttgaaagggaataggaaagtaagtgtcttgaagtaaaagataaatatggatggagaaagaagaaattctggatgatagagatgataaaaatatttattaagaaatgaagtcaggttcagtgtatgaaatggaaaggaatttttcagaattttaagaaaggggaagttcctcttggaaaagatatagcaaccattggggaatgaccttttcatttcagaagtggatgaggaaggtggtgtgagcatcaggtatattctggaccatttcaagtgctggtgagaagaaaggaactctttgcctgaactgggcttggttttccaagtgctgctttggaaatgaagacccagagatgcagagcttatggtagttcataaatcttcatgttctattatctttcatctgccaataaagttcattttcaataatgtccaccattgctgtgcccagaataaccacaggcaaacatcaaaacaatacgcataagttagacaagattaaatcttgtctgatatctgcacaaacagatatgcaccatgttggaaacatgtgttttcctagtcccatccaggcttcccacaagaaagccatgatgtgggtctaaaccatatgttttgagtaaaggagaatagaagaaggggagtgtccgcaaaatggaaagagatgaagatgttccaaggaaatatgctgaaacagaacagtgaatgttttgcccaaaactacaaaaataaaagaaaaaaagaaaattgcaatacatggctactaagtctttgatcataagtcgaatttatagacctggaatttgccatcctagtctttcctttttagtaagacttctgtcctctggcagtgcatatggtaggtctctaatgtttctgcatctccaggaagatgcagatccttatttttgctgggaaatccttctaaatagaaatgtaacatttttataaaaacagattaatgtgtttttcacttagtaaatgttttcaagagctgaattgagaaggaaagagactggagtggttaatggtgatttgatttctggcattctgagttttctgctacaattagctgcattacttggtgccaaagagcagtggggaattgttgagttgctgtatcctttaaaaaaaaacaaaaaacttgttattttgaaagaacttaaggctcacaagatgttacaaaaatagtagagtggccttaccc

SEQ ID NO: 20001 - DNA, 1266 bp, Homo sapiens
acggcaaggatgtgaggcaggcgagccggacgccgctcgcagcaccggagagggcgcactgcaaaggcgggcagcagaccgtggagagcccgggagcggagctggacaccgcctcggagggaagaaatgaggtagcggcggttcccggacccggccatgcccgtcccctgttctcggagcccagcgccgtctcggccaggccagcccggacactgagcgggccgagcgcgagtccccggcgtccggcggagcgaagatgcagtgagtccccgcgggactgctgcgcggggcccgccgcggccagccggacccagcatccgaccgcactttgggcgagctgctgacttgagaccagcccaaacggggggctttccatctccagcacccctcggaggtggggagcaccggcccctaggcacactcgctgtagagtttccgcgggttttggccccagtcctgagggttgtgtgtgttaggggacccacctcacgttcgccgaggagttcctgcatattcttgcaccatcccgggtgctgttgctggggctctctttatttgcacgcgcgcttctagcttttttcctgacattttccactctacgctcgttctttctcccttgcattttgttgcttgcctgagactctttgctctcgcccttgcccaggctggggtaattctgtgtgcgcgcgtgtctcccccgcaccaaccttttttgcacactcgaagctgaatattttcttttttagagaatttacccgcacctcctgcggggttcctaagcactctctctgctcccctccccccaactccccttggttctttttggtgcaagaattctggctgtttacctcagactcagacccctgaaatgttgccaaattcttcaaataactgtttggggggtggggggagatgaaagagagtcgcgttttgtttacagttaaagacatccaatatcttaaaaaggagttttcctttagaaacacacacacccttcctcttgctcaaaagatctcactccatgatactgtgtaaaatatttttgcactgttgtgaagtatttttgacttttttctgtacataactgtgttctcagagctgaatgtttatatcttttgctgtgcaaaagaaacatgtaaaatgttgttcagttgtatatacagaaatgtgtataaaacattttgttattttttaaaagtagcactgttctggttctgtttgcacgccagtggggagagaataaagaggaaaatttaacagaacagg

SEQ ID NO: 20002 - DNA, 3165 bp, Homo sapiens
acggcaaggatgtgaggcaggcgagccggacgccgctcgcagcaccggagagggcgcactgcaaaggcgggcagcagaccgtggagagcccgggagcggagctggacaccgcctcggagggaagaaatgaggtagcggcggttcccggacccggccatgcccgtcccctgttctcggagcccagcgccgtctcggccaggccagcccggacactgagcgggccgagcgcgagtccccggcgtccggcggagcgaagatgcagtgagtccccgcgggactgctgcgcggggcccgccgcggccagccggacccagcatccgaccgcactttgggcgagctgctgacttgagaccagcccaaacggggggctttccatctccagcacccctcggaggtggggagcaccggcccctaggcacactcgctgtagagtttccgcgggttttggccccagtcctgagggttgtgtgtgttaggggacccacctcacgttcgccgaggagttcctgcatattcttgcaccatcccgggtgctgttgctggggctctctttatttgcacgcgcgcttctagcttttttcctgacattttccactctacgctcgttctttctcccttgcattttgttgcttgcctgagactctttgctctcgcccttgcccaggctggggtaattctgtgtgcgcgcgtgtctcccccgcaccaaccttttttgcacactcgaagctgaatattttcttttttagagaatttacccgcacctcctgcggggttcctaagcactctctctgctcccctccccccaactccctaccacagggccgctcccagtagttttattcttcgatcttgcccgggccgagcctggcaggggccggtggctcagcgggcctcgcacccggcgctccgccgccgccgccgcccagctgcgccggggcgccctccggagatgctgccgtggaagaagcacaagttcgagctgctggccgaggcgccgccgcggcaggcgtccaagcccaagggctacgctgtgagcctgcactactcggcgctcagctcgctggcgcgggcgtgccccgaaggcgcgcttagccgggtgggcagcatgttccgctccaagcgcaagaagctgcacatcactagcgaggacccaacttacaccgtgctctacctgggcaatgccaccaccatccaggcgcgcggcgacggctgcaccgaccttgctgtgggcaagatctggagcaagagcgaggcgggccgtcagggcaccaagatgaagctgacggtgagtgcgcagggtatccgcatggtgcacgccgaggagcgcgcgctgcgccgcccgggccacctctacctgctgcaccgcgtcacctactgcgtggccgacgcgcggctgcccaaggtcttcgcctgggtgtaccggcacgagctgaagcacaaggccgtgatgctgcgctgccacgccgtgctggtgtccaagcccgaaaaggcgcaggccatggccctgctgctctaccagacgtcggccaacgcgctggcggaatttaaacgcctcaagcggcgggacgacgcgcgtcaccagcagcaggagctggtgggcgcacacaccatcccgctagtgccgctgcgcaagctgctcctacacggaccctgctgctataaaccgccggtggagcgcagccgcagcgcgcccaagcttggctccatcaccgaggacctgctcggcgaacagctggagcaggagctgcaggaggaagaggaagaggagcaacccgagggctgcccggaggaggaggagaaccgtgcggcagagggagatccagcagaggaggaggccgaggcgcagcgtgcgctagtggtcgccatgcactttgagtgcggggacttgttggatactctggagaatggccgtggggaggcgctaggaggcggcgggggctccctgggcccgggggccgggccgccgcctctgctgctgggcagcgcctccgacatgaaggctgagctgtcgcaacttattagcgacctgggcgagctcagcttcggcaacgacgtgcgcaccctgcaggccgacttgcgggtgacgcgcctgctgtcgggcgacagcacgggcagcgagagctccatcgagggcgggggccctgacgccacctccgccaccgccggggactcgtcccgccaggccgacggcgccagtgcagacgagccccactcgggctgagctcctccgcgcgtcgccggcgctccaccgtggctacccatccgtggtcccgacaacctccctgtcccttgcccgcccccaggaagggggaaatggggcatttggggcccagacctacacttggagcccaggtccagcgttcccccgaccgctttcccctacctcccggcccccgctcccgccccagcacttttggctctgttgcgcgtggggatgcggggagatttgagaggggaaaaccccgccaggagggagagagaggcacccctctgggatgcgggtgagggaaggttggctgaagttcctagtctcaggccgtaggtgcctggccagtttcctgtttgtggggcagctggggcctgaggaggaggggttcacttcctcctcccaccccctgggagcggccctgcgctgtcactgacatctcattaaaaaaaaaaaaaaaatttgctctcaaggtgtttgaggctttaatgcaaccctttagcccttggttctttttggtgcaagaattctggctgtttacctcagactcagacccctgaaatgttgccaaattcttcaaataactgtttggggggtggggggagatgaaagagagtcgcgttttgtttacagttaaagacatccaatatcttaaaaaggagttttcctttagaaacacacacacccttcctcttgctcaaaagatctcactccatgatactgtgtaaaatatttttgcactgttgtgaagtatttttgacttttttctgtacataactgtgttctcagagctgaatgtttatatcttttgctgtgcaaaagaaacatgtaaaatgttgttcagttgtatatacagaaatgtgtataaaacattttgttattttttaaaagtagcactgttctggttctgtttgcacgccagtggggagagaataaagaggaaaatttaacagaacagg

SEQ ID NO: 20003 - DNA, 565 bp, Homo sapiens
ggcatggtaaaaatatatagaaaccaaaagcacaattacatatatgcatttcaaaacacactcattagaatagtccacaggttgtctgtcctcacaagcgtctcagtgttcattaacatctgcccatggactacagcttatctctgaaacagtcagaagtctaaagggaatcggcaataataggactgctttagcattttttaaatataaagcacaatgaagtcaattgttgaacggtgtctatccttacttctctgggtgtgtgactatattttacctggatgttggctccataatccacagatattttatttttctctccattgctgtattcccagcaaagaaaaaatagtagttactaaaaaaaatttattgaatgaatgaatgaatgaatgattcgactgtacctggtgggcatgtgtgtgttcttttatttggtaaaataagaatttttgggaggctgagacaggaaaattgcttgaaactgggaggcagaggttgccgtgagctgagatcatgccaccgcgctccagcctgggcaacagagtgagactttatctcaaaa

SEQ ID NO: 20004 - DNA, 390 bp, Homo sapiens
aacaagtaagaagtttatgtatgaaagtaatcaatgtaaaatataagaaaggaataaatggtacccattttgaatttttaattctaataggagagtagattgtagattgaattgtctttcctgtttacttgttaattagaaaatgcatccttcataaacagctcctttctcaaattttttgtatattgtgtttgtgtttgggttttagtttgtacccgcgctaagttttggttttgttgtgtttggtgttttttgttttgttttgttttgttttgttttttcttttttaaccaacctgtgtattaggtgttagccctgttagccccaatagccatgcatgaaatctttaaataaaagttaaaaaagttctttagaggcatatttctgtaa

SEQ ID NO: 20005 - DNA, 276 bp, Homo sapiens
aacaggaaatgggctcaagattgttacattatgccaaatgaattgggagtcatacatttagtttagtacacgaagcagtaagtgaaaagagccatgcataacaattctgaagtatggtgctgggattacaggtgtgagccacggcgcccggcctctttccttagcttctaaaaccacgagtgttttcaggagcccttcagttgggagcagctgcatctaggacctctaacttcttcagtgttctcgggtggctttgctggtgtcacacctgccact

SEQ ID NO: 20006 - DNA, 627 bp, Homo sapiens
gattttcacacagacactttaggaaagaaactaagtttggggggacttgacctaatcccacatcacagccccagtaatacagccctggaatttatcacagaaagcctagaatcccatgcatatcccatgcatatgcatccctagtcctatgggttcaaggcttggagctctccctggatttagctgggaaaagttggcagacagttcttctctgtcttctagaaatatggactagaatcgtgagtgtgagattgcaagtaacttttaaaatcatctagtttaacttcaccccatttcatagaccaagaaactgagaccagagagagaaatggactttcaagttcaccctgctagttactgatggatcacaagtcaaatctcctgattctagcactgtttctcttacaccacaccacctttgaaagtgtgtcaatcaaatcttactttagttgcagaggatgactttagtttctgaagataaaattgtgagtcaatcaagatgagtcccaagacaatagcctgtttagcccttataagttcagggatgaaaggttagaaagaaacaggatggaaggaggactggagaaaaaaacaaaagaggaaggaaggaggaggaagcaaacagga

SEQ ID NO: 20007 - DNA, 711 bp, Homo sapiens
aggaaccctcagtatcacagaccttgggtcccattctcaatatcaggtgaaactgccagagtacagagtctgatcatatttcctgtggcctaaactcaggtgcctctgagagctgtgggacctgtttccaacttgacatggagagagactgtatgtcttcgacctcagattccccaacctattaggaaacatttgacaattatttataaatagggtgactgtatgtccttttctgtccaagacagtccccatttacgactcttgttctggcactattaatagtgcccgctctgagcctcagattgccccagtttggaccaggaatcacatcatgtcctatttataaactaatttatagcagttttgaacctgtaggagacaacatctaaggtcccagcagtctctgaattgctccaggaagaatcatttaaatcttgggccagggttgaaattacaacataccatcaccagtcatgctgtgtagtggtcccttgttttcctccagctagtttctagaggtcttgtctggaagtgatcctactgtatcatctctccatgactgagtttaggaaacttggttatcaaaccaacctgagttggcacctggctctaccacctatcactgttaccttagctcaatgatgtcacctccctgagctacttttctcatcaattaagtgtggactgtgaacattaaataagctgaagtat

SEQ ID NO: 20008 - DNA, 221 bp, Homo sapiens
atgggtctttcagtgaaactgatgaaaagtatctgaaatctggtttctatctagagtttgaataacacagtgaagttaaaactaacactgaactcatttaatgtaggcagctgctttttttttggcatttgttgatactgtattttatgaaacattaatccagaaactgtgcttgatgaaagtcttttgtagacacatcttatttatttctttctagcact

SEQ ID NO: 20009 - DNA, 355 bp, Homo sapiens
agtgtacaatgtggaatacacaatgtacaatatggaatacacaaggtaatcacaagggtccttgtaagagagaggcagggctaggagcagtggctcacgcctataatcccagccctttaggaggccgaggcgggtggatcacgaggtcaggagaccatactagctaacatggtgaaaccccatctctactaaaaagtacaaaaaattagctgggaatggtggcgggcgcctgtagtcccagctactcgggaggctgaggcaggagaatggcatgaacctgggaggcagagcttgcagtgagccgagaccgtgccactgcactccagcctgggcaacagagcgagagtccgtctca

SEQ ID NO: 20010 - DNA, 318 bp, Homo sapiens
gttcctaatccctgaatctattcatttcattgaaattgatgagtactttcaatacaaatagttacaatattttaagatgttcactgtttataacatcattatatgagtccatgttaaaccagagaagcagaaccagtagacaatatagatttagagatttgttacaaggaattggatgatggaagtatggaggctggctaagcgagtccaaagcccagtcaagaggaaagcaggctagaaacccatgggcataagctgtttagagtccctcagctcagggaaagcctaagctctctttcaaagggctcacctaacttt

SEQ ID NO: 20011 - DNA, 341 bp, Homo sapiens
aattttttttttttttgtagagatgaggtctccctgtattgcctagactagtcttgaactcctgggctccagcgatcctcccgcctcagcttcccacagtgctgggattataggcatgagcctccgcaccaggccgattttcttaagtgtagaaggagaatactgcttccctcctaagggctgtgctgggataaattaaacgatgtatgtgaagcactgacagcgtagtcctctcactcctaccttccctctgctgaataaaggcttcctggggagtcaggaaaaccagcccagagaaccctgaagtggaaggcattacagagtcctggcccctactaacc

SEQ ID NO: 20012 - DNA, 518 bp, Homo sapiens
gactttattaccatccctaaacacacaaaaaaatttcttttagatttactctcactttgcacgaatagcaaacatgcttagaactgcttagattgcacaatgttctcagattaggaagggaaaattggtttgaataaaatacagatgtctattccgctaacaactaaatctttgtgaatgttctgagtcctgtaccatcaaagaaatagatcgtccatgggggtttctatttctggtagattgtacttacacactgaatgaaaaagctttctcctaatattcccagtccaaataaaaacaacccaaggggcacctcttatttaggtcaataaaagtttgcaaatgtggaatactttagccatctacatcacactggtagagactttctgtgatcagctattttttaataccatatttaatcaaatctaagataccatcattgtgaaactcgacattttatatatcactaagaaagcaaaaatgcagcctgggtgaccagagtgaaactccatctcaaa

SEQ ID NO: 20013 - DNA, 968 bp, Homo sapiens
gggggttagaaatacataagttttacattttacatacacatgcatgaagtagtatacatagcatttatatattcacagtataatatagtatttgtatatagtatttttatacctacacatagaaatatgcatagttaattaacatctataaattttctaccataaaaatgtattgcttttataattaaagaaaaatacatattttcaagtcttggaaatcagtaatattcataaatatttttaaagattatgtagttcatctaatcctaattattctaagttttagccacagatgaagttaataatctaaaaaacaacatacttgaatcacatgatgctttaagaaaatggtatcactgagttttgttcacagttatgtcttgggtaaggaaatcctgacaaacagccttatgcaggttattactatattaactgtacaatactgttaaagacattacccactacaacacttaatagctctgatacggaactccacataagaaatttcttcagaggtaactatttagaaaatgtcttgtttcccccaaatatttagcctgttttcttaaagatataggcatttttatatttaaaagatacaaaggtatgatgtcttccttctctttggcttcctggaagcttaaagctaaaatcccagctcaactaggtaggctcctgtggcctgcacagttgtgtcctatcttcctccacacttccacacctcctcaagattgctacttggattgctatttctccctggtttgcaatttgagtatcttatttacatatttttaccaatttgttggtacatgtttttgttgtaagctgccagatagtatttgtgggataagtagaataaaaagaaaatattgtaatcccagcactttgggaggttgaggttagaggactgcttgagctaaggaagtcaagaccaggaaaacataatgagactccgtctccacaaaaaa

SEQ ID NO: 20014 - DNA, 299 bp, Homo sapiens
gatctctactatttgtagagaaatctaatcaaactaataaatgatctgatatccaacttctaatttttgctaccaattgctatattctccaagaaaagtacaaatgttgccttattaattcatgttctggttctgcttcttctcaatctttccctgacacactttgaaatgcaatgtttcatcagctctctgatttcctttcacagcccattttactctgtcacttgtatcccttgtttattcaattcctcctctccagctaagatgtctcagtcacttctctcttcaatatagcttgt

SEQ ID NO: 20015 - DNA, 552 bp, Homo sapiens
cgccgtgccaagcgacacaaagcctgactttacaacctcagagaaagtggaagtaagaaggcttaggtgggcaggcaggacgagagaaagactgagaggagggaaagccgcgtaggtgggagtacagcggcgcgagggtcgagggggaaccctcgtcggtgcagatgaggagggtgggctttcagaactagtcccccctcgcaccccgccccgcccctcccgcgctggggtcttcacggtgccctgcctcagagcccggctccaccacgcccggaagagggagtctggccgtcggctggctcagggcgggccggttggctgtacccaggctccctggcccgagtgcgggaccagagcgcggggcggcgcggcagccgcggaccgaggaggggctgcgagcgaaacggcgcggcgcggcacggcggacgagttagggccggggcgagggaggctgtggctcccgacagagacaggggagtagtgtcgggctgaggcgaggtgaggcgcggggtgcctcgggagggttccccgtgccccgaggggggcggccgc

SEQ ID NO: 20016 - DNA, 450 bp, Homo sapiens
tgccaatgggttatccaggcaagaagcagatcagaatataggaaatatcactcttttgacatgaatgtagttgaaatccatttttaagttagttaaggactaacttaaaaatacctacaaaatccagggagactgacttcagtatttgtcatggatcttcagaatactgaatcccaaatttcaatactcgcttctcaaacagggagaactgttctaaggtgacccaggaatgccagccatacaaatatgctcaagacatggaaaaaaacattaaaatggatttgctgcaactgatattctgtgttctgcaatgctaggtgtgcccttgtagtccaagaactaacactgcagactgcaactagaatgtggtccctggtcatgtcacttccaagaaatatcaggtttaagaactaagcagtatgtgtaagctgaaaagggattaagagtgag

SEQ ID NO: 20017 - DNA, 1480 bp, Homo sapiens
tctttacccacctggctgtgcacagcactcccactgacaactgccttggtcaaggtgggcttcagggctcagtgtcctggttactgcagcggcagcaacagcaggtcctactatcgcctccctctagtctctgcttctctggatccctgaggagggcagaaggaagaaaacagcccaaagatgagagtgattcgcgtgggtacccgcaagagccagcttgctcgcatacagacggacagtgtggtggcaacattgaaagcctcgtaccctggcctgcagtttgaaatcattgctatgtccaccacaggggacaagattcttgatactgcactctctaagattggagagaaaagcctgtttaccaaggagcttgaacatgccctggagaagaatgaagtggacctggttgttcactccttgaaggacctgcccactgtgcttcctcctggcttcaccatcggagccatctgcaagcgggaaaaccctcatgatgctgttgtctttcacccaaaatttgttgggaagaccctagaaaccctgccagagaagagtgtggtgggaaccagctccctgcgaagagcagcccagctgcagagaaagttcccgcatctggagttcaggagtattcggggaaacctcaacacccggcttcggaagctggacgagcagcaggagttcagtgccatcatcctggcaacagctggcctgcagcgcatgggctggcacaaccgggtggggcagatcctgcaccctgaggaatgcatgtatgctgtgggccagggggccttgggcgtggaagtgcgagccaaggaccaggacatcttggatctggtgggtgtgctgcacgatcccgagactctgcttcgctgcatcgctgaaagggccttcctgaggcacctggaaggaggctgcagtgtgccagtagccgtgcatacagctatgaaggatgggcaactgtacctgactggaggagtctggagtctagacggctcagatagcatacaagagaccatgcaggctaccatccatgtccctgcccagcatgaagatggccctgaggatgacccacagttggtaggcatcactgctcgtaacattccacgagggccccagttggctgcccagaacttgggcatcagcctggccaacttgttgctgagcaaaggagccaaaaacatcctggatgttgcacggcagcttaacgatgcccattaactggtttgtggggcacagatgcctgggttgctgctgtccagtgcctacatcccgggcctcagtgccccattctcactgctatctggggagtgattaccccgggagactgaactgcagggttcaagccttccagggatttgcctcaccttggggccttgatgactgccttgcctcctcagtatgtgggggcttcatctctttagagaagtccaagcaacagcctttgaatgtaaccaatcctactaataaaccagttctgaaggtg

SEQ ID NO: 20018 - DNA, 1657 bp, Homo sapiens
tctttacccacctggctgtgcacagcactcccactgacaactgccttggtcaaggtgggcttcagggctcagtgtcctggttactgcagcggcagcaacagcaggtcctactatcgcctccctctagtctctgcttctctggatccctgaggagggcagaaggtactgaggaaggttaaagggaccagccttggagtatttccccactctgagactcagctggccacaggccaggttctgaagttcctttcttccaagccagtgattctggttcttggacaaggtgttgaggaacactagaaacagaggggactgtgacctgggggactttttctgcaggaagaaaacagcccaaagatgagagtgattcgcgtgggtacccgcaagagccagcttgctcgcatacagacggacagtgtggtggcaacattgaaagcctcgtaccctggcctgcagtttgaaatcattgctatgtccaccacaggggacaagattcttgatactgcactctctaagattggagagaaaagcctgtttaccaaggagcttgaacatgccctggagaagaatgaagtggacctggttgttcactccttgaaggacctgcccactgtgcttcctcctggcttcaccatcggagccatctgcaagcgggaaaaccctcatgatgctgttgtctttcacccaaaatttgttgggaagaccctagaaaccctgccagagaagagtgtggtgggaaccagctccctgcgaagagcagcccagctgcagagaaagttcccgcatctggagttcaggagtattcggggaaacctcaacacccggcttcggaagctggacgagcagcaggagttcagtgccatcatcctggcaacagctggcctgcagcgcatgggctggcacaaccgggtggggcagatcctgcaccctgaggaatgcatgtatgctgtgggccagggggccttgggcgtggaagtgcgagccaaggaccaggacatcttggatctggtgggtgtgctgcacgatcccgagactctgcttcgctgcatcgctgaaagggccttcctgaggcacctggaaggaggctgcagtgtgccagtagccgtgcatacagctatgaaggatgggcaactgtacctgactggaggagtctggagtctagacggctcagatagcatacaagagaccatgcaggctaccatccatgtccctgcccagcatgaagatggccctgaggatgacccacagttggtaggcatcactgctcgtaacattccacgagggccccagttggctgcccagaacttgggcatcagcctggccaacttgttgctgagcaaaggagccaaaaacatcctggatgttgcacggcagcttaacgatgcccattaactggtttgtggggcacagatgcctgggttgctgctgtccagtgcctacatcccgggcctcagtgccccattctcactgctatctggggagtgattaccccgggagactgaactgcagggttcaagccttccagggatttgcctcaccttggggccttgatgactgccttgcctcctcagtatgtgggggcttcatctctttagagaagtccaagcaacagcctttgaatgtaaccaatcctactaataaaccagttctgaaggtg

SEQ ID NO: 20019 - DNA, 1561 bp, Homo sapiens
tctttacccacctggctgtgcacagcactcccactgacaactgccttggtcaaggtgggcttcagggctcagtgtcctggttactgcagcggcagcaacagcaggtcctactatcgcctccctctagtctctgcttctctggatccctgaggagggcagaagccagtgattctggttcttggacaaggtgttgaggaacactagaaacagaggggactgtgacctgggggactttttctgcaggaagaaaacagcccaaagatgagagtgattcgcgtgggtacccgcaagagccagcttgctcgcatacagacggacagtgtggtggcaacattgaaagcctcgtaccctggcctgcagtttgaaatcattgctatgtccaccacaggggacaagattcttgatactgcactctctaagattggagagaaaagcctgtttaccaaggagcttgaacatgccctggagaagaatgaagtggacctggttgttcactccttgaaggacctgcccactgtgcttcctcctggcttcaccatcggagccatctgcaagcgggaaaaccctcatgatgctgttgtctttcacccaaaatttgttgggaagaccctagaaaccctgccagagaagagtgtggtgggaaccagctccctgcgaagagcagcccagctgcagagaaagttcccgcatctggagttcaggagtattcggggaaacctcaacacccggcttcggaagctggacgagcagcaggagttcagtgccatcatcctggcaacagctggcctgcagcgcatgggctggcacaaccgggtggggcagatcctgcaccctgaggaatgcatgtatgctgtgggccagggggccttgggcgtggaagtgcgagccaaggaccaggacatcttggatctggtgggtgtgctgcacgatcccgagactctgcttcgctgcatcgctgaaagggccttcctgaggcacctggaaggaggctgcagtgtgccagtagccgtgcatacagctatgaaggatgggcaactgtacctgactggaggagtctggagtctagacggctcagatagcatacaagagaccatgcaggctaccatccatgtccctgcccagcatgaagatggccctgaggatgacccacagttggtaggcatcactgctcgtaacattccacgagggccccagttggctgcccagaacttgggcatcagcctggccaacttgttgctgagcaaaggagccaaaaacatcctggatgttgcacggcagcttaacgatgcccattaactggtttgtggggcacagatgcctgggttgctgctgtccagtgcctacatcccgggcctcagtgccccattctcactgctatctggggagtgattaccccgggagactgaactgcagggttcaagccttccagggatttgcctcaccttggggccttgatgactgccttgcctcctcagtatgtgggggcttcatctctttagagaagtccaagcaacagcctttgaatgtaaccaatcctactaataaaccagttctgaaggtg

SEQ ID NO: 20020 - DNA, 1452 bp, Homo sapiens
  misc_feature (86)..(86): n is a, c, g, or t
caggagtcagactgtaggacgacctcgggtcccacgtgtccccggtactcgccggccggagcccccggcttcccggggccgggggnaccttagcggcacccacacacagcctactttccaagcggagccatgtctggtaacggcaatgcggctgcaacggcggaagaaaacagcccaaagatgagagtgattcgcgtgggtacccgcaagagccagcttgctcgcatacagacggacagtgtggtggcaacattgaaagcctcgtaccctggcctgcagtttgaaatcattgctatgtccaccacaggggacaagattcttgatactgcactctctaagattggagagaaaagcctgtttaccaaggagcttgaacatgccctggagaagaatgagacctgcccactgtgcttcctcctggcttcaccatcggagccatctgcaagcgggaaaaccctcatgatgctgttgtctttcacccaaaatttgttgggaagaccctagaaaccctgccagagaagagtgtggtgggaaccagctccctgcgaagagcagcccagctgcagagaaagttcccgcatctggagttcaggagtattcggggaaacctcaacacccggcttcggaagctggacgagcagcaggagttcagtgccatcatcctggcaacagctggcctgcagcgcatgggctggcacaaccgggtggggcagatcctgcaccctgaggaatgcatgtatgctgtgggccagggggccttgggcgtggaagtgcgagccaaggaccaggacatcttggatctggtgggtgtgctgcacgatcccgagactctgcttcgctgcatcgctgaaagggccttcctgaggcacctggaaggaggctgcagtgtgccagtagccgtgcatacagctatgaaggatgggcaactgtacctgactggaggagtctggagtctagacggctcagatagcatacaagagaccatgcaggctaccatccatgtccctgcccagcatgaagatggccctgaggatgacccacagttggtaggcatcactgctcgtaacattccacgagggccccagttggctgcccagaacttgggcatcagcctggccaacttgttgctgagcaaaggagccaaaaacatcctggatgttgcacggcagcttaacgatgcccattaactggtttgtggggcacagatgcctgggttgctgctgtccagtgcctacatcccgggcctcagtgccccattctcactgctatctggggagtgattaccccgggagactgaactgcagggttcaagccttccagggatttgcctcaccttggggccttgatgactgccttgcctcctcagtatgtgggggcttcatctctttagagaagtccaagcaacagcctttgaatgtaaccaatcctactaataaaccagttctgaaggtg

SEQ ID NO: 20021 - DNA, 1867 bp, Homo sapiens
tctttacccacctggctgtgcacagcactcccactgacaactgccttggtcaaggtgggcttcagggctcagtgtcctggttactgcagcggcagcaacagcaggtcctactatcgcctccctctagtctctgcttctctggatccctgaggagggcagaaggtactgaggaaggttaaagggaccagccttggagtatttccccactctgagactcagctggccacaggccaggttctgaagttcctttcttccaagccagtgattctggttcttggacaaggtgttgaggaacactagaaacagaggggactgtgacctgggggactttttctgcaggaagaaaacagcccaaagatgagagtgattcgcgtgggtacccgcaagagccagcttgctcgcatacagacggacagtgtggtggcaacattgaaagcctcgtaccctggcctgcagtttgaaatcattgctatgtccaccacaggggacaagattcttgatactgcactctctaagattggagagaaaagcctgtttaccaaggagcttgaacatgccctggagaagaatgaagtggacctggttgttcactccttgaaggacctgcccactgtgcttcctcctggcttcaccatcggagccatctgcaagcgggaaaaccctcatgatgctgttgtctttcacccaaaatttgttgggaagaccctagaaaccctgccagagaagagtgtggtgggaaccagctccctgcgaagagcagcccagctgcagagaaagttcccgcatctggagttcaggagtattcggggaaacctcaacacccggcttcggaagctggacgagcagcaggagttcagtgccatcatcctggcaacagctggcctgcagcgcatgggctggcacaaccgggtggggcagatcctgcaccctgaggaatgcatgtatgctgtgggccagggggccttgggcgtggaagtgcgagccaaggaccaggacatcttggatctggtgggtgtgctgcacgatcccgagactctgcttcgctgcatcgctgaaagggccttcctgaggcacctggaaggaggctgcagtgtgccagtagccgtgcatacagctatgaaggatgggcaactgtacctgactggaggagtctggagtctagacggctcagatagcatacaagagaccatgcaggctaccatccatgtccctgcccagcatgaagatggccctgaggatgacccacagttggtaggcatcactgctcgtaacattccacgagggccccagttggctgcccagaacttgggcatcagcctggccaacttgttgctgagcaaaggagccaaaaacatcctggatgttgcacggcagcttaacgatgcccattaactggtttgtggggcacagatgcctgggttgctgctgtccagtgcctacatcccgggcctcagtgccccattctcactgctatctggggagtgattaccccgggagactgaactgcagggttcaagccttccagggatttgcctcaccttggggccttgatgactgccttgcctcctcagtatgtgggggcttcatctctttagagaagtccaagcaacagcctttgaatgtaaccaatcctactaataaaccagttctgaaggtgttgtgtgtgcgcgtgtggagttggcgggaagataggaacaaacacaaagccctttcatccttacctcagaggctgggacttttgcccagagttctcctggtacgtcctttctgcttctgcctcaatagttttcatttcacacagaataaattgtctcccaggaacaccaagaaacagagccacaatcttaaattcctatggtttgcccct

SEQ ID NO: 20022 - DNA, 735 bp, Homo sapiens
tgctctgtatacagtgctaactcattcttgttgaatgttgtgtatggataggaccaggtctggggccacagttgccttttcagtgatgtcctcaggtctgtggtcacagggtggtgttaagagcccttgcagctcacaagaacttcttgttacaggaaggaggctgcagtgtgccagtagccgtgcatacagctatgaaggatgggcaactgtacctgactggaggagtctggagtctagacggctcagatagcatacaagagaccatgcaggctaccatccatgtccctgcccagcatgaagatggccctgaggatgacccacagttggtaggcatcactgctcgtaacattccacgagggccccagttggctgcccagaacttgggcatcagcctggccaacttgttgctgagcaaaggagccaaaaacatcctggatgttgcacggcagcttaacgatgcccattaactggtttgtggggcacagatgcctgggttgctgctgtccagtgcctacatcccgggcctcagtgccccattctcactgctatctggggagtgattaccccgggagactgaactgcagggttcaagccttccagggatttgcctcaccttggggccttgatgactgccttgcctcctcagtatgtgggggcttcatctctttagagaagtccaagcaacagcctttgaatgtaaccaatcctactaataaaccagttctgaaggtg

SEQ ID NO: 20023 - DNA, 1584 bp, Homo sapiens
tctttacccacctggctgtgcacagcactcccactgacaactgccttggtcaaggtgggcttcagggctcagtgtcctggttactgcagcggcagcaacagcaggtcctactatcgcctccctctagtctctgcttctctggatccctgaggagggcagaaggtactgaggaaggttaaagggaccagccttggagtatttccccactctgagactcagctggccacaggccaggttctgaagttcctttcttccaagccagtgattctggttcttggacaaggtgttgaggaacactagaaacagaggggactgtgacctgggggactttttctgcaggaagaaaacagcccaaagatgagagtgattcgcgtgggtacccgcaagagccagcttgctcgcatacagacggacagtgtggtggcaacattgaaagcctcgtaccctggcctgcagtttgaaatcattgctatgtccaccacaggggacaagattcttgatactgcactctctaagattggagagaaaagcctgtttaccaaggagcttgaacatgccctggagaagaatgaagtggacctggttgttcactccttgaaggacctgcccactgtgcttcctcctggcttcaccatcggagccatctgcaagcgggaaaaccctcatgatgctgttgtctttcacccaaaatttgttgggaagaccctagaaaccctgccagagaagagtgtggtgggaaccagctccctgcgaagagcagcccagctgcagagaaagttcccgcatctggagttcaggagtattcggggaaacctcaacacccggcttcggaagctggacgagcagcaggagttcagtgccatcatcctggcaacagctggcctgcagcgcatgggctggcacaaccgggtggggcagatcctgcaccctgaggaatgcatgtatgctgtgggccagggggccttgggcgtggaagtgcgagccaaggaccaggacatcttggatctggtgggtgtgctgcacgatcccgagactctgcttcgctgcatcgctgaaagggccttcctgaggcacctggaaggaggctgcagtgtgccagtagccgtgcatacagctatgaaggatgggcaactgtacctgactggaggagtctggagtctagacggctcagatagcatacaagagaccatgcaggctaccatccatgtccctgcccagcatgaagatggccctgaggatgacccacagttggtaggcatcactgctcgtaacattccacgagggccccagttggctgcccagaacttgggcatcagcctggccaacttgttgctgagcaaaggagccaaaaacatcctggatgttgcacggcagcttaacgatgcccattctcactgctatctggggagtgattaccccgggagactgaactgcagggttcaagccttccagggatttgcctcaccttggggccttgatgactgccttgcctcctcagtatgtgggggcttcatctctttagagaagtccaagcaacagcctttgaatgtaaccaatcctactaataaaccagttctgaaggtg

SEQ ID NO: 20024 - DNA, 1664 bp, Homo sapiens
  misc_feature (1419)..(1419): n is a, c, g, or t
  misc_feature (1424)..(1424): n is a, c, g, or t
  misc_feature (1435)..(1435): n is a, c, g, or t
  misc_feature (1450)..(1451): n is a, c, g, or t
  misc_feature (1453)..(1453): n is a, c, g, or t
  misc_feature (1462)..(1462): n is a, c, g, or t
  misc_feature (1465)..(1465): n is a, c, g, or t
  misc_feature (1479)..(1479): n is a, c, g, or t
  misc_feature (1523)..(1523): n is a, c, g, or t
  misc_feature (1550)..(1550): n is a, c, g, or t
  misc_feature (1558)..(1558): n is a, c, g, or t
  misc_feature (1560)..(1560): n is a, c, g, or t
  misc_feature (1572)..(1572): n is a, c, g, or t
  misc_feature (1651)..(1651): n is a, c, g, or t
tctttacccacctggctgtgcacagcactcccactgacaactgccttggtcaaggtgggcttcagggctcagtgtcctggttactgcagcggcagcaacagcaggtcctactatcgcctccctctagtctctgcttctctggatccctgaggagggcagaaggtactgaggaaggttaaagggaccagccttggagtatttccccactctgagactcagctggccacaggccaggttctgaagttcctttcttccaagccagtgattctggttcttggacaaggtgttgaggaacactagaaacagaggggactgtgacctgggggactttttctgcaggaagaaaacagcccaaagatgagagtgattcgcgtgggtacccgcaagagccagcttgctcgcatacagacggacagtgtggtggcaacattgaaagcctcgtaccctggcctgcagtttgaaatcattgctatgtccaccacaggggacaagattcttgatactgcactctctaagattggagagaaaagcctgtttaccaaggagcttgaacatgccctggagaagaatgaagtggacctggttgttcactccttgaaggacctgcccactgtgcttcctcctggcttcaccatcggagccatctgcaagcgggaaaaccctcatgatgctgttgtctttcacccaaaatttgttgggaagaccctagaaaccctgccagagaagagtgtggtgggaaccagctccctgcgaagagcagcccagctgcagagaaagttcccgcatctggagttcaggagtattcggggaaacctcaacacccggcttcggaagctggacgagcagcaggagttcagtgccatcatcctggcaacagctggcctgcagcgcatgggctggcacaaccgggtggggcagatcctgcaccctgaggaatgcatgtatgctgtgggccagggggccttgggcgtggaagtgcgagccaaggaccaggacatcttggatctggtgggtgtgctgcacgatcccgagactctgcttcgctgcatcgctgaaagggccttcctgaggcacctggaaggaggctgcagtgtgccagtagccgtgcatacagctatgaaggatgggcaactgtacctgactggaggagtctggagtctagacggctcagatagcatacaagagaccatgcaggctaccatccatgtccctgcccagcatgaagatggccctgaggatgacccacagttggtaggcatcactgctcgtaacattccacgagggccccagttggctgcccagaacttgggcatcagcctggccaacttgttgctgagcaaaggagccaaaaacatcctggatgttgcacggcagcttaacgatgcccattaactggtttgtggggtttttttttttttnttttnttttttgtttnatttcttttcatctnngngcttttttnttncccttttttcattnctttttgttggttgtgatttccccgggagactttacttttttgngtttaagcttttttagggttttgcttnacttttgntncttttttttttncttttctttcctttttttttttggttttttttcttttttgagattctttaatgtttttgcctttgtttttatccattcnttttttttttttt

SEQ ID NO: 20025 - DNA, 1501 bp, Homo sapiens
tctttacccacctggctgtgcacagcactcccactgacaactgccttggtcaaggtgggcttcagggctcagtgtcctggttactgcagcggcagcaacagcaggtcctactatcgcctccctctagtctctgcttctctggatccctgaggagggcagaaggtactgaggaaggttaaagggaccagccttggagtatttccccactctgagactcagctggccacaggccaggttctgaagttcctttcttccaagccagtgattctggttcttggacaaggtgttgaggaacactagaaacagaggggactgtgacctgggggactttttctgcaggaagaaaacagcccaaagatgagagtgattcgcgtgggtacccgcaagagccagcttgctcgcatacagacggacagtgtggtggcaacattgaaagcctcgtaccctggcctgcagtttgaaatcattgctatgtccaccacaggggacaagattcttgatactgcactctctaagattggagagaaaagcctgtttaccaaggagcttgaacatgccctggagaagaatgaagtggacctggttgttcactccttgaaggacctgcccactgtgcttcctcctggcttcaccatcggagccatctgcaagcgggaaaaccctcatgatgctgttgtctttcacccaaaatttgttgggaagaccctagaaaccctgccagagaagagtgtggtgggaaccagctccctgcgaagagcagcccagctgcagagaaagttcccgcatctggagttcaggagtattgatgtaaccctattgtaagtcaaggaccatctgtcttcacttcttgaccaccccacctctaacaccgtaggctgggaagattgtgaatcagaggccagactctaggctttcatggagaaaattttcaaaaaaaaaaaaaagaggccagactcactcttaggcctacccaggtaccaaagctggagggcgagggggtaataaacaagagtgcatataatctcttgttctcaccaaatcccacctccttccctcatacagcatgaagatggccctgaggatgacccacagttggtaggcatcactgctcgtaacattccacgagggccccagttggctgcccagaacttgggcatcagcctggccaacttgttgctgagcaaaggagccaaaaacatcctggatgttgcacggcagcttaacgatgcccattaactggtttgtggggcacagatgcctgggttgctgctgtccagtgcctacatcccgggcctcagtgccccattctcactgctatctggggagtgattaccccgggagactgaactgcagggttcaagccttccagggatttgcctcaccttggggccttgatgactgccttgcctcctcagtatgtgggggcttcatctctttagagaagtccaagcaacagcctttgaatgtaaccaatcctactaataaaccagttctgaaggtg

SEQ ID NO: 20026 - DNA, 817 bp, Homo sapiens
gtcagatgattttgtccaactataataggctaatcttaagtgttctgatcacatgtaaggtaggctaggtgtattaaatgcattttcagcttgttttcaacttaacaatgggtttatcaggatgtaaccctattgtaagtcaaggaccatctgtcttcacttcttgaccaccccacctctaacaccgtaggctgggaagattgtgaatcagaggccagactctaggctttcatggagaaaattttcaaaaaaaaaaaaaagaggccagactcactcttaggcctacccaggtaccaaagctggagggcgagggggtaataaacaagagtgcatataatctcttgttctcaccaaatcccacctccttccctcatacagcatgaagatggccctgaggatgacccacagttggtaggcatcactgctcgtaacattccacgagggccccagttggctgcccagaacttgggcatcagcctggccaacttgttgctgagcaaaggagccaaaaacatcctggatgttgcacggcagcttaacgatgcccattaactggtttgtggggcacagatgcctgggttgctgctgtccagtgcctacatcccgggcctcagtgccccattctcactgctatctggggagtgattaccccgggagactgaactgcagggttcaagccttccagggatttgcctcaccttggggccttgatgactgccttgcctcctcagtatgtgggggcttcatctctttagagaagtccaagcaacagcctttgaatgtaaccaatcctactaataaaccagttctgaaggtg

SEQ ID NO: 20027 - DNA, 310 bp, Homo sapiens
atcatgaatcgtagcacagtgctaggctcagtaaatgctgatcaataatgagcacctgattgattgactctctcctcagttgctatgtccaccacaggggacaagattcttgatactgcactctctaaggtaacaacatcttcctccccagttcttgtccccactcttctttccttccctgaagggattcactcaggctctttctgtccggcagattggagagaaaagcctgtttaccaaggagcttgaacatgccctggagaagaatgagtaagtaaaggatagggagagtgttgggtgccctccccag

SEQ ID NO: 20028 - DNA, 406 bp, Homo sapiens
tcatgaatcgtagcacagtgctaggctcagtaaatgctgatcaataatgagcacctgattgattgactctctcctcagttgctatgtccaccacaggggacaagattcttgatactgcactctctaaggtaacaacatcttcctccccagttcttgtccccactcttctttccttccctgaagggattcactcaggctctttctgtccggcagattggagagaaaagcctgtttaccaaggagcttgaacatgccctggagaagaatgagtaagtaaaggatagggagagtgttgggtgccctccccagtgctcttgctggggaccctaggtattgctaggggtctccttggctgggggacccgggggttttcatgatagggtcagagaggctgaaggcagctcat

SEQ ID NO: 20029 - DNA, 1480 bp, Homo sapiens
  misc_feature (86)..(86): n is a, c, g, or t
caggagtcagactgtaggacgacctcgggtcccacgtgtccccggtactcgccggccggagcccccggcttcccggggccgggggnaccttagcggcacccacacacagcctactttccaagcggagccatgtctggtaacggcaatgcggctgcaacggcggaagaaaacagcccaaagatgagagtgattcgcgtgggtacccgcaagagccagcttgctcgcatacagacggacagtgtggtggcaacattgaaagcctcgtaccctggcctgcagtttgaaatcattgctatgtccaccacaggggacaagattcttgatactgcactctctaagattggagagaaaagcctgtttaccaaggagcttgaacatgccctggagaagaatgaagtggacctggttgttcactccttgaaggacctgcccactgtgcttcctcctggcttcaccatcggagccatctgcaagcgggaaaaccctcatgatgctgttgtctttcacccaaaatttgttgggaagaccctagaaaccctgccagagaagagtgtggtgggaaccagctccctgcgaagagcagcccagctgcagagaaagttcccgcatctggagttcaggagtattcggggaaacctcaacacccggcttcggaagctggacgagcagcaggagttcagtgccatcatcctggcaacagctggcctgcagcgcatgggctggcacaaccgggtggggcagatcctgcaccctgaggaatgcatgtatgctgtgggccagggggccttgggcgtggaagtgcgagccaaggaccaggacatcttggatctggtgggtgtgctgcacgatcccgagactctgcttcgctgcatcgctgaaagggccttcctgaggcacctggaaggaggctgcagtgtgccagtagccgtgcatacagctatgaaggatgggcaactgtacctgactggaggagtctggagtctagacggctcagatagcatacaagagaccatgcaggctaccatccatgtccctgcccagcatgaagatggccctgaggatgacccacagttggtaggcatcactgctcgtaacattccacgagggccccagttggctgcccagaacttgggcatcagcctggccaacttgttgctgagcaaaggagccaaaaacatcctggatgttgcacggcagcttaacgatgcccattaactggtttgtggggcacagatgcctgggttgctgctgtccagtgcctacatcccgggcctcagtgccccattctcactgctatctggggagtgattaccccgggagactgaactgcagggttcaagccttccagggatttgcctcaccttggggccttgatgactgccttgcctcctcagtatgtgggggcttcatctctttagagaagtccaagcaacagcctttgaatgtaaccaatcctactaataaaccagttctgaaggtg

SEQ ID NO: 20030 - DNA, 959 bp, Homo sapiens
tctttacccacctggctgtgcacagcactcccactgacaactgccttggtcaaggtgggcttcagggctcagtgtcctggttactgcagcggcagcaacagcaggtcctactatcgcctccctctagtctctgcttctctggatccctgaggagggcagaaggaagaaaacagcccaaagatgagagtgattcgcgtgggtacccgcaagagccagcttgctcgcatacagacggacagtgtggtggcaacattgaaagcctcgtaccctggcctgcagtttgaaatcattgctatgtccaccacaggggacaagattcttgatactgcactctctaagattggagagaaaagcctgtttaccaaggagcttgaacatgccctggagaagaatgaagtggacctggttgttcactccttgaaggacctgcccactgtgcttcctcctggcttcaccatcggagccatctgcaagcgggaaaaccctcatgatgctgttgtctttcacccaaaatttgttgggaagaccctagaaaccctgccagagaagagtgtggtgggaaccagctccctgcgaagagcagcccagctgcagagaaagttcccgcatctggagttcaggagtattcggggaaacctcaacacccggcttcggaagctggacgagcagcaggagttcagtgccatcatcctggcaacagctggcctgcagcgcatgggctggcacaaccgggtggggcagatcctgcaccctgaggaatgcatgtatgctgtgggccaggtacacttgaccagggaagccacatggtgacatatgccttccctttgttctcaaccaagaagcttgtctcacaaccttctgcatctgcttccccagaatagcattctcagggaggggcagaccttgggatgctaccggtccaaaaggcgctggggagcaagtagatagaggtggtccca

SEQ ID NO: 20031 - DNA, 1745 bp, Homo sapiens
tctttacccacctggctgtgcacagcactcccactgacaactgccttggtcaaggtgggcttcagggctcagtgtcctggttactgcagcggcagcaacagcaggtcctactatcgcctccctctagtctctgcttctctggatccctgaggagggcagaaggtactgaggaaggttaaagggaccagccttggagtatttccccactctgagactcagctggccacaggccaggttctgaagttcctttcttccaagccagtgattctggttcttggacaaggtgttgaggaacactagaaacagaggggactgtgacctgggggactttttctgcaggaagaaaacagcccaaagatgagagtgattcgcgtgggtacccgcaagagccagcttgctcgcatacagacggacagtgtggtggcaacattgaaagcctcgtaccctggcctgcagtttgaaatcattgctatgtccaccacaggggacaagattcttgatactgcactctctaagattggagagaaaagcctgtttaccaaggagcttgaacatgccctggagaagaatgaagtggacctggttgttcactccttgaaggacctgcccactgtgcttcctcctggcttcaccatcggagccatctgcaagcgggaaaaccctcatgatgctgttgtctttcacccaaaatttgttgggaagaccctagaaaccctgccagagaagagtgtggtgggaaccagctccctgcgaagagcagcccagctgcagagaaagttcccgcatctggagttcaggagtattcggggaaacctcaacacccggcttcggaagctggacgagcagcaggagttcagtgccatcatcctggcaacagctggcctgcagcgcatgggctggcacaaccgggtggggcagatcctgcaccctgaggaatgcatgtatgctgtgggccagggggccttgggcgtggaagtgcgagccaaggaccaggacatcttggatctggtgggtgtgctgcacgatcccgagactctgcttcgctgcatcgctgaaagggccttcctgaggcacctggaaggaggctgcagtgtgccagtagccgtgcatacagctatgaaggatgggcaactgtacctgactggaggagtctggagtctagacggctcagatagcatacaagagaccatgcaggctaccatccatgtccctgcccaggtaccaaagctggagggcgagggggtaataaacaagagtgcatataatctcttgttctcaccaaatcccacctccttccctcatacagcatgaagatggccctgaggatgacccacagttggtaggcatcactgctcgtaacattccacgagggccccagttggctgcccagaacttgggcatcagcctggccaacttgttgctgagcaaaggagccaaaaacatcctggatgttgcacggcagcttaacgatgcccattaactggtttgtggggcacagatgcctgggttgctgctgtccagtgcctacatcccgggcctcagtgccccattctcactgctatctggggagtgattaccccgggagactgaactgcagggttcaagccttccagggatttgcctcaccttggggccttgatgactgccttgcctcctcagtatgtgggggcttcatctctttagagaagtccaagcaacagcctttgaatgtaaccaatcctactaataaaccagttctgaaggtg

SEQ ID NO: 20032 - DNA, 652 bp, Homo sapiens
agaccctacaacccacaagttactgcaaagctgggcttctaccagaagtgagtgatttgaaattgaaaacagatttcggatctcacctgagtagctcgagtgtaagggagggactgggagagccacagagaacatttgtcaatccagaaccaaccattcatggtgttgcttgactggagggcagggaaggaaaggactagaagcaaggcgaaacaggatctttctgtagatacacacatataagtcttggatttgcattttagggtgaattgtaattagcttgagatgaccaggggcccaccaatcaagcaactctgggaaaaacacttgtctacatcttaagtttctttgtctataaaatgtcaagatttgaactaacactacatgattctctcgggaactcaccagttctaaaatttccactccttcttttcacagggcagtgtaactttaactccctgtttcaactttgggtgtaaaatacaggctcacaagcacttttgctttgcagcggaagctaggaagaccctgctgtggaattttgcagaggggctgagcagtggtgggaaggaccagcggcccatgtaccatgttgggcccctgcattccaaggtgtctgcctagaaataaatgatagtttatttaacatact

SEQ ID NO: 20033 - DNA, 751 bp, Homo sapiens
tctctactaaaaatacaaaaaaaattagccgggtgtggtggcacatgcctgtagtcccagctactcgggaggctgaggcaggagaatcgcttgaacccgggaggcggaggttgcagtgagccaagatcatgccactgcactccattctggtgacagagcgagattccatctcaaaataaataaataaataaataaaaaataaatgtcatctagcttgttttgatggttcaagtaaagataagtcttaacatttgtgatgctaatctaaagctttgttaaactggaaatgagactttgctaagcagcatatgtgtaacaggtgatctgatccatgtagtcattgtgcatgagtgaattaatggtttaaaatttgacttgtactgcttgataaaagaatgtttctattaggttcttggcagggtctcagaatgtgattttattcttagtttgtgtgctctcatctaatattgcttctttgggtagggacagaagtaagtttttgccctcagtcttttgttttcagtaattaagaacaaataatacatattgataatctgttaatattgcataatatatttgaaatgaaagtagcctttaggtgttattgtagaacatgtcaatccagttttggctgggtgtggtggcacgtgcctgtagtcccagctactcaggaggctgagacaagaggatgtcttaaggccagaaatttgagaccagcttgggcaatatagcaagacctctgtctcaattt

SEQ ID NO: 20034 - DNA, 189 bp, Homo sapiens
caggagtccaagcaagaggattgcagattgtagcctggaagaggccagtagctgtggtgacaatggacaccaggtggatatgttggagagacacttagaagggtctcactctgtcacccagactggagtacactggtgtgatctcggctcactgcaacctccgcctcccaggctcaagtgattctcctg

SEQ ID NO: 20035 - DNA, 734 bp, Homo sapiens
gtacaataatccccctgtgtatctatcactcactcacaacaatcatcaaattatagctctgctggtttttaccagttattgtgaaacaaatatcaaaatgtcattttatcatatttcagtatgtatctctaaaaggtaagaattatttctaaaaatcataaatacctcatcatatcagacattaacagtaattacataatatccaaaatctgatcagtgttcaaaatttcctcaagtgttttatatttagtttgtttgaatcaaaattcatgcaaggttcacatcgtatttgcatgatttggataagtctcttaaccttatagatcctcctctatttttttttttttgcttgctatatatttatatctctatatatattgatatagacatatgtagtgacactgagtcatctgtttcctgcttccccacactctgcctctcctgacatctgggtctctgggttatgccatatatggtgatagtggctgcagccactttacctgtgtgacttacccacagcaatgggatggtaacagcaaagctaaccaaagtgctctgtgcccctttgggttgcatgtggggagactggccacccaatgcctctccagtggggtaggggttgtcttttggtgcatctgtttttcctgtgattattggtgagggcagcaaagattagcaggtggttgtaaactaccttgagtaggttgtaataaatagtctggcctcagactgta

SEQ ID NO: 20036 - DNA, 1099 bp, Homo sapiens
ttttttttccctctcgctcctcggctgcctctggaatttttttttttcacttgccctctccagctcccactagtgattggagactgagagccaagtacttagcggagggattacacttctcaacgcacttggagcggccccagcgccgccgcctgtgtgcggagtgcggagccgacttggggagcggcggggtgcgggccggaggcagcccgggtacaggggtgcgcttcccaagccccgtccgctgctcagagcatccccaagatttccctcatgggtcctgtcctggttgtttaagaaggtttccagaaaacctcctggtttgaagaacaaagattcgtggaattattgtaccttgagagctggaaagggctcgcagagatgatataatgtcgtggatttcaacttttcggggccatagacacttttcagaaattgataaaacgttgacacaccttgtaaaaaatgaacacattaaaattaagcctgcagtttgaggtaatggagaagcactggagatttgtaagccacggagtcaaatggtggactgggattttcaggagatcatttagagtagagacggagtttgatcatgttggccaggctggtctcaaactactgacctcaagtgatccactcaccttggcctcccaaagtgctggaattacatggagcaagatcttaccaaatcctttagtcatggtctatttcgttgcactcatatggttgttactgcgaaggtgaagaactaatgactgcagcaggaaaaagaattggatgtgtcatgaattatggccctgcttatacttctacttcaaccgtaatcatttgtttaaacaaaaagttctgcatttgaattgtcacaattgtgtgtgtgttataaacatctcatatttcatccaggctcagccaacacttgcctttattaatgctcataatcaagaaataaaatctcatactaaccaaaaattatccttcataagagaatataaacagaagtctggttcataaacttactaattaacacctctattctcatgtatcaactaacatttttgtttcgtcttaaaataaataaaactttatgacatgctaataa

SEQ ID NO: 20037 - DNA, 1001 bp, Homo sapiens
ttttttttccctctcgctcctcggctgcctctggaatttttttttttcacttgccctctccagctcccactagtgattggagactgagagccaagtacttagcggagggattacacttctcaacgcacttggagcggccccagcgccgccgcctgtgtgcggagtgcggagccgacttggggagcggcggggtgcgggccggaggcagcccgggtacaggggtgcgcttcccaagccccgtccgctgctcagagcatccccaagatttccctcatgggtcctgtcctggttgtttaagaaggtttccagaaaacctcctggtttgaagaacaaagattcgtggaattattgtaccttgagagctggaaagggctcgcagagatgatataatgtcgtggatttcaacttttcggggccatagacacttttcagaaattgataaaacgttgacacaccttgtaaaaaatgaacacattaaaattaagcctgcagtttgaggtaatggagaagcactggagatttgtaagccacggagtcaaatggtggactgggattttcaggagatcatttagagagcaagatcttaccaaatcctttagtcatggtctatttcgttgcactcatatggttgttactgcgaaggtgaagaactaatgactgcagcaggaaaaagaattggatgtgtcatgaattatggccctgcttatacttctacttcaaccgtaatcatttgtttaaacaaaaagttctgcatttgaattgtcacaattgtgtgtgtgttataaacatctcatatttcatccaggctcagccaacacttgcctttattaatgctcataatcaagaaataaaatctcatactaaccaaaaattatccttcataagagaatataaacagaagtctggttcataaacttactaattaacacctctattctcatgtatcaactaacatttttgtttcgtcttaaaataaataaaactttatgacatgctaataa

SEQ ID NO: 20038 - DNA, 1141 bp, Homo sapiens
ttttttttccctctcgctcctcggctgcctctggaatttttttttttcacttgccctctccagctcccactagtgattggagactgagagccaagtacttagcggagggattacacttctcaacgcacttggagcggccccagcgccgccgcctgtgtgcggagtgcggagccgacttggggagcggcggggtgcgggccggaggcagcccgggtacaggggtgcgcttcccaagccccgtccgctgctcagagcatccccaagatttccctcatgggtcctgtcctggttgtttaagaaggtttccagaaaacctcctggtttgaagaacaaagattcgtggaattattgtaccttgagagctggaaagggctcgcagagatgatataatgtcgtggatttcaacttttcggggccatagacacttttcagaaattgataaaacgttgacacaccttgtaaaaaatgaacacattaaaattaagcctgcagtttgaggtaatggagaagcactggagatttgtaagccacggagtcaaatggtggactgggattttcaggagatcatttagagtagagacggagtttgatcatgttggccaggctggtctcaaactactgacctcaagtgatccactcaccttggcctcccaaagtgctggaattacatggagcaagatcttaccaaatcctttagtcatggtctatttcgttgcactcatatggttgttactgcgaaggtgaagaactaatgactgcagcaggaaaaagaattggatgtgtcatgaattatggccctgcttatacttctacttcaaccgtaatcatttgtttaaacaaaaagttctgcatttgaattgtcacaattgtgtgtgtgttataaacatctcatatttcatccaggctcagccaacacttgcctttattaatgctcataatcaagaaataaaatctcatactaaccaaaaattatccttcataagagaatataaacagaagtctggttcataaacttactaattaacacctctattctcatgtatcaactaacatttttgtttcgtcttaaaataaataaaactttatgacatgctaataaaaatatggcctcgttggcctcagcggtggagctctgcggccg

SEQ ID NO: 20039 - DNA, 866 bp, Homo sapiens
ttttttttccctctcgctcctcggctgcctctggaatttttttttttcacttgccctctccagctcccactagtgattggagactgagagccaagtacttagcggagggattacacttctcaacgcacttggagcggccccagcgccgccgcctgtgtgcggagtgcggagccgacttggggagcggcggggtgcgggccggaggcagcccgggtacaggggtgcgcttcccaagccccgtccgctgctcagagcatccccaagatttccctcatgggtcctgtcctggttgtttaagaaggtttccagaaaacctcctggtttgaagaacaaagattcgtggaattattgtaccttgagagctggaaagggctcgcagagatgatataatgtcgtggatttcaacttttcggggccatagacacttttcagaaattgataaaacgttgacacaccttgtaaaaaatgaacacattaaaattaagcctgcagtttgaggtaatggagaagcactggagatttgtaagccacggagtcaaatggtggactgggattttcaggagatcatttagagagcaagatcttaccaaatcctttagtcatggtctatttcgttgcactcatatggttgttactgcgaaggtgaagaactaatgactgcagcaggaaaaagaattggatgtgtcatgaattatggccctgcttatacttctacttcaaccgtaatcatttgtttaaacaaaaagttctgcatttgaattgtcacaattgtgtgtgtgttataaacatctcatatttcatccaggctcagccaacacttgcctttattaatgctcataatcaagaaataaaatctcatactaacc

SEQ ID NO: 20040 - DNA, 481 bp, Homo sapiens
cgctatctcttctggcactgtgggctttgccaggaatgctgtctccacctctccctccttagccatccttcaaggccagcttcaatgccaccacctccatggagccttctcggggtcctgcattgcctaagattgccccctgccaccagcacagtcagcaccactcacgttatctgtctcatcatccatgtgccgtgtgtccatttaacagaactatatggaggacctgctctgtgccagacactgctaggctggctaccgcaatgaccaagaagtacagggcccctgccctcaggccttgtgtcttgtcccccacccaccccaaccaggagcagttagcccccagaacttgaggcaggagactctgtctctcctcagtgtctggcccatagttggtgctcaacaatgaatggatggcatgtgctctattggttgaatgaatgagtcagtggccaaataaatagaatgaaatgtgaaaaag

SEQ ID NO: 20041 - DNA, 280 bp, Homo sapiens
gaaacattttctaatgtatttaaaaatctccccagtgaagaatttcagtaggttttgaaactatttatttaaaatgtaaaattgaaacaccttgggattactttgaactggaacaactgattgacatcaggacagacaatttttgatacaattttctaggcaaattgtatcaaaaaattgtgcatggttagtggggcagatttaagatattagtactgtgcttccacctgtcaagccaattatgtgtttctttgtatatctttggggattaaaaaaatta

SEQ ID NO: 20042 - DNA, 507 bp, Homo sapiens
cgcggcgggggaagaaccggggggcggagagggggcgcgctgacgtctcgccggcttaacctgttgctctcgagactgcgtcggagcccgcaggcagggccgcgggaagccggccgggccgccgccgccatgctcggccgtgtgcgcgccgccgccagccacgggcttgcagccggacgcccggactcggagacacgatccgctgaacgcccgcaataagaaagaaaacccaccccacgctgctctccacctcaacgaggtccggaatgggaggcggggtgcggttctcgtccaagttctaccccatttgctttgtggctgcatccgaaacggacgtgccccgggaaggcgtccacgctccaagacaaggttgcctcagtgcagtttctacagcccgagtttaaactagtcctttgcattctacccagccctctgcaatgcggatgtattttaattcttaaattctttatggaacagcaaaaacacaaaaagaagtctcaagcgcgt

SEQ ID NO: 20043 - DNA, 385 bp, Homo sapiens
aaaatcagagctctttatttcagatggagttatctcgttggcttactatttaaaataagaatttgtaccactatacgttggctaactctgatgttaaaggaaacttgctgaaaactgatttttgttttggcaaaatatagaattactacttttcctggtgggcctaagccagattcagtgccaagagggaggtagggagaagtagggttttttttttttttgccagcagatgccatcaatcttgaagtattctggacaagtgaggagagcataaattaagactattgacgtcaaaatccagataaacttgaatccaaatcctagtctcatcattttatcaactatgtgcccttgagcgaattactgaatctctctgagtttctca

SEQ ID NO: 20044 - DNA, 136 bp, Homo sapiens
gagagagagagaatcttccccaccacctctttgacctggatcattgcagggaggggcagcaaaggcaaggggagaagagtaaaatgatggaggagggaaaggtgattgcatttgctccccctccaaaccagcttct

SEQ ID NO: 20045 - DNA, 491 bp, Homo sapiens
aagtttgtcactgacttgtgttcctgaaccatgaagcatgaatatgtgggctgagaaatagtttctcttgataaataaacaagtaacaaattttaaaaagagaggaagatgaagctgggctagttgggggaaggagagctggtaagggatctggtcttgatcctaacagcaatggattaacctatgttcaaatcccttaccatctgtgtggcctcaagaaagttatttagcctctctaaaccttagttttctcatctgcataatgagaacaatgagaggacctactttacaagattaaatgttaatagatgtcaactactaagaacactaatcaatgctataattgttgttttgttgtgctgacactaatcaatgctacaattgttgttttgtcgtgcttcagacctgaggttctaaagaactctatttgtacctcatagcactatgggcaaaataattgctcaataaatgcttaagatcagggtagattt

SEQ ID NO: 20046 - DNA, 278 bp, Homo sapiens
tgaaaattcaccaaaaaaagagaggaagagctgtaagggtgagcagtctagggtaggatgatggtgacccttaggggtgggtcaggaggtgaggccaccaaggtcatggccaagagaatgtgaactctcctcagtgagttaccttaaaagttaatagtcaaaactgggcatggtggcttacgcctgcagtctcagctactcagaagtctgaggcaggaggatcacttgagccccgtagtttgaagtccaggctgggcagcatagtgagaacctggctc

SEQ ID NO: 20047 - DNA, 545 bp, Homo sapiens
aatgtactaggctgggaggcagagctgtggctgggcccagatgcacagcttctgcactggtcctgaaatggcctcccaggggagcagccatccagttactgtggaacaatctctgccacctctgtacccctcccatccggaactcgccatgccacagtgcctgtcacgaggaagctgggcttcctattccctctcagaaaagccagttgtggcaaaccagtccccacagcttcccttcatggtgacactagtcaggacacatagtttctgatacattcagggttcctccctagcaccacacagaaacagacccagtaatcttcagtttttaaagaattaatctgagagaatgcctgtcccaactctatgtgctgataaatatatgctctgtcttgttccaactcatggataaatatagttttgactggtaaactgaaacaggacataagacagagccctgcggaactccactagagactttctcccaatgttaacatccgggtattagagtctttcagaacaggcattctgtcaggagctaatac

SEQ ID NO: 20048 - DNA, 317 bp, Homo sapiens
tatgtttgctactagaactgggttggcatctaacttcctttgtaaaagcactacaaattaactattgtaagctgtgaaatggagtttgtagtaacagacctggcaagtaaacacctagtgtttgtctcttaaaaaatgatgtattacagctccaccaggtggctgccaacagtgtgaatgagacaggctggcatcgaccaggaggaggggaaagctgctcttgattttctttgtgcatatcggagtctacaacataataatttagtgaaggacaaagaagggagcccactgcaggtttttctaggaagtctggcaaa

SEQ ID NO: 20049 - DNA, 425 bp, Homo sapiens
cgaaaccctctctctactaaaaatacaaaaaattagccaggtgtggtggtacacacctgcagtcccaggtacttgggaggctgaggctgaggcacgagaattgcttgaacccaggaggccaaggtttgcagtgagccgagatggcaccactaaactccagcctgggtgacagagcaaaactctctaaaagaagaaggaaaaaaaaaaaaagatggtatcttaaaattttttaaaaatattttttctgccaatctcttttttttgattgcagtatttaatctatttacatttaatgcagttattataaagtaggaattatgtctgcattttgctatttgtcttctatatgtcatgttttttttgtttatttccccattactactttcctttgtgttaaatatataatataccattttaattacctt

SEQ ID NO: 20050 - DNA, 291 bp, Homo sapiens
gtcgatccggtgcgggccacacaggagatccagaccccggctaacctgggccctggctggggctgcactggtgggaccctggtctctgaaggcagcctgggagctaatgggcaactgaagctcccagtcaccaccatcaggcttccacaccaactggcgaccagggcgcaacgaaccctgcgtaccatgggggctcagtgcctctcacaggggcggctagtgaagatggagtatttacaaatgctattaaaacaacctctcaacttcaattggagtccggtaatgtgataa

SEQ ID NO: 20051 - DNA, 498 bp, Homo sapiens
tcactattcaaagctctacctctgagaactaggtataaatgaagttagctcttgagctctgaaaatcaactaacaaacacagcccactcattggagacattcattcaacactatttacttattttttaaaagataaattgtattgtgtatatttgaggtttataacatatgttatgggatttatatataaatagtaaaatgtttagtgaagtaaattaacatgtctgtcatctcacatagttactttcttgtgtgtatgtcaaaggcagctaaaatctgcttatttaacaaaaatacctagtacattacaattttgttagccatagtcgtcatgttatacattagatctctagacttgttcatcctacatatgtgcaactttctatcctttgacctacatctccccattccctgccacctcccatttactcctaatttaggctaatttaattctggttttccagcctataacatatcaaaaaaatttttttgagtcag

SEQ ID NO: 20052 - DNA, 741 bp, Homo sapiens
aagagaacacagaattcaattccttttcagaaaattttgctgcttcaagctgtgcttgggcttcttatccttactgtaattgtgaggggtgaaaatagtcctttgaactttttatgaggaaagtggtggtgttctgtaaaggacatttatttaaatatgattgttattggcttccataatcccccatgtcatctgacctcggattagacccagtctgccagtctgatgagagagccagttgtaagttacctgttgaatttcctgtggatcccctctgttgttctttattagctccataatccagctggatgttactggttacagtttggctaatgatcatgaccaatttttgaagaaaggattccttattggcgggcaaatttttgttgagtggtacagccagaaacattttcacattattctttcctactttaggagctaaacttgcgggctgtttatgtatttgtttttagggtaatcaaattttttctttataacatttgtcacagtgacatttcttatgcacacataaagagtaaccagatattacactgtatgttttggaggaaactgttctggaagacctaggcctaaaactcacttaataatgaagttggggaaatagattacagttcttattaagaaaaaaaatttcatgttttaaagcccccctttatttgccaaaatattccaaaatagtatatctccttgacatattatccagaacccaatatgccttac

SEQ ID NO: 20053 - DNA, 235 bp, Homo sapiens
taggaaaaagagaagctatattcaatcattgaggcatttttcatggtgaagggctggaagtcaagtttgttctaacctcaggatctttgcacttacagatccctctccagatcacctttttccccagaactttgtaaaatttgccccttcacatccatcctgtttcttcttgaaggtcatctcatcagagaggggatcccagaccaccctaaaatcaccaccacacatcactcat

SEQ ID NO: 20054 - DNA, 490 bp, Homo sapiens
cgggtggccaagaagacacccaccaagcgcagcactctcatcatctctggtgtttccaaggtgcccattgctcaggacgagttggcgctatccctgggctatgcggcatccctggaagcctcagtgcaggatgatgcagggaccagcggaggcccctcttcacctccctcagacccaccagccatgtctccaggaccgctagatgccctctctagtcccacaagtgtccaggaagcagacgagacaacccgttcggatatttctgagaggccatctgtggatgatattgagtcggaaacggggtccactggtgccctggagacccgcagcctcaaggatcacaaagtgagtttcctgcgcagcggcactaagctcatcttccccggaggcctaggcagaaggaagctggcctgagccaatcacacgatgatgatgtccattgctgtgtgatggcttggaatttaatttattaaagtcaaattggagttta

SEQ ID NO: 20055 - DNA, 433 bp, Homo sapiens
acccctatgcaaaatgtacagtttataattccaaatacatacatatatatatacacacacacctgaatagccttaagtcctttccatatataaattatttttattcatttcatcttttcttttttaaattttgtttttgtttttgtttttaatataaatatatatataaatacagagacagggtctccccatatttcccgggctggtctggaactcctgggctcaaggaacccacctgccttggccttccaaagtgctgtgattacagagatgagccgctgtgcctggccttattccatcttttctttaaagttttcctgttcacctgagcacaaagtgacttctctcttctcatgagctgtatgacttttggctttaaagagctctttctgtaacttaacattttttcctggttgtgtggttttaatcctca

SEQ ID NO: 20056 - DNA, 730 bp, Homo sapiens
agacctggcgaaatacctggcggcgttttgtcgtgtaaccgccaactttatcggtagcacgaaggcacaaagatctgggttgaagaagaggcgaaagctaattttaaaaaagcacctccctgcccccgggtattaaactgtaccatttgcctttcacacactgcaacttcaaccgttgattcactgttttgagtattgagctctttatgtgagaaaccaaaggtgggtgtcttccttccaccacctcttttgttcccgtcttgtgcgctgtactgaaatcctgtatttgctttgactttaattccctggttttctagtgccgcgggtgcgcatgagtgcattttaaatcaaacagcttagaatttatacgacaaatgtcaattacaggtcgacagttttctctttcacagtgcccgtgtctcgctagtaattagccaccgttgctttgagaattcgaatcaatgattactgatccagtaattcccttaagtaaacatttctttcggcaataaagacaatttccagttactctcatggttctttatcctggattcctagctgattagccttgtgtttaatgctggcatagaagccatgttgactcataattaaaaatcactgttgtgtaacattttgcccacctgctttttcctcttctctgttcagcccttccctgtgtagaggaagttgtacttctttgaaaggaaaagtaaacatttttattactgtt

SEQ ID NO: 20057 - DNA, 836 bp, Homo sapiens
  misc_feature (34)..(35): n is a, c, g, or t
atatggttccggggggcgcagaatcgcacaattnncaacagctcttcgtgatgtttgcattcaactcacagtgctgaacctttctttgatagtgcagctttgaaacactctttttgtagaaactgcaagtggatatttggtcctctctgaggatttcgttggaaacgggataaaccgcacagaactaaaacagaagcattctcagaaccctcttcgtgatgtttgcattcaactcacagtgctgaacctttctttgatagtgcagctttgaaacactcttcttgtagaaactgcattttacttttccagttatttttataagttatttatttatagagacagagtcttgctatgttgcccaagctggtcttaaaccccaggcctcaaatgatccttccacctcctagtgaccttttaaaaacaattcttccatataaacttacaatattctcaggcccagtgcagtggttcacacctatcatcctagcgttatgggggggccaaggcagacagatcacttgagctcaggagttcgagatcagcctggacaacatagtgaaaccctgtctgtatcaaaaatttaagaaattatctgggtgtggtggcaggtgcctgtagtcccagctatctgggggctgaggcaggagaatcatttgagcctgggaggcagaggttgcagtgagctgagatcactccactgcactccagcctaggtgacaaagtgagaccgtgtctcaaaaacaaaacaaaacaaaaaacagtaaaaaataaataaataaaaatattctctcagctgggcatggcagctcatgcctgtaatcccaatgctttgagag

SEQ ID NO: 20058 - DNA, 332 bp, Homo sapiens
caaggttttgctttatggttaatttagctggtgatgagagcaagctgaaacttgtgagaagagacataaactgcaacaaaccgaggtcatggttcatgttgtggagaatccagagtgtcccactggtccagacatcattccaattgtagctggtgtggttgctggaattgttcttattggccttgcattactgctgatatggaagcttttaatgataattcatgacagaagggagtttgctaaatttgaaaaggagaagaaaatgttccaatatttccattggagatgaggttcatttgacattagcataacttcaaataagtgtccaaaaa

SEQ ID NO: 20059 - DNA, 270 bp, Homo sapiens
gagctgtccttgctcaagatgggtgaaggggtgctttaccagatagcatttgtttttccattgacctacaactcctgcttttaaggctcctgcgaaaatctctcaggctgattctctctgttgtttcagtgtgtgattcttgagaaaagaatggtatactttacctagttagccattttcagggctcttgatgcttgcattaaaaaaaaaatctttttctttatcttctactctaactcttcctcccctcaccgcccaccccccgaccaa

SEQ ID NO: 20060 - DNA, 432 bp, Homo sapiens
tctaaggctgctcaggtgaccagggaaaggcactgctcacacagggcttgaacaaagaatgcatccagcaaagctctgtgtgggggcctcctgtggccccagctccaatgcactgagcttcccacggcgccaagccgcctccacagagccaggggaactatgcacatgacacactgtacagggacagaggctctagggagtgccaggaacagtttcagtcgtagccctggaccctttgggatgttatgatggcccctcctgctgtgacagctgagggagattcacagcatattaaggcccatggctgtgtgctggcagcagggagatggctgagcatcatctcaggagccatttctctcgcctccctgcccctaacgaccaccttttcttttctttttttttggggggactagaatcttgctgtgttgccca

SEQ ID NO: 20061 - DNA, 548 bp, Homo sapiens
tagataggtcttctggccatggttgttgagatgtttgttattgaaagatcaaaggatagctgttgcttaatggtaaaacaaatttccaacaggctcagttttagttcccttattcctaaagtatagataacacaaaagcaagaattttgtttttagaaaattagctactccgtaggctgaggcagaagagccgcttgaacctgggaggcagagactgcagtgatgccccatatcatatatggaatgcatccccatttacacctaaaatttgaaacagaatctgagaaacaaaatatttctaatctccttcctgatcctcttcactgataccaggtttgcagaaaatataaggccagctcttatcttttgagagaagactcttatttctttgtctaagattgtctatacccctttttatctgcctcttttaaaaatccttgtccagccactatatttttaatttaatcaacactcagtttttgcttttcctgtttttttttttctgttttttgtttgtttgtttgtttgtttgtttgagactctatctc

SEQ ID NO: 20062 - DNA, 372 bp, Homo sapiens
atatgaaattccagatcatgggagggagagtttgaagaaggaagaaccaccaatagaaagcggtccccaaagaggtatcggggatggcacccagacaggagcacatgtaccactgcccagaatgtgcatttcactagacaagtgaccacaaaagttttcactgtgacttgaaaatgcccactcctcccagaagttcaaggaactggacccccggacatgagcccaaggttcgccggcttcaaagatcctggccacacaccagtgagcctggcagaggcaggcttctggtcctctttcccagtgatttcctgctggcctgacaccaaactccactttccctgaatgactctaataaaagtttatcaaaactcc

SEQ ID NO: 20063 - DNA, 1236 bp, Homo sapiens
aagatgaatatttctagtgatttataagttacttgaggaaatcatgctgtttattcttttcctttttaggtattctttgtgaatttgctatttgtgtgtgaatatatctgttgcgataatgaataaccatatgaaatggataattgtatgaaaattcatttgtaattcaatagattgccagggattttaggttggttatgaaggtttgttttttttttttttttcttttggagagtggggagattggcatacagtttcaaattgtttatgtggaagttggaagtgtgactaagctcgaagaaaggaagagagggacaaagaaagggaggaggtacccctaagtgggaacctaccaggacattcaaagcaagagcagtaagttctgaatgttctgggacaacctgggtgatatgcatggatatgggctgtggaggctgagcattttaatgataacttagggaaacgaggcatggccatggtgtaaaactctcaaatcccaagccctaatccaaccttaaaatccgagtcttctaaagggctgttttaaccatgaaaggaccataagaaaggcaattcacagaaaatgaagccatgtggccaagaaatataagaaaaacagtaaaaagcccttaatctcaatagcaatagagtggatgcaaatgaatataatgagttgccatgtcgttcttactggattggaacaacgaaattagaatgtctaaataacatgtatcatccaggatgttggggaaatgggagctcttgtaccccctgaaggcagggcatttaaattggtgcaaccgcttggatgctgctatgtagtatctggtgcactgagggatgaacatggcctggacaccaggaacccgcacttctaaggtcaataccctaattatatttcttccgtggttcacaagaaggtatgtaaggaggctcaatggactgaggcgatgtgtacactgaggggcacaggaaatccctctaagagtctgtcaagcagggactgcatacgtgtcatcggtcatctaacggggcgtcaagtcagggacgtctcaacattcctaaggatggactgaaacgcatggaaacaagcgacagtgaaacagggcagctccccaagaacgacaaacacgacataccagcaggcaacacgcggcaacaaataagagacagcgagaacgaaaaaagagacagcgacagggcgagcacaaagaaacagagaagacagacggagaa

SEQ ID NO: 20064 - DNA, 434 bp, Homo sapiens
catcctttggggaggagatttgagatttctctaggcattctgatcaaacctagataggatacccaaagatattgatggtaggcatttcccaaataaatagctcaatccgattcctctacagtggagtccccacttcccaagccctgagtcccactgacatactcaaagctcccagacagcttttttagttccattctaaaggcttaccagacaaaggaagaaaacatctgatatgaaagggagcaaaaccaactaaaaagcaacttagaggaaacagtcatgcaagaggaattaatttgaaatagttctttacactgggcgtggtggctcacacctgtaatcccagctctcagggaggtaagaggcgggaggatagcttgagcccaggagtttgagacctgcctggccaatatagcgagaccccattctccaca

SEQ ID NO: 20065 - DNA, 306 bp, Homo sapiens
tttttgtaggaattggtggtgtcttggaatatctgcttcaggacgataatgaaactaatgatttagggcagtagaagaagccgtgggaggaactttcacatttggcgaggcaagtacaattttgttagggctttttgaaactgcatttgaaaacttgcttagcggttttgtgattcatggtatatatcaaattttattgaaaagctgtcagtgaacaggatgagaagttctcttttaaatacagtcagaggcattataaaaactagcaattctaaacttactgcaaaataaaaattacccgaaaga

SEQ ID NO: 20066 - DNA, 369 bp, Homo sapiens
aaaaggaaaaaaagacaatttagttgagcagggttgacaaatctctcaaagcaggtcatggtgcaaattcttgtgtgcctgacacagaaaaataagtagcttactattgaccaatggtaatttcattcttaaattaagacataggcaatgaaacgtagacaataagcatattttctccctttgagttctacatgcatcaaatgaatctttgagggacattccaccaggccaaagtctagactaaacaggtgtaaaaatgagaactattttaatttttaaaaattaagaataggctgcatgaagttacagcagagaaaaggcaaggcaaagaattatatcctaaagtatgaatcacatgtggcttgagtt

SEQ ID NO: 20067 - DNA, 182 bp, Homo sapiens
gtgacaaaatggggcaatagttctgtaaggctgagagaagctgggggtgtacccagtggctaggctactcagaggggactgtcatgctgtcagtagtgtagtgggagccaagcaggctttactcaccggcctgttaacagctgtgcgagtcatgcctttcgcttgtgttagctcaccttgtg

SEQ ID NO: 20068 - DNA, 406 bp, Homo sapiens
aatttcccagactgaaaattcagtgtctctgaatcacagagacttgagatcacacatctctgcaagaaaatcatccctgaagctgggagcgacagaaagatgctgtctctgtctccctcactgtgagtgtaaggtccagtcttgtcctgattctgccctgggcttgcatgctgtcctgttcctgttatagaaagtagggctgatgacaccgccttgcagggctgagaggtcacatgtgagtgtgtgtacttgagatggcagcacggcccttgatttttccattgattcaacaccacgtggtggctgtttcttttttcttttctttttttttttttttttataagacagagtcttgctctgttgctcaggctggagtacagtggcatgatctccgctcattgcaacc

SEQ ID NO: 20069 - DNA, 506 bp, Homo sapiens
agacaatataaatataaaatcaaagaagaaatgacgaacaggaggatgtaaagcagcactgtgatcaccacgccaagaatgcctggctgcacggttcttacaaacatccagtagagcttcgcggcatccgccacaggagtctcctcattatctgtaagccgctgacaaaagcaaattcagatttgaaaaactcagaatgggaacactgatcaccaagttaggtgaatgtaaagatacaaagactatgtgaccctataatttgttttagaattaaatcttctaggtactgaagattgccagcttttcaggtgcacaaaggaaaagaaaaaaggctgggttttgcatgctactttaccaggtttttctcatcttccctctaagcctttacatgcacacactcgacatgcaattcataaagtaaaagccatgttttatttatgtactattaacttctgaatttaatgagcacaagacatgaagaaattaaatatgatggtgaaaagagt

SEQ ID NO: 20070 - DNA, 412 bp, Homo sapiens
gtctacacactgctcagccacatgactggaacagtgttttcacaggaatggcagcacaagcgatctgaacagcgctctgatgaaatcagcactgacctgtgcctgacgtcctatactcctcagcatggctttatgggttcttgcaatttttcctgtgggtgtgaaaatgcctggaagtccactcagtgagctttgcagtggttgctccgtaggattcctgttgaactgcctggccttcagccatggggagattttgctgaggggtaggcttaatggtggccctgaatattcctgctgcccagcagctgggaagtagttagctgagcaagattcatcttcaatgacgaaggggatttccacaaggtaaattgttctaacctcagagatgagtgtgattggatgctcccaactt

SEQ ID NO: 20071 - DNA, 704 bp, Homo sapiens
ggtcgaattgcaggagtcggggctgcatcagagtcctaggtgggcaacatgggaagagaactgctggaggggcacaggagggggtgagactgaaatagaaaccaagacttgctgatggtactcctgaggggatcgacacagggaaatgtaacagggagtgggcgaagatagagaaggtttctcacattggctttggaagtcaagcactcagttcaggctgagagaatattctctcttagttcctgctctctggagtggagtagttcagactcaacagaaaaagctttgctgggccaggcgcagtggctcacacctctaattagaacactttgggaggccaaggcgggcagatcacctgaggtcaggagtttgagaccagcctggccaacatggcgaaaccccatctctactagaaatacaaaaaattagccacgtatggtggcgcatgcctgtaatctcagctacttgggaggctgaggcagaagaatcgcttgaacccgggaggcagaggttgcagtgagctgagatcacgccactgcaccccagcctgtgcgacaagagcgaaactccatctcaaaaaaaggacaaaagaaaaaaaagaaaagaaaaagctttgctgggtctgttggtctgttcaagtagggacaggaagaacttgtaggtgacagagcacattgcccagcattgtcatgggtcttgggata

SEQ ID NO: 20072 - DNA, 204 bp, Homo sapiens
gttagtctctatctcataccccacatcagctagccagccctgattttggattttgtagatttgaaaagaatctttataatgccctgttgggggaggtgtgcccttatcttagtctgctcggtccgctataacaaaataccatagactgggtagctaaaacagcagacatttatttctcaccattctggagctgaaagtcagaga

SEQ ID NO: 20073 - DNA, 329 bp, Homo sapiens
cagtagtcagctctgttttaaaacaattgcttgggtcctgctggctcaacttgcagttgtcctagtcctgagtcttgtcttagccaaagactgttgttggaaagcccacacaaaggccttgtgtataggatgccctactattaaaggagcatgttctagtctcagtggattaaatttgctttggtgtgcattcccttaccaaatttctcactactttgtttggctggttatttcagtgaaaaatcattttaacgtgaaggcagatttcttctaattattacatagtcctagtggtgacggttattggagtaaaataatttttttttttt

SEQ ID NO: 20074 - DNA, 479 bp, Homo sapiens
aaccaaaatagagctggagtcatcatactaatatcaaagaaatagactttaaaacaaaaagtcttattagaaacaagatgtataggatatcaggaaaatggaacaattaaaatatatatgcaactaacaacagagtcccaaaacaagtgaactaaaaacagaaagaactgaagggagaaataggcaattctgtaataatagttggagatctcaatatcatactcttaataattgataggccaactagaaagaaaatcatcagttatatggagaatttgaacaacactatcaattattttgacctaactagtatcttagagcactccatccaacagcagcagaatgcatattcttttcaagcacacataaaacaattatttagaatagatatgtgatagagcataaaacagttctcaataaattgaaaataattgaagttatgacaagtatgttgtccaacaaaaccagtatcgcattaa

SEQ ID NO: 20075 - DNA, 458 bp, Homo sapiens
tatgaaaggccgttccagtgtctggcagtaatgaaatctgaccctcagaacagagcagcagtcccgaatcagctgatgggctgaggtggcaagtcattgtgcctttatcaaacaagggagcccttcctgggaatttcctgaaatacttgggaagtagatcctggtaaaaattggactacctgaagttaagtttggactattgtcaaaatcctaaagccaagtgtgacttctaggctggaaaagctaggacttctgggttacatagcacctgagggcttcaggaagcacgaaagataggatttgtgtgcaggttctaagttctaaggtcagagcctgaatcatggagtaaaatgtgaatcaaagttttcaacaaggatatgttaagtagggttttacattaaggccactcaagaataattctgtgtctaaattcatctatacatattcttgtcaataat

SEQ ID NO: 20076 - DNA, 733 bp, Homo sapiens
tcacggcgaactaccagggaccattatttgggtatatcaaggcaagttaggatttagtttctctgtggttttattaataacttgtgacttgggagctctgatttgcctattgtactaatttaggtgggattgattttaggtaacattggggtaccagaaaaagatcttctttgaaagatcttcttgtctccaactccttaaataatgctggatttggggactaatgggtgataaaatttaaaagatagtgagaacccgattatagaagtcctctcaaaacatccatatgtcatttgcctttaaacctataaattacaatatacactaaaaccacactctcatatctctactcattttggtgtgaggagggagaagataaaagtgttattagccacatcatggactattgctgtaaataccaaagggcatcatatacttaagctgaagaactcttagagacataaacaatgaaccaaatctaaggcagacgtaagagcttcctgaaagggttttactgtacattttgtttcgtttgctacatttgatacctacacactcaatagggaggaaaaacaggtttcagaataagccaactgtttcagacttgaaggcctgtgggggcagttggtaatataaaagtaatatgctgcagggtaagataaagactactgaggcctacagctgaattggagagaaataccatgacttaaagacattcaaagccaattaaaaa

SEQ ID NO: 20077 - DNA, 2796 bp, Homo sapiens
gatgcgagccggccaccagtcccggcagagccactagggcctctcgcggctcccacccggcggcggcggcggcggcggcggcgtccgcgatggtttcagacgctgaaggattttgcatctgatcgctcggcgtttcaaagaagcagcgatcggagatggatgtctctctttgcccagccaagtgtagtttctggcggattttcttgctgggaagcgtctggctggactatgtgggctccgtgctggcttgccctgcaaattgtgtctgcagcaagactgagatcaattgccggcggccggacgatgggaacctcttccccctcctggaagggcaggattcagggaacagcaatgggaacgccagtatcaacatcacggacatctcaaggaatatcacttccatacacatagagaactggcgcagtcttcacacgctcaacgccgtggacatggagctctacaccggacttcaaaagctgaccatcaagaactcaggacttcggagcattcagcccagagcctttgccaagaacccccatttgcgttatataaacctgtcaagtaaccggctcaccacactctcgtggcagctcttccagacgctgagtcttcgggaattgcagttggagcagaactttttcaactgcagctgtgacatccgctggatgcagctctggcaggagcagggggaggccaagctcaacagccagaacctctactgcatcaacgctgatggctcccagcttcctctcttccgcatgaacatcagtcagtgtgaccttcctgagatcagcgtgagccacgtcaacctgaccgtacgagagggtgacaatgctgttatcacttgcaatggctctggatcaccccttcctgatgtggactggatagtcactgggctgcagtccatcaacactcaccagaccaatctgaactggaccaatgttcatgccatcaacttgacgctggtgaatgtgacgagtgaggacaatggcttcaccctgacgtgcattgcagagaacgtggtgggcatgagcaatgccagtgttgccctcactgtctactatcccccacgtgtggtgagcctggaggagcctgagctgcgcctggagcactgcatcgagtttgtggtgcgtggcaaccccccaccaacgctgcactggctgcacaatgggcagcctctgcgggagtccaagatcatccatgtggaatactaccaagagggagagatttccgagggctgcctgctcttcaacaagcccacccactacaacaatggcaactataccctcattgccaaaaacccactgggcacagccaaccagaccatcaatggccacttcctcaaggagccctttccagagagcacggataactttatcttgtttgacgaagtgagtcccacacctcctatcactgtgacccacaaaccagaagaagacacttttggggtatccatagcagttggacttgctgcttttgcctgtgtcctgttggtggttctcttcgtcatgatcaacaaatatggtcgacggtccaaatttggaatgaagggtcccgtggctgtcatcagtggtgaggaggactcagccagcccactgcaccacatcaaccacggcatcaccacgccctcgtcactggatgccgggcccgacactgtggtcattggcatgactcgcatccctgtcattgagaacccccagtacttccgtcagggacacaactgccacaagccggacacgtatgtgcagcacattaagaggagagacatcgtgctgaagcgagaactgggtgagggagcctttggaaaggtcttcctggccgagtgctacaacctcagcccgaccaaggacaagatgcttgtggctgtgaaggccctgaaggatcccaccctggctgcccggaaggatttccagagggaggccgagctgctcaccaacctgcagcatgagcacattgtcaagttctatggagtgtgcggcgatggggaccccctcatcatggtctttgaatacatgaagcatggagacctgaataagttcctcagggcccatgggccagatgcaatgatccttgtggatggacagccacgccaggccaagggtgagctggggctctcccaaatgctccacattgccagtcagatcgcctcgggtatggtgtacctggcctcccagcactttgtgcaccgagacctggccaccaggaactgcctggttggagcgaatctgctagtgaagattggggacttcggcatgtccagagatgtctacagcacggattattacagggtgggaggacacaccatgctccccattcgctggatgcctcctgaaagcatcatgtaccggaagttcactacagagagtgatgtatggagcttcggggtgatcctctgggagatcttcacctatggaaagcagccatggttccaactctcaaacacggaggtcattgagtgcattacccaaggtcgtgttttggagcggccccgagtctgccccaaagaggtgtacgatgtcatgctggggtgctggcagagggaaccacagcagcggttgaacatcaaggagatctacaaaatcctccatgctttggggaaggccaccccaatctacctggacattcttggctagtggtggctggtggtcatgaattcatactctgttgcctcctctctccctgcctcacatctcccttccacctcacaactccttccatccttgactgaagcgaacatcttcatataaactcaagtgcctgctacacatacaacactgaaaaaaggaaaaaaaaaga

SEQ ID NO: 20078 - DNA, 1388 bp, Homo sapiens
gagaacaaccaccaggagtcctaccctctgtcagtgtctcccatggagaataatcactgcccagcgtcctccgagtcccacccgaagccatccagcccccggcaggagagcacacgcgtgatccagctgatgcccagccccatcatgcaccctctgatcctgaacccccggcactccgtggatttcaaacagtccaggctctccgaggacgggctgcatagggaagggaagcccatcaacctctctcatcgggaagacctggcttacatgaaccacatcatggtctctgtctccccgcctgaagagcacgccatgcccattgggagaatagcatgtgcagcacattaagaggagagacatcgtgctgaagcgagaactgggtgagggagcctttggaaaggtcttcctggccgagtgctacaacctcagcccgaccaaggacaagatgcttgtggctgtgaaggccctgaaggatcccaccctggctgcccggaaggatttccagagggaggccgagctgctcaccaacctgcagcatgagcacattgtcaagttctatggagtgtgcggcgatggggaccccctcatcatggtctttgaatacatgaagcatggagacctgaataagttcctcagggcccatgggccagatgcaatgatccttgtggatggacagccacgccaggccaagggtgagctggggctctcccaaatgctccacattgccagtcagatcgcctcgggtatggtgtacctggcctcccagcactttgtgcaccgagacctggccaccaggaactgcctggttggagcgaatctgctagtgaagattggggacttcggcatgtccagagatgtctacagcacggattattacagggtgggaggacacaccatgctccccattcgctggatgcctcctgaaagcatcatgtaccggaagttcactacagagagtgatgtatggagcttcggggtgatcctctgggagatcttcacctatggaaagcagccatggttccaactctcaaacacggaggtcattgagtgcattacccaaggtcgtgttttggagcggccccgagtctgccccaaagaggtgtacgatgtcatgctggggtgctggcagagggaaccacagcagcggttgaacatcaaggagatctacaaaatcctccatgctttggggaaggccaccccaatctacctggacattcttggctagtggtggctggtggtcatgaattcatactctgttgcctcctctctccctgcctcacatctcccttccacctcacaactccttccatccttgactgaagcgaacatcttcatataaactcaagtgcctgctacacatacaacactgaaaaaaggaaaaaaaaaga

SEQ ID NO: 20079 - DNA, 368 bp, Homo sapiens
ccttggctgttacatcttgtcgttcatcacccctaccacctttgcaagattaagattgttaataaagatgttaacacgttctctaggcctcactccaacctcgccatagctggcccgctatctggggccctctgctcaagaaaagaaactgcattttatcataagttctgttgtttaccgtctcctgatggcctggagcttttggctgtcttgcttaaatgtgactcaaagcagttaaaaaataaagaaggaaataaaatgaaaaacaacaacggaaagaagaaaagggcaacctcagcctgatgaaagacttggaagagtgagacctctccctctccggaataaattgctagttgcctttcagtgtc

SEQ ID NO: 20080 - DNA, 2838 bp, Homo sapiens
gatgcgagccggccaccagtcccggcagagccactagggcctctcgcggctcccacccggcggcggcggcggcggcggcggcgtccgcgatggtttcagacgctgaaggattttgcatctgatcgctcggcgtttcaaagaagcagcgatcggagatggatgtctctctttgcccagccaagtgtagtttctggcggattttcttgctgggaagcgtctggctggactatgtgggctccgtgctggcttgccctgcaaattgtgtctgcagcaagactgagatcaattgccggcggccggacgatgggaacctcttccccctcctggaagggcaggattcagggaacagcaatgggaacgccagtatcaacatcacggacatctcaaggaatatcacttccatacacatagagaactggcgcagtcttcacacgctcaacgccgtggacatggagctctacaccggacttcaaaagctgaccatcaagaactcaggacttcggagcattcagcccagagcctttgccaagaacccccatttgcgttatataaacctgtcaagtaaccggctcaccacactctcgtggcagctcttccagacgctgagtcttcgggaattgcagttggagcagaactttttcaactgcagctgtgacatccgctggatgcagctctggcaggagcagggggaggccaagctcaacagccagaacctctactgcatcaacgctgatggctcccagcttcctctcttccgcatgaacatcagtcagtgtgaccttcctgagatcagcgtgagccacgtcaacctgaccgtacgagagggtgacaatgctgttatcacttgcaatggctctggatcaccccttcctgatgtggactggatagtcactgggctgcagtccatcaacactcaccagaccaatctgaactggaccaatgttcatgccatcaacttgacgctggtgaatgtgacgagtgaggacaatggcttcaccctgacgtgcattgcagagaacgtggtgggcatgagcaatgccagtgttgccctcactgtctactatcccccacgtgtggtgagcctggaggagcctgagctgcgcctggagcactgcatcgagtttgtggtgcgtggcaaccccccaccaacgctgcactggctgcacaatgggcagcctctgcgggagtccaagatcatccatgtggaatactaccaagagggagagatttccgagggctgcctgctcttcaacaagcccacccactacaacaatggcaactataccctcattgccaaaaacccactgggcacagccaaccagaccatcaatggccacttcctcaaggagccctttccagagagcacggataactttatcttgtttgacgaagtgagtcccacacctcctatcactgtgacccacaaaccagaagaagacacttttggggtatccatagcagttggacttgctgcttttgcctgtgtcctgttggtggttctcttcgtcatgatcaacaaatatggtcgacggtccaaatttggaatgaagggtcccgtggctgtcatcagtggtgaggaggactcagccagcccactgcaccacatcaaccacggcatcaccacgccctcgtcactggatgccgggcccgacactgtggtcattggcatgactcgcatccctgtcattgagaacccccagtacttccgtcagggacacaactgccacaagccggacacgtatgtgcagcacattaagaggagagacatcgtgctgaagcgagaactgggtgagggagcctttggaaaggtcttcctggccgagtgctacaacctcagcccgaccaaggacaagatgcttgtggctgtgaaggccctgaaggatcccaccctggctgcccggaaggatttccagagggaggccgagctgctcaccaacctgcagcatgagcacattgtcaagttctatggagtgtgcggcgatggggaccccctcatcatggtctttgaatacatgaagcatggagacctgaataagttcctcagggcccatgggccagatgcaatgatccttgtggatggacagccacgccaggccaagggtgagctggggctctcccaaatgctccacattgccagtcagatcgcctcgggtatggtgtacctggcctcccagcactttgtgcaccgagacctggccaccaggaactgcctggttggagcgaatctgctagtgaagattggggacttcggcatgtccagagatgtctacagcacggattattacaggctctttaatccatctggaaatgatttttgtatatggtgtgaggtgggaggacacaccatgctccccattcgctggatgcctcctgaaagcatcatgtaccggaagttcactacagagagtgatgtatggagcttcggggtgatcctctgggagatcttcacctatggaaagcagccatggttccaactctcaaacacggaggtcattgagtgcattacccaaggtcgtgttttggagcggccccgagtctgccccaaagaggtgtacgatgtcatgctggggtgctggcagagggaaccacagcagcggttgaacatcaaggagatctacaaaatcctccatgctttggggaaggccaccccaatctacctggacattcttggctagtggtggctggtggtcatgaattcatactctgttgcctcctctctccctgcctcacatctcccttccacctcacaactccttccatccttgactgaagcgaacatcttcatataaactcaagtgcctgctacacatacaacactgaaaaaaggaaaaaaaaaga

SEQ ID NO: 20081 - DNA, 2394 bp, Homo sapiens
gatgcgagccggccaccagtcccggcagagccactagggcctctcgcggctcccacccggcggcggcggcggcggcggcggcgtccgcgatggtttcagacgctgaaggattttgcatctgatcgctcggcgtttcaaagaagcagcgatcggagatggatgtctctctttgcccagccaagtgtagtttctggcggattttcttgctgggaagcgtctggctggactatgtgggctccgtgctggcttgccctgcaaattgtgtctgcagcaagactgagatcaattgccggcggccggacgatgggaacctcttccccctcctggaagggcaggattcagggaacagcaatgggaacgccagtatcaacatcacggacatctcaaggaatatcacttccatacacatagagaactggcgcagtcttcacacgctcaacgccgtggacatggagctctacaccggacttcaaaagctgaccatcaagaactcaggacttcggagcattcagcccagagcctttgccaagaacccccatttgcgttatataaacctgtcaagtaaccggctcaccacactctcgtggcagctcttccagacgctgagtcttcgggaattgcagttggagcagaactttttcaactgcagctgtgacatccgctggatgcagctctggcaggagcagggggaggccaagctcaacagccagaacctctactgcatcaacgctgatggctcccagcttcctctcttccgcatgaacatcagtcagtgtgaccttcctgagatcagcgtgagccacgtcaacctgaccgtacgagagggtgacaatgctgttatcacttgcaatggctctggatcaccccttcctgatgtggactggatagtcactgggctgcagtccatcaacactcaccagaccaatctgaactggaccaatgttcatgccatcaacttgacgctggtgaatgtgacgagtgaggacaatggcttcaccctgacgtgcattgcagagaacgtggtgggcatgagcaatgccagtgttgccctcactgtctactatcccccacgtgtggtgagcctggaggagcctgagctgcgcctggagcactgcatcgagtttgtggtgcgtggcaaccccccaccaacgctgcactggctgcacaatgggcagcctctgcgggagtccaagatcatccatgtggaatactaccaagagggagagatttccgagggctgcctgctcttcaacaagcccacccactacaacaatggcaactataccctcattgccaaaaacccactgggcacagccaaccagaccatcaatggccacttcctcaaggagccctttccagagagcacggataactttatcttgtttgacgaagtgagtcccacacctcctatcactgtgacccacaaaccagaagaagacacttttggggtatccatagcagttggacttgctgcttttgcctgtgtcctgttggtggttctcttcgtcatgatcaacaaatatggtcgacggtccaaatttggaatgaagggtcccgtggctgtcatcagtggtgaggaggactcagccagcccactgcaccacatcaaccacggcatcaccacgccctcgtcactggatgccgggcccgacactgtggtcattggcatgactcgcatccctgtcattgagaacccccagtacttccgtcagggacacaactgccacaagccggacacgtgggtcttttcaaacatagacaatcatgggatattaaacttgaaggacaatagagatcatctagtcccatcaactcactatatatatgaggaacctgaggtccagagtggggaagtgtcttacccaaggtcacatggtttcagagaaattatgttgaatccaataagccttcccggacattccaagcctcttaaccatggcatctatgttgaggatgtcaatgtttatttcagcaaaggacgtcatggcttttaaaaactccttttaagcctccttgttttgatgtcaccttggtaggctgggccctctgagaggttggaagctctaggcattgttctctttggatccagggatgctaagtagaaactgcatgagccaccagtgccccggcaccctttaacaccaccagatgggtgttttcccccatccaccactggcagggttgccccttccctccaatcatcactgtgctccttttttcccggcctacgaggcagctcctgccactatctttagagccaataaagagaattaaaaacctgtgcaccaggagcatcttttaaatacactagccattctcttgctttacaaaaacaacctaaccatcacaagaaagcctgatgaagtccagccgtgctccagcctcactttccct

SEQ ID NO: 20082 - DNA, 2281 bp, Homo sapiens
gatgcgagccggccaccagtcccggcagagccactagggcctctcgcggctcccacccggcggcggcggcggcggcggcggcgtccgcgatggtttcagacgctgaaggattttgcatctgatcgctcggcgtttcaaagaagcagcgatcggagatggatgtctctctttgcccagccaagtgtagtttctggcggattttcttgctgggaagcgtctggctggactatgtgggctccgtgctggcttgccctgcaaattgtgtctgcagcaagactgagatcaattgccggcggccggacgatgggaacctcttccccctcctggaagggcaggattcagggaacagcaatgggaacgccagtatcaacatcacggacatctcaaggaatatcacttccatacacatagagaactggcgcagtcttcacacgctcaacgccgtggacatggagctctacaccggacttcaaaagctgaccatcaagaactcaggacttcggagcattcagcccagagcctttgccaagaacccccatttgcgttatataaacctgtcaagtaaccggctcaccacactctcgtggcagctcttccagacgctgagtcttcgggaattgcagttggagcagaactttttcaactgcagctgtgacatccgctggatgcagctctggcaggagcagggggaggccaagctcaacagccagaacctctactgcatcaacgctgatggctcccagcttcctctcttccgcatgaacatcagtcagtgtgaccttcctgagatcagcgtgagccacgtcaacctgaccgtacgagagggtgacaatgctgttatcacttgcaatggctctggatcaccccttcctgatgtggactggatagtcactgggctgcagtccatcaacactcaccagaccaatctgaactggaccaatgttcatgccatcaacttgacgctggtgaatgtgacgagtgaggacaatggcttcaccctgacgtgcattgcagagaacgtggtgggcatgagcaatgccagtgttgccctcactgtctactatcccccacgtgtggtgagcctggaggagcctgagctgcgcctggagcactgcatcgagtttgtggtgcgtggcaaccccccaccaacgctgcactggctgcacaatgggcagcctctgcgggagtccaagatcatccatgtggaatactaccaagagggagagatttccgagggctgcctgctcttcaacaagcccacccactacaacaatggcaactataccctcattgccaaaaacccactgggcacagccaaccagaccatcaatggccacttcctcaaggagccctttccagagagcacggataactttatcttgtttgacgaagtgagtcccacacctcctatcactgtgacccacaaaccagaagaagacacttttggggtatccatagcagttggacttgctgcttttgcctgtgtcctgttggtggttctcttcgtcatgatcaacaaatatggtcgacggtccaaatttggaatgaagggtcccgtggctgtcatcagtggtgaggaggactcagccagcccactgcaccacatcaaccacggcatcaccacgccctcgtcactggatgccgggcccgacactgtggtcattggcatgactcgcatccctgtcattgagaacccccagtacttccgtcagggacacaactgccacaagccggacacgtgggtcttttcaaacatagacaatcatgggatattaaacttgaaggacaatagagatcatctagtcccatcaactcactatatatatgaggaacctgaggtccagagtggggaagtgtcttacccaaggtcacatggtttcagagaaattatgttgaatccaataagccttcccggacattccaagcctcttaaccatggcatctatgttgaggatgtcaatgtttatttcagcaaaggacgtcatggcttttaaaaactccttttaagcctccttgttttgatgtcaccttggtaggctgggccctctgagaggttggaagctctaggcattgttctctttggatccagggatgctaagtagaaactgcatgagccaccagtgccccggcaccctttaacaccaccagatgggtgttttcccccatccaccactggcagggttgccccttccctccaatcatcactgtgctccttttttcccggcctacgaggcagctcctgccactatctttagagccaataaagagaattaaaaacctg

SEQ ID NO: 20083 - DNA, 2772 bp, Homo sapiens
gatgcgagccggccaccagtcccggcagagccactagggcctctcgcggctcccacccggcggcggcggcggcggcggcggcgtccgcgatggtttcagacgctgaaggattttgcatctgatcgctcggcgtttcaaagaagcagcgatcggagatggatgtctctctttgcccagccaagtgtagtttctggcggattttcttgctgggaagcgtctggctggactatgtgggctccgtgctggcttgccctgcaaattgtgtctgcagcaagactgagatcaattgccggcggccggacgatgggaacctcttccccctcctggaagggcaggattcagggaacagcaatgggaacgccagtatcaacatcacggacatctcaaggaatatcacttccatacacatagagaactggcgcagtcttcacacgctcaacgccgtggacatggagctctacaccggacttcaaaagctgaccatcaagaactcaggacttcggagcattcagcccagagcctttgccaagaacccccatttgcgttatataaacctgtcaagtaaccggctcaccacactctcgtggcagctcttccagacgctgagtcttcgggaattgcagttggagcagaactttttcaactgcagctgtgacatccgctggatgcagctctggcaggagcagggggaggccaagctcaacagccagaacctctactgcatcaacgctgatggctcccagcttcctctcttccgcatgaacatcagtcagtgtgaccttcctgagatcagcgtgagccacgtcaacctgaccgtacgagagggtgacaatgctgttatcacttgcaatggctctggatcaccccttcctgatgtggactggatagtcactgggctgcagtccatcaacactcaccagaccaatctgaactggaccaatgttcatgccatcaacttgacgctggtgaatgtgacgagtgaggacaatggcttcaccctgacgtgcattgcagagaacgtggtgggcatgagcaatgccagtgttgccctcactgtctactatcccccacgtgtggtgagcctggaggagcctgagctgcgcctggagcactgcatcgagtttgtggtgcgtggcaaccccccaccaacgctgcactggctgcacaatgggcagcctctgcgggagtccaagatcatccatgtggaatactaccaagagggagagatttccgagggctgcctgctcttcaacaagcccacccactacaacaatggcaactataccctcattgccaaaaacccactgggcacagccaaccagaccatcaatggccacttcctcaaggagccctttccagttgacgaagtgagtcccacacctcctatcactgtgacccacaaaccagaagaagacacttttggggtatccatagcagttggacttgctgcttttgcctgtgtcctgttggtggttctcttcgtcatgatcaacaaatatggtcgacggtccaaatttggaatgaagggtcccgtggctgtcatcagtggtgaggaggactcagccagcccactgcaccacatcaaccacggcatcaccacgccctcgtcactggatgccgggcccgacactgtggtcattggcatgactcgcatccctgtcattgagaacccccagtacttccgtcagggacacaactgccacaagccggacacgtatgtgcagcacattaagaggagagacatcgtgctgaagcgagaactgggtgagggagcctttggaaaggtcttcctggccgagtgctacaacctcagcccgaccaaggacaagatgcttgtggctgtgaaggccctgaaggatcccaccctggctgcccggaaggatttccagagggaggccgagctgctcaccaacctgcagcatgagcacattgtcaagttctatggagtgtgcggcgatggggaccccctcatcatggtctttgaatacatgaagcatggagacctgaataagttcctcagggcccatgggccagatgcaatgatccttgtggatggacagccacgccaggccaagggtgagctggggctctcccaaatgctccacattgccagtcagatcgcctcgggtatggtgtacctggcctcccagcactttgtgcaccgagacctggccaccaggaactgcctggttggagcgaatctgctagtgaagattggggacttcggcatgtccagagatgtctacagcacggattattacagggtgggaggacacaccatgctccccattcgctggatgcctcctgaaagcatcatgtaccggaagttcactacagagagtgatgtatggagcttcggggtgatcctctgggagatcttcacctatggaaagcagccatggttccaactctcaaacacggaggtcattgagtgcattacccaaggtcgtgttttggagcggccccgagtctgccccaaagaggtgtacgatgtcatgctggggtgctggcagagggaaccacagcagcggttgaacatcaaggagatctacaaaatcctccatgctttggggaaggccaccccaatctacctggacattcttggctagtggtggctggtggtcatgaattcatactctgttgcctcctctctccctgcctcacatctcccttccacctcacaactccttccatccttgactgaagcgaacatcttcatataaactcaagtgcctgctacacatacaacactgaaaaaaggaaaaaaaaaga

SEQ ID NO: 20084 - DNA, 2516 bp, Homo sapiens
aggccaggcctacctggggctgggttggagtggtatggtctttagctgttagaaagaagatgaagtgggagaggatggcatggctggaccagaggaagaaattgaggggaagaagggtggcgtcacttgttcaaggtcatccaactgacacatagagaactggcgcagtcttcacacgctcaacgccgtggacatggagctctacaccggacttcaaaagctgaccatcaagaactcaggacttcggagcattcagcccagagcctttgccaagaacccccatttgcgttatataaacctgtcaagtaaccggctcaccacactctcgtggcagctcttccagacgctgagtcttcgggaattgcagttggagcagaactttttcaactgcagctgtgacatccgctggatgcagctctggcaggagcagggggaggccaagctcaacagccagaacctctactgcatcaacgctgatggctcccagcttcctctcttccgcatgaacatcagtcagtgtgaccttcctgagatcagcgtgagccacgtcaacctgaccgtacgagagggtgacaatgctgttatcacttgcaatggctctggatcaccccttcctgatgtggactggatagtcactgggctgcagtccatcaacactcaccagaccaatctgaactggaccaatgttcatgccatcaacttgacgctggtgaatgtgacgagtgaggacaatggcttcaccctgacgtgcattgcagagaacgtggtgggcatgagcaatgccagtgttgccctcactgtctactatcccccacgtgtggtgagcctggaggagcctgagctgcgcctggagcactgcatcgagtttgtggtgcgtggcaaccccccaccaacgctgcactggctgcacaatgggcagcctctgcgggagtccaagatcatccatgtggaatactaccaagagggagagatttccgagggctgcctgctcttcaacaagcccacccactacaacaatggcaactataccctcattgccaaaaacccactgggcacagccaaccagaccatcaatggccacttcctcaaggagccctttccagttgacgaagtgagtcccacacctcctatcactgtgacccacaaaccagaagaagacacttttggggtatccatagcagttggacttgctgcttttgcctgtgtcctgttggtggttctcttcgtcatgatcaacaaatatggtcgacggtccaaatttggaatgaagggtcccgtggctgtcatcagtggtgaggaggactcagccagcccactgcaccacatcaaccacggcatcaccacgccctcgtcactggatgccgggcccgacactgtggtcattggcatgactcgcatccctgtcattgagaacccccagtacttccgtcagggacacaactgccacaagccggacacgtatgtgcagcacattaagaggagagacatcgtgctgaagcgagaactgggtgagggagcctttggaaaggtcttcctggccgagtgctacaacctcagcccgaccaaggacaagatgcttgtggctgtgaaggccctgaaggatcccaccctggctgcccggaaggatttccagagggaggccgagctgctcaccaacctgcagcatgagcacattgtcaagttctatggagtgtgcggcgatggggaccccctcatcatggtctttgaatacatgaagcatggagacctgaataagttcctcagggcccatgggccagatgcaatgatccttgtggatggacagccacgccaggccaagggtgagctggggctctcccaaatgctccacattgccagtcagatcgcctcgggtatggtgtacctggcctcccagcactttgtgcaccgagacctggccaccaggaactgcctggttggagcgaatctgctagtgaagattggggacttcggcatgtccagagatgtctacagcacggattattacagggtgggaggacacaccatgctccccattcgctggatgcctcctgaaagcatcatgtaccggaagttcactacagagagtgatgtatggagcttcggggtgatcctctgggagatcttcacctatggaaagcagccatggttccaactctcaaacacggaggtcattgagtgcattacccaaggtcgtgttttggagcggccccgagtctgccccaaagaggtgtacgatgtcatgctggggtgctggcagagggaaccacagcagcggttgaacatcaaggagatctacaaaatcctccatgctttggggaaggccaccccaatctacctggacattcttggctagtggtggctggtggtcatgaattcatactctgttgcctcctctctccctgcctcacatctcccttccacctcacaactccttccatccttgactgaagcgaacatcttcatataaactcaagtgcctgctacacatacaacactgaaaaaaggaaaaaaaaaga

SEQ ID NO: 20085 - DNA, 2235 bp, Homo sapiens
gatgcgagccggccaccagtcccggcagagccactagggcctctcgcggctcccacccggcggcggcggcggcggcggcggcgtccgcgatggtttcagacgctgaaggattttgcatctgatcgctcggcgtttcaaagaagcagcgatcggagatggatgtctctctttgcccagccaagtgtagtttctggcggattttcttgctgggaagcgtctggctggactatgtgggctccgtgctggcttgccctgcaaattgtgtctgcagcaagactgagatcaattgccggcggccggacgatgggaacctcttccccctcctggaagggcaggattcagggaacagcaatgggaacgccagtatcaacatcacggacatctcaaggaatatcacttccatacacatagagaactggcgcagtcttcacacgctcaacgccgtggacatggagctctacaccggacttcaaaagctgaccatcaagaactcaggacttcggagcattcagcccagagcctttgccaagaacccccatttgcgttatataaacctgtcaagtaaccggctcaccacactctcgtggcagctcttccagacgctgagtcttcgggaattgcagttggagcagaactttttcaactgcagctgtgacatccgctggatgcagctctggcaggagcagggggaggccaagctcaacagccagaacctctactgcatcaacgctgatggctcccagcttcctctcttccgcatgaacatcagtcagtgtgaccttcctgagatcagcgtgagccacgtcaacctgaccgtacgagagggtgacaatgctgttatcacttgcaatggctctggatcaccccttcctgatgtggactggatagtcactgggctgcagtccatcaacactcaccagaccaatctgaactggaccaatgttcatgccatcaacttgacgctggtgaatgtgacgagtgaggacaatggcttcaccctgacgtgcattgcagagaacgtggtgggcatgagcaatgccagtgttgccctcactgtctactatcccccacgtgtggtgagcctggaggagcctgagctgcgcctggagcactgcatcgagtttgtggtgcgtggcaaccccccaccaacgctgcactggctgcacaatgggcagcctctgcgggagtccaagatcatccatgtggaatactaccaagagggagagatttccgagggctgcctgctcttcaacaagcccacccactacaacaatggcaactataccctcattgccaaaaacccactgggcacagccaaccagaccatcaatggccacttcctcaaggagccctttccagttgacgaagtgagtcccacacctcctatcactgtgacccacaaaccagaagaagacacttttggggtatccatagcagttggacttgctgcttttgcctgtgtcctgttggtggttctcttcgtcatgatcaacaaatatggtcgacggtccaaatttggaatgaagggtcccgtggctgtcatcagtggtgaggaggactcagccagcccactgcaccacatcaaccacggcatcaccacgccctcgtcactggatgccgggcccgacactgtggtcattggcatgactcgcatccctgtcattgagaacccccagtacttccgtcagggacacaactgccacaagccggacacgtgtttcagagaaattatgttgaatccaataagccttcccggacattccaagcctcttaaccatggcatctatgttgaggatgtcaatgtttatttcagcaaaggacgtcatggcttttaaaaactccttttaagcctccttgttttgatgtcaccttggtaggctgggccctctgagaggttggaagctctaggcattgttctctttggatccagggatgctaagtagaaactgcatgagccaccagtgccccggcaccctttaacaccaccagatgggtgttttcccccatccaccactggcagggttgccccttccctccaatcatcactgtgctccttttttcccggcctacgaggcagctcctgccactatctttagagccaataaagagaattaaaaacctgtgcaccaggagcatcttttaaatacactagccattctcttgctttacaaaaacaacctaaccatcacaagaaagcctgatgaagtccagccgtgctccagcctcactttccct

SEQ ID NO: 20086 - DNA, 2284 bp, Homo sapiens
gatgcgagccggccaccagtcccggcagagccactagggcctctcgcggctcccacccggcggcggcggcggcggcggcggcgtccgcgatggtttcagacgctgaaggattttgcatctgatcgctcggcgtttcaaagaagcagcgatcggagatggatgtctctctttgcccagccaagtgtagtttctggcggattttcttgctgggaagcgtctggctggactatgtgggctccgtgctggcttgccctgcaaattgtgtctgcagcaagactgagatcaattgccggcggccggacgatgggaacctcttccccctcctggaagggcaggattcagggaacagcaatgggaacgccagtatcaacatcacggacatctcaaggaatatcacttccatacacatagagaactggcgcagtcttcacacgctcaacgccgtggacatggagctctacaccggacttcaaaagctgaccatcaagaactcaggacttcggagcattcagcccagagcctttgccaagaacccccatttgcgttatataaacctgtcaagtaaccggctcaccacactctcgtggcagctcttccagacgctgagtcttcgggaattgcagttggagcagaactttttcaactgcagctgtgacatccgctggatgcagctctggcaggagcagggggaggccaagctcaacagccagaacctctactgcatcaacgctgatggctcccagcttcctctcttccgcatgaacatcagtcagtgtgaccttcctgagatcagcgtgagccacgtcaacctgaccgtacgagagggtgacaatgctgttatcacttgcaatggctctggatcaccccttcctgatgtggactggatagtcactgggctgcagtccatcaacactcaccagaccaatctgaactggaccaatgttcatgccatcaacttgacgctggtgaatgtgacgagtgaggacaatggcttcaccctgacgtgcattgcagagaacgtggtgggcatgagcaatgccagtgttgccctcactgtctactatcccccacgtgtggtgagcctggaggagcctgagctgcgcctggagcactgcatcgagtttgtggtgcgtggcaaccccccaccaacgctgcactggctgcacaatgggcagcctctgcgggagtccaagatcatccatgtggaatactaccaagagggagagatttccgagggctgcctgctcttcaacaagcccacccactacaacaatggcaactataccctcattgccaaaaacccactgggcacagccaaccagaccatcaatggccacttcctcaaggagccctttccagttgacgaagtgagtcccacacctcctatcactgtgacccacaaaccagaagaagacacttttggggtatccatagcagttggacttgctgcttttgcctgtgtcctgttggtggttctcttcgtcatgatcaacaaatatggtcgacggtccaaatttggaatgaagggtcccgtggctgtcatcagtggtgaggaggactcagccagcccactgcaccacatcaaccacggcatcaccacgccctcgtcactggatgccgggcccgacactgtggtcattggcatgactcgcatccctgtcattgagaacccccagtacttccgtcagggacacaactgccacaagccggacacgtgggtcttttcaaacatagacaatcatgggatattaaacttgaaggacaatagagatcatctagtcccatcaactcactatatatatgaggaacctgaggtccagagtggggaagtgtcttacccaaggtcacatggtttatttcagcaaaggacgtcatggcttttaaaaactccttttaagcctccttgttttgatgtcaccttggtaggctgggccctctgagaggttggaagctctaggcattgttctctttggatccagggatgctaagtagaaactgcatgagccaccagtgccccggcaccctttaacaccaccagatgggtgttttcccccatccaccactggcagggttgccccttccctccaatcatcactgtgctccttttttcccggcctacgaggcagctcctgccactatctttagagccaataaagagaattaaaaacctgtgcaccaggagcatcttttaaatacactagccattctcttgctttacaaaaacaacctaaccatcacaagaaagcctgatgaagtccagccgtgctccagcctcactttccct

SEQ ID NO: 20087 - DNA, 1708 bp, Homo sapiens
gatgcgagccggccaccagtcccggcagagccactagggcctctcgcggctcccacccggcggcggcggcggcggcggcggcgtccgcgatggtttcagacgctgaaggattttgcatctgatcgctcggcgtttcaaagaagcagcgatcggagatggatgtctctctttgcccagccaagtgtagtttctggcggattttcttgctgggaagcgtctggctggactatgtgggctccgtgctggcttgccctgcaaattgtgtctgcagcaagactgagatcaattgccggcggccggacgatgggaacctcttccccctcctggaagggcaggattcagggaacagcaatgggaacgccagtatcaacatcacggacatctcaaggaatatcacttccatacacatagagaactggcgcagtcttcacacgctcaacgccgtggacatggagctctacaccggacttcaaaagctgaccatcaagaactcaggacttcggagcattcagcccagagcctttgccaagaacccccatttgcgttatataaacctgtcaagtaaccggctcaccacactctcgtggcagctcttccagacgctgagtcttcgggaattgcagttggagcagaactttttcaactgcagctgtgacatccgctggatgcagctctggcaggagcagggggaggccaagctcaacagccagaacctctactgcatcaacgctgatggctcccagcttcctctcttccgcatgaacatcagtcagtgtgaccttcctgagatcagcgtgagccacgtcaacctgaccgtacgagagggtgacaatgctgttatcacttgcaatggctctggatcaccccttcctgatgtggactggatagtcactgggctgcagtccatcaacactcaccagaccaatctgaactggaccaatgttcatgccatcaacttgacgctggtgaatgtgacgagtgaggacaatggcttcaccctgacgtgcattgcagagaacgtggtgggcatgagcaatgccagtgttgccctcactgtctactatcccccacgtgtggtgagcctggaggagcctgagctgcgcctggagcactgcatcgagtttgtggtgcgtggcaaccccccaccaacgctgcactggctgcacaatgggcagcctctgcgggagtccaagatcatccatgtggaatactaccaagagggagagatttccgagggctgcctgctcttcaacaagcccacccactacaacaatggcaactataccctcattgccaaaaacccactgggcacagccaaccagaccatcaatggccacttcctcaaggagccctttccagttgacgaagtgagtcccacacctcctatcactgtgacccacaaaccagaagaagacacttttggggtatccatagcagttggacttgctgcttttgcctgtgtcctgttggtggttctcttcgtcatgatcaacaaatatggtcgacggtccaaatttggaatgaaggatggcctggagcttttggctgtcttgcttaaatgtgactcaaagcagttaaaaaataaagaaggaaataaaatgaaaaacaacaacggaaagaagaaaagggcaacctcagcctgatgaaagacttggaagagtgagacctctccctctccggaataaattgctagttgcctttcagtgtc

SEQ ID NO: 20088 - DNA, 2016 bp, Homo sapiens
gatgcgagccggccaccagtcccggcagagccactagggcctctcgcggctcccacccggcggcggcggcggcggcggcggcgtccgcgatggtttcagacgctgaaggattttgcatctgatcgctcggcgtttcaaagaagcagcgatcggagatggatgtctctctttgcccagccaagtgtagtttctggcggattttcttgctgggaagcgtctggctggactatgtgggctccgtgctggcttgccctgcaaattgtgtctgcagcaagactgagatcaattgccggcggccggacgatgggaacctcttccccctcctggaagggcaggattcagggaacagcaatgggaacgccagtatcaacatcacggacatctcaaggaatatcacttccatacacatagagaactggcgcagtcttcacacgctcaacgccgtggacatggagctctacaccggacttcaaaagctgaccatcaagaactcaggacttcggagcattcagcccagagcctttgccaagaacccccatttgcgttatataaacctgtcaagtaaccggctcaccacactctcgtggcagctcttccagacgctgagtcttcgggaattgcagttggagcagaactttttcaactgcagctgtgacatccgctggatgcagctctggcaggagcagggggaggccaagctcaacagccagaacctctactgcatcaacgctgatggctcccagcttcctctcttccgcatgaacatcagtcagtgtgaccttcctgagatcagcgtgagccacgtcaacctgaccgtacgagagggtgacaatgctgttatcacttgcaatggctctggatcaccccttcctgatgtggactggatagtcactgggctgcagtccatcaacactcaccagaccaatctgaactggaccaatgttcatgccatcaacttgacgctggtgaatgtgacgagtgaggacaatggcttcaccctgacgtgcattgcagagaacgtggtgggcatgagcaatgccagtgttgccctcactgtctactatcccccacgtgtggtgagcctggaggagcctgagctgcgcctggagcactgcatcgagtttgtggtgcgtggcaaccccccaccaacgctgcactggctgcacaatgggcagcctctgcgggagtccaagatcatccatgtggaatactaccaagagggagagatttccgagggctgcctgctcttcaacaagcccacccactacaacaatggcaactataccctcattgccaaaaacccactgggcacagccaaccagaccatcaatggccacttcctcaaggagccctttccagttgacgaagtgagtcccacacctcctatcactgtgacccacaaaccagaagaagacacttttggggtatccatagcagttggacttgctgcttttgcctgtgtcctgttggtggttctcttcgtcatgatcaacaaatatggtcgacggtccaaatttggaatgaagggtgagctgtcttgactgggctgatgctgggctgccaggaaaaagaacacgcataactccggattggcccatgatggcttcctgctgtggcccagccagcactgcccgctttccctctcttgctcctcagcctggcagtccttattagcctctcccccaaaagccaggttgccaaacctctcagccttcaagtgcccatcatacctctgccctcttggtacaacttccctgaattcttcaaaccaagggtgtctcatcaaattgtgcattaactgtgttacaataagaataaactgtgtttatttctagatggcctggagcttttggctgtcttgcttaaatgtgactcaaagcagttaaaaaataaagaaggaaataaaatgaaaaacaacaacggaaagaagaaaagggcaacctcagcctgatgaaagacttggaagagtgagacctctccctctccggaataaattgctagttgcctttcagtgtc

SEQ ID NO: 20089 - DNA, 1139 bp, Homo sapiens
catgagaataccagtgtgtactcatagtacgagaagggaggcgcctagtccggaacgactctcttaattttccaccgctacacatgtgcagcacattaagaggagagacatcgtgctgaagcgagaactgggtgagggagcctttggaaaggtcttcctggccgagtgctacaacctcagcccgaccaaggacaagatgcttgtggctgtgaaggccctgaaggatcccaccctggctgcccggaaggatttccagagggaggccgagctgctcaccaacctgcagcatgagcacattgtcaagttctatggagtgtgcggcgatggggaccccctcatcatggtctttgaatacatgaagcatggagacctgaataagttcctcagggcccatgggccagatgcaatgatccttgtggatggacagccacgccaggccaagggtgagctggggctctcccaaatgctccacattgccagtcagatcgcctcgggtatggtgtacctggcctcccagcactttgtgcaccgagacctggccaccaggaactgcctggttggagcgaatctgctagtgaagattggggacttcggcatgtccagagatgtctacagcacggattattacagggtgggaggacacaccatgctccccattcgctggatgcctcctgaaagcatcatgtaccggaagttcactacagagagtgatgtatggagcttcggggtgatcctctgggagatcttcacctatggaaagcagccatggttccaactctcaaacacggaggtcattgagtgcattacccaaggtcgtgttttggagcggccccgagtctgccccaaagaggtgtacgatgtcatgctggggtgctggcagagggaaccacagcagcggttgaacatcaaggagatctacaaaatcctccatgctttggggaaggccaccccaatctacctggacattcttggctagtggtggctggtggtcatgaattcatactctgttgcctcctctctccctgcctcacatctcccttccacctcacaactccttccatccttgactgaagcgaacatcttcatataaactcaagtgcctgctacacatacaacactgaaaaaaggaaaaaaaaaga

SEQ ID NO: 20090 - DNA, 499 bp, Homo sapiens
tgagcttaattgccagaaatgcattccctaagcactgcccccaccccgcaacctgccgctgcaatgtgggagactgcaactgcatgggcttcaattctgagttctgatgtctactggggaggtgatgtaaagcgtcttggatttgcgggtcttccaagaactcaagcaggtggtgttagagtcattactgggcaaggcaagaagtgccaccatcagccccatggacagagcttcctttgggtagtaagtgtttgcctgtcttttcacccactttgtctggctcccagaccttcctgagatcagcgtgagccacgtcaacctgaccgtacgagagggtgacaatgctgttatcacttgcaatggctctggatcaccccttcctgatgtggactggatagtcactgggctgcagtccatcaacactcaccaggtaggcatcctgggcttcagccccatcaggaggctagggagtgatcacactgtagtcttgaagaagagg

SEQ ID NO: 20091 - DNA, 379 bp, Homo sapiens
  misc_feature (326)..(326): n is a, c, g, or t
  misc_feature (334)..(334): n is a, c, g, or t
tgtcagtcatgattctgattactgtcttaaaatgctgcacataagtaattaaatttccttgtgaactgggaagtttcatcagacttttatcataactattgtttccatcatccacagttactgttttgaattcttctctaaaaatatttgtaattggcaatagtccaaattttcttttgttttctttcctgtttttgagacacagtctggctctgtcgcctaagctggagtgcagtggtgggatctcggctcactgcaaactctgcctcccgggttcacgccattctcctgcctcagccacccaagtagctgggactacatgctgngattacangcgtgaagcattacatccaagtgaaacttcttaagactggtcctg

SEQ ID NO: 20092 - DNA, 551 bp, Homo sapiens
  misc_feature (430)..(430): n is a, c, g, or t
  misc_feature (436)..(436): n is a, c, g, or t
  misc_feature (460)..(460): n is a, c, g, or t
  misc_feature (494)..(494): n is a, c, g, or t
  misc_feature (515)..(515): n is a, c, g, or t
  misc_feature (528)..(528): n is a, c, g, or t
  misc_feature (548)..(548): n is a, c, g, or t
tgtcagtcatgattctgattactgtcttaaaatgctgcacataagtaattaaatttccttgtgaactgggaagtttcatcagacttttatcataactattgtttccatcatccacagttactgttttgaattcttctctaaaaatatttgtaattggcaatagtccaaattttcttttgttttctttcctgtttttgagacacagtctggctctgtcgcctaagctggagtgcagtggtgggatctcggctgggtgacaaaggtagaatctatccaaaaaaaaaagttattatttctgaagattgtatgaaatttataaaagtctgctggccctgatatgatgctgtcagtcatgattctgattactgtcttaaaatgctgcacataagtaattaaatttcaagaaacaaagttcatcagcttctctccnaaggtntttgcccacaatacccagagggcntgtgcagcaatcatgtgtgatggggtgggggggntccaagcagggtgggcagganccagggggcctgnttgaccaggacagacccccnctg

SEQ ID NO: 20093 - DNA, 412 bp, Homo sapiens
tgtcagtcatgattctgattactgtcttaaaatgctgcacataagtaattaaatttccttgtgaactgggaagtttcatcagacttttatcataactattgtttccatcatccacagttactgttttgaattcttctctaaaaatatttgtaattggcaatagtccaaattttcttttgttttctttcctgtttttgagacacagtctggctctgtcgcctaagctggagtgcagtggtgggatctcggctcactgcaaactctgcctcccgggttcacgccattctcctgcctcagccacccaagtagctgggactacaagtgctgccaccacatccagctaattttttgtatttttagtagagacagggtttcactgtgttagccaggatggtctcaatctcctgatctc

SEQ ID NO: 20094 - DNA, 352 bp, Homo sapiens
tattatacagtggtgtttatgctggttttaagttttaaaacattttatctttaaatgaccactgtataaatgttactttcaaaatattgtttggtgttgataggttctatttactcttcccaacatttatttgtattatgagtcacttcatactgactcaccagcattgcattaaaataaccagtcaccatcaaaaagtggactaaggacatgaatagacaattctccaaagaagaaatacaaatggccagcaagcatatgaaaaaatgctcaacatcactaatgatcagggaaatgcaaatcaaaaccacaatgcaataccacctcactcctgcaagaatggccataaatc

SEQ ID NO: 20095 - DNA, 1831 bp, Homo sapiens
acttccggtcgtgggccatgccgggggcgggcccggaaccgccacgggtgagtcgggtcgtggctgctgccgggtcctgcgcgctccggactgaggtggcgtccctgggccggacggcggtgtcccggcgtggcgggaagccggcactggagcgggagcgcactgggcgcgggaccgggaggcgcagggaccggacggctcccgagtcgcccacctgacggtaccgagagggcggcgcccctccgagcagagccgtcccggccactcccctgggatctgacttggctcttgcggtcgcgggcaccgtgaagccctggggtgtgcgtggctcctcctgctagaagaagtcttcacttcccaggagagccaaagcgtgtctggccctaggtgggaaaagaactggctgtgacctttgccctgacctggaagggcccagccttgggctgaatggcagcacccacgcccgcccgtccggtgctgacccacctgctggtggctctcttcggcatgggctcctgggctgcggtcaatgggatctgggtggagctacctgtggtggtcaaagagcttccagagggttggagcctcccctcttacgtctctgtgcttgtggctctggggaacctgggtctgctggtggtgaccctctggaggaggctggccccaggaaaggacgagcaggtccccatccgggtggtgcaggtgctgggcatggtgggcacagccctgctggcctctctgtggcaccatgtggccccagtggcaggacagttgcattctgtggccttcttagcactggcctttgtgctggcactggcatgctgtgcctcgaatgtcactttcctgcccttcttgagccacctgccacctcgcttcttacggtcattcttcctgggtcaaggcctgagtgccctgctgccctgcgtgctggccctagtgcagggtgtgggccgcctcgagtgcccgccagcccccatcaacggcacccctggccccccgctcgacttccttgagcgttttcccgccagcaccttcttctgggcactgactgcccttctggtcgcttcagctgctgccttccagggtcttctgctgctgttgccgccaccaccatctgtacccacaggggagttaggatcaggcctccaggtgggagccccaggagcagaggaagaggtggaagagtcctcaccactgcaagagccaccaagccaggcagcaggcaccacccctggtccagaccctaaggcctatcagcttctatcagcccgcagtgcctgcctgctgggcctgttggccgccaccaacgcgctgaccaatggcgtgctgcctgccgtgcagagcttttcctgcttaccctacgggcgtctggcctaccacctggctgtggtgctgggcagtgctgccaatcccctggcctgcttcctggccatgggtgtgctgtgcaggtccttggcagggctgggcggcctctctctgctgggcgtgttctgtgggggctacctgatggcgctggcagtcctgagcccctgcccgcccctggtgggcacctcggcgggggtggtcctcgtggtgctgtcgtgggtgctgtgtcttggcgtgttctcctacgtgaaggtggcagccagctccctgctgcatggcgggggccggccggcattgctggcagccggcgtggccatccaggtgggctctctgctcggcgctgttgctatgttccccccgaccagcatctatcacgtgttccacagcagaaaggactgtgcagacccctgtgactcctgagcctgggacctacatgtggtttgcgtaataaaacatttgtatttaa

SEQ ID NO: 20096 - DNA, 2211 bp, Homo sapiens
aaaataaactagtagagcgcggttaatcggacgggcccggaaccgccacgggtgagtcgggtcgtggctgctgccgggtcctgcgcgctccggactgaggtggcgtccctgggccggacggcggtgtcccggcgtggcgggaagccggcactggagcgggagcgcactgggcgcgggaccgggaggcgcagggaccggacggctcccgagtcgcccacctgacggtaccgagagggcggcgcccctccgagcagagccgtcccggccactcccctgggatctgacttggctcttgcggtcgcgggcaccgtgaagccctggggtgtgcgtggctcctcctggtaggcgccctttcccggcgtccggcttggggtggtggtggcgttgactccagccccgcctctccctggagaggagggctccactcgctccttcggcctcctcccctggggccgcagcgactcgggccggcttcctgcttccctgcctgccggcggtcccgctggctagaagaagtcttcacttcccaggagagccaaagcgtgtctggccctaggtgggaaaagaactggctgtgacctttgccctgacctggaagggcccagccttgggctgaatggcagcacccacgcccgcccgtccggtgctgacccacctgctggtggctctcttcggcatgggctcctgggctgcggtcaatgggatctgggtggagctacctgtggtggtcaaagagcttccagagggttggagcctcccctcttacgtctctgtgcttgtggctctggggaacctgggtctgctggtggtgaccctctggaggaggctggccccaggaaaggacgagcaggtccccatccgggtggtgcaggtgctgggcatggtgggcacagccctgctggcctctctgtggcaccatgtggccccagtggcaggacagttgcattctgtggccttcttagcactggcctttgtgctggcactggcatgctgtgcctcgaatgtcactttcctgcccttcttgagccacctgccacctcgcttcttacggtcattcttcctgggtcaaggcctgagtgccctgctgccctgcgtgctggccctagtgcagggtgtgggccgcctcgagtgcccgccagcccccatcaacggcacccctggccccccgctcgacttccttgagcgttttcccgccagcaccttcttctgggcactgactgcccttctggtcgcttcagctgctgccttccagggtcttctgctgctgttgccgccaccaccatctgtacccacaggggagttaggatcaggcctccaggtgggagccccaggagcagaggaagaggtggaagagtcctcaccactgcaagagccaccaagccaggcagcaggcaccacccctggtccagaccctaaggcctatcagcttctatcagcccgcagtgcctgcctgctgggcctgttggccgccaccaacgcgctgaccaatggcgtgctgcctgccgtgcagagcttttcctgcttaccctacgggcgtctggcctaccacctggctgtggtgctgggcagtgctgccaatcccctggcctgcttcctggccatgggtgtgctgtgcaggtccttggcagggctgggcggcctctctctgctgggcgtgttctgtgggggctacctgatggcgctggcagtcctgagcccctgcccgcccctggtgggcacctcggcgggggtggtcctcgtggtgctgtcgtgggtgctgtgtcttggcgtgttctcctacgtgaaggtggcagccagctccctgctgcatggcgggggccggccggcattgctggcagccggcgtggccatccaggtgggctctctgctcggcgctgttgctatgttccccccgaccagcatctatcacgtgttccacagcagaaaggactgtgcagacccctgtgactcctgagcctgggcaggtggggaccccgctccccaacacctgtctttccctcaatgctgccaccatgcctgagtgcctgcagcccaggaggcccgcacaccggtacactcgtggacacctacacactccataggagatcctggctttccagggtgggcaagggcaaggagcaggcttggagccagggaccagtgggggctgtagggtaagcccctgagcctgggacctacatgtggtttgcgtaataaaacatttgtatttaa

SEQ ID NO: 20097 - DNA, 2207 bp, Homo sapiens
acttccggtcgtgggccatgccgggggcgggcccggaaccgccacgggtgagtcgggtcgtggctgctgccgggtcctgcgcgctccggactgaggtggcgtccctgggccggacggcggtgtcccggcgtggcgggaagccggcactggagcgggagcgcactgggcgcgggaccgggaggcgcagggaccggacggctcccgagtcgcccacctgacggtaccgagagggcggcgcccctccgagcagagccgtcccggccactcccctgggatctgacttggctcttgcggtcgcgggcaccgtgaagccctggggtgtgcgtggctcctcctggtaggcgccctttcccggcgtccggcttggggtggtggtggcgttgactccagccccgcctctccctggagaggagggctccactcgctccttcggcctcctcccctggggccgcagcgactcgggccggcttcctgcttccctgcctgccggcggtcccgctggctagaagaagtcttcacttcccaggagagccaaagcgtgtctggccctaggtgggaaaagaactggctgtgacctttgccctgacctggaagggcccagccttgggctgaatggcagcacccacgcccgcccgtccggtgctgacccacctgctggtggctctcttcggcatgggctcctgggctgcggtcaatgggatctgggtggagctacctgtggtggtcaaagagcttccagagggttggagcctcccctcttacgtctctgtgcttgtggctctggggaacctgggtctgctggtggtgaccctctggaggaggctggccccaggaaaggacgagcaggtccccatccgggtggtgcaggtgctgggcatggtgggcacagccctgctggcctctctgtggcaccatgtggccccagtggcaggacagttgcattctgtggccttcttagcactggcctttgtgctggcactggcatgctgtgcctcgaatgtcactttcctgcccttcttgagccacctgccacctcgcttcttacggtcattcttcctgggtcaaggcctgagtgccctgctgccctgcgtgctggccctagtgcagggtgtgggccgcctcgagtgcccgccagcccccatcaacggcacccctggccccccgctcgacttccttgagcgttttcccgccagcaccttcttctgggcactgactgcccttctggtcgcttcagctgctgccttccagggtcttctgctgctgttgccgccaccaccatctgtacccacaggggagttaggatcaggcctccaggtgggagccccaggagcagaggaagaggtggaagagtcctcaccactgcaagagccaccaagccaggcagcaggcaccacccctggtccagaccctaaggcctatcagcttctatcagcccgcagtgcctgcctgctgggcctgttggccgccaccaacgcgctgaccaatggcgtgctgcctgccgtgcagagcttttcctgcttaccctacgggcgtctggcctaccacctggctgtggtgctgggcagtgctgccaatcccctggcctgcttcctggccatgggtgtgctgtgcaggtccttggcagggctgggcggcctctctctgctgggcgtgttctgtgggggctacctgatggcgctggcagtcctgagcccctgcccgcccctggtgggcacctcggcgggggtggtcctcgtggtgctgtcgtgggtgctgtgtcttggcgtgttctcctacgtgaaggtggcagccagctccctgctgcatggcgggggccggccggcattgctggcagccggcgtggccatccaggtgggctctctgctcggcgctgttgctatgttccccccgaccagcatctatcacgtgttccacagcagaaaggactgtgcagacccctgtgactcctgagcctgggcaggtggggaccccgctccccaacacctgtctttccctcaatgctgccaccatgcctgagtgcctgcagcccaggaggcccgcacaccggtacactcgtggacacctacacactccataggagatcctggctttccagggtgggcaagggcaaggagcaggcttggagccagggaccagtgggggctgtagggtaagcccctgagcctgggacctacatgtggtttgcgtaataaaacatttgtatttaa

SEQ ID NO: 20098 - DNA, 2649 bp, Homo sapiens
aaaataaactagtagagcgcggttaatcggacgggcccggaaccgccacgggtgagtcgggtcgtggctgctgccgggtcctgcgcgctccggactgaggtggcgtccctgggccggacggcggtgtcccggcgtggcgggaagccggcactggagcgggagcgcactgggcgcgggaccgggaggcgcagggaccggacggctcccgagtcgcccacctgacggtaccgagagggcggcgcccctccgagcagagccgtcccggccactcccctgggatctgacttggctcttgcggtcgcgggcaccgtgaagccctggggtgtgcgtggctcctcctggtaggcgccctttcccggcgtccggcttggggtggtggtggcgttgactccagccccgcctctccctggagaggagggctccactcgctccttcggcctcctcccctggggccgcagcgactcgggccggcttcctgcttccctgcctgccggcggtcccgctggctagaagaagtcttcacttcccaggagagccaaagcgtgtctggccctaggtgggaaaagaactggctgtgacctttgccctgacctggaagggcccagccttgggctgaatggcagcacccacgcccgcccgtccggtgctgacccacctgctggtggctctcttcggcatgggctcctgggctgcggtcaatgggatctgggtggagctacctgtggtggtcaaagagcttccagagggttggagcctcccctcttacgtctctgtgcttgtggctctggggaacctgggtctgctggtggtgaccctctggaggaggctggccccaggaaaggacgagcaggtccccatccgggtggtgcaggtgctgggcatggtgggcacagccctgctggcctctctgtggcaccatgtggccccagtggcaggacagttgcattctgtggccttcttagcactggcctttgtgctggcactggcatgctgtgcctcgaatgtcactttcctgcccttcttgagccacctgccacctcgcttcttacggtcattcttcctgggtcaaggcctgagtgccctgctgccctgcgtgctggccctagtgcagggtgtgggccgcctcgagtgcccgccagcccccatcaacggcacccctggccccccgctcgacttccttgagcgttttcccgccagcaccttcttctgggcactgactgcccttctggtcgcttcagctgctgccttccagggtcttctgctgctgttgccgccaccaccatctgtacccacaggggagttaggatcaggcctccaggtgggagccccaggagcagaggaagaggtggaagagtcctcaccactgcaagagccaccaagccaggcagcaggcaccacccctggtccagaccctaaggcctatcagcttctatcagcccgcagtgcctgcctgctgggcctgttggccgccaccaacgcgctgaccaatggcgtgctgcctgccgtgcagagcttttcctgcttaccctacgggcgtctggcctaccacctggctgtggtgctgggcagtgctgccaatcccctggcctgcttcctggccatgggtgtgctgtgcaggtccttggcagggctgggcggcctctctctgctgggcgtgttctgtgggggctacctgatggcgctggcagtcctgagcccctgcccgcccctggtgggcacctcggcgggggtggtcctcgtggtgctgtcgtgggtgctgtgtcttggcgtgttctcctacgtgaaggtggcagccagctccctgctgcatggcgggggccggccggcattgctggcagccggcgtggccatccaggtgggctctctgctcggcgctgttgctatgttccccccgaccagcatctatcacgtgttccacagcagaaaggactgtgcagacccctgtgactcctgagcctgggcaggtggggaccccgctccccaacacctgtctttccctcaatgctgccaccatgcctgagtgcctgcagcccaggaggcccgcacaccggtacactcgtggacacctacacactccataggagatcctggctttccagggtgggcaagggcaaggagcaggcttggagccagggaccagtgggggctgtagggtaagcccctgagcctgggacctacatgtggtttgcgtaataaaacatttgtatttaaaaaaaaaaaaaaaaaaaaaaaaaaaaaaaaaaaaaaaaaaaaaaaaaaaacaaaacaacaaacaaaaaaaaaaaaaaaaaaaaaaaaaaagggggggcgccccaaaattcccccccgcggacgggacccaaacataactataggacgctccccacctaattcgttttaggtaaaaagcagggcgccccagaaagagagcgggactcactatataataacacgacgccgacgacgcaggggcgatttacaacaacacagcccgttggcgagagaaccacaccacgcctcgcacggtcgcactattagtggagagcggccacccccactcttctgggggaggcaacaacaatggcagggccacacccacacggaagagttacaggccgccaggggagaaacaaacacaagcagcgacgtattcttgagacccacacgaac

SEQ ID NO: 20099 - DNA, 2042 bp, Homo sapiens
acttccggtcgtgggccatgccgggggcgggcccggaaccgccacgggtgagtcgggtcgtggctgctgccgggtcctgcgcgctccggactgaggtggcgtccctgggccggacggcggtgtcccggcgtggcgggaagccggcactggagcgggagcgcactgggcgcgggaccgggaggcgcagggaccggacggctcccgagtcgcccacctgacggtaccgagagggcggcgcccctccgagcagagccgtcccggccactcccctgggatctgacttggctcttgcggtcgcgggcaccgtgaagccctggggtgtgcgtggctcctcctgctagaagaagtcttcacttcccaggagagccaaagcgtgtctggccctaggtgggaaaagaactggctgtgacctttgccctgacctggaagggcccagccttgggctgaatggcagcacccacgcccgcccgtccggtgctgacccacctgctggtggctctcttcggcatgggctcctgggctgcggtcaatgggatctgggtggagctacctgtggtggtcaaagagcttccagagggttggagcctcccctcttacgtctctgtgcttgtggctctggggaacctgggtctgctggtggtgaccctctggaggaggctggccccaggaaaggacgagcaggtccccatccgggtggtgcaggtgctgggcatggtgggcacagccctgctggcctctctgtggcaccatgtggccccagtggcaggacagttgcattctgtggccttcttagcactggcctttgtgctggcactggcatgctgtgcctcgaatgtcactttcctgcccttcttgagccacctgccacctcgcttcttacggtcattcttcctgggtcaaggcctgagtgccctgctgccctgcgtgctggccctagtgcagggtgtgggccgcctcgagtgcccgccagcccccatcaacggcacccctggccccccgctcgacttccttgagcgttttcccgccagcaccttcttctgggcactgactgcccttctggtcgcttcagctgctgccttccagggtcttctgctgctgttgccgccaccaccatctgtacccacaggggagttaggatcaggcctccaggtgggagccccaggagcagaggaagaggtggaagagtcctcaccactgcaagagccaccaagccaggcagcaggcaccacccctggtccagaccctaaggcctatcagcttctatcagcccgcagtgcctgcctgctgggcctgttggccgccaccaacgcgctgaccaatggcgtgctgcctgccgtgcagagcttttcctgcttaccctacgggcgtctggcctaccacctggctgtggtgctgggcagtgctgccaatcccctggcctgcttcctggccatgggtgtgctgtgcaggtccttggcagggctgggcggcctctctctgctgggcgtgttctgtgggggctacctgatggcgctggcagtcctgagcccctgcccgcccctggtgggcacctcggcgggggtggtcctcgtggtgctgtcgtgggtgctgtgtcttggcgtgttctcctacgtgaaggtggcagccagctccctgctgcatggcgggggccggccggcattgctggcagccggcgtggccatccaggtgggctctctgctcggcgctgttgctatgttccccccgaccagcatctatcacgtgttccacagcagaaaggactgtgcagacccctgtgactcctgagcctgggcaggtggggaccccgctccccaacacctgtctttccctcaatgctgccaccatgcctgagtgcctgcagcccaggaggcccgcacaccggtacactcgtggacacctacacactccataggagatcctggctttccagggtgggcaagggcaaggagcaggcttggagccagggaccagtgggggctgtagggtaagcccctgagcctgggacctacatgtggtttgcgtaataaaacatttgtatttaa

SEQ ID NO: 20100 - DNA, 2000 bp, Homo sapiens
aaaataaactagtagagcgcggttaatcggacgggcccggaaccgccacgggtgagtcgggtcgtggctgctgccgggtcctgcgcgctccggactgaggtggcgtccctgggccggacggcggtgtcccggcgtggcgggaagccggcactggagcgggagcgcactgggcgcgggaccgggaggcgcagggaccggacggctcccgagtcgcccacctgacggtaccgagagggcggcgcccctccgagcagagccgtcccggccactcccctgggatctgacttggctcttgcggtcgcgggcaccgtgaagccctggggtgtgcgtggctcctcctggtaggcgccctttcccggcgtccggcttggggtggtggtggcgttgactccagccccgcctctccctggagaggagggctccactcgctccttcggcctcctcccctggggccgcagcgactcgggccggcttcctgcttccctgcctgccggcggtcccgctggctagaagaagtcttcacttcccaggagagccaaagcgtgtctggccctaggtgggaaaagaactggctgtgacctttgccctgacctggaagggcccagccttgggctgaatggcagcacccacgcccgcccgtccggtgctgacccacctgctggtggctctcttcggcatgggctcctgggctgcggtcaatgggatctgggtggagctacctgtggtggtcaaagagcttccagagggttggagcctcccctcttacgtctctgtgcttgtggctctggggaacctgggtctgctggtggtgaccctctggaggaggctggccccaggaaaggacgagcaggtccccatccgggtggtgcaggtgctgggcatggtgggcacagccctgctggcctctctgtggcaccatgtggccccagtggcaggacagttgcattctgtggccttcttagcactggcctttgtgctggcactggcatgctgtgcctcgaatgtcactttcctgcccttcttgagccacctgccacctcgcttcttacggtcattcttcctgggtcaaggcctgagtgccctgctgccctgcgtgctggccctagtgcagggtgtgggccgcctcgagtgcccgccagcccccatcaacggcacccctggccccccgctcgacttccttgagcgttttcccgccagcaccttcttctgggcactgactgcccttctggtcgcttcagctgctgccttccagggtcttctgctgctgttgccgccaccaccatctgtacccacaggggagttaggatcaggcctccaggtgggagccccaggagcagaggaagaggtggaagagtcctcaccactgcaagagccaccaagccaggcagcaggcaccacccctggtccagaccctaaggcctatcagcttctatcagcccgcagtgcctgcctgctgggcctgttggccgccaccaacgcgctgaccaatggcgtgctgcctgccgtgcagagcttttcctgcttaccctacgggcgtctggcctaccacctggctgtggtgctgggcagtgctgccaatcccctggcctgcttcctggccatgggtgtgctgtgcaggtccttggcagggctgggcggcctctctctgctgggcgtgttctgtgggggctacctgatggcgctggcagtcctgagcccctgcccgcccctggtgggcacctcggcgggggtggtcctcgtggtgctgtcgtgggtgctgtgtcttggcgtgttctcctacgtgaaggtggcagccagctccctgctgcatggcgggggccggccggcattgctggcagccggcgtggccatccaggtgggctctctgctcggcgctgttgctatgttccccccgaccagcatctatcacgtgttccacagcagaaaggactgtgcagacccctgtgactcctgagcctgggacctacatgtggtttgcgtaataaaacatttgtatttaa

SEQ ID NO: 20101 - DNA, 1264 bp, Homo sapiens
aaaataaactagtagagcgcggttaatcggacgggcccggaaccgccacggctagaagaagtcttcacttcccaggagagccaaagcgtgtctggccctaggtgggaaaagaactggctgtgacctttgccctgacctggaagggcccagccttgggctgaatggcagcacccacgcccgcccgtccggtgctgacccacctgctggtggctctcttcggcatgggctcctgggctgcggtcaatgggatctgggtggagctacctgtggtggtcaaagagcttccagaggctgctgccttccagggtcttctgctgctgttgccgccaccaccatctgtacccacaggggagttaggatcaggcctccaggtgggagccccaggagcagaggaagaggtggaagagtcctcaccactgcaagagccaccaagccaggcagcaggcaccacccctggtccagaccctaaggcctatcagcttctatcagcccgcagtgcctgcctgctgggcctgttggccgccaccaacgcgctgaccaatggcgtgctgcctgccgtgcagagcttttcctgcttaccctacgggcgtctggcctaccacctggctgtggtgctgggcagtgctgccaatcccctggcctgcttcctggccatgggtgtgctgtgcaggtccttggcagggctgggcggcctctctctgctgggcgtgttctgtgggggctacctgatggcgctggcagtcctgagcccctgcccgcccctggtgggcacctcggcgggggtggtcctcgtggtgctgtcgtgggtgctgtgtcttggcgtgttctcctacgtgaaggtggcagccagctccctgctgcatggcgggggccggccggcattgctggcagccggcgtggccatccaggtgggctctctgctcggcgctgttgctatgttccccccgaccagcatctatcacgtgttccacagcagaaaggactgtgcagacccctgtgactcctgagcctgggcaggtggggaccccgctccccaacacctgtctttccctcaatgctgccaccatgcctgagtgcctgcagcccaggaggcccgcacaccggtacactcgtggacacctacacactccataggagatcctggctttccagggtgggcaagggcaaggagcaggcttggagccagggaccagtgggggctgtagggtaagcccctgagcctgggacctacatgtggtttgcgtaataaaacatttgtatttaa

SEQ ID NO: 20102 - DNA, 1212 bp, Homo sapiens
acttccggtcgtgggccatgccgggggcgggcccggaaccgccacgggtgagtcgggtcgtggctgctgccgggtcctgcgcgctccggactgaggtggcgtccctgggccggacggcggtgtcccggcgtggcgggaagccggcactggagcgggagcgcactgggcgcgggaccgggaggcgcagggaccggacggctcccgagtcgcccacctgacggtaccgagagggcggcgcccctccgagcagagccgtcccggccactcccctgggatctgacttggctcttgcggtcgcgggcaccgtgaagccctggggtgtgcgtggctcctcctggtaggcgccctttcccggcgtccggcttggggtggtggtggcgttgactccagccccgcctctccctggagaggagggctccactcgctccttcggcctcctcccctggggccgcagcgactcgggccggcttcctgcttccctgcctgccggcggtcccgctggctagaagaagtcttcacttcccaggagagccaaagcgtgtctggccctaggtgggaaaagaactggctgtgacctttgccctgacctggaagggcccagccttgggctgaatggcagcacccacgcccgcccgtccggtgctgacccacctgctggtggctctcttcggcatgggctcctgggctgcggtcaatgggatctgggtggagctacctgtggtggtcaaagagcttccagagggtgctgtcgtgggtgctgtgtcttggcgtgttctcctacgtgaaggtggcagccagctccctgctgcatggcgggggccggccggcattgctggcagccggcgtggccatccaggtgggctctctgctcggcgctgttgctatgttccccccgaccagcatctatcacgtgttccacagcagaaaggactgtgcagacccctgtgactcctgagcctgggcaggtggggaccccgctccccaacacctgtctttccctcaatgctgccaccatgcctgagtgcctgcagcccaggaggcccgcacaccggtacactcgtggacacctacacactccataggagatcctggctttccagggtgggcaagggcaaggagcaggcttggagccagggaccagtgggggctgtagggtaagcccctgagcctgggacctacatgtggtttgcgtaataaaacatttgtatttaa

SEQ ID NO: 20103 - DNA, 831 bp, Homo sapiens
  misc_feature (10)..(10): n is a, c, g, or t
ggcgcccttncctggggtagaggtttttacctgggatcgggccggaaccgccacggctagaagaagtcttcacttcccaggagagccaaagcgtgtctggccctaggtgggaaaagaactggctgtgacctttgccctgacctggaagggcccagccttgggctgaatggcagcacccacgcccgcccgtccggtgctgacccacctgctggtggctctcttcggcatgggctcctgggctgcggtcaatgggatctgggtggagctacctgtggtggtcaaagagcttccagagggttggagcctcccctcttacgtctctgtgcttgtggctctggggaacctgggtctgctggtggtgaccctctggaggaggctggccccaggaaaggacgagcaggtccccatccgggtggtgcaggtgctgggcatggtgggcacagccctgctggcctctctgtggcaccatgtggccccagtggcaggacagttgcattctgtggccttcttagcactggcctttgtgctggcactggcatgctgtgcctcgaatgtcactttcctgcccttcttgagccacctgccacctcgcttcttacggtcattcttcctgggtcaaggcctgagtgccctgctgccctgcgtgctggccctagtgcagggtgtgggccgcctcgagtgcccgccagcccccatcaacggcacccctggctttccagggtgggcaagggcaaggagcaggcttggagccagggaccagtgggggctgtagggtaagcccctgagcctgggacctacatgtggtttgcgtaataaaacatttgtatttaa

SEQ ID NO: 20104 - DNA, 767 bp, Homo sapiens
gggtcctgcgcgctccggactgaggtggcgtccctgggccggacggcggtgtcccggcgtggcgggaagccggcactggagcgggagcgcactgggcgcgggaccgggaggcgcagggaccggacggctcccgagtcgcccacctgacggtaccgagagggcggcgcccctccgagcagagccgtcccggccactcccctgggatctgacttggctcttgcggtcgcgggcaccgtgaagccctggggtgtgcgtggctcctcctggtaggcgccctttcccggcgtccggcttggggtggtggtggcgttgactccagccccgcctctccctggagaggagggctccactcgctccttcggcctcctcccctggggccgcagcgactcgggccggcttcctgcttccctgcctgccggcggtcccgctgggtacgttttagccaatcctccccatctgcgctcctgcccggggctcccccagttcccctggtctcaccctgttctgactccggctctgcatcctatctgtttctctgtttctttcaagctagaagaagtcttcacttcccaggagagccaaagcgtgtctggccctaggtgggaaaagaactggctgtgacctttgccctgacctggaagggcccagccttgggctgaatggcagcacccacgcccgcccgtccggtgctgacccacctgctggtggctctcttcggcatgggctcctgggctgcggtcaatgggatctgggtggagctacctgtg

SEQ ID NO: 20105 - DNA, 1752 bp, Homo sapiens
acttccggtcgtgggccatgccgggggcgggcccggaaccgccacggctagaagaagtcttcacttcccaggagagccaaagcgtgtctggccctaggtgggaaaagaactggctgtgacctttgccctgacctggaagggcccagccttgggctgaatggcagcacccacgcccgcccgtccggtgctgacccacctgctggtggctctcttcggcatgggctcctgggctgcggtcaatgggatctgggtggagctacctgtggtggtcaaagagcttccagagggttggagcctcccctcttacgtctctgtgcttgtggctctggggaacctgggtctgctggtggtgaccctctggaggaggctggccccaggaaaggacgagcaggtccccatccgggtggtgcaggtgctgggcatggtgggcacagccctgctggcctctctgtggcaccatgtggccccagtggcaggacagttgcattctgtggccttcttagcactggcctttgtgctggcactggcatgctgtgcctcgaatgtcactttcctgcccttcttgagccacctgccacctcgcttcttacggtcattcttcctgggtcaaggcctgagtgccctgctgccctgcgtgctggccctagtgcagggtgtgggccgcctcgagtgcccgccagcccccatcaacggcacccctggccccccgctcgacttccttgagcgttttcccgccagcaccttcttctgggcactgactgcccttctggtcgcttcagctgctgccttccagggtcttctgctgctgttgccgccaccaccatctgtacccacaggggagttaggatcaggcctccaggtgggagccccaggagcagaggaagaggtggaagagtcctcaccactgcaagagccaccaagccaggcagcaggcaccacccctggtccagaccctaaggcctatcagcttctatcagcccgcagtgcctgcctgctgggcctgttggccgccaccaacgcgctgaccaatggcgtgctgcctgccgtgcagagcttttcctgcttaccctacgggcgtctggcctaccacctggctgtggtgctgggcagtgctgccaatcccctggcctgcttcctggccatgggtgtgctgtgcaggtccttggcagggctgggcggcctctctctgctgggcgtgttctgtgggggctacctgatggcgctggcagtcctgagcccctgcccgcccctggtgggcacctcggcgggggtggtcctcgtggtgctgtcgtgggtgctgtgtcttggcgtgttctcctacgtgaaggtggcagccagctccctgctgcatggcgggggccggccggcattgctggcagccggcgtggccatccaggtgggctctctgctcggcgctgttgctatgttccccccgaccagcatctatcacgtgttccacagcagaaaggactgtgcagacccctgtgactcctgagcctgggcaggtggggaccccgctccccaacacctgtctttccctcaatgctgccaccatgcctgagtgcctgcagcccaggaggcccgcacaccggtacactcgtggacacctacacactccataggagatcctggctttccagggtgggcaagggcaaggagcaggcttggagccagggaccagtgggggctgtagggtaagcccctgagcctgggacctacatgtggtttgcgtaataaaacatttgtatttaa

SEQ ID NO: 20106 - DNA, 1929 bp, Homo sapiens
aaaataaactagtagagcgcggttaatcggacgggcccggaaccgccacgggtgagtcgggtcgtggctgctgccgggtcctgcgcgctccggactgaggtggcgtccctgggccggacggcggtgtcccggcgtggcgggaagccggcactggagcgggagcgcactgggcgcgggaccgggaggcgcagggaccggacggctcccgagtcgcccacctgacgctagaagaagtcttcacttcccaggagagccaaagcgtgtctggccctaggtgggaaaagaactggctgtgacctttgccctgacctggaagggcccagccttgggctgaatggcagcacccacgcccgcccgtccggtgctgacccacctgctggtggctctcttcggcatgggctcctgggctgcggtcaatgggatctgggtggagctacctgtggtggtcaaagagcttccagagggttggagcctcccctcttacgtctctgtgcttgtggctctggggaacctgggtctgctggtggtgaccctctggaggaggctggccccaggaaaggacgagcaggtccccatccgggtggtgcaggtgctgggcatggtgggcacagccctgctggcctctctgtggcaccatgtggccccagtggcaggacagttgcattctgtggccttcttagcactggcctttgtgctggcactggcatgctgtgcctcgaatgtcactttcctgcccttcttgagccacctgccacctcgcttcttacggtcattcttcctgggtcaaggcctgagtgccctgctgccctgcgtgctggccctagtgcagggtgtgggccgcctcgagtgcccgccagcccccatcaacggcacccctggccccccgctcgacttccttgagcgttttcccgccagcaccttcttctgggcactgactgcccttctggtcgcttcagctgctgccttccagggtcttctgctgctgttgccgccaccaccatctgtacccacaggggagttaggatcaggcctccaggtgggagccccaggagcagaggaagaggtggaagagtcctcaccactgcaagagccaccaagccaggcagcaggcaccacccctggtccagaccctaaggcctatcagcttctatcagcccgcagtgcctgcctgctgggcctgttggccgccaccaacgcgctgaccaatggcgtgctgcctgccgtgcagagcttttcctgcttaccctacgggcgtctggcctaccacctggctgtggtgctgggcagtgctgccaatcccctggcctgcttcctggccatgggtgtgctgtgcaggtccttggcagggctgggcggcctctctctgctgggcgtgttctgtgggggctacctgatggcgctggcagtcctgagcccctgcccgcccctggtgggcacctcggcgggggtggtcctcgtggtgctgtcgtgggtgctgtgtcttggcgtgttctcctacgtgaaggtggcagccagctccctgctgcatggcgggggccggccggcattgctggcagccggcgtggccatccaggtgggctctctgctcggcgctgttgctatgttccccccgaccagcatctatcacgtgttccacagcagaaaggactgtgcagacccctgtgactcctgagcctgggcaggtggggaccccgctccccaacacctgtctttccctcaatgctgccaccatgcctgagtgcctgcagcccaggaggcccgcacaccggtacactcgtggacacctacacactccataggagatcctggctttccagggtgggcaagggcaaggagcaggcttggagccagggaccagtgggggctgtagggtaagcccctgagcctgggacctacatgtggtttgcgtaataaaacatttgtatttaa

SEQ ID NO: 20107 - DNA, 2246 bp, Homo sapiens
aaaataaactagtagagcgcggttaatcggacgggcccggaaccgccacgggtgagtcgggtcgtggctgctgccgggtcctgcgcgctccggactgaggtggcgtccctgggccggacggcggtgtcccggcgtggcgggaagccggcactggagcgggagcgcactgggcgcgggaccgggaggcgcagggaccggacggctcccgagtcgcccacctgacggtaccgagagggcggcgcccctccgagcagagccgtcccggccactcccctgggatctgacttggctcttgcggtcgcgggcaccgtgaagccctggggtgtgcgtggctcctcctggtaggcgccctttcccggcgtccggcttggggtggtggtggcgttgactccagccccgcctctccctggagaggagggctccactcgctccttcggcctcctcccctggggccgcagcgactcgggccggcttcctgcttccctgcctgccggcggtcccgctggctagaagaagtcttcacttcccaggagagccaaagcgtgtctggccctaggtgggaaaagaactggctgtgacctttgccctgacctggaagggcccagccttgggctgaatggcagcacccacgcccgcccgtccggtgctgacccacctgctggtggctctcttcggcatgggctcctgggctgcggtcaatgggatctgggtggagctacctgtggtggtcaaagagcttccagagggttggagcctcccctcttacgtctctgtgcttgtggctctggggaacctgggtctgctggtggtgaccctctggaggaggctggccccaggaaaggacgagcaggtccccatccgggtggtgcaggtgctgggcatggtgggcacagccctgctggcctctctgtggcaccatgtggccccagtggcaggacagttgcattctgtggccttcttagcactggcctttgtgctggcactggcatgctgtgcctcgaatgtcactttcctgcccttcttgagccacctgccacctcgcttcttacggtcattcttcctgggtcaaggcctgagtgccctgctgccctgcgtgctggccctagtgcagggtgtgggccgcctcgagtgcccgccagcccccatcaacggcacccctggccccccgctcgacttccttgagcgttttcccgccagcaccttcttctgggcactgactgcccttctggtcgcttcagctgctgccttccagggtcttctgctgctgttgccgccaccaccatctgtacccacaggggagttaggatcaggcctccaggtgggagccccaggagcagaggaagaggtggaagagtcctcaccactgcaagagccaccaagccaggcagcaggcaccacccctggtccagaccctaaggcctatcagcttctatcagcccgcagtgcctgcctgctgggcctgttggccgccaccaacgcgctgaccaatggcgtgctgcctgccgtgcagagcttttcctgcttaccctacgggcgtctggcctaccacctggctgtggtgctgggcagtgctgccaatcccctggcctgcttcctggccatgggtgtgctgtgcaggtccttggcagggctgggcggcctctctctgctgggcgtgttctgtgggggctacctgatggcgctggcagtcctgagcccctgcccgcccctggtgggcacctcggcgggggtggtcctcgtggtgctgtcgtgggtgctgtgtcttggcgtgttctcctacgtgaaggtggcagccagctccctgctgcatggcgggggccggccggcattgctggcagccggcgtggccatccaggtgggctctctgctcggcgctgttgctatgttccccccgaccagcatctatcacgtgttccacagcagaaaggactgtgcagacccctgtgactcctgagcctgggcaggtggggaccccgctccccaacacctgtctttccctcaatgctgccaccatgcctgagtgcctgcagcccaggaggcccgcacaccggtacactcgtggacacctacacactccataggagatcctggctttccagggtgggcaagggcaaggagcaggcttggagccagggaccagtgggggctgtagggtaagcccctgagcctgggacctacatgtggtttgcgtaataaaacatttgtatttaaatgagttggcattaattctttgagcacatctctct

SEQ ID NO: 20108 - DNA, 1518 bp, Homo sapiens
cttaggtctagagttacgagggactggtttaatcggcgaggagcttccagagggttggagcctcccctcttacgtctctgtgcttgtggctctggggaacctgggtctgctggtggtgaccctctggaggaggctggccccaggaaaggacgagcaggtccccatccgggtggtgcaggtgctgggcatggtgggcacagccctgctggcctctctgtggcaccatgtggccccagtggcaggacagttgcattctgtggccttcttagcactggcctttgtgctggcactggcatgctgtgcctcgaatgtcactttcctgcccttcttgagccacctgccacctcgcttcttacggtcattcttcctgggtcaaggcctgagtgccctgctgccctgcgtgctggccctagtgcagggtgtgggccgcctcgagtgcccgccagcccccatcaacggcacccctggccccccgctcgacttccttgagcgttttcccgccagcaccttcttctgggcactgactgcccttctggtcgcttcagctgctgccttccagggtcttctgctgctgttgccgccaccaccatctgtacccacaggggagttaggatcaggcctccaggtgggagccccaggagcagaggaagaggtggaagagtcctcaccactgcaagagccaccaagccaggcagcaggcaccacccctggtccagaccctaaggcctatcagcttctatcagcccgcagtgcctgcctgctgggcctgttggccgccaccaacgcgctgaccaatggcgtgctgcctgccgtgcagagcttttcctgcttaccctacgggcgtctggcctaccacctggctgtggtgctgggcagtgctgccaatcccctggcctgcttcctggccatgggtgtgctgtgcaggtccttggcagggctgggcggcctctctctgctgggcgtgttctgtgggggctacctgatggcgctggcagtcctgagcccctgcccgcccctggtgggcacctcggcgggggtggtcctcgtggtgctgtcgtgggtgctgtgtcttggcgtgttctcctacgtgaaggtggcagccagctccctgctgcatggcgggggccggccggcattgctggcagccggcgtggccatccaggtgggctctctgctcggcgctgttgctatgttccccccgaccagcatctatcacgtgttccacagcagaaaggactgtgcagacccctgtgactcctgagcctgggcaggtggggaccccgctccccaacacctgtctttccctcaatgctgccaccatgcctgagtgcctgcagcccaggaggcccgcacaccggtacactcgtggacacctacacactccataggagatcctggctttccagggtgggcaagggcaaggagcaggcttggagccagggaccagtgggggctgtagggtaagcccctgagcctgggacctacatgtggtttgcgtaataaaacatttgtatttaa

SEQ ID NO: 20109 - DNA, 1281 bp, Homo sapiens
aaaataaactagtagagcgcggttaatcggacgggcccggaaccgccacgggtgagtcgggtcgtggctgctgccgggtcctgcgcgctccggactgaggtggcgtccctgggccggacggcggtgtcccggcgtggcgggaagccggcactggagcgggagcgcactgggcgcgggaccgggaggcgcagggaccggacggctcccgagtcgcccacctgacggtaccgagagggcggcgcccctccgagcagagccgtcccggccactcccctgggatctgacttggctcttgcggtcgcgggcaccgtgaagccctggggtgtgcgtggctcctcctggtaggcgccctttcccggcgtccggcttggggtggtggtggcgttgactccagccccgcctctccctggagaggagggctccactcgctccttcggcctcctcccctggggccgcagcgactcgggccggcttcctgcttccctgcctgccggcggtcccgctggctagaagaagtcttcacttcccaggagagccaaagcgtgtctggccctaggtgggaaaagaactggctgtgacctttgccctgacctggaagggcccagccttgggctgaatggcagcacccacgcccgcccgtccggtgctgacccacctgctggtggctctcttcggcatgggctcctgggctgcggtcaatgggatctgggtggagctacctgtggtggtcaaagagcttccagagggttggagcctcccctcttacgtctctgtgcttgtggctctggggaacctgggtctgctggtggtgaccctctggaggaggctggccccaggaaaggacgagcaggtccccatccgggtggtgcaggtgctgggcatggtgggcacagccctgctggcctctctgtggcaccatgtggccccagtggcaggacagttgcattctgtggccttcttagcactggcctttgtgctggcactggcatgctgtgcctcgaatgtcactttcctgcccttcttgagccacctgccacctcgcttcttacggtcattcttcctgggtcaaggcctgagtgccctgctgccctgcgtgctggccctagtgcagggtgtgggccgcctcgagtgcccgccagcccccatcaacggcacccctggctttccagggtgggcaagggcaaggagcaggcttggagccagggaccagtgggggctgtagggtaagcccctgagcctgggacctacatgtggtttgcgtaataaaacatttgtatttaa

SEQ ID NO: 20110 - DNA, 637 bp, Homo sapiens
aaaataaactagtagagcgcggttaatcggacgggcccggaaccgccacgggtgagtcgggtcgtggctgctgccgggtcctgcgcgctccggactgaggtggcgtccctgggccggacggcggtgtcccggcgtggcgggaagccggcactggagcgggagcgcactgggcgcgggaccgggaggcgcagggaccggacggctcccgagtcgcccacctgacggtaccgagagggcggcgcccctccgagcagagccgtcccggccactcccctgggatctgacttggctcttgcggcgctgttgctatgttccccccgaccagcatctatcacgtgttccacagcagaaaggactgtgcagacccctgtgactcctgagcctgggcaggtggggaccccgctccccaacacctgtctttccctcaatgctgccaccatgcctgagtgcctgcagcccaggaggcccgcacaccggtacactcgtggacacctacacactccataggagatcctggctttccagggtgggcaagggcaaggagcaggcttggagccagggaccagtgggggctgtagggtaagcccctgagcctgggacctacatgtggtttgcgtaataaaacatttgtatttaa

SEQ ID NO: 20111 - DNA, 446 bp, Homo sapiens
gccgactactactactactaaattcgcggccggtcgacagaattttttgaagactcagattcatcaagttatattatgtcacagaacagaatggacatatttccattttacatacaaaatgatctgcttatttgggagtatctgaattagacaaattctcggccgggcgcggggctcacgcttgtaatcccagcactttgggaggccgaggcgggcggatcacgaggtcaggagatcgagaccatcctggctaacacggtgaaaccccgtctctactaaaaatacaaaaaaaattagccgggcgtgatggtgggcacctgtagtcccagctactcgggaggctgaggcaggagaatggcgtgaaccctggaggcggagcttgcagtgagccgagattgcgccactgcactcccgcctgggccacagagcgagactccgtctcaaaa

SEQ ID NO: 20112 - DNA, 256 bp, Homo sapiens
acactgaagaagtccgtttgtaattgttggtcgcaacactgtcattcttttggagtcttagtgacaggttaatgggtaagatactttagggacaggggacagcccctgtgggccttcaagtcatacccctccctgcctggtgccccttactagctgtggattatccactgtaaaacttgtctcttgggtgggggaagtttgcctggcaacacctactaacacctatatggcgtgcagtccctttgcctgccccagg

SEQ ID NO: 20113 - DNA, 467 bp, Homo sapiens
ccaggctggagtgcagtgacggaatcttggctcactgcaacctctgcctcccaggtcaaagtgattctcctgcctcagcctcccaagtagctgggactacaggtgcccgccaccgcacccagctaccagaagaaaactttcacacagcctacctaagcttatgttcaagagtctctcttgaaatccaggaagaggctgatattccaagagtgatttaattgtgggatcctcctgaagcagatgaataggaacagctatttaaattgatgtaattttattatgacctccttcacagtggttttcaggtaaccctgctttcttagttaataatgaggttctgtgacccaggtaaccttgatgcacagatgagataatgtggggattcactgatgcaaaatcagaggcaatcctttcataagtagaggtgcctctggccccagttgtttagatctcctttggccaaaaaa

SEQ ID NO: 20114 - DNA, 244 bp, Homo sapiens
taacatatgaccaaatgtctgggcacctggggcccagtcaagtcggcacataaaattaactatcacagaagggtgtggaacctgggggtatgagtcactggggccgttagtgtaaccatttgccacaggcagacttgtttgggttataattctttcctgtaaatcttattcatctctgtatccccaatgcctagtatgatctctgacttatagtaggtgatcattaatgtttgttgaaagagcg

SEQ ID NO: 20115 - DNA, 375 bp, Homo sapiens
agagttggttaggttaagtggggatcttgttttgatggaccacccagtattttagacattatctattttttcaatatcgttttcaaagaaataaattatactgaggaaatttaatgtgttactaaagaatagaaaatatactaaattttatttgagggtcattctctttctaaaataatcataatagctattaaaagttttcatgtgagcatattttctttaatttgtttcataagctgttttgtaggaaagtgttacaaaaacatttgtacttggcgtgagcccgggaggcggagcttgcagtgagtggagatcgcgccactgcactccatccagcctgggcgacagagcgagactccgtctcaaaaaaaaaaa

SEQ ID NO: 20116 - DNA, 419 bp, Homo sapiens
gtgtcagagcctttacctggaccttcgcatgaaaaaggaaacagaatagtcaatggacaaggagaagggcctcctgcaaaacatccttccttgaagcctaccactggagtggaagatcctgctgtgaaaggagcagtacaaagaaagaatgtacagacattgagagcagaacaagccttaccagtggcttcagaggaagagcaagaaaggcatgaaagaagtgaaaagaagcaaccacaggtcaaaaaaggaaataatacaaacaaaagtgaaaaaatacaactttcagaaaatatatgtgatagtacatcttctgctgctgctggcagattaacccaacaaagaaagattgggaaaacgtatcctcagcaatttcccaagaagctgaaggaagagcatgataagtaagcctatagcag

SEQ ID NO: 20117 - DNA, 363 bp, Homo sapiens
ttgcgtcagtggaaggtgaccgggccaggggcctaaggccctggtacatgttaagtcccagctctgcactggccacacaccgggtggttaccatccttcccagagcagccactaatatccccggtgtaaggaccagcacacttacccaaggccatgtggagtgaggagcaggactgcctggcccagaactgccgcctccccaccccaggctgccacctccatgcagacagcctggtcaggaaggcaaatgtgccagtctttgcaggaaggacagagggacttgtgaggcctcgggagtctcagtgacccactcgagagcatccagggacgagtcccgggcagtaaatcagaccgtaatgatca

SEQ ID NO: 20118 - DNA, 259 bp, Homo sapiens
tggattccaagtctttgctattgtgaatagtgccgtaataaacatacgtgtgcatgtgtctttatagcagcatgatttataatcgtttgggtatatacccagtaatgggatggctggggcaagaccccatttcaaaaaaagagaaagaaaattcgtgtagtcccagctgctcgcgaggctaaggtgggaggcggaagttgcagtgagctgagatcacaccactgcactgtagcctgggtgacagaacgagacccgtctc

SEQ ID NO: 20119 - DNA, 106 bp, Homo sapiens
ttccaggcacctgccaccatgcctggctaacaattttagtttttaaaacttaaagaaatgtgtgtgcatttctcatttacaggcttccttcctctattcagcttct

SEQ ID NO: 20120 - DNA, 452 bp, Homo sapiens
aaatcttcaaagagaaatggacaaatacaaaataatactggggagcttgaacacacataattagcttatgacagatcgtggagatgaaaattttttttgtaagtgaagtttaaaaacacctgggaataatacaagtaatgaggttgatgtggggtgtgtgtggctgtgtgtgtgtgtctgtgtgtgtgcatgcatgcataagcctatatgggttaaacttaaaaaaaaaaccctttccaaaagaccatagaaaattttttcatacagctttattcagatataatttacccatttaaaatatgtaaggctgggcacagtggctcatgtctataatcccagcactttgggaagctagggtgggtggatcacttgagatcaggagttcaagaccagcatggtcaacatggcgaaaccccgtctctactgaaaatacaaaatatagccgggcatgg

SEQ ID NO: 20121 - DNA, 349 bp, Homo sapiens
gagctgtggattgggagtgaacactacataaaatttgcagggtatcccaggacacccctcagtctttaatacaaaccaatttagttactctggagtgaaatgacttgtggatacactgttcaaccatgacttcctttatgacaaggagcacttatacatgtttccaaatgtgaattagcccttgaattagtttgaaaactgctacttgaataacttttgaagagaaagattttctttccggtaattttactccctaaaaaaggcaaaatactcagatgttcaatgtgaaattacaaatagttgtttgaagtatatatacttcaataaatagttctttgtgtatataaag

SEQ ID NO: 20122 - DNA, 513 bp, Homo sapiens
ttgctcattgggctatggttatgtaaggtgatgacactgggggaagctgggtgaagagtacacaggaactctactattttacaacttctatgtcagtctaaagttatttcaaaagttaaaaaaaaaatcacctgggaatgtgatcctgccctattaactttggaacaccatcattcccactgccctcaccaggcatgtatggtgagccaggccccatgcctggggggcccatccagttcttacagagccctgggagatgggaccgttaaatgagctaatgtcaagcacttagcacagcgcctgggacaaaggaaaggcttggaaactgttagcaatgttatcacagtgttcccattttaaaatgaggaaacagcctcagagagctgaagtgatttggccaagtcacaaagctaaaaagcagctgacattgggtttaataccacattctccaactgaaaacttctgactacactagactcccctgctgtcatgttgacaaggattatttgtaaa

SEQ ID NO: 20123 - DNA, 204 bp, Homo sapiens
tcactgatttccagtgaacattcatttgtttgctttaaaaaataatctgctaaaaaaatagcattattcccataggatgggtatatctgaatataaattcatgtgcagtgtggctataataaaaacaatcatgaagtactttggagcttatataatctgcaagatcaaagctatattgtggtgtaataaaaaaagaaccaaaaa

SEQ ID NO: 20124 - DNA, 566 bp, Homo sapiens
tctagttcttacacagctaaaaaaaaaccacaacaaatttacaaattaaatacaaatgaaaccacaaaatgaatactattcaattaaaaatattatagtaatttaacgtgacaaatgatgtattttgctaaaactgtcatccgtcgtattgttactatggtgttgcctgctatagctcagcttcttttgtgttcaacatgcctatgccaccaagtgactcctgatatcttaattttctcaccatttttctgttacaactaccaaatagtgcaatctcatgatgcatttggctttcattttgtgcatgaaagtatcattgtcattttaaaaccacctctgttcttttctcattatcccagaacaataaaagcagcactaaaacacacatgtaaatgtgggtgctgaaattgtgtggcaatacttggttgtaaggtggtcacccaaataattcagaatatgcttatacaaatctaaaaaatatgaaaatgaaaataaaattaaaaccctagagaatacattcgcagacataatttgagaaaaactgttcaggtctgctggttcccaaa

SEQ ID NO: 20125 - DNA, 647 bp, Homo sapiens
cgctgggattacaggtgtgagacaccgcgcccagcccccgaatgctgattcttttatctgcttctgtattcaatctgttgtgatatgatgggtagcctctgaaacactccactgtatacttgtgaaagaatgaatgtgaaaaaggaaaatagatttgtagtattattatgcaaattgttttgacctcagagaccacttggaaatgttttagggaacccccagaggaccttggatcatgctttgagaaccgcggctctagatatgttactatttcagtagcatctaagtacatgtggctgctgagcacttgtaatgtggctagtgcaaatgagagacaggacttccagctatatgtaatttaacaaactcaaatttaaaaactggaacctcataaaatgttttgttgttgttgttaaacatgaccttatagttttggtaggaatacatttcactttaacccttcaaaatttagcatttgaattgagatatgctgtatatgttaaatacatgacagattttggggacttagaaaaaaataatgtaagatatttcattaatagtttttatattgagtatgttttgctatgataatatttttgatatattgggttaaataaaatgtattttaaaattaatttaagctatat

SEQ ID NO: 20126 - DNA, 774 bp, Homo sapiens
agtagagacagggtttcactgtgttagccaggatggtctccatctcctgaccttgtgatccacctgcctcagcctcccaaagagctgggattacaggtgtgagccaccgagcccggcccagccatattttttgatagactagtgtcaggctgctgctagtgagactagagggcaaatggggagcacgcctcaggtgagcgagctaaattagaagtgattttgattgctcgacactctgcttgaaggtggaactttgcaaggcttcatctctgatgtactacagaagagagcgccggttcttgccctgagtctgcttctggcagttgggtccctcatcgggtatagtcgtgagtattcttttgcaattactaattcctttgctcccctaatctggttggaataaggcatttgtttggagtcagtgaccagtgctggggagagcctggagaccagcttcaaggcccgatatgccacctttgcattgtcctgtgaatgcctgggaaacctgtcatcacatagttttatttgtcttgggaggaaactggcatctcttttgctttgttaatttgcttaaaagcttgcttgggagtgtatatgctttgtttgggggaggctccagaggcacagcattatagccaataaaacaataaaaagggaacaggtttcaaaagcggaaagatggtaattagtaggtttggtatattcccttaagatgctgctgagacaggagtagagcttttctttagcttttagaagtcttgttagcttgagcat

SEQ ID NO: 20127 - DNA, 599 bp, Homo sapiens
  misc_feature (592)..(592): n is a, c, g, or t
agtagagacagggtttcactgtgttagccaggatggtctccatctcctgaccttgtgatccacctgcctcagcctcccaaagagctgggattacaggtgtgagccaccgagcccggcccagccatattttttgatagactagtgtcaggctgctgctagtgagactagagggcaaatggggagcacgcctcaggtgagcgagctaaattagaagtgattttgattgctcgacactctgcttgaaggtggaactttgcaaggcttcatctctgatgtactacagaagagagcgccggttcttgccctgagtctgcttctggcagttgggtccctcatcgggtatagtcgttctccaaatgataagtccatcaatgcccttctgatgactgttacaggattttttattggtggaccttctaatatgattagttctgctatttctgcggacttgggtcgccaggagctcatccaaaggagcagtgaagctttggccactgtcacaggaattgtggatggttcggggagcattggagctgcagtggggccagtatttagggtctctgatccgggacaacccaggatgtgggacggnggtaccg

SEQ ID NO: 20128 - DNA, 444 bp, Homo sapiens
atctgtgaaaatcccacaggtatcatcatatttaatggtagaggactgaacacttcccccaagatcaggagcaagccaaggatgtccactgttaccacttctattcaatattatactgaacaaaattagtagaactaataaaccaaagttgcaggatataagatcaatatacaaaaaatgtcatttctatatataacatacaaacatcaattatatgtctatacactagcaatgaacaattcaaaaatgaaattaataagacatttccatttataatagcatcaaagagaataaaataggaagaaatctaacaaaagaagtgcaagaagctgggcatggtggcatgtgcctatagtcctagctactcaggaggctgaaatgggagaatctcttgagcccaggagttcaagtccagcctgggcaacatctcaagaccccatctta

SEQ ID NO: 20129 - DNA, 276 bp, Homo sapiens
gttctgctcctgggagtgacatggtcaggtccatgtggctgctccctgggaggctgcagtgaggagggctgcagtgaaaggacctttctcttccttgggcctccattcactctggcatctcaggcaatgactagctctttgagactcagtttcttcctctataaaatggaggcagaaatgccaccagcctcctagggctgctagaggcttgaacgactattgcagggaaccgtgccccacagagccgggtgctgggaagggcagccacggtcatcc

SEQ ID NO: 20130 - DNA, 387 bp, Homo sapiens
tcattttcttctgagaagcagcagtcacagagatgtagctaaaaagacaggacttggggtaattaggagcccaagtggcaaataaaggagtatttgacccattcaagctctgagagtacccaaactcagctcattcaggttgatggagaattggtagagaggcttcttcttaaaagtatctgcaatggaggaatatcccctcaatatggaatttcattccaaacaaattgcagaaatagggaaggattctgtcttataaaaaaaattgcatggtgatgataactgagcaagatatactatggtgagcgctcaaaagaaaaaagctaatgtatatatccaaagactactactattttcaccatccctgacttataattatttgcacct

SEQ ID NO: 20131 - DNA, 342 bp, Homo sapiens
acactaataacacatttgtatgaatataatccaaataaggttaaaccccattcatatttgacaatactattagcctgaagtccaaaagagacatattcacctttgttataataaaatgattttatttgacaacgattttattatatcaaacaagccaaatgtgtcttttttggacttcaagtttacctaatatcaaaaattaatgaggaccgaagttagagtttgattttggaaagttagtcaaatataaaaagcttaaaacacttgatatcacaaaatagaatcacaggttattgtaaaataagtcattcatttagtcaaagtgataactcaaagatttca

SEQ ID NO: 20132 - DNA, 441 bp, Homo sapiens
tgagactttctggagagaattaccatctgtccccagtttggatttatttcgtgcttctgattctaatgcaaatcaaaaagaattcaacagcctttatttctaccaaagagctggaaaaagtttaggacagaaaaggcaccatgaatcttcatttaactcaggagacaaggaatcattaacaggttttatgtgctcacaactaccacaattcaaaaaacgacgtctagcatatgaaaaagtccctggtagagttgatgggcagactcggctgaggtttttttgaaggaggagaagagcaatgttacatgccatattccactgtttttgatgctaatccactagcgcaattatttagatttgctcatacactaaagaaaacacaattgttcatatatgtctcagtatttctgtattaaatattcataatatgtaaaagcccta

SEQ ID NO: 20133 - DNA, 202 bp, Homo sapiens
cagaaacaaacaaacaaacaaaacaattgctttatagttcttatccacgatgaatcatttttcttctagattaaaaaagaaataatagattaaaaggaagtaatagagacaaacgagattcaatgttaggtgaaaaggatgaggcatcaatcactctactgttcaatagtgttaacgaaaaaaagaatccattggctgaaag

SEQ ID NO: 20134 - DNA, 478 bp, Homo sapiens
acactctcttcaataaatgctgctgggaaaattggatatccatatgcgaaataacaagactagaccttcacctctcaccctatacaaatacaataaatataaaatcaattaaaatgtataaaaaacctaaatgcaagatgtaaactaacactactagaggaaacatagagaaaacacttcaggacatttgtctgggaaaagattttatgaataagacctcacaaacataggcaacaaaagcaaaaataaacaaatgggattattgcaaatttaaaaacttctaaatgacaaaggaaacaaccaacagagtgaaaaagtaatctacaaattgggaaaaaatatttgtaaactacttatccaacaggggattaataaccaaattatagaagggatgcagacatctcaacagcaaaaaaccaaaacaaaagacaaaaaccaaaaaaaaaaagtcgacgcggccgcgaatttagtagtagta

SEQ ID NO: 20135 - DNA, 392 bp, Homo sapiens
ggtctaccttttcatttggaaccctctttgtcactgccatagtaacaaatggaaacattgagaacattttgtgacaggcactgtcattgttcccagtgaaatctcttcccctgtgtcttcccagtaaatgaaactgagaagaaaaatcataacaaataacatgaaagaggacctaatcaatatgttcccactgggctgtcaataccagcctgtgttaatctaatatgatttagtcatatgttttatggcagctgtgggaatatggacaggacctacaaatcatctttagactgaaagtgagtacacctttgacagattatgtgtaggcacttatatacaactctcagataaaagactagagacttcacccaagaaccaacattcttagaatt

SEQ ID NO: 20136 - DNA, 804 bp, Homo sapiens
tataccatcatgcatctggcaaacaggacaatgtgacgtccctctgtttcctaattggataccctttatttctttttcgtgcctgattgccctggccaggacttccacatactatgttgcataagagtcatgagtgagggcatcgttgtcttgtgctggtttcaaagtgttttgcccattcagtatgattttggctgtggttttgccataaatagctctgtatgtatttgtgagatacgttccaccatacctactttattgagagtttttagcaggaagggctgttgaattttgtcgaaagccttttctacatctattgagacacattatgtggtttttttaatcgttgattctgtttatgtgatggattacatgttattaatttgcatatgttgaaccagccttgccatcccaatgggtatgaggtgctgtcccactgtagttttggtttgcatttccctaatgattgatgacgttgagcgtcttctcatgttataaactcttcacgtgcttattggccacatctttgaagaaatgtctattcaaatacttgtccatttttgaatttttttttcctgttgctgagttttgagagttctctgtatattctggatcttaattacttatcagatatatgaattgcaaatgtttcctcccattctgtgggctgcatttttactgttaatactgtatttttatgcctaatttttaaagtgttcatgaagtcttgtttgcctgtttctttagttgcctgtgccttttgtgtcacagccaagaacgctgccaaatccaatgtcatgaggc

SEQ ID NO: 20137 - DNA, 885 bp, Homo sapiens
acatcaaaaagggatgaagatggacttgatggtattccttaccactttcctggctggatcacaacaggctgtctaggttgccttatcaaactgaatccgccttggcaatattatcactgagacgctgaaagatttttaacttaaccgactccatcgtgcttctaacctccttgttcgttcagcataggctgaactaactttgagagaaacttatagtttaaaacaaagatgataacagccctttcccaaagcacacctccttcttgcctggggactagattccctttgtaggactaacattagctacaagattagaaattatggtttaagagtcatgcaactggagccttcaagacttttcttcaaatatctcagtgcttgagatattttccagaccctgcacttgccggatcatctggcaccacccagatcgataaactgtctaatctgctcttgtgccatcgatacaccccgctgtttatcgatgccatcccaatgggtatgaggtgctgtcccactgtagttttggtttgcatttccctaatgattgatgacgttgagcgtcttctcatgttataaactcttcacgtgcttattggccacatctttgaagaaatgtctattcaaatacttgtccatttttgaatttttttttcctgttgctgagttttgagagttctctgtatattctggatcttaattacttatcagatatatgaattgcaaatgtttcctcccattctgtgggctgcatttttactgttaatactgtatttttatgcctaatttttaaagtgttcatgaagtcttgtttgcctgtttctttagttgcctgtgccttttgtgtcacagccaagaacgctgccaaatccaatgtcatgaggc

SEQ ID NO: 20138 - DNA, 821 bp, Homo sapiens
gtcaattcatcaataaaaatgtaaaaattataaacatgcacccaataagaaagcccaaaaatgtaaacgttggcagaatggaagggacagacaacaaacagttctatctataataagagttggagacttaaacacaccacttaataatggatagaccatctagggttgggagcggtggctcatgcctgtaatcccggcctcccgagtagctgggattacaggcatccgccaccatgcctggctaatttttgttttttgagatggagcctgggcaacaaagtgagacacatccaccctcaacaaaaagtcgttacaagagacagcattatatatggataaaagagtcaattcatcaataaaaatgtaaaaattataaacatgcacccaccaccacgcccaggtcaacctttttttaaataactgccatcccaatgggtatgaggtgctgtcccactgtagttttggtttgcatttccctaatgattgatgacgttgagcgtcttctcatgttataaactcttcacgtgcttattggccacatctttgaagaaatgtctattcaaatacttgtccatttttgaatttttttttcctgttgctgagttttgagagttctctgtatattctggatcttaattacttatcagatatatgaattgcaaatgtttcctcccattctgtgggctgcatttttactgttaatactgtatttttatgcctaatttttaaagtgttcatgaagtcttgtttgcctgtttctttagttgcctgtgccttttgtgtcacagccaagaacgctgccaaatccaatgtcatgaggc

SEQ ID NO: 20139 - DNA, 283 bp, Homo sapiens
acctcccgggttcaagcaattctgcctcagcctcctgagtagctgggattacaggcacccaccaccacgcccaggtcaacctttttttaaataactgccatcccaatgggtatgaggtgctgtcccactgtagttttggtttgcatttccctaatgattgatgacgttgagcgtcttctcatgttataaactcttcacgtgcttattggccacatctttgaagaaatgtctattcaaatacttgtccatttttgaatttttttttcctgttgctgagttttga

SEQ ID NO: 20140 - DNA, 3333 bp, Homo sapiens
gcgccgagccggtttccccgccggtgtccgagaggcgcccccggcccggcccggcccggcccgcgccctccgcccccgcctccccgggccggcggcggtgggcgagctcgcgggcccggccgcccccagccccagccccgccgggccccgccccccgtcgagtgcatgaggttgacgctactttgttgcacctggagggaagaacgtatgggagaggaaggaagcgagttgcccgtgtgtgcaagctgcggccagaggatctatgatggccagtacctccaggccctgaacgcggactggcacgcagactgcttcaggtgttgtgactgcagtgcctccctgtcgcaccagtactatgagaaggatgggcagctcttctgcaagaaggactactgggcccgctatggcgagtcctgccatgggtgctctgagcaaatcaccaagggactggttatggtggctggggagctgaagtaccaccccgagtgtttcatctgcctcacgtgtgggacctttatcggtgacggggacacctacacgctggtggagcactccaagctgtactgcgggcactgctactaccagactgtggtgacccccgtcatcgagcagatcctgcctgactcccctggctcccacctgccccacaccgtcaccctggtgtccatcccagcctcatctcatggcaagcgtggactttcagtctccattgaccccccgcacggcccaccgggctgtggcaccgagcactcacacaccgtccgcgtccagggagtggatccgggctgcatgagcccagatgtgaagaattccatccacgtcggagaccggatcttggaaatcaatggcacgcccatccgaaatgtgcccctggacgagattgacctgctgattcaggaaaccagccgcctgctccagctgaccctcgagcatgaccctcacgatacactgggccacgggctggggcctgagaccagccccctgagctctccggcttatactcccagcggggaggcgggcagctctgcccggcagaaacctgtcttgaggagctgcagcatcgacaggtctccgggcgctggctcactgggctccccggcctcccagcgcaaggacctgggtcgctctgagtccctccgcgtagtctgccggccacaccgcatcttccggccgtcggacctcatccacggggaggtgctgggcaagggctgcttcggccaggctatcaaggtgacacaccgtgagacaggtgaggtgatggtgatgaaggagctgatccggttcgacgaggagacccagaggacgttcctcaaggaggtgaaggtcatgcgatgcctggaacaccccaacgtgctcaagttcatcggggtgctctacaaggacaagaggctcaacttcatcactgagtacatcaagggcggcacgctccggggcatcatcaagagcatggacagccagtacccatggagccagagagtgagctttgccaaggacatcgcatcagggatggcctacctccactccatgaacatcatccaccgagacctcaactcccacaactgcctggtccgcgagaacaagaatgtggtggtggctgacttcgggctggcgcgtctcatggtggacgagaagactcagcctgagggcctgcggagcctcaagaagccagaccgcaagaagcgctacaccgtggtgggcaacccctactggatggcacctgagatgatcaacggccgcagctatgatgagaaggtggatgtgttctcctttgggatcgtcctgtgcgagatcatcgggcgggtgaacgcagaccctgactacctgccccgcaccatggactttggcctcaacgtgcgaggattcctggaccgctactgccccccaaactgccccccgagcttcttccccatcaccgtgcgctgttgcgatctggaccccgagaagaggccatcctttgtgaagctggaacactggctggagaccctccgcatgcacctggccggccacctgccactgggcccacagctggagcagctggacagaggtttctgggagacctaccggcgcggcgagagcggactgcctgcccaccctgaggtccccgactgagccagggccactcagctgcccctgtccccacctctggagaatccacccccaccagattcctccgcgggaggtggccctcagctgggacagtggggacccaggcttctcctcagagccaggccctgacttgccttctcccaccccgtggaccgcttcccctgccttctctctgccgtggcccagagccggcccagctgcacacacacaccatgctctcgccctgctgtaacctctgtcttggcagggctgtcccctcttgcttctccttgcatgagctggagggcctgtgtgagttacgcccctttccacacgccgctgccccagcaaccctgttcacgctccacctgtctggtccatagctccctggaggctgggccaggaggcagcctccgaaccatgccccatataacgcttgggtgcgtgggagggcgcacatcagggcagaggccaagttccaggtgtctgtgttcccaggaaccaaatggggagtctggggcccgttttccccccagggggtgtctaggtagcaacaggtatcgaggactctccaaacccccaaagcagagagagggctgatcccatggggcggaggtccccagtggctgagcaaacagccccttctctcgctttgggtcttttttttgtttctttcttaaagccactttagtgagaagcaggtaccaagcctcagggtgaagggggtcccttgagggagcgtggagctgcggtgccctggccggcgatggggaggagccggctccggcagtgagaggataggcacagtggaccgggcaggtgtccaccagcagctcagcccctgcagtcatctcagagccccttcccgggcctctcccccaaggctccctgcccctcctcatgcccctctgtcctctgcgttttttctgtgtaatctattttttaagaagagtttgtattattttttcatacggctgcagcagcagctgccaggggcttgggattttatttttgtggcgggcgggggtgggagggccattttgtcactttgcctcagttgagcatctaggaagtattaaaactgtgaagctttctcagtgcactttgaacctggaaaacaatcccaacaggcccgtgggaccatgacttagggaggtgggacccacccacccccatccaggaaccgtgacgtccaaggaaccaaacccagacgcagaacaataaaataaattccgtactccccaccca

SEQ ID NO: 20141 - DNA, 162 bp, Homo sapiens
gcggccgcctactactactactgctcgaattcaagcttctaacgatgtacggggacatgacttagggaggtgggacccacccacccccatccaggaaccgtgacgtccaaggaaccaaacccagacgcagaacaataaaataaattccgtactccccaccca

SEQ ID NO: 20142 - DNA, 3624 bp, Homo sapiens
  misc_feature (3343)..(3343): n is a, c, g, or t
gcgccgagccggtttccccgccggtgtccgagaggcgcccccggcccggcccggcccggcccgcgccctccgcccccgcctccccgggccggcggcggtgggcgagctcgcgggcccggccgcccccagccccagccccgccgggccccgccccccgtcgagtgcatgaggttgacgctactttgttgcacctggagggaagaacgtatgggagaggaaggaagcgagttgcccgtgtgtgcaagctgcggccagaggatctatgatggccagtacctccaggccctgaacgcggactggcacgcagactgcttcaggtgttgtgactgcagtgcctccctgtcgcaccagtactatgagaaggatgggcagctcttctgcaagaaggactactgggcccgctatggcgagtcctgccatgggtgctctgagcaaatcaccaagggactggttatggtggctggggagctgaagtaccaccccgagtgtttcatctgcctcacgtgtgggacctttatcggtgacggggacacctacacgctggtggagcactccaagctgtactgcgggcactgctactaccagactgtggtgacccccgtcatcgagcagatcctgcctgactcccctggctcccacctgccccacaccgtcaccctggtgtccatcccagcctcatctcatggcaagcgtggactttcagtctccattgaccccccgcacggcccaccgggctgtggcaccgagcactcacacaccgtccgcgtccagggagtggatccgggctgcatgagcccagatgtgaagaattccatccacgtcggagaccggatcttggaaatcaatggcacgcccatccgaaatgtgcccctggacgagattgacctgctgattcaggaaaccagccgcctgctccagctgaccctcgagcatgaccctcacgatacactgggccacgggctggggcctgagaccagccccctgagctctccggcttatactcccagcggggaggcgggcagctctgcccggcagaaacctgtcttgaggagctgcagcatcgacaggtctccgggcgctggctcactgggctccccggcctcccagcgcaaggacctgggtcgctctgagtccctccgcgtagtctgccggccacaccgcatcttccggccgtcggacctcatccacggggaggtgctgggcaagggctgcttcggccaggctatcaaggtgacacaccgtgagacaggtgaggtgatggtgatgaaggagctgatccggttcgacgaggagacccagaggacgttcctcaaggaggtgaaggtcatgcgatgcctggaacaccccaacgtgctcaagttcatcggggtgctctacaaggacaagaggctcaacttcatcactgagtacatcaagggcggcacgctccggggcatcatcaagagcatggacagccagtacccatggagccagagagtgagctttgccaaggacatcgcatcagggatggcctacctccactccatgaacatcatccaccgagacctcaactcccacaactgcctggtccgcgagaacaagaatgtggtggtggctgacttcgggctggcgcgtctcatggtggacgagaagactcagcctgagggcctgcggagcctcaagaagccagaccgcaagaagcgctacaccgtggtgggcaacccctactggatggcacctgagatgatcaacggccgcagctatgatgagaaggtggatgtgttctcctttgggatcgtcctgtgcgagatcatcgggcgggtgaacgcagaccctgactacctgccccgcaccatggactttggcctcaacgtgcgaggattcctggaccgctactgccccccaaactgccccccgagcttcttccccatcaccgtgcgctgttgcgatctggaccccgagaagaggccatcctttgtgaagctggaacactggctggagaccctccgcatgcacctggccggccacctgccactgggcccacagctggagcagctggacagaggtttctgggagacctaccggcgcggcgagagcggactgcctgcccaccctgaggtccccgactgagccagggccactcagctgcccctgtccccacctctggagaatccacccccaccagattcctccgcgggaggtggccctcagctgggacagtggggacccaggcttctcctcagagccaggccctgacttgccttctcccaccccgtggaccgcttcccctgccttctctctgccgtggcccagagccggcccagctgcacacacacaccatgctctcgccctgctgtaacctctgtcttggcagggctgtcccctcttgcttctccttgcatgagctggagggcctgtgtgagttacgcccctttccacacgccgctgccccagcaaccctgttcacgctccacctgtctggtccatagctccctggaggctgggccaggaggcagcctccgaaccatgccccatataacgcttgggtgcgtgggagggcgcacatcagggcagaggccaagttccaggtgtctgtgttcccaggaaccaaatggggagtctggggcccgttttccccccagggggtgtctaggtagcaacaggtatcgaggactctccaaacccccaaagcagagagagggctgatcccatggggcggaggtccccagtggctgagcaaacagccccttctctcgctttgggtcttttttttgtttctttcttaaagccactttagtgagaagcaggtaccaagcctcagggtgaagggggtcccttgagggagcgtggagctgcggtgccctggccggcgatggggaggagccggctccggcagtgagaggataggcacagtggaccgggcaggtgtccaccagcagctcagcccctgcagtcatctcagagccccttcccgggcctctcccccaaggctccctgcccctcctcatgcccctctgtcctctgcgttttttctgtgtaatctattttttaagaagagtttgtattattttttcatacggctgcagcagcagctgccaggggcttgggattttatttttgtggcgggcgggggtgggagggccattttgtcactttgcctcagttgagcatctaggaagtattaaaactgtgaagctttctcagtgcactttgaacctggaaaacaatcccaacaggcccgtgggaccatgacttagggaggtgggacccacccacccccatccaggaaccgtgacgtccaaggaaccaaacccagacgcagaacaataaaataaattccgtactccccacccaaaaaaaatanttataaaaactccaggtgggggcccgttctccattcttcctaatacaagttcacttaccaattacttggccgctctttacacagttcggaatggtgaaacactgtccgatctccaacttaaatgctcttcatgaaaatctcctatttccaacttgcttatattcaaaacagcccgtaccttttgcctttccaaattgtgcccaccactattgctaaatgcaaatgtggacacttcctatttcgtattctccttaacattttcttacttctattgtacctcg

SEQ ID NO: 20143 - DNA, 4293 bp, Homo sapiens
  misc_feature (3746)..(3746): n is a, c, g, or t
gcgccgagccggtttccccgccggtgtccgagaggcgcccccggcccggcccggcccggcccgcgccctccgcccccgcctccccgggccggcggcggtgggcgagctcgcgggcccggccgcccccagccccagccccgccgggccccgccccccgtcgagtgcatgaggttgacgctactttgttgcacctggagggaagaacgtatgggagaggaaggaagcgagttgcccgtgtgtgcaagctgcggccagaggatctatgatggccagtacctccaggccctgaacgcggactggcacgcagactgcttcaggtgttgtgactgcagtgcctccctgtcgcaccagtactatgagaaggatgggcagctcttctgcaagaaggactactgggcccgctatggcgagtcctgccatgggtgctctgagcaaatcaccaagggactggttatggtggctggggagctgaagtaccaccccgagtgtttcatctgcctcacgtgtgggacctttatcggtgacggggacacctacacgctggtggagcactccaagctgtactgcgggcactgctactaccagactgtggtgacccccgtcatcgagcagatcctgcctgactcccctggctcccacctgccccacaccgtcaccctggtgtccatcccagcctcatctcatggcaagcgtggactttcagtctccattgaccccccgcacggcccaccgggctgtggcaccgagcactcacacaccgtccgcgtccagggagtggatccgggctgcatgagcccagatgtgaagaattccatccacgtcggagaccggatcttggaaatcaatggcacgcccatccgaaatgtgcccctggacgagattgacctgctgattcaggaaaccagccgcctgctccagctgaccctcgagcatgaccctcacgatacactgggccacgggctggggcctgagaccagccccctgagctctccggcttatactcccagcggggaggcgggcagctctgcccggcagaaacctgtcttgaggagctgcagcatcgacaggtctccgggcgctggctcactgggctccccggcctcccagcgcaaggacctgggtcgctctgagtccctccgcgtagtctgccggccacaccgcatcttccggccgtcggacctcatccacggggaggtgctgggcaagggctgcttcggccaggctatcaaggtgacacaccgtgagacaggtgaggtgatggtgatgaaggagctgatccggttcgacgaggagacccagaggacgttcctcaaggaggtgaaggtcatgcgatgcctggaacaccccaacgtgctcaagttcatcggggtgctctacaaggacaagaggctcaacttcatcactgagtacatcaagggcggcacgctccggggcatcatcaagagcatggacagccagtacccatggagccagagagtgagctttgccaaggacatcgcatcagggatggcctacctccactccatgaacatcatccaccgagacctcaactcccacaactgcctggtccgcgagaacaagaatgtggtggtggctgacttcgggctggcgcgtctcatggtggacgagaagactcagcctgagggcctgcggagcctcaagaagccagaccgcaagaagcgctacaccgtggtgggcaacccctactggatggcacctgagatgatcaacggccgcagctatgatgagaaggtggatgtgttctcctttgggatcgtcctgtgcgagatcatcgggcgggtgaacgcagaccctgactacctgccccgcaccatggactttggcctcaacgtgcgaggattcctggaccgctactgccccccaaactgccccccgagcttcttccccatcaccgtgcgctgttgcgatctggaccccgagaagaggccatcctttgtgaagctggaacactggctggagaccctccgcatgcacctggccggccacctgccactgggcccacagctggagcagctggacagaggtttctgggagacctaccggcgcggcgagagcggactgcctgcccaccctgaggtccccgactgagccagggccactcagctgcccctgtccccacctctggagaatccacccccaccagattcctccgcgggaggtggccctcagctgggacagtggggacccaggcttctcctcagagccaggccctgacttgccttctcccaccccgtggaccgcttcccctgccttctctctgccgtggcccagagccggcccagctgcacacacacaccatgctctcgccctgctgtaacctctgtcttggcagggctgtcccctcttgcttctccttgcatgagctggagggcctgtgtgagttacgcccctttccacacgccgctgccccagcaaccctgttcacgctccacctgtctggtccatagctccctggaggctgggccaggaggcagcctccgaaccatgccccatataacgcttgggtgcgtgggagggcgcacatcagggcagaggccaagttccaggtgtctgtgttcccaggaaccaaatggggagtctggggcccgttttccccccagggggtgtctaggtagcaacaggtatcgaggactctccaaacccccaaagcagagagagggctgatcccatggggcggaggtccccagtggctgagcaaacagccccttctctcgctttgggtcttttttttgtttctttcttaaagccactttagtgagaagcaggtaccaagcctcagggtgaagggggtcccttgagggagcgtggagctgcggtgccctggccggcgatggggaggagccggctccggcagtgagaggataggcacagtggaccgggcaggtgtccaccagcagctcagcccctgcagtcatctcagagccccttcccgggcctctcccccaaggctccctgcccctcctcatgcccctctgtcctctgcgttttttctgtgtaatctattttttaagaagagtttgtattattttttcatacggctgcagcagcagctgccaggggcttgggattttatttttgtggcgggcgggggtgggagggccattttgtcactttgcctcagttgagcatctaggaagtattaaaactgtgaagctttctcagtgcactttgaacctggaaaacaatcccaacaggcccgtgggaccatgacttagggaggtgggacccacccacccccatccaggaaccgtgacgtccaaggaaccaaacccagacgcagaacaataaaataaattccgtactccccacccatcacaaaaaaaaacaaagcaaacgacaaaaaaaaaacattggtggggcggccttcggccacacgaaaaagtttataaaaacacaaaaggtgggggggggggcacccaaaaagggaaagataaacatggacgcaaaacaggctagacgcataggaggacacctcagtggtcactagacaaaagggagtggggtatctacaccgcaataaaaaacacgcgctcgcgggggacaaccggagagtgttcgcttgaaacacaactaccacgaagtgggagttccagacaggagccaccagcaggagccataaacacaccagggagagtcacaaacggagaaggcgtcggtactataagaaagataagcgccccggcgcgcgtagatgataacaaagcagtatcgagcaaaacgaagcnccaacgacaacacgacaaacgtaagagaatcagcaaggaaaagcaagaacagagagacaggagagcagagccgagacaggaaagtcaaaggaacgagatgagcgagagcgaggagacggacgagtaagagcgaagagcagaggagagatcgagaagaagaaggagagagaaggaggtgtacgaagagagcgaagaacgaacaaagagagagagagcagagagagaagagagcgaagaaggatgagaagaaggagagaggacgagagcgaaggacgagagacacgacggagagagcacgagaagcagtgggagccgagacgtgaaggaagcaaacagatgaagtgcaaacaccagtagcacgataaggaaagaagtaggaagacgatgaagacgaagagagagagcgacggagtgacagaggagcagaaggagcacgacaagagacgaagagacacgatagggagagagagagagagcaagggagagaggcagtagagcagagagacagctagggagcagacagagcgatagacagcatagaagaggt

SEQ ID NO: 20144 - DNA, 1932 bp, Homo sapiens
gcgccgagccggtttccccgccggtgtccgagaggcgcccccggcccggcccggcccggcccgcgccctccgcccccgcctccccgggccggcggcggtgggcgagctcgcgggcccggccgcccccagccccagccccgccgggccccgccccccgtcgagtgcatgaggttgacgctactttgttgcacctggagggaagaacgtatgggagaggaaggaagcgagttgcccgtgtgtgcaagctgcggccagaggatctatgatggccagtacctccaggccctgaacgcggactggcacgcagactgcttcagcgggcactgctactaccagactgtggtgacccccgtcatcgagcagatcctgcctgactcccctggctcccacctgccccacaccgtcaccctggtgtccatcccagcctcatctcatggcaagcgtggactttcagtctccattgaccccccgcacggcccaccgggctgtggcaccgacttcttccccatcaccgtgcgctgttgcgatctggaccccgagaagaggccatcctttgtgaagctggaacactggctggagaccctccgcatgcacctggccggccacctgccactgggcccacagctggagcagctggacagaggtttctgggagacctaccggcgcggcgagagcggactgcctgcccaccctgaggtccccgactgagccagggccactcagctgcccctgtccccacctctggagaatccacccccaccagattcctccgcgggaggtggccctcagctgggacagtggggacccaggcttctcctcagagccaggccctgacttgccttctcccaccccgtggaccgcttcccctgccttctctctgccgtggcccagagccggcccagctgcacacacacaccatgctctcgccctgctgtaacctctgtcttggcagggctgtcccctcttgcttctccttgcatgagctggagggcctgtgtgagttacgcccctttccacacgccgctgccccagcaaccctgttcacgctccacctgtctggtccatagctccctggaggctgggccaggaggcagcctccgaaccatgccccatataacgcttgggtgcgtgggagggcgcacatcagggcagaggccaagttccaggtgtctgtgttcccaggaaccaaatggggagtctggggcccgttttccccccagggggtgtctaggtagcaacaggtatcgaggactctccaaacccccaaagcagagagagggctgatcccatggggcggaggtccccagtggctgagcaaacagccccttctctcgctttgggtcttttttttgtttctttcttaaagccactttagtgagaagcaggtaccaagcctcagggtgaagggggtcccttgagggagcgtggagctgcggtgccctggccggcgatggggaggagccggctccggcagtgagaggataggcacagtggaccgggcaggtgtccaccagcagctcagcccctgcagtcatctcagagccccttcccgggcctctcccccaaggctccctgcccctcctcatgcccctctgtcctctgcgttttttctgtgtaatctattttttaagaagagtttgtattattttttcatacggctgcagcagcagctgccaggggcttgggattttatttttgtggcgggcgggggtgggagggccattttgtcactttgcctcagttgagcatctaggaagtattaaaactgtgaagctttctcagtgcactttgaacctggaaaacaatcccaacaggcccgtgggaccatgacttagggaggtgggacccacccacccccatccaggaaccgtgacgtccaaggaaccaaacccagacgcagaacaataaaataaattccgtactccccaccca

SEQ ID NO: 20145 - DNA, 1342 bp, Homo sapiens
gcgccgagccggtttccccgccggtgtccgagaggcgcccccggcccggcccggcccggcccgcgccctccgcccccgcctccccgggccggcggcggtgggcgagctcgcgggcccggccgcccccagccccagccccgccgggccccgccccccgtcgagtgcatgaggttgacgctactttgttgcacctggagggaagaacgtatgggagaggaaggaagcgagttgcccgtgtgtgcaagctgcggccagaggatctatgatggccagtacctccaggccctgaacgcggactggcacgcagactgcttcaggtgttgtgactgcagtgcctccctgtcgcaccagtactatgagaaggatgggcagctcttctgcaagaaggactactgggcccgctatggcgagtcctgccatgggtgctctgagcaaatcaccaagggactggttatggtggctggggagctgaagtaccaccccgagtgtttcatctgcctcacgtgtgggacctttatcggtgacggggacacctacacgctggtggagcactccaagctgtactgcgggcactgctactaccagactgtggtgacccccgtcatcgagcagatcctgcctgactcccctggctcccacctgccccacaccgtcaccctggtgtccatcccagcctcatctcatggcaagcgtggactttcagtctccattgaccccccgcacggcccaccgggctgtggcaccgagcactcacacaccgtccgcgtccagggagtggatccgggctgcatgagcccagatgtgaagaattccatccacgtcggagaccggatcttggaaatcaatggcacgcccatccgaaatgtgcccctggacgaggtacggtcctgagtctgtggggcaggacgggaggtagtgccttcatgcctagccccctccccactccacccccattcacatgcctgctgtccccagattgacctgctgattcaggaaaccagccgcctgctccagctgaccctcgagcatgaccctcacgatacactgggccacgggctggggcctgagaccagccccctgagctctccggcttatactcccagcggggaggcgggcagctctgcccggcagaaacctgtcttgtaagtcagcctgctcctcggttcagctgggtgctttcactcctgctggggctcaggggctgtgggacctaggtcggggagccagccctgcacaaatgcagcccaggcttgagccagggaggtggaggctgcagtaagctgtcatcacaccactgctctccagcttgggtgacaaaacaagacccactctcaaaaaaaaa

SEQ ID NO: 20146 - DNA, 285 bp, Homo sapiens
cgcaaggacctgggtcgctctgagtccctccgcgtagtctgccggccacaccgcatcttccggccgtcggacctcatccacggggaggtgctgggcaagggctgcttcggccaggctatcaaggtacagagcatgccagggtctcaggggacagtctgggtgggacccctccatcctccttccttcccagtctatggaaacacagtggaaggggtatctggcttccagactccctggccagtgccctctcctcccttggcctcctggagctaattaggaacaggg

SEQ ID NO: 20147 - DNA, 3263 bp, Homo sapiens
gcgccgagccggtttccccgccggtgtccgagaggcgcccccggcccggccgcccccagccccagccccgccgggccccgccccccgtcgagtgcatgaggttgacgctactttgttgcacctggagggaagaacgtatgggagaggaaggaagcgagttgcccgtgtgtgcaagctgcggccagaggatctatgatggccagtacctccaggccctgaacgcggactggcacgcagactgcttcaggtgttgtgactgcagtgcctccctgtcgcaccagtactatgagaaggatgggcagctcttctgcaagaaggactactgggcccgctatggcgagtcctgccatgggtgctctgagcaaatcaccaagggactggttatggtggctggggagctgaagtaccaccccgagtgtttcatctgcctcacgtgtgggacctttatcggtgacggggacacctacacgctggtggagcactccaagctgtactgcgggcactgctactaccagactgtggtgacccccgtcatcgagcagatcctgcctgactcccctggctcccacctgccccacaccgtcaccctggtgtccatcccagcctcatctcatggcaagcgtggactttcagtctccattgaccccccgcacggcccaccgggctgtggcaccgagcactcacacaccgtccgcgtccagggagtggatccgggctgcatgagcccagatgtgaagaattccatccacgtcggagaccggatcttggaaatcaatggcacgcccatccgaaatgtgcccctggacgagattgacctgctgattcaggaaaccagccgcctgctccagctgaccctcgagcatgaccctcacgatacactgggccacgggctggggcctgagaccagccccctgagctctccggcttatactcccagcggggaggcgggcagctctgcccggcagaaacctgtcttgaggagctgcagcatcgacaggtctccgggcgctggctcactgggctccccggcctcccagcgcaaggacctgggtcgctctgagtccctccgcgtagtctgccggccacaccgcatcttccggccgtcggacctcatccacggggaggtgctgggcaagggctgcttcggccaggctatcaaggtgacacaccgtgagacaggtgaggtgatggtgatgaaggagctgatccggttcgacgaggagacccagaggacgttcctcaaggaggtgaaggtcatgcgatgcctggaacaccccaacgtgctcaagttcatcggggtgctctacaaggacaagaggctcaacttcatcactgagtacatcaagggcggcacgctccggggcatcatcaagagcatggacagccagtacccatggagccagagagtgagctttgccaaggacatcgcatcagggatggcctacctccactccatgaacatcatccaccgagacctcaactcccacaactgcctggtccgcgagaacaagaatgtggtggtggctgacttcgggctggcgcgtctcatggtggacgagaagactcagcctgagggcctgcggagcctcaagaagccagaccgcaagaagcgctacaccgtggtgggcaacccctactggatggcacctgagatgatcaacggccgcagctatgatgagaaggtggatgtgttctcctttgggatcgtcctgtgcgagatcatcgggcgggtgaacgcagaccctgactacctgccccgcaccatggactttggcctcaacgtgcgaggattcctggaccgctactgccccccaaactgccccccgagcttcttccccatcaccgtgcgctgttgcgatctggaccccgagaagaggccatcctttgtgaagctggaacactggctggagaccctccgcatgcacctggccggccacctgccactgggcccacagctggagcagctggacagaggtttctgggagacctaccggcgcggcgagagcggactgcctgcccaccctgaggtccccgactgagccagggccactcagctgcccctgtccccacctctggagaatccacccccaccagattcctccgcgggaggtggccctcagctgggacagtggggacccaggcttctcctcagagccaggccctgacttgccttctcccaccccgtggaccgcttcccctgccttctctctgccgtggcccagagccggcccagctgcacacacacaccatgctctcgccctgctgtaacctctgtcttggcagggctgtcccctcttgcttctccttgcatgagctggagggcctgtgtgagttacgcccctttccacacgccgctgccccagcaaccctgttcacgctccacctgtctggtccatagctccctggaggctgggccaggaggcagcctccgaaccatgccccatataacgcttgggtgcgtgggagggcgcacatcagggcagaggccaagttccaggtgtctgtgttcccaggaaccaaatggggagtctggggcccgttttccccccagggggtgtctaggtagcaacaggtatcgaggactctccaaacccccaaagcagagagagggctgatcccatggggcggaggtccccagtggctgagcaaacagccccttctctcgctttgggtcttttttttgtttctttcttaaagccactttagtgagaagcaggtaccaagcctcagggtgaagggggtcccttgagggagcgtggagctgcggtgccctggccggcgatggggaggagccggctccggcagtgagaggataggcacagtggaccgggcaggtgtccaccagcagctcagcccctgcagtcatctcagagccccttcccgggcctctcccccaaggctccctgcccctcctcatgcccctctgtcctctgcgttttttctgtgtaatctattttttaagaagagtttgtattattttttcatacggctgcagcagcagctgccaggggcttgggattttatttttgtggcgggcgggggtgggagggccattttgtcactttgcctcagttgagcatctaggaagtattaaaactgtgaagctttctcagtgcactttgaacctggaaaacaatcccaacaggcccgtgggaccatgacttagggaggtgggacccacccacccccatccaggaaccgtgacgtccaaggaaccaaacccagacgcagaacaataaaataaattccgtactccccaccca

SEQ ID NO: 20148 - DNA, 3272 bp, Homo sapiens
gcgccgagccggtttccccgccggtgtccgagaggcgcccccggcccggcccggcccggcccgcgccctccgcccccgcctccccgggccggcggcggtgggcgagctcgcgggcccggccgcccccagccccagccccgccgggccccgccccccgtcgagtgcatgaggttgacgctactttgttgcacctggagggaagaacgtatgggagaggaaggaagcgagttgcccgtgtgtgcaagctgcggccagaggatctatgatggccagtacctccaggccctgaacgcggactggcacgcagactgcttcaggtgttgtgactgcagtgcctccctgtcgcaccagtactatgagaaggatgggcagctcttctgcaagaaggactactgggcccgctatggcgagtcctgccatgggtgctctgagcaaatcaccaagggactggttatggtggctggggagctgaagtaccaccccgagtgtttcatctgcctcacgtgtgggacctttatcggtgacggggacacctacacgctggtggagcactccaagctgtactgcgggcactgctactaccagactgtggtgacccccgtcatcgagcagatcctgcctgactcccctggctcccacctgccccacaccgtcaccctggtgtccatcccagcctcatctcatggcaagcgtggactttcagtctccattgaccccccgcacggcccaccgggctgtggcaccgagcactcacacaccgtccgcgtccagggagtggatccgggctgcatgagcccagatgtgaagaattccatccacgtcggagaccggatcttggaaatcaatggcacgcccatccgaaatgtgcccctggacgagattgacctgctgattcaggaaaccagccgcctgctccagctgaccctcgagcatgaccctcacgatacactgggccacgggctggggcctgagaccagccccctgagctctccggcttatactcccagcggggaggcgggcagctctgcccggcagaaacctgtcttcgcaaggacctgggtcgctctgagtccctccgcgtagtctgccggccacaccgcatcttccggccgtcggacctcatccacggggaggtgctgggcaagggctgcttcggccaggctatcaaggtgacacaccgtgagacaggtgaggtgatggtgatgaaggagctgatccggttcgacgaggagacccagaggacgttcctcaaggaggtgaaggtcatgcgatgcctggaacaccccaacgtgctcaagttcatcggggtgctctacaaggacaagaggctcaacttcatcactgagtacatcaagggcggcacgctccggggcatcatcaagagcatggacagccagtacccatggagccagagagtgagctttgccaaggacatcgcatcagggatggcctacctccactccatgaacatcatccaccgagacctcaactcccacaactgcctggtccgcgagaacaagaatgtggtggtggctgacttcgggctggcgcgtctcatggtggacgagaagactcagcctgagggcctgcggagcctcaagaagccagaccgcaagaagcgctacaccgtggtgggcaacccctactggatggcacctgagatgatcaacggccgcagctatgatgagaaggtggatgtgttctcctttgggatcgtcctgtgcgagatcatcgggcgggtgaacgcagaccctgactacctgccccgcaccatggactttggcctcaacgtgcgaggattcctggaccgctactgccccccaaactgccccccgagcttcttccccatcaccgtgcgctgttgcgatctggaccccgagaagaggccatcctttgtgaagctggaacactggctggagaccctccgcatgcacctggccggccacctgccactgggcccacagctggagcagctggacagaggtttctgggagacctaccggcgcggcgagagcggactgcctgcccaccctgaggtccccgactgagccagggccactcagctgcccctgtccccacctctggagaatccacccccaccagattcctccgcgggaggtggccctcagctgggacagtggggacccaggcttctcctcagagccaggccctgacttgccttctcccaccccgtggaccgcttcccctgccttctctctgccgtggcccagagccggcccagctgcacacacacaccatgctctcgccctgctgtaacctctgtcttggcagggctgtcccctcttgcttctccttgcatgagctggagggcctgtgtgagttacgcccctttccacacgccgctgccccagcaaccctgttcacgctccacctgtctggtccatagctccctggaggctgggccaggaggcagcctccgaaccatgccccatataacgcttgggtgcgtgggagggcgcacatcagggcagaggccaagttccaggtgtctgtgttcccaggaaccaaatggggagtctggggcccgttttccccccagggggtgtctaggtagcaacaggtatcgaggactctccaaacccccaaagcagagagagggctgatcccatggggcggaggtccccagtggctgagcaaacagccccttctctcgctttgggtcttttttttgtttctttcttaaagccactttagtgagaagcaggtaccaagcctcagggtgaagggggtcccttgagggagcgtggagctgcggtgccctggccggcgatggggaggagccggctccggcagtgagaggataggcacagtggaccgggcaggtgtccaccagcagctcagcccctgcagtcatctcagagccccttcccgggcctctcccccaaggctccctgcccctcctcatgcccctctgtcctctgcgttttttctgtgtaatctattttttaagaagagtttgtattattttttcatacggctgcagcagcagctgccaggggcttgggattttatttttgtggcgggcgggggtgggagggccattttgtcactttgcctcagttgagcatctaggaagtattaaaactgtgaagctttctcagtgcactttgaacctggaaaacaatcccaacaggcccgtgggaccatgacttagggaggtgggacccacccacccccatccaggaaccgtgacgtccaaggaaccaaacccagacgcagaacaataaaataaattccgtactccccaccca

SEQ ID NO: 20149 - DNA, 3422 bp, Homo sapiens
gcgccgagccggtttccccgccggtgtccgagaggcgcccccggcccggcccggcccggcccgcgccctccgcccccgcctccccgggccggcggcggtgggcgagctcgcgggcccggccgcccccagccccagccccgccgggccccgccccccgtcgagtgcatgaggttgacgctactttgttgcacctggagggaagaacgtatgggagaggaaggaagcgagttgcccgtgtgtgcaagctgcggccagaggatctatgatggccagtacctccaggccctgaacgcggactggcacgcagactgcttcaggtgttgtgactgcagtgcctccctgtcgcaccagtactatgagaaggatgggcagctcttctgcaagaaggactactgggcccgctatggcgagtcctgccatgggtgctctgagcaaatcaccaagggactggttatggtggctggggagctgaagtaccaccccgagtgtttcatctgcctcacgtgtgggacctttatcggtgacggggacacctacacgctggtggagcactccaagctgtactgcgggcactgctactaccagactgtggtgacccccgtcatcgagcagatcctgcctgactcccctggctcccacctgccccacaccgtcaccctggtgtccatcccagcctcatctcatggcaagcgtggactttcagtctccattgaccccccgcacggcccaccgggctgtggcaccgagcactcacacaccgtccgcgtccagggagtggatccgggctgcatgagcccagatgtgaagaattccatccacgtcggagaccggatcttggaaatcaatggcacgcccatccgaaatgtgcccctggacgagattgacctgctgattcaggaaaccagccgcctgctccagctgaccctcgagcatgaccctcacgatacactgggccacgggctggggcctgagaccagccccctgagctctccggcttatactcccagcggggaggcgggcagctctgcccggcagaaacctgtcttgaggagctgcagcatcgacaggtctccgggcgctggctcactgggctccccggcctcccagcgcaaggacctgggtcgctctgagtccctccgcgtagtctgccggccacaccgcatcttccggccgtcggacctcatccacggggaggtgctgggcaagggctgcttcggccaggctatcaaggtgacacaccgtgagacaggtgaggtgatggtgatgaaggagctgatccggttcgacgaggagacccagaggacgttcctcaaggaggtgaaggtcatgcgatgcctggaacaccccaacgtgctcaagttcatcggggtgctctacaaggacaagaggctcaacttcatcactgagtacatcaagggcggcacgctccggggcatcatcaagagcatggacagccagtacccatggagccagagagtgagctttgccaaggacatcgcatcagggatggcctacctccactccatgaacatcatccaccgagacctcaactcccacaactgcctggtccgcgagaacaagaatgtggtggtggctgacttcgggctggcgcgtctcatggtggacgagaagactcagcctgagggcctgcggagcctcaagaagccagaccgcaagaagcgctacaccgtggtgggcaacccctactggatggcacctgagatgatcaacggccgcagctatgatgagaaggtggatgtgttctcctttgggatcgtcctgtgcgagatcatcgggcgggtgaacgcagaccctgactacctgccccgcaccatggactttggcctcaacgtgcgaggattcctggaccgctactgccccccaaactgccccccgagcttcttccccatcaccgtgcgctgttgcgatctggaccccgagaagaggccatcctttgtgaagctggaacactggctggagaccctccgcatgcacctggccggccacctgccactgggcccacagctggagcagctggacagaggtttctgggagacctaccggcgcggcgagagcggactgcctgcccaccctgaggtccccgactgagccagggccactcagctgcccctgtccccacctctggagaatccacccccaccagattcctccgcgggaggtggccctcagctgggacagtggggacccaggcttctcctcagagccaggccctgacttgccttctcccaccccgtggaccgcttcccctgccttctctctgccgtggcccagagccggcccagctgcacacacacaccatgctctcgccctgctgtaacctctgtcttggcagggctgtcccctcttgcttctccttgcatgagctggagggcctgtgtgagttacgcccctttccacacgccgctgccccagcaaccctgttcacgctccacctgtctggtccatagctccctggaggctgggccaggaggcagcctccgaaccatgccccatataacgcttgggtgcgtgggagggcgcacatcagggcagaggccaagttccaggtgtctgtgttcccaggaaccaaatggggagtctggggcccgttttccccccagggggtgtctaggtagcaacaggtatcgaggactctccaaacccccaaagcagagagagggctgatcccatggggcggaggtccccagtggctgagcaaacagccccttctctcgctttgggtcttttttttgtttctttcttaaagccactttagtgagaagcaggtaccaagcctcagggtgaagggggtcccttgagggagcgtggagctgcggtgccctggccggcgatggggaggagccggctccggcagtgagaggataggcacagtggaccgggcaggtgtccaccagcagctcagcccctgcagtcatctcagagccccttcccgggcctctcccccaaggctccctgcccctcctcatgcccctctgtcctctgcgttttttctgtgtaatctattttttaagaagagtttgtattattttttcatacggctgcagcagcagctgccaggggcttgggattttatttttgtggcgggcgggggtgggagggccattttgtcactttgcctcagttgagcatctaggaagtattaaaactgtgaagctttctcagtgcactttgaacctggaaaacaatcccaacaggcccgtgggaccatgacttagggaggtgggacccacccacccccatccaggaaccgtgacgtccaaggaaccaaacccagacgcagaacaataaaataaattccgtactccccacccatcatagaaagataatggccgccttttaccacgttggactgggccctggtgttaccaactttcggctggccacattccccttttcggcgt

SEQ ID NO: 20150 - DNA, 1149 bp, Homo sapiens
agctcagcccctgcagtcatctcagagccccttcccgggcctctcccccaaggctccctgcccctcctcatgccccgcttcccctgccttctctctgccgtggcccagagccggcccagctgcacacacacaccatgctctcgccctgctgtaacctctgtcttggcagggctgtcccctcttgcttctccttgcatgagctggagggcctgtgtgagttacgcccctttccacacgccgctgccccagcaaccctgttcacgctccacctgtctggtccatagctccctggaggctgggccaggaggcagcctccgaaccatgccccatataacgcttgggtgcgtgggagggcgcacatcagggcagaggccaagttccaggtgtctgtgttcccaggaaccaaatggggagtctggggcccgttttccccccagggggtgtctaggtagcaacaggtatcgaggactctccaaacccccaaagcagagagagggctgatcccatggggcggaggtccccagtggctgagcaaacagccccttctctcgctttgggtcttttttttgtttctttcttaaagccactttagtgagaagcaggtaccaagcctcagggtgaagggggtcccttgagggagcgtggagctgcggtgccctggccggcgatggggaggagccggctccggcagtgagaggataggcacagtggaccgggcaggtgtccaccagcagctcagcccctgcagtcatctcagagccccttcccgggcctctcccccaaggctccctgcccctcctcatgcccctctgtcctctgcgttttttctgtgtaatctattttttaagaagagtttgtattattttttcatacggctgcagcagcagctgccaggggcttgggattttatttttgtggcgggcgggggtgggagggccattttgtcactttgcctcagttgagcatctaggaagtattaaaactgtgaagctttctcagtgcactttgaacctggaaaacaatcccaacaggcccgtgggaccatgacttagggaggtgggacccacccacccccatccaggaaccgtgacgtccaaggaaccaaacccagacgcagaacaataaaataaattccgtactccccaccca

SEQ ID NO: 20151 - DNA, 1246 bp, Homo sapiens
gcgccgagccggtttccccgccggtgtccgagaggcgcccccggcccggcccggcccggcccgcgccctccgcccccgcctccccgggccggcggcggtgggcgagctcgcgggcccggccgcccccagccccagccccgccgggccccgccccccgtcgagtgcatgaggttgacgctactttgttgcacctggagggaagaacgtatgggagaggaaggaagcgagttgcccgtgtgtgcaagctgcggccagaggatctatgatggccagtacctccaggccctgaacgcggactggcacgcagactgcttcaggtgttgtgactgcagtgcctccctgtcgcaccagtactatgagaaggatgggcagctcttctgcaagaaggactactgggcccgctatggcgagtcctgccatgggtgctctgagcaaatcaccaagggactggttatggtggctggggagctgaagtaccaccccgagtgtttcatctgcctcacgtgtgggacctttatcggtgacggggacacctacacgctggtggagcactccaagctgtactgcgggcactgctactaccagactgtggtgacccccgtcatcgagcagatcctgcctgactcccctggctcccacctgccccacaccgtcaccctggtgtccatcccagcctcatctcatggcaagcgtggactttcagtctccattgaccccccgcacggcccaccgggctgtggcaccgagcactcacacaccgtccgcgtccagggagtggatccgggctgcatgagcccagatgtgaagaattccatccacgtcggagaccggatcttggaaatcaatggcacgcccatccgaaatgtgcccctggacgagattgacctgctgattcaggaaaccagccgcctgctccagctgaccctcgagcatgaccctcacgatacactgggccacgggctggggcctgagaccagccccctgagctctccggcttatactcccagcggggaggcgggcagctctgcccggcagaaacctgtcttgtaagtcagcctgctcctcggttcagctgggtgctttcactcctgctggggctcaggggctgtgggacctaggtcggggagccagccctgcacaaatgcagcccaggcttgagccagggaggtggaggctgcagtaagctgtcatcacaccactgctctccagcttgggtgacaaaacaagacccactctcaaaaaaaaa

SEQ ID NO: 20152 - DNA, 691 bp, Homo sapiens
gaatttcctgggaatggatttcagaatcattcctaagattaactgtaggaggtttaaaactctgtgcaaatgtgcacgtttgctatgtgtgtggaatattctttaaaaatataattgaaaattttctttattctgaaaaagtgaactgctgtgatttaccttgatttggctgaatgaagttaataaattggatagctccttaagggctttattctcttggtaattgcctacttgtgtggatgcacattttatctagtttgaatttgtttcaaaggaacattattttgtaaataaaatatatattttttcccatgtggtattgcatagcacatggagaaaatagattgatgataccgtttcattttatgatttttctttgaatataatgttttgttcttttattggaaataaaactgaccccaagaataaaattatatttccttttaattttatgatagtgcatttaaagtaatgtatatctacccaaggtgatgaagatgatgattgccaaccacaatttaatgacattaaagaaattaatgagttttgattcctttgcttatcttgtgtgttatagtctaactccttttaaatctgttctttgacattttatatgactttcagattgtgtgcgtatatatgatacatataattatgtattaaagtatgttaattaaaaatgttaattaaa

SEQ ID NO: 20153 - DNA, 573 bp, Homo sapiens
  misc_feature (195)..(195): n is a, c, g, or t
  misc_feature (386)..(386): n is a, c, g, or t
aaaatatatggtctaggtacgaggctgggtttaccatgttgtcggtagcagccctgctcggtgcccgttcgcgcccgtcctgtcggccacgtccgcggggttgcgggcgcgctgcggccttggtgcaggccacggtgcccgccaccccggagcagctgtgttggacctgaagcggcccttcctcagccgggagtngctgagcgccaggcctgcgccgcctttggtcgcctccgtgggcctcaatgtccctgcttctgtttgttattcccacacagacatcaaggtgcctgacttctctgaataccgccgccttgaagttttagatagtacgaagtcttcaagagaaagcagcgaggctaggaaaggtttctcctatttggtaactnggagtaactactgtggggtgtcgcatatgctgccaagaatgccgtcacccagttcgtttccagcatgagtgcttctgctgatgtgttggccctggcgaaaatcgaaatcaagttatccgatattccagaaggcaagaacatggctttcaaatggagaggcaaacccctgtttgtacgtcatagaacc

SEQ ID NO: 20154 - DNA, 492 bp, Homo sapiens
  misc_feature (14)..(14): n is a, c, g, or t
  misc_feature (36)..(38): n is a, c, g, or t
  misc_feature (51)..(51): n is a, c, g, or t
  misc_feature (114)..(114): n is a, c, g, or t
  misc_feature (305)..(305): n is a, c, g, or t
gcggctgtcgcatngttgtcggtagcagcccgctcnnncgtttcgcgcccntcctgtcggccaccccggagcagctgtgttggacctgaagcggcccttcctcagccgggagtngctgagcgccaggcctgcgccgcctttggtcgcctccgtgggcctcaatgtccctgcttctgtttgttattcccacacagacatcaaggtgcctgacttctctgaataccgccgccttgaagttttagatagtacgaagtcttcaagagaaagcagcgaggctaggaaaggtttctcctatttggtaactnggagtaactactgtggggtgtcgcatatgctgccaagaatgccgtcacccagttcgtttccagcatgagtgcttctgctgatgtgttggccctggcgaaaatcgaaatcaagttatccgatattccagaaggcaagaacatggctttcaaatggagaggcaaacccctgtttgtacgtcatagaacc

SEQ ID NO: 20155 - DNA, 284 bp, Homo sapiens
aataagatttatgtaacttagacaattgcagaaattaaacaatatctgacatattaagttgacaaacatggtttaaagtgtttgaagatgttgaattaacaaagtttataaatgggaccaaaattattaaacattttttaaaagtacttaaatgtgatacacttatcaatagaataacgtgtaatctgaaatttaaagtttgagaactagttttaaatttgtaactttaataaattgaacccttccctcctctaggaaaataaaagaatacctatgtaaaagga

SEQ ID NO: 20156 - DNA, 438 bp, Homo sapiens
ttaaaatacaaaacagccacttagatttgagaactatgctaagtgctttgcaggcagtatctcgtcttgtttcagaataaaaggtgaaagactgtttctaattcatccatggaatcatactgtagtttcaatgtatgtatatcttaaaaattttattgtgtaaatatttaaatatgtaagtatttaattcagatgagttgatactcccagcgttcccaaatattgttaggggccagtgttaaataataactattttaccagaattatgaaaatatttgagaaccataagattttgtttctttgctcaaaaaactaaggggcctggcacaatggctcccgcctgtgatcccagcaccttgggaggctgaggcaggtggattgcctgagccgaggcattccacgaccagcctggccaacaaggggaaaccctgtctccac

SEQ ID NO: 20157 - DNA, 339 bp, Homo sapiens
tacaccagatttgctaaagcctaagactagtctcaaaaattcatttttctattaatcagaccacacacacacagagagagagagagagagacagaaagacagagagacagagagacagagaaagacagagacagagacagagagacagagaccagaagcttggctggtaacaaattcttaccccttttgccagcataccacgtttctgggttccctttctctgcagcttccagaagaatgaagtggcttttgatgaccctgctcattgcaccatagctttgggggccaagccactttacaaaagaaaattatccttttctgttttataaaactataggc

SEQ ID NO: 20158 - DNA, 253 bp, Homo sapiens
aaggaacctagccgaggtcacgtggtgatctgggagagaagcaggaagcagaacacagtctctggattctcagctagtcctgctccaccagcccagctgggttcctaccggacacttctcttcccgtgacttgtgctcagactctgccagcttaacacaagggaacgatgacaacagctcaccgctgtgctcctaacacctgcccccaactgcaaccagccctgctggatgtggccagaggcacaagctcagc

SEQ ID NO: 20159 - DNA, 406 bp, Homo sapiens
tgtatgtatatatgaatactggatattgatttaagcaaaatgttatatttaactctattttggggatgggagtgggatagaataataaaagaatgctgcctcatttgccctaagagcaagtctacaaataatatcttgactaataatagcaatataagcatattatttagcagtacacaaagtaaatgttataagagatggctaagagtttaaatttgttttctatagaaacagtatatgggagggggctaggaattgcagtttttgttataatctctaatagcatgtctttttttaaactgtccacatattaacattattttggatgatataaaataattttttaaaaatcgtgcatagataatgtacaagtgaaagagaagccagtgattttagcatacctcta

SEQ ID NO: 20160 - DNA, 433 bp, Homo sapiens
ctcgagcagttcttttaagggaggagaccacccctcgtattgtcttattcccaatttctgcctcagagaaaaagtaggagttaaagaaaagacagaaatgaaatcagcagtcaaacagccccatgctgcattccaggcctcgtagttaaagatcgacccctgacctaaccggttatgttatctatagattccagacattgtatggaaaagcactgtgaaaatccttgtcctgttctgttccattctgattacaggtgcatgcagcccccagtcatgtacccactgcttgctcaatggatcacgaccctctcgtgcagactgccttagagctgtaagcccttaaaagggacaggaattgctcacccagggagctcagtttttggagacatgagtccgctgatgctcccagctgaataaagccctttccttccac

SEQ ID NO: 20161 - DNA, 219 bp, Homo sapiens
aagtagagatagggtttcactgtgttggccaggctggtcttgaactcctcacattgtgatccacccgcctcggcctcccaaagttctgggattacaagcgtgagccaccgcgcctggccgtgtgtttgagattcctagagacattagtaaaaccctccaaaagagtggggaccttacaccagcctgccggttcaagctccatactggacctccacctcc

SEQ ID NO: 20162 - DNA, 327 bp, Homo sapiens
gaccccacagcccctgaagggttgtcagactgaagctttgttttaaggtgaccactggcctctaggaaaccttctacccccattatcttacctcaactgtttcctctggagccacttggacttcaaaaatagtttgattttaatgcaaactgttgtttctgcttttgtcttttcttcttactaacacttcagattctgagtatctgacctacctaattggcctggagcgaggacagctgccatgagtcagctctaataagttaaacggcattgtagtaaggcattgctatccttccattgtttcagataaaactgggtgaacgaatc

SEQ ID NO: 20163 - DNA, 4418 bp, Homo sapiens
  misc_feature (130)..(130): n is a, c, g, or t
cgcagggtcacagcgtgtctttgaagctgcctccgccgccaccatgagcggccgaagtcggggtcgaaagtcctcccgcgccaaaaaccggggcaaaggccgcgccaaagcccgagtccgccctgctccngacgacgccccgcgcgacccggacccttcacagtaccagagtctcggggaagacacccaggcggcacaggtgcaggctggcgcggggtggggtggcctggaagccgctgcgtccgcgcagctcctccggctcggggaggaggccgcctgccggctccccctggactgtggcctcgcgctgcgggcccgagctgcgggggaccacgggcaggccgcggccaggcccggcccggggaaggccgcatctctctcggagcgcctggccgcagacactgtcttcgtgggaacagcgggaaccgtgggaaggccgaaaaatgccccccgcgttggaaaccggcgtggccctgccgggaagaaggccccagaaacctgtagcaccgcggggagggggcctcaggtcatagctggtgggaggcagaagaaaggggcggcaggggagaatacctcggtgtcagctggggaggaaaagaaggaagagagggatgcagggtcggggcccccagcgacggaaggcagcatggatacgctggagaacgtgcagctgaagctggagaacatgaacgcccaggcggacagggcctaccttcggctctccaggaagtttgggcagttgcgactgcagcacttggagcgcaggaaccacctcatccaaaatatcccgggcttctgggggcaagcatttcagaaccatccccagctagcatcctttctgaatagccaagagaaagaggtactgagctacttaaacagcttggaagtggaagagctcggccttgccagattgggctacaaaatcaagttctacttcgatcgcaacccgtatttccaaaataaggtgctcatcaaggaatatgggtgtggtccttctggccaggtggtgtctcgttctactccaatccagtggctcccagggcatgatctccagtccctaagccagggaaacccagaaaacaaccgtagtttctttgggtggttttcaaaccacagctccattgagtctgacaagattgtggagataatcaacgaagaattgtggcccaatcccttgcagttctaccttttgagtgaaggggctcgtgtagagaaaggaaaggaaaaagaaggcaggcaaggtccaggaaagcagccaatggagactactcagcctggggtgagccaatccaactgatcctgcacaagtctccctgctacctcctgctgggctgctcctggttgactacatatttggctctctgccttctcttcatgttggcctctgtgtactatagaccctttggactttagttacaagaatatggcatttatgatcatgttcttttgcctcccatagcctcttgcttttctacgttagtgtcacatgttatgtgatcgcacccggactgttcatatgttaagcacacatactttagatgtgtgctccctgttatctacattgcctggaccttgttcttggctctggcctttcctacttgtctttaacatggacactcatgagtcatcctccaggacgaccagtgcatcctcaagctctgctccttcagggccagtgacttgctgggcttcgtgttcatgctggccatgcatgtcatctatgcaagcgtttccattgccactgcagaatgaagccagtgcacatggtattagtcatcagccagaacttcctgttctgtgggtctggggtcaccagctgagatgtcacctgctttatttctggctttggcctgtggtctgtgatacccatcctgcttgatgttctgcagaatggcacttgactgctgggcatgcatgaagttaagggcaagaaacagtatgccatgtgttctgtaccatcatgtgtctcttcttgcttctgggcccttctactggtgaactttcatcaagatctgcgccatgccgtgtcactatcaagccattaagttttgtctgggttgctgtcagccccagttggcttcctggtcaacaaggacctcaagaactgcctgtggaccgaggccccctaccagtgcatgagacacacacctaccctccccagctttccaggaaccctactggctgccagactgatgggcgggctggtatgtgtggacatgtgttcactgtcattatgctgtggctccaggtgagggtgaggactgggcctatatagaatccagataccattgtcaacttcccttattcccgtctaagatgtgagcagagtgccatagtaggggttctgggaagaggtatttctgatttgtgggcctctgcttgcttgacttcaggtcacttatacttcttattttgcttgcctgccttcatccctcatttcctccctctcattcttctttcctccctccctttcctggtagcctcctttcctccccttctgccttccccttccttctttccttattcttttttattttgtttaaatagtaccacagagaaaacaactgaaaaaccacatttttctacatacagctggggaggtagctgagaacttggcactgcgcacacatactaggttgaaagagagttgaggaaaccagaaggccaagtggatctgctggcaaaccctgaacctgtctcctgcgcttgctctacagttctgaagttgaaaatccttttcatgcctagcatctgcttgagttataaaccccaaggcagccatgtcatagactagtgtttactcttgttttgactttgttttaatgcttcctaagacccaagtgcctcctgctgtttcctcctttgtggtagcctctggccatctggacctcaatccccagctttcccactttcagcagtcctttgctctctttgcttctacctcaaatagccccaggagtgggctttagtctccaatatggagcatctcaagcttctcctgggggatggggattgggatgggcagaatctgttttggatctccgggttatttccagtgggtgtaaaagcagagctgggcctttccctctcttatccctgagggtgggtaagaaggactgtatctacacctgttcttccctaccttctcttttgttagggaggcctcattctaagttcctcaagagagtccttggcttaaagctgtagcaagggtgtgctaggtgggggatttggagcaaaaccgtcgagtaggcatgatactggtatggagtgggcctgcaaaatcagacagaaatggcttgagaagccgcagggggagcatgcctgtctctcagtgatagagtatgggagggacctccctagcttggaaaatgagaattgaaggggttatgaacaaataggatgcctagttgaggatgttcccaaagttttgtccaatcttatcattagtagattttataagccacagagacaaaccagaaacggaataatgttactttggatgctttatttttttgttctaggtgtggctttgtacatgcagaagaatgctatatgctgcacattttgcctttaaagtcttacgactttccccattttagtctaatgggaagatacagatgtgcaagtctgcttttttgttttttgttattatttttttttttttgctctgtgttatggacattttcagacatgcacagaagtggagaggatggtccttggaccccatgtgtccatcacctagctgcatcacttatcagctatggtcaacctggtttcatctgtatctctctcttttcacctgtattgtttattgaaaatccaagacactatgccaatgcaaccgtgactactttgggagattggtagtctcttttgatggtgatagtgatggggtgcactatcataatcacatcaggtctgctttttgcttttaatgttaactaatgaagttccagagatgggccttagaaatgtgttttaagaattaacaaggagtctcaaaaagaaatgagagggatgcttcctttcccttgcatctacaaaacaagagagagactgttctgttgtaaaactctttcaaaaattctgatatggtaaggtacttgagacccttcaccagaatgtcaatctttttttctgtgtaacatggaaacttgtgtgaccattagcattgttatcagcttgtactggtctcataactctggttttggaagaataatttggaaattgttgctgtgttctgtgaaaataacctccccaaaataattagtaactggttgttctacttggtaatttgacaccctgttaataacgcaattatttctgtgttcttaaacagtataaatagttgtaagtttgcatgcatgatggaaaaataaaaacctgtatctctgttatatttctgattttcaaaa

SEQ ID NO: 20164 - DNA, 2667 bp, Homo sapiens
  misc_feature (130)..(130): n is a, c, g, or t
cgcagggtcacagcgtgtctttgaagctgcctccgccgccaccatgagcggccgaagtcggggtcgaaagtcctcccgcgccaaaaaccggggcaaaggccgcgccaaagcccgagtccgccctgctccngacgacgccccgcgcgacccggacccttcacagtaccagagtctcggggaagacacccaggcggcacaggtgcaggctggcgcggggtggggtggcctggaagccgctgcgtccgcgcagctcctccggctcggggaggaggccgcctgccggctccccctggactgtggcctcgcgctgcgggcccgagctgcgggggaccacgggcaggccgcggccaggcccggcccggggaaggccgcatctctctcggagcgcctggccgcagacactgtcttcgtgggaacagcgggaaccgtgggaaggccgaaaaatgccccccgcgttggaaaccggcgtggccctgccgggaagaaggccccagaaacctgtagcaccgcggggagggggcctcaggtcatagctggtgggaggcagaagaaaggggcggcaggggagaatacctcggtgtcagctggggaggaaaagaaggaagagagggatgcagggtcggggcccccagcgacggaaggcagcatggatacgctggagaacgtgcagctgaagctggagaacatgaacgcccaggcggacagggcctaccttcggctctccaggaagtttgggcagttgcgactgcagcacttggagcgcaggaaccacctcatccagactgatgggcgggctggtatgtgtggacatgtgttcactgtcattatgctgtggctccagctggggaggtagctgagaacttggcactgcgcacacatactaggttgaaagagagttgaggaaaccagaaggccaagtggatctgctggcaaaccctgaacctgtctcctgcgcttgctctacagttctgaagttgaaaatccttttcatgcctagcatctgcttgagttataaaccccaaggcagccatgtcatagactagtgtttactcttgttttgactttgttttaatgcttcctaagacccaagtgcctcctgctgtttcctcctttgtggtagcctctggccatctggacctcaatccccagctttcccactttcagcagtcctttgctctctttgcttctacctcaaatagccccaggagtgggctttagtctccaatatggagcatctcaagcttctcctgggggatggggattgggatgggcagaatctgttttggatctccgggttatttccagtgggtgtaaaagcagagctgggcctttccctctcttatccctgagggtgggtaagaaggactgtatctacacctgttcttccctaccttctcttttgttagggaggcctcattctaagttcctcaagagagtccttggcttaaagctgtagcaagggtgtgctaggtgggggatttggagcaaaaccgtcgagtaggcatgatactggtatggagtgggcctgcaaaatcagacagaaatggcttgagaagccgcagggggagcatgcctgtctctcagtgatagagtatgggagggacctccctagcttggaaaatgagaattgaaggggttatgaacaaataggatgcctagttgaggatgttcccaaagttttgtccaatcttatcattagtagattttataagccacagagacaaaccagaaacggaataatgttactttggatgctttatttttttgttctaggtgtggctttgtacatgcagaagaatgctatatgctgcacattttgcctttaaagtcttacgactttccccattttagtctaatgggaagatacagatgtgcaagtctgcttttttgttttttgttattatttttttttttttgctctgtgttatggacattttcagacatgcacagaagtggagaggatggtccttggaccccatgtgtccatcacctagctgcatcacttatcagctatggtcaacctggtttcatctgtatctctctcttttcacctgtattgtttattgaaaatccaagacactatgccaatgcaaccgtgactactttgggagattggtagtctcttttgatggtgatagtgatggggtgcactatcataatcacatcaggtctgctttttgcttttaatgttaactaatgaagttccagagatgggccttagaaatgtgttttaagaattaacaaggagtctcaaaaagaaatgagagggatgcttcctttcccttgcatctacaaaacaagagagagactgttctgttgtaaaactctttcaaaaattctgatatggtaaggtacttgagacccttcaccagaatgtcaatctttttttctgtgtaacatggaaacttgtgtgaccattagcattgttatcagcttgtactggtctcataactctggttttggaagaataatttggaaattgttgctgtgttctgtgaaaataacctccccaaaataattagtaactggttgttctacttggtaatttgacaccctgttaataacgcaattatttctgtgttcttaaacagtataaatagttgtaagtttgcatgcatgatggaaaaataaaaacctgtatctctgttatatttctgattttcaaaa

SEQ ID NO: 20165 - DNA, 770 bp, Homo sapiens
accagttacggaactctcacttctgtgttatggacattttcagacatgcacagaagtggagaggatggtccttggaccccatgtgtccatcacctagctgcatcacttatcagctatggtcaacctggtttcatctgtatctctctcttttcacctgtattgtttattgaaaatccaagacactatgccaatgcaaccgtgactactttgggagattggtagtctcttttgatggtgatagtgatggggtgcactatcataatcacatcaggtctgctttttgcttttaatgttaactaatgaagttccagagatgggccttagaaatgtgttttaagaattaacaaggagtctcaaaaagaaatgagagggatgcttcctttcccttgcatctacaaaacaagagagagactgttctgttgtaaaactctttcaaaaattctgatatggtaaggtacttgagacccttcaccagaatgtcaatctttttttctgtgtaacatggaaacttgtgtgaccattagcattgttatcagcttgtactggtctcataactctggttttggaagaataatttggaaattgttgctgtgttctgtgaaaataacctccccaaaataattagtaactggttgttctacttggtaatttgacaccctgttaataacgcaattatttctgtgttcttaaacagtataaatagttgtaagtttgcatgcatgatggaaaaataaaaacctgtatctctgttatatttctgattttcaaaa

SEQ ID NO: 20166 - DNA, 4074 bp, Homo sapiens
  misc_feature (130)..(130): n is a, c, g, or t
cgcagggtcacagcgtgtctttgaagctgcctccgccgccaccatgagcggccgaagtcggggtcgaaagtcctcccgcgccaaaaaccggggcaaaggccgcgccaaagcccgagtccgccctgctccngacgacgccccgcgcgacccggacccttcacagtaccagagtctcggggaagacacccaggcggcacaggtgcaggctggcgcggggtggggtggcctggaagccgctgcgtccgcgcagctcctccggctcggggaggaggccgcctgccggctccccctggactgtggcctcgcgctgcgggcccgagctgcgggggaccacgggcaggccgcggccaggcccggcccggggaaggccgcatctctctcggagcgcctggccgcagacactgtcttcgtgggaacagcgggaaccgtgggaaggccgaaaaatgccccccgcgttggaaaccggcgtggccctgccgggaagaaggccccagaaacctgtagcaccgcggggagggggcctcaggtcatagctggtgggaggcagaagaaaggggcggcaggggagaatacctcggtgtcagctggggaggaaaagaaggaagagagggatgcagggtcggggcccccagcgacggaaggcagcatggatacgctggagaacgtgcagctgaagctggagaacatgaacgcccaggcggacagggcctaccttcggctctccaggaagtttgggcagttgcgactgcagcacttggagcgcaggaaccacctcatccaaaatatcccgggcttctgggggcaagcatttcagaaccatccccagctagcatcctttctgaatagccaagagaaagaggtactgagctacttaaacagcttggaagtggaagagctcggccttgccagattgggctacaaaatcaagttctacttcgatcgcaacccgtatttccaaaataaggtgctcatcaaggaatatgggtgtggtccttctggccaggtggtgtctcgttctactccaatccagtggctcccagggcatgatctccagtccctaagccagggaaacccagaaaacaaccgtagtttctttgggtggttttcaaaccacagctccattgagtctgacaagattgtggagataatcaacgaagaattgtggcccaatcccttgcagttctaccttttgagtgaaggggctcgtgtagagaaaggaaaggaaaaagaaggcaggcaaggtccaggaaagcagccaatggagactactcagcctggggtgagccaatccaactgatcctgcacaagtctccctgctacctcctgctgggctgctcctggttgactacatatttggctctctgccttctcttcatgttggcctctgtgtactatagaccctttggactttagttacaagaatatggcatttatgatcatgttcttttgcctcccatagcctcttgcttttctacgttagtgtcacatgttatgtgatcgcacccggactgttcatatgttaagcacacatactttagatgtgtgctccctgttatctacattgcctggaccttgttcttggctctggcctttcctacttgtctttaacatggacactcatgagtcatcctccaggacgaccagtgcatcctcaagctctgctccttcagggccagtgacttgctgggcttcgtgttcatgctggccatgcatgtcatctatgcaagcgtttccattgccactgcagaatgaagccagtgcacatggtattagtcatcagccagaacttcctgttctgtgggtctggggtcaccagctgagatgtcacctgctttatttctggctttggcctgtggtctgtgatacccatcctgcttgatgttctgcagaatggcacttgactgctgggcatgcatgaagttaagggcaagaaacagtatgccatgtgttctgtaccatcatgtgtctcttcttgcttctgggcccttctactggtgaactttcatcaagatctgcgccatgccgtgtcactatcaagccattaagttttgtctgggttgctgtcagccccagttggcttcctggtcaacaaggacctcaagaactgcctgtggaccgaggccccctaccagtgcatgagacacacacctaccctccccagctttccaggaaccctactggctgccagactgatgggcgggctggtatgtgtggacatgtgttcactgtcattatgctgtggctccagctggggaggtagctgagaacttggcactgcgcacacatactaggttgaaagagagttgaggaaaccagaaggccaagtggatctgctggcaaaccctgaacctgtctcctgcgcttgctctacagttctgaagttgaaaatccttttcatgcctagcatctgcttgagttataaaccccaaggcagccatgtcatagactagtgtttactcttgttttgactttgttttaatgcttcctaagacccaagtgcctcctgctgtttcctcctttgtggtagcctctggccatctggacctcaatccccagctttcccactttcagcagtcctttgctctctttgcttctacctcaaatagccccaggagtgggctttagtctccaatatggagcatctcaagcttctcctgggggatggggattgggatgggcagaatctgttttggatctccgggttatttccagtgggtgtaaaagcagagctgggcctttccctctcttatccctgagggtgggtaagaaggactgtatctacacctgttcttccctaccttctcttttgttagggaggcctcattctaagttcctcaagagagtccttggcttaaagctgtagcaagggtgtgctaggtgggggatttggagcaaaaccgtcgagtaggcatgatactggtatggagtgggcctgcaaaatcagacagaaatggcttgagaagccgcagggggagcatgcctgtctctcagtgatagagtatgggagggacctccctagcttggaaaatgagaattgaaggggttatgaacaaataggatgcctagttgaggatgttcccaaagttttgtccaatcttatcattagtagattttataagccacagagacaaaccagaaacggaataatgttactttggatgctttatttttttgttctaggtgtggctttgtacatgcagaagaatgctatatgctgcacattttgcctttaaagtcttacgactttccccattttagtctaatgggaagatacagatgtgcaagtctgcttttttgttttttgttattatttttttttttttgctctgtgttatggacattttcagacatgcacagaagtggagaggatggtccttggaccccatgtgtccatcacctagctgcatcacttatcagctatggtcaacctggtttcatctgtatctctctcttttcacctgtattgtttattgaaaatccaagacactatgccaatgcaaccgtgactactttgggagattggtagtctcttttgatggtgatagtgatggggtgcactatcataatcacatcaggtctgctttttgcttttaatgttaactaatgaagttccagagatgggccttagaaatgtgttttaagaattaacaaggagtctcaaaaagaaatgagagggatgcttcctttcccttgcatctacaaaacaagagagagactgttctgttgtaaaactctttcaaaaattctgatatggtaaggtacttgagacccttcaccagaatgtcaatctttttttctgtgtaacatggaaacttgtgtgaccattagcattgttatcagcttgtactggtctcataactctggttttggaagaataatttggaaattgttgctgtgttctgtgaaaataacctccccaaaataattagtaactggttgttctacttggtaatttgacaccctgttaataacgcaattatttctgtgttcttaaacagtataaatagttgtaagtttgcatgcatgatggaaaaataaaaacctgtatctctgttatatttctgattttcaaaa

SEQ ID NO: 20167 - DNA, 1361 bp, Homo sapiens
  misc_feature (130)..(130): n is a, c, g, or t
cgcagggtcacagcgtgtctttgaagctgcctccgccgccaccatgagcggccgaagtcggggtcgaaagtcctcccgcgccaaaaaccggggcaaaggccgcgccaaagcccgagtccgccctgctccngacgacgccccgcgcgacccggacccttcacagtaccagagtctcggggaagacacccaggcggcacaggtgcaggctggcgcggggtggggtggcctggaagccgctgcgtccgcgcagctcctccggctcggggaggaggccgcctgccggctccccctggactgtggcctcgcgctgcgggcccgagctgcgggggaccacgggcaggccgcggccaggcccggcccggggaaggccgcatctctctcggagcgcctggccgcagacactgtcttcgtgggaacagcgggaaccgtgggaaggccgaaaaatgccccccgcgttggaaaccggcgtggccctgccgggaagaaggccccagaaacctgtagcaccgcggggagggggcctcaggtcatagctggtgggaggcagaagaaaggggcggcaggggagaatacctcggtgtcagctggggaggaaaagaaggaagagagggatgcagggtcggggcccccagcgacggaaggcagcatggatacgctggagaacgtgcagctgaagctggagaacatgaacgcccaggcggacagggcctaccttcggctctccaggaagtttgggcagttgcgactgcagcacttggagcgcaggaaccacctcatccaaaatatcccgggcttctgggggcaagcatttcagaaccatccccagctagcatcctttctgaatagccaagagaaagaggtactgagctacttaaacagcttggaagtggaagagctcggccttgccagattgggctacaaaatcaagttctacttcgatcgcaacccgtatttccaaaataaggtgctcatcaaggaatatgggtgtggtccttctggccaggtggtgtctcgttctactccaatccagtggctcccagggcatgatctccagtccctaagccagggaaacccagaaaacaaccgtagtttctttgggtggttttcaaaccacagctccattgagtctgacaagattgtggagataatcaacgaagaattgtggcccaatcccttgcagttctaccttttgagtgaaggggctcgtgtagagaaaggaaaggaaaaagaaggcaggcaaggtccaggaaagcagccaatggagactactcagcctgggggccccgaccctgcatccctctcttccttcttttcctccccagctgacaccgaggtattctcccctgccgcccctttaatct

SEQ ID NO: 20168 - DNA, 561 bp, Homo sapiens
cactcattatcttcttacacatcttgaatttacagcacgtaacatttcctgagatttaggttacagctagaatacacagctgttatttctggcttttatctcccaccaaaatgcaagctccatgaaggcaaggactttgtcttattcactgctgagtttcagtacctggaacagtaactggcctataaggggcacttaaaaaagatttgaggagtggatgcatgatagcaaccactgaaaactataacccgacttggaaggggcttggttttgcaggaagccaacctgggattcataaccaggcatgaggatggggctgggggagggttagtcaatacaggaccctgtgctaactctggggtaaggtatggctataaaacagagcagccctaccgtggttctttacaaggttggtctaagagttatttcactttgggagcctcccacacaagggtgacttgaccaaagttctcagcaggggataacaggatgcaggaaactccttggtcaccaggagaccatagctgagcttcccaagcaggctcagaagccttcaggcag

SEQ ID NO: 20169 - DNA, 552 bp, Homo sapiens
caagtttccctcccctctgtgaccgagactaagtctagcacacagcacttgggccagcaaatcctggaaggcagacaaaaatgagaacctgaagcaatgcttacagtagatgtctcacacagaacaatacaaacatgtaaaaaatctttcaccacatattcttgccaattaattggatcatataagtaaaatcattacaaatataagtatttacaggatttaaaagttagaatatatttgaatgcataggtagaaaagtatcatattttaaaactatgtatatttaaatttagtaattttctaatctctagaaatctctgctgttcaaaaggtgggcagcactgaaagttgttttcctgttagatgggcaagagcacaatgcccaaaacagaagatacagttaggaataaggggccttgaatgtcatgaaggcttgaggtcagcttacagataacaggattattaaaaagatgaatttccacttccaaagtctttcattggcagatcttggtagcactttatatgttcaccaatgggaggtcaacatttatc

SEQ ID NO: 20170 - DNA, 290 bp, Homo sapiens
ttttttttcatattcatcaatatctcattcagtagatcttttcttcttgacttatgagatttagagaattcatctgaaagtctattaaatccttcttcagtgtctccatttagcttctctttcattttaatttttttggtcttgggagcatccaggtaatctgtaacaccattttctcttgtttctgatttctcatctgagtcataatggtggcttgacttccttctgtcactccagcactgtgtaatgtattttcagcttatcttgtttaaatcttcgtaaaaaccata

SEQ ID NO: 20171 - DNA, 414 bp, Homo sapiens
actctgctctttaataactgtgtgacttaagactggttacttcacctctgagtctgagcttcctcatctctaaaatggggatggtaatagtagttcctacctcagttcctgacatatagtaagagcttaataaatatttggagatggaaaaaactaatatcttgaagactaaattaaataatggacattaggtgctaagcacatcctaagtgttcaacaagtattagttattaggtgttagttattaggccccagttgtctgtttaatgaatcagtgccaacctttaggttattactaaagggctgcatacttaatcctatcccctttttacatttttattaatgacttaataaaaacaagcatgactccaaatttctagatgatagaaagctgaaaagagtaacaggagatac

SEQ ID NO: 20172 - DNA, 430 bp, Homo sapiens
tctttatcccaatctgagattctgtaatgtttggaagccaactcaatctacatatcgcacttgattgataactcagtgcactataaacaggctctactggcatgttcatttcatagaattcttaggttctccttatctgaggaagacacctcaaaatggaacaactgacaccctacgagccccagatccctgtacttccccttttgtaacactcatcagattttaaattacttgtgcttattacccactaagtcctataatattatgtaccatatctgtcttaactactcctagaggcacagtgcctcttcagattatgtttgacactttcagtgtgctctaaaagcatttattaattgaattagataaatgagtgaatcttgattctgctgccttttctttcttaaaagggaatctgagccctttatat

SEQ ID NO: 20173 - DNA, 332 bp, Homo sapiens
agagaatagcaaatactatatactaatgtaattgcaaatttatatgaaatggccaatgttgaggaaattacaaattatcaaaattgaagaagagttaagaaacctgaatatactgctatagtgaaaaaactgaaaaaattaggaaaagaccacctaaaatgacctgaggcccaaaagcttttgctgagtaattccaccaaacattaaagaggagaaaatttctacattatatgaagtgtgctaggaaaataactcatctcaagttatttaaagctaggaaaataactcatctcaaaagggagtattatttttgacacaaaaattagtgtatt

SEQ ID NO: 20174 - DNA, 895 bp, Homo sapiens
ttagatggagtcttggctctgttgcccaggctggagtacagtggcacgatctcagctcactgcactctccacctcctgggttcaagcactactcgggaggctgaggcaggagaagggcatgaacctggcaggcggagcttgcagtgagccaagatggcgtcactgcactccagcctgagggacagagcaagactctgtctcaaaaaaaaaagaaaaaaaagtggcacagatcaattataaatcacggcttcaaggccagtgctctcacttggtacattaataatctcaggcccaaataagataagtgatatgtcaacgtatgttcactttggtctttacatggcagctatagtatacggaatattataagctcagatcgtcatagctacataactcctttagttggaagatcacgcgtaaatgcccatcaagagctagcagttctgcatttgactcttgaagaccgtggcatggcagacaacacttcttgagctgtaacaggtggacattaaatccatgacaggaggtagagacggccagattacttgagcccaagagtttgagaccagcctaggcaacatggaaacaacagttccaggccaggtgcgatggctcatgcctgtcatctcaacactttgggaggctgaggtggttggaccacctgaggtcaggagttcaagaccagcctggccaacatggcaaaactctgtctctactaaaaaatacaggccgggtactgtggctcatgcctgtaatgccagcactttgggaggctggggcaggcaaatcatgaggtcaaaagattgagaccatcctggccaacatggtgaaacctcgtctctactaaaaatacaaaaattagccaggcatggtagtgtgcgcctgtagtcccagc

SEQ ID NO: 20175 - DNA, 934 bp, Homo sapiens
ataacttcagaaactaaatctgaataaaaacctatgtgtaaacgatcatatagatggctgttagcaaagtggtacttttgtcaactatagtatagtatatttgacacgtttaaaatgtacagtttcataggttttaagatacatatatacacaggaagccatcatcacaatcaagatagtgaacataacctaaatctccagaagtccctcatgttcctttgtgatcttgtctcctgccccttcataccgtccatccccagggaaccattgcattctgtcatgagagattagttttgcactttctaaaattttgcataagtggaatcatacagtagggacccttcaggagtggaggagggctggcttatttcagtcagcataattgagattcatccataaagtagcaagtatcaatactttttattatatattgattgtggttatcccacagtttatccattcacttattgatggacatttgaattccagtttttagaaattacaaagctgctaagaacattttagtacaactcttggtatggatagatgctttcttcttgagtaaatacctcggagtggaatggctgaattgtaatggatatgtgtgtttatctttcgaaggaaacaacagttccaggccaggtgcgatggctcatgcctgtcatctcaacactttgggaggctgaggtggttggaccacctgaggtcaggagttcaagaccagcctggccaacatggcaaaactctgtctctactaaaaaatacaggccgggtactgtggctcatgcctgtaatgccagcactttgggaggctggggcaggcaaatcatgaggtcaaaagattgagaccatcctggccaacatggtgaaacctcgtctctactaaaaatacaaaaattagccaggcatggtagtgtgcgcctgtagtcccagc

SEQ ID NO: 20176 - DNA, 454 bp, Homo sapiens
tgctcttaaataccctacaatgcacagatggtacctccattcccatccccagctctgccctcatgcaacgaagaatgatctggcccaaaatgtcaatagtgccaaggttgagaaactctgtgctggaagagattgccccaaactggattctaaaagaacttgagttggcgtcccagatctgtggattctgtgaccttgagtaagttacttatctctctgatctcttctgaagtgaaaagtgatcaaactgtctgggtgtgagaagaatataaaaggatatatgtaaaatatctggccagaaataagttcaatcattacttttctcccttcttttccctaacaaagtgtagtaaaaggctctgcctcaaagtgagttctgagagaaaggagttttgaagtactcatatttttcactgatttggtaatatctcaagattttattacttgcctgttt

SEQ ID NO: 20177 - DNA, 297 bp, Homo sapiens
agacatttgatgtcagttttcagaatgagattattttttctaatttttaccagtcaagctttgctagcaggaactgagaacattcagaagtctgcctccaaaggcaggaagtttacctagtttcatctgaatagggtgcaaggccatgccaaggggaagtatttgcattattccctagcagaacctcgtacaaggctgccaactccatccgcctagtgaggatacagtgatattcaggccaaattgaatttcttcccccggggaagattattttgctcctttgctctctgttttgtt

SEQ ID NO: 20178 - DNA, 671 bp, Homo sapiens
atggcatgtcacccagtagtactaaacttaagataacatgcaggtaccttttgattcctttcctgactgctgagtcactctattgttgcagaccattagaccggacttcactcacatactccacgaggaaattcttgaaggtttgttctgtccaggaaccttcaattctgtagcagtggcctcagtttcacagcacacagctgccccaccctaccacgcattcagtgtgctgattgagagggctggaaaagcagggaccgtcccctaatccctaaaacgtcttgttgggtggactctgctagcaaaagagttgtcattcccagtcatgctctggaaaggaggtgctagtgacctgatggggcatggccacagcacccttcactgcctgccctcaaggggccagcaccacctggccggccagtctctccacacgctgcttctctttttacgtttaaaaaaatgatttaaaagatgatgtcagagcaatggtgaagtaaattgtggagggaatgaaaacacccccaccttgaaatcctagcccaacccgtttcatttctgtaagggactctgtccctgtgtttcctcagcacgtttcccaaaacatgtgacccagagtgactcggggaatttctgaattatggaagtagtactaaaaaatatttacattgcag

SEQ ID NO: 20179 - DNA, 332 bp, Homo sapiens
gagggacaagatctttgtgtatattttaaattttgtttagttagaaaatagtaagttgccttttagcctagccccaaaactcatttgtgaagtggacatccatttaaaatctagctccatttagcccccgattacagtggcttgccttgtcaaacctcctgctcactagtgggatcctcactcagcaaatgtttgttgagtgtgggccaggcacgatggctcatgcctgtaatcccagcactttgggaggccgaggtgggcagatcacttgaagccaggagttcaagaccagcctggccaaaaaagcaaaaccctgtctctactaaaaatac

SEQ ID NO: 20180 - DNA, 337 bp, Homo sapiens
taaaagccctctttaaaaaaaaaacattacaaatattttactcatatatctttaaagttaaagactaagggctgggtgtggtggctcatgcctgtaatctcagcactctgggagaccaaggcgggtggatcatttgaggccaggagtttgaggccagcctggccaccatgtctactacaaatacaaaaattggccaggcgtggcagtgcgtacttgtaatcccagcttcttgggaggctgaggcatgggaatcacttgaacccaggaggcagaggttgcagtgggccaagatcatgccactgcactccagcctgggcgacagaatgactcccatctc

SEQ ID NO: 20181 - DNA, 396 bp, Homo sapiens
tcgatttttttacattatttggacattatgactttttctataaaatagtaagaacattaaaatgtaagacgcataatgaaaatacaagtggagaagctgtttgtagtaaaattcctattaagtaatgtataacgtaaatgttcagagcaatactttattatagtgacacaaagaaataattaaaagtatattaaaataaatgagtatattactttactacttgtacttttatgtaataaaatgcagtgcattttaaaactgttagggccgggcttgatggctcatgcctgtaatttcagcactttgggaggccaaggtgggcagatcacctgaggtcaggagttcgagaccagcctgaccaacatggagaaacccagtctctactaaaaatacaaa

SEQ ID NO: 20182 - DNA, 335 bp, Homo sapiens
aacttgtctcaaaaaaacaaaaaaataaaacccctcaacagtaagaaaatgaacagcccgatttaaaaaaaaatgggcaaagccaagtgtggtggcttacatctttaatcccagcactttgggaagctgaggtgggaggatcacttgaggccaggagtttgagatcagcctgggcaacatagaaagatcccatctctacaaaaaataaaaagcttagccaggcatggtggtgcacacctttagtcccagctttttgggaagctgagacaggaggatcacttgagcccaggagttcaaggctgcaattagccatgatcgagccactgcactctgcc

SEQ ID NO: 20183 - DNA, 777 bp, Homo sapiens
ggagctttactttcttattttcctaattggaacaaatgctaattgaaacaaatggatatttaaaaatgtttgctttgttctaatttgtatttttatggagaaaggcaatttttaaatatgtaaataatgatgtactttcctaagctgccagctaacttcaagtcactggaaagctttggttcctaagttagtgggtgataaaatcagtacctattttactagattctcacatcccttttcaaaacaatctccattgacctatgtacaagaggtaagcaaaacaatgtgcacaaagattaataggttgtaatgaaatgatagaaattatagaaatgttatttttaatatttcaattaatatcttataaagtaatgcacatttatgttagaaaatttaaaatacaggatatataataaagaaaattaagagtagtcataatcctaccttttatttaatagcttcaactattagatttttagtatatttaaggaatctctcaaatatatatggttataacatatatagtgcatattatttgtactttaattaatattagaataaaattataaatgcagttttacatctaatttgttttattttattcagaatttcccaccatattaaatgtactatagaaagtgaacatttcatcataaaataatttatttaactaatactcatttgtgattggccacttccagtttttcacaaccgtagcaaagaataaacttgtaattcactctctatgtacatccttgtttcctcagcataaacttt

SEQ ID NO: 20184 - DNA, 491 bp, Homo sapiens
ggttaacatgcgggataataaaatgtattagatcatctactactattaaggtccagttccttcaaatttgttacatgtgcattaaaactgatcctattctgtatcacatctagagaaaataattttgggtgatcaatgcagatgaaagccctgcaaagaactacttcaaaagagaaaagggcactttataaaaatacaacaattccaaaaggcttagtgtaattttaagctttgatacttgtagaagtatcaatgctacaaatatttacaaagcatcactgaaaggtttgttatatttcttttacctttatttagttttgccattttttagagtgacagggtctcagtatgttgccaaggctggagtgcaatggctatttccaggcacaatcacagcgcactgcagcctccaatgctaggcctcaagtgatcctgccatttaagccttatgagtagctgggactacaggcatgcctagctcctgaatatta

SEQ ID NO: 20185 - DNA, 452 bp, Homo sapiens
gggatttcagttaggagatttgggtgaggacacagagctaaaccacatacataacccataaaggataaaattaggggagctgtgagatggtcatagaagggatattttatcaaaaattttagagatttgtagtctaaggattctatggtctttactggttgaagtaaaactcccaataaaaacgttttagtagcttctttgattctgaatatttacaaagtgagtctcctttgaaatatgttagacaaaggcagggaaagacctttaaattaaccaacactctagctttttcctataccctggtttctgttattaagatttttttcctccaaataatcattttgctttgtaatcccaagagaaaagataggcaaaaatgcatgccccaaaactcttatagatcagcgtatctcagagtaaaatccaagatacctgtgtgagaatcccctgat

SEQ ID NO: 20186 - DNA, 331 bp, Homo sapiens
tattcataaaatcgaccttgttataagaataagaaatctgtggccaggtgcagtgactcacacctgtaatcccaacactttgggaagctgagacaaaaggatcgcttgagcccaggactttgagaccagcctgggctacagggcaaaatgctttctctgcaaaagatattaaaaaaaaaaatagctgggcatggtggcacgtccctacagtcctgactagttgggagactgaggtgggagaattacctgagtccaggaggttgaggctgcagtgagccgagatagtgtcactgcacttcagcctgggtgactgagcaagactctgtctcac

SEQ ID NO: 20187 - DNA, 358 bp, Homo sapiens
aagaatttcttaatttccaaatggcagaagctgtagagatgttttgacgctttttagaaaacagtaaagcatataatacttcacatgaaggtttatcttgaactacttttccagtcttccttctttcttgttatatttgactttcagaaattttaggtgagatataaaaagccttataggagcagtattcagcaaagtgtgtttaaccaactttgttacatacaccagttctttgctttaaaagaaatagtgttttgtttttcttaaaagcttttattgagctataatttacatgtcacactattcacacatttaaagtatacaattcagtggcttttactatgttcatagagttgtg

SEQ ID NO: 20188 - DNA, 477 bp, Homo sapiens
acacaaaaatgcacaagtttgacatgtcccaagtaaccaaaggcagtgcatttcaaatttatacctgatgaaatcacaccacttaagaatttaacagatctatcaacattgcaccagaccatatgtctacacagatctggccaggtgtttgggttgaataggagtttccgtagtagaagaaatttgagataatagaagagtcttgtcccaccttaggaaagttgcctaaactctctgcacatctaaagaactctgaaagatggaaggaaaatgctgacttcagtctgacaaaagggtacctagaaaaaagtcaaagcatgcaaccaccatgctctgaaagaaagtcaggtgatgggatgatctgtgtggcaaaccaccgtgacagtgtttacctatgtaatgaacctgcatgtcctatcctgcacatgtaacactgaccttaaaataaaagttggaaatcaagaataaaaatttaaa

SEQ ID NO: 20189 - DNA, 365 bp, Homo sapiens
gccaggcacatgcttcccatgcgctaggtactgttttgtgtgcttatatatattaacccatttaatcttaactcatttaatctaattaacccatttaatctaatattaacccattaatagatgtcatatgcctgtttaatctgccaagaacaaagccaagggcatttctttcatattcttactccttcattcaatcatttgcccatttgtccaggcttattgagtgtttgctgtgggtaagccaggcagaattctaggttttggtgatcccgtggtgaacaagccacagttcccgccctcctagagcttctattctactggggcaggagacaatgaatttaaaaaaaaaaaaaaaaaaaaaaaaa

SEQ ID NO: 20190 - DNA, 522 bp, Homo sapiens
agagctagatctggtcataaaacaactcgaagttgtttactggaaagtttaaatacttgaatgtaattattcacatagttatttctatttggtttattctgatactgctgtataatgacctaacgtgacactaataggtcattaatgtaactgatataatagtatatgtatttttcatcgacttaagtcctgtataacaaattacattttaactaatttgaaatttaattcaactcattttaagcgttagaaagactgttttgtgaacctgtcaattgtgtaaaaaatgtattgaggtaatatttatattgaacaaaatagatacaactttaaattataattaggaatatttattgagaatttttgctgcagtttgtgtccgagattcatttcaatattgactgacttttgagtgcagtggatcccacctgtaatcctagctactctggaggctgaggcaggaggatctgttgagcccacgagtttgagaccagcctgggcaacatatcaagaccccttttc

SEQ ID NO: 20191 - DNA, 890 bp, Homo sapiens
agtgacctaaacttttgaaggctgaactctaaagcagcatggtttcccaccaagatattcaagccaaaaattaatccttgcctttcaatataatcacttctaatttcatgccttttggtataaccacacttgatgaatgcttcatttcttgccttggaaagccttgacctttcatgactgtccacaagccatgattgaccaggaactctttgggagcctcccattgcacaacactaccacaagtagaccatgagtaggacattattggttggaggcatcattggtctcataaaatgtagacaaaaatctccagggatattcttctacctttctaaaaaaagtaagcaagcaaatggaaggtgggccagaaacagccaggatccagactgtctgatgataataagacaaggcaagccagagctgctaggaggtggcttggacagcaggtagcagaatgggacaggattgtctcatgccagatttttgtaacagcatcattgtaaggttattgaatagcagagaggtagtatgttgaactcttacttccataaccctcaagagaaatgacatggtcctgagtctgggatacaaaattctattaaatgtttaaatcagtagaggatgcagttaggaagatgagcaaactcctcaggaataaaagactgtttaaagagaaggaaaataaatggaaattctagaaaagaaaaaatatatatagatataaaaaagaaattaaacagtagcttagtagtaggtaaatagcgtaaacaaaaagaactacacctagatacatcttaatgaaactgcagaaaatctaagaaaagatcttgaaagcagccagagagaaaggacagttcatcaaaggaacaacagaatgacagaagaattct

SEQ ID NO: 20192 - DNA, 587 bp, Homo sapiens
tccaacccagaactggtccctgcttccttagagtcatctcaggcacaagctcaaatgcagtgagaagccactcccatcttcctgtcactaagatgcccacggttcttctgcagtgtcctccctctcccatctcagcaagctaaagaaacctaactctgagcacgagtgtgttctgggtggtcttggatcagcagacattaacataaattctttataaatgatctatgcaataccaatatgttacgtacattatataagagacacacaaataaaagtttaaaaggttgagataaaaatgaatagaggtcgggcgcagtggctcacgcctataatcccagcactttgggaggttgaggtgggcggatgacctgaggtcaggagttcgagaccagcctggccaacatggtgaaaccccatctctactaaaaatacaaaaattagccaggcgtagtagcatgtgcctgtaatcccagctactcgaactgctgaggcaggagaatcacttgaacccgggaggcggaggttgcagtgagccgagatcatgccactgcactccagcctgggcaacagagtgagacgctgtctca

SEQ ID NO: 20193 - DNA, 426 bp, Homo sapiens
tcactacaaaaataaaaataaatataagctgggcatggtggtaggtgcctatagttctagctgaggaggctgaaaaaaaaggatcccttgagcccagaatttcaaggatgtattaagctctgattgcattattgcactccagcctggcaacagagcaagaccctgtctcttaaaaaaaaaaaaaaaaaaaaaacaaaaaactgctatataaatggagtcacacaggctgttaccttttgaaattggccttttttcactcagcataatgcccttgagttccagcaaagctgttgaatgtattaccagtttgttcctttttattttgtactccatggtatgtatggatgtaccacaatttgttaaccattcatttactgagggtcatttaatattacaaaataaacctgctttaaacatttgcttgta

SEQ ID NO: 20194 - DNA, 395 bp, Homo sapiens
tgagcgcagtgatggagagagggccaggaaagttggagggaagtgtcccaggtagctgggcaaggccctcaggagtcctgcattggtaaatcctgctgtactccatcatttgctgggagcagcatgtgggagctgtggccttggcgcaaatgcagcagatggtttcagcggccagcagctgggcccttccttggtcagttagctccctgttattggagatctgtaaggtgcgtactcatggttgccttcctcccaccccacaatattgtactttatatattaaaagtgccctaggctgtgcgggcttgagacaggggccagtctccctgccctttgagttaccagtgcagactacctggaatcttcattgtttaagagggccctaagcttcctgt

SEQ ID NO: 20195 - DNA, 313 bp, Homo sapiens
ccaccgtgtctggctaattttaaaattttttgtagagacgggtccccctatgttgcctaggctattctcatactcctaggctcaagtgatccttcagccttggcctccttagaattgttcattttaacttggggatggcaacatgggtgcagtgagtgtttaaagataatatgagggattttgatgagtttaattcaaaacatggaaacattcagatatcttatgtacagggcattgtctatgttatacaaacatttcttccagagtaaaatctttgctcacatttactactatgtgaacaaaataaaaatgc

SEQ ID NO: 20196 - DNA, 880 bp, Homo sapiens
tttaaacaacaggaatttatttctcagagttctggaggctgagcagttcagaaatcaaggtgccagctgatttggttcttggtgaaagccctttttgtggtttgcagacagaagcctttttgctgtgtcctcacatggtagagagagacatcaactctctagtttttgtaatacgggcacactaatcccattcatgaggggtttcaccctcatgactcaattacttcccagaggcccaccctccaagcactatcacactggggattaaagattcagtctgtgaatttgaggtggacacaaatactcagttcatagcactgcaggtatagttttgaggaccctagctttatgtattagtctcaattccaacttcttaccttgcatagacccaaggcctcttctgctgccctccccttacaatacaagcctatagttggaaccttattctacaggcctttataaagactgccaggggtggtgcttctctgctgattaatactgtattttttaaaaataatcttttttctagcatcggagaagttctctttcacgcaataattctaaagagaaatgaaattcaaaaactgggagtatctaaactcaactgctggctaattcaaggtagtgcctggtggtgtggaacaatcattttgaaatttctgacatctaaaatcttaggcgtttcagaccatatttgcctgagtgatcttatagcagccggaatcttaaggtatacagattttgatactttaaaatacacctgttctcccgaatttgacttcatggaaaaaagcgactgtgggtgatatttcgcgtgtttaagctacaaaccgtttatctaagaaaacagctccttgaacacagtgagctggcttttcac

SEQ ID NO: 20197 - DNA, 951 bp, Homo sapiens
taatcatcaaatttgttataaaataatttctgtcactataaaataatttgaattaagagtttacttgccaaatattttcctttttctggccttctgaggatgctgtggaaaaataattgtctcaccaagagcaggttgtaaataatcagtagaaaaatagaagttctgcattgggtttggttgttggtatctacttttagccttggagatcaaatagctaagtcaaagatcaaagtggtgtgtataactgttgtaattcttatgaggatcaggtctcatatgcaatggtttgaatatatgtctgtaaaacatcaagaagtaccaaatattgtaatcagtctgcaaggctttgtgaaaatgacagtgcacagaaagcttatgacctacaatgtatgttgaaagaggttaagtaaaacagtttttcatgataaattgtcttattataaaatataattaactacatggtggtttcttctcagcagatattgattttagctcactctttatcatcttctctttattttttctgacttctttctacttttcatttttcatgatatttctctttattttcagttatcttgagaagtcagcacatcgtatatttggttcactgtagttttttgttttcttagtgggatgtctaaatacattggatttatctgttctataaactttgttattcttacatcaataaagtattactggctaaggctataatcatttgtgtaattttaattcattttactttattttctcccagatttgcctgagtgatcttatagcagccggaatcttaaggtatacagattttgatactttaaaatacacctgttctcccgaatttgacttcatggaaaaaagcgactgtgggtgatatttcgcgtgtttaagctacaaaccgtttatctaagaaaacagctccttgaacacagtgagctggcttttcac

SEQ ID NO: 20198 - DNA, 495 bp, Homo sapiens
tcgcttgagcccaagaggttgaggctgcagtgagctatgatcacaccactgcactccagcctgggcgacactgtctcaaaaaacaaaacaaaacaaaacaaaaaaaatggctggctatgaaatagacacagaatttatagaagagaattgagaaactgacctatatgaatttgatacataataaggtgataattcaaataacttgttcaaggatgatattttaaatttggttttggaaaggatgggggcagttagactgttttcagatactaaaataatttctgcaacatgaaaagaaagatttaaatgtaaaaacttctagaaaaataacatagtataaatgttttttaaaactctggttaagggaatttctctcttaggccaatgatatggttttgaatatgtgtcccctcaaaatctcatgctgaaatgtggtctccagtgttggagatgggaccgggtgggtgggggcaggtccctcatgaatggcttggg

SEQ ID NO: 20199 - DNA, 112 bp, Homo sapiens
ctgcgtcgactggtttccttgctggaaagtgtggatgataatttccatatctgtgtggcaagaagaaaatgaggtcatgtgcgtcatgatgcggcccagcacctggcatacg

SEQ ID NO: 20200 - DNA, 262 bp, Homo sapiens
agtttagggagtaattagattttgattagtcaaggatgcataatcttttgtaatattgtaatatataaggtaactaaaaaataaaaatatggggagatgatataaaaaattccagcaaaagataagaaaggaaaaggaacataaaacagttggaacaaatagattgttagtgttcatttatagatacagctcaaccacatactctttacaagagataaacctaaaatacaaggaaacagaagaaggtaaaggtaaaaagatg

SEQ ID NO: 20201 - DNA, 443 bp, Homo sapiens
ttcaaccctagacactgccgtggggtcagagccccgcagcctgcctgactgcatgctccacctagagttttgagccagcaggcactgaagaagcaatccacaccctcatcgcgtgccctgcgaggggaacaagggaacttttcctgtctcacttccagcaggggaagaacatacaaccattttgaaatacataacagcattctgttcatatcaaggcctccactcaagacaaactacttaattagagcctaactgacctggagaaagggaaatacccattacctgcccctctagcctttctcttggggtaaaggaactacccaactcagccccctctagccatcatatcccatataagtggaggatagagaagactgagaagcagttgcaaagttcgcagcccaggagcacaggctaagaattaatcgtaggtatacagaaca

SEQ ID NO: 20202 - DNA, 316 bp, Homo sapiens
ctcaccatttcttgccaccaatcattcctccccaaattacttctcctgccttctctatttctccaaaagcactaccgtcttacagattcaacgttgtaatgcaatgatgtgctttatgactatgaaaatggtacgcgagttctttgttttttttgtgtgtgaaattaagattaaaatggataagtagtttacaagtatctagtccacactcaattactgttaccttaggtcttttaataaatatatactgattcctgagttccttgagcaaagactctgaattattcaaattgtttttagcactttaagttttcag

SEQ ID NO: 20203 - DNA, 867 bp, Homo sapiens
tcagcagggtcagaacctataatttcattcggtatattctgtgaagatgtacagccagcaaaagctttttaattcgggaaaacacgattggacttgcactttcaaaagattaccgtggttgcacagaagagactgactgggtcagaggttagttacaggctggaaaaccagtttagatgaaactgaagagcaaggatgaaagcctgaactagagcagtggaaatgcgaatgtggagcagaggaacgattcaagaaattctgcggtaaaactcatcagacttcatgactgattaaaggtatggtggtagacaagggagggagaggaaggataagaatggagaagcaggaattgggcgttatttgaaaatttctgacatgggaggaaaatctggatatttaataacatctgactaaattaggggatgaaagagcataagcggagagggaatggtggtgctctctccttgaccatactttagttaggctcctctgagccctcttcccaactaggcctcatccttgggcccctgtcttaggcctgctgagtccagttttagcaagaatcttgcaaagtcagtttagagagtatctcctagccttgataattgatcatctccgcctgtcttcagcaagaatcttgtaagtcactttaacaagaatatccccgacccttgatatcacttcttagtaattttccatgaactgacccctcagtctgcttgctggttataaatcctagctgtttttgttgtattaaaacttgaggccaatctctctcccccatggtgatagtcatggcacctattgcaatagttctaaatgtcttccttgacattttaacaagtgtcagaataatttttctttagc

SEQ ID NO: 20204 - DNA, 3847 bp, Homo sapiens
gcggccgcgccgggcaccaccctccaagagactggtatcgcagcccccagctccaaggaactcagcgcaggcaggggcttcagggacgcggagagggaggcttatctctgctgaaagggaatagcggcccgcaaacaagcaaaccaggacactgctccgaggtcccgcccaggaaggcaaaacgaagtcccaccgctctcacacccggcaaccaaccaaggcacagcacgccccaccagcaagccacgcctcgcgcatcacgcacgcacgcacgcacgcacacacgtctgtcgcggcttcccgccttgcgctccgtcatgctctattgcgcatatctcggggcgggggaggaacggagattgacaaggaggcagaggcctgagcgaggcggaaaatcctcaccccggcccgcgggtagacccaaacttctagcgcgtcacttccgctgggggcggagcggggcggggctgagtgggtggcgacctagctgctgcgccagtgtttgtgttggaagctcagctgatgcaggccggttggagtggacgtcattgccgggaacgagcgagtcgccgctgcagccctagtgactgcggcctgcatcccggtaagaccatgaattatggcatttcttaaatgaagcgttcaagaagtgagagaatgtcatagaaaataaatgatttttaagttatgtctattaatctgactgtagatatatatatttacctccttagtaatgcaagaagtgtttgtgggaagcagagaagcaagcaactgtatttcttgttctcacctaagcattactggaggataagccacatcagtctacaaagaggttttcatacaaacataataagatgtaaatggaccaaaagtgaagcacattcttgcagtaagcactgttactctccaagcaaccatggtttacatattgggattttgaaacttagcacttctgctcccaagggacttacaaaagtgaacatttgtatgtcccgtattaaaagtactttgaactctgtttcaaaggctgtttttggcaatcaaaatgaaatgatttcacgtttagctcaatttaagccaagttcccaaattttaagaaaagtatcggatagtggctggttaaaacagaaaaacatcaaacaagccatcaaatctctgaaaaaatatagtgacaaatcagcagaaaagagtccttttccagaagagaaaagtcacattatagacaaagaagaagatataggtaaacgcagtctttttcattacacaagttctataaccacaaaatttggagactcattctactttttatcaaatcatattaattcatatttcaaacgtaaggaaaaaatgtctcaacaaaaggaaaatgaacatttccgggacaaatcagaacttgaagataaaaaggtagaagaggggaaattaagatctccagatcctggcatcctggcttataagccaggctcagaatctgtacatacggtggacaagcctacaagtccttctgcgatacctgatgttcttcaagtttcaactaaacaaagtattgctaactttctttctcgtcccacggaaggtgtacaagctttagtaggtggttatattggtggacttgtccccaaattaaagtatgattcaaagagtcagtcagaagaacaggaagagcctgctaaaactgatcaggctgtcagcaaagacagaaatgcagaggagaaaaagcgtttatctcttcagcgagaaaagattatcgcaagggtgagtattgataacaggacccgggcattagttcaggcattaagaagaacaactgacccaaagctctgcattactagggttgaagaactgacttttcatcttctagaatttcctgaaggaaaaggagtggctgtcaaggaaagaattattccatatttattacgactgagacaaattaaggatgaaactcttcaggctgcagttagagaaattttggccctaattggctatgtggatccagtgaaagggagaggaatccgaattctctcaattgatggtggaggaacaaggggcgtggttgctctccagaccctacgaaaattagttgaacttactcagaagccagttcatcagctctttgattacatttgtggtgtaagcacaggtgccatattagctttcatgttggggttgtttcatatgcccttggatgaatgtgaggaactttatcgaaaattaggatcagatgtattttcacaaaatgtcattgttggaacagtaaaaatgagttggagccatgcattttatgacagtcaaacatgggaaaacattcttaaggataggatgggatctgcactgatgattgaaacagcaagaaaccccacatgtcctaaggtagctgctgtaagtaccatagtaaatagagggataacacccaaagcttttgtgttcagaaactatggtcattttcctggaatcaactctcattatttgggaggctgtcagtataaaatgtggcaggccattagagcctcatctgctgctccaggctactttgcagaatatgcattgggaaatgatcttcatcaagatggaggtttgcttctgaataacccttcggcattagctatgcatgagtgtaaatgtctttggccagatgtgccgttagagtgcatagtatccctgggcactggacgttatgagagtgatgtgagaaacacggtaacatacacaagcttgaaaactaaactttctaatgttatcaacagtgctacagatacagaagaagtccatataatgcttgatggcctgttacctcctgacacctattttagattcaatcctgtaatgtgtgaaaacatacctctagatgaaagtcgaaatgaaaagctggatcagctgcagttggaagggttgaaatacatagaaagaaatgaacaaaaaatgaaaaaagttgcaaaaatattaagtcaagaaaaaacaactctgcagaaaattaatgattggataaaattaaaaactgatatgtatgaaggacttccattcttttcaaaattgtgatgagtatatgcttatgttctcataaatgaaggtctgtttagaagatcaaccacattcaataaggaattgtggggttcgacatgagttaactttgaaatacgtatgaattctggagaatcctgaaaaagacggtgcttcaaccagcttgcatagcacagagaatattcttggttacagaattcatatgggaactaggcttttaagatgttaataattagctaagctttagtaacccttactgtgctagtagattttagtagatattggtgttatattgtttgatgtttgaaaatatattaatatatgtgccgaacaagaaaccgaaagctatattgtactgtgtatttttactttagtcctcataatcatgttgaatttatgtgatcattgattttatttcatatggaaaagctaatttcttcttaaatttacattacctaatattctcactagctatgttctccaatccacactgccttttattgtaatatcatctaaatagatgcagaaaaatggaattttctctattaaagtattttacatttgacataaaaaagaaccagatacagttttctattcagatatgtttattttaacattgtttggttaaaaaaggtgaagttccagtcaaccactttttacccctgaaatttcaagataatgctatattaacttttccagatctaacactagcttattcttccctgttataaaatggtttgaacttactgaggagatattcctatcattaacaaaaataaactatttaaataataaaaaagtcgacgcggccgcgaatttagtagtagta

SEQ ID NO: 20205 - DNA, 3458 bp, Homo sapiens
tcagcagggtcagaacctataatttcattcggtatattctgtgaagatgtacagccagcaaaagctttttaattcgggaaaacacgattggacttgcactttcaaaagattaccgtggttgcacagaagagactgactgggtcagaggttagttacaggctggaaaaccagtttagatgaaactgaagagcaaggatgaaagcctgaactagagcagtggaaatgcgaatgtggagcagaggaacgattcaagaaattctgcggtaaaactcatcagacttcatgactgattaaagattgtcttctcctccaaggtctacatgattacctgaagtttaataataatgcaagaagtgtttgtgggaagcagagaagcaagcaactgtatttcttgttctcacctaagcattactggaggataagccacatcagtctacaaagaggttttcatacaaacataataagatgtaaatggaccaaaagtgaagcacattcttgcagtaagcactgttactctccaagcaaccatggtttacatattgggattttgaaacttagcacttctgctcccaagggacttacaaaagtgaacatttgtatgtcccgtattaaaagtactttgaactctgtttcaaaggctgtttttggcaatcaaaatgaaatgatttcacgtttagctcaatttaagccaagttcccaaattttaagaaaagtatcggatagtggctggttaaaacagaaaaacatcaaacaagccatcaaatctctgaaaaaatatagtgacaaatcagcagaaaagagtccttttccagaagagaaaagtcacattatagacaaagaagaagatataggtaaacgcagtctttttcattacacaagttctataaccacaaaatttggagactcattctactttttatcaaatcatattaattcatatttcaaacgtaaggaaaaaatgtctcaacaaaaggaaaatgaacatttccgggacaaatcagaacttgaagataaaaaggtagaagaggggaaattaagatctccagatcctggcatcctggcttataagccaggctcagaatctgtacatacggtggacaagcctacaagtccttctgcgatacctgatgttcttcaagtttcaactaaacaaagtattgctaactttctttctcgtcccacggaaggtgtacaagctttagtaggtggttatattggtggacttgtccccaaattaaagtatgattcaaagagtcagtcagaagaacaggaagagcctgctaaaactgatcaggctgtcagcaaagacagaaatgcagaggagaaaaagcgtttatctcttcagcgagaaaagattatcgcaagggtgagtattgataacaggacccgggcattagttcaggcattaagaagaacaactgacccaaagctctgcattactagggttgaagaactgacttttcatcttctagaatttcctgaaggaaaaggagtggctgtcaaggaaagaattattccatatttattacgactgagacaaattaaggatgaaactcttcaggctgcagttagagaaattttggccctaattggctatgtggatccagtgaaagggagaggaatccgaattctctcaattgatggtggaggaacaaggggcgtggttgctctccagaccctacgaaaattagttgaacttactcagaagccagttcatcagctctttgattacatttgtggtgtaagcacaggtgccatattagctttcatgttggggttgtttcatatgcccttggatgaatgtgaggaactttatcgaaaattaggatcagatgtattttcacaaaatgtcattgttggaacagtaaaaatgagttggagccatgcattttatgacagtcaaacatgggaaaacattcttaaggataggatgggatctgcactgatgattgaaacagcaagaaaccccacatgtcctaaggtagctgctgtaagtaccatagtaaatagagggataacacccaaagcttttgtgttcagaaactatggtcattttcctggaatcaactctcattatttgggaggctgtcagtataaaatgtggcaggccattagagcctcatctgctgctccaggctactttgcagaatatgcattgggaaatgatcttcatcaagatggaggtttgcttctgaataacccttcggcattagctatgcatgagtgtaaatgtctttggccagatgtgccgttagagtgcatagtatccctgggcactggacgttatgagagtgatgtgagaaacacggtaacatacacaagcttgaaaactaaactttctaatgttatcaacagtgctacagatacagaagaagtccatataatgcttgatggcctgttacctcctgacacctattttagattcaatcctgtaatgtgtgaaaacatacctctagatgaaagtcgaaatgaaaagctggatcagctgcagttggaagggttgaaatacatagaaagaaatgaacaaaaaatgaaaaaagttgcaaaaatattaagtcaagaaaaaacaactctgcagaaaattaatgattggataaaattaaaaactgatatgtatgaaggacttccattcttttcaaaattgtgatgagtatatgcttatgttctcataaatgaaggtctgtttagaagatcaaccacattcaataaggaattgtggggttcgacatgagttaactttgaaatacgtatgaattctggagaatcctgaaaaagacggtgcttcaaccagcttgcatagcacagagaatattcttggttacagaattcatatgggaactaggcttttaagatgttaataattagctaagctttagtaacccttactgtgctagtagattttagtagatattggtgttatattgtttgatgtttgaaaatatattaatatatgtgccgaacaagaaaccgaaagctatattgtactgtgtatttttactttagtcctcataatcatgttgaatttatgtgatcattgattttatttcatatggaaaagctaatttcttcttaaatttacattacctaatattctcactagctatgttctccaatccacactgccttttattgtaatatcatctaaatagatgcagaaaaatggaattttctctattaaagtattttacatttgacataaaaaagaaccagatacagttttctattcagatatgtttattttaacattgtttggttaaaaaaggtgaagttccagtcaaccactttttacccctgaaatttcaagataatgctatattaacttttccagatctaacactagcttattcttccctgttataaaatggtttgaacttactgaggagatattcctatcattaacaaaaataaactatttaaataataaaaaagtcgacgcggccgcgaatttagtagtagta

SEQ ID NO: 20206 - DNA, 4005 bp, Homo sapiens
gcggccgcgccgggcaccaccctccaagagactggtatcgcagcccccagctccaaggaactcagcgcaggcaggggcttcagggacgcggagagggaggcttatctctgctgaaagggaatagcggcccgcaaacaagcaaaccaggacactgctccgaggtcccgcccaggaaggcaaaacgaagtcccaccgctctcacacccggcaaccaaccaaggcacagcacgccccaccagcaagccacgcctcgcgcatcacgcacgcacgcacgcacgcacacacgtctgtcgcggcttcccgccttgcgctccgtcatgctctattgcgcatatctcggggcgggggaggaacggagattgacaaggaggcagaggcctgagcgaggcggaaaatcctcaccccggcccgcgggtagacccaaacttctagcgcgtcacttccgctgggggcggagcggggcggggctgagtgggtggcgacctagctgctgcgccagtgtttgtgttggaagctcagctgatgcaggccggttggagtggacgtcattgccgggaacgagcgagtcgccgctgcagccctagtgactgcggcctgcatcccgattgtcttctcctccaaggtctacatgattacctgaagtttaataattttgcctttctagagtgttatacagctggaatcatactgctatggtccgaatgtttgtgcctctcaaaattcatgtggaaatcataaccgctaaagtgatggtattaagaggtaagaccatgaattatggcatttcttaaatgaagcgttcaagaagtgagagaatgtcatagaaaataaatgatttttaagttatgtctattaatctgactgtagatatatatatttacctccttagtaatgcaagaagtgtttgtgggaagcagagaagcaagcaactgtatttcttgttctcacctaagcattactggaggataagccacatcagtctacaaagaggttttcatacaaacataataagatgtaaatggaccaaaagtgaagcacattcttgcagtaagcactgttactctccaagcaaccatggtttacatattgggattttgaaacttagcacttctgctcccaagggacttacaaaagtgaacatttgtatgtcccgtattaaaagtactttgaactctgtttcaaaggctgtttttggcaatcaaaatgaaatgatttcacgtttagctcaatttaagccaagttcccaaattttaagaaaagtatcggatagtggctggttaaaacagaaaaacatcaaacaagccatcaaatctctgaaaaaatatagtgacaaatcagcagaaaagagtccttttccagaagagaaaagtcacattatagacaaagaagaagatataggtaaacgcagtctttttcattacacaagttctataaccacaaaatttggagactcattctactttttatcaaatcatattaattcatatttcaaacgtaaggaaaaaatgtctcaacaaaaggaaaatgaacatttccgggacaaatcagaacttgaagataaaaaggtagaagaggggaaattaagatctccagatcctggcatcctggcttataagccaggctcagaatctgtacatacggtggacaagcctacaagtccttctgcgatacctgatgttcttcaagtttcaactaaacaaagtattgctaactttctttctcgtcccacggaaggtgtacaagctttagtaggtggttatattggtggacttgtccccaaattaaagtatgattcaaagagtcagtcagaagaacaggaagagcctgctaaaactgatcaggctgtcagcaaagacagaaatgcagaggagaaaaagcgtttatctcttcagcgagaaaagattatcgcaagggtgagtattgataacaggacccgggcattagttcaggcattaagaagaacaactgacccaaagctctgcattactagggttgaagaactgacttttcatcttctagaatttcctgaaggaaaaggagtggctgtcaaggaaagaattattccatatttattacgactgagacaaattaaggatgaaactcttcaggctgcagttagagaaattttggccctaattggctatgtggatccagtgaaagggagaggaatccgaattctctcaattgatggtggaggaacaaggggcgtggttgctctccagaccctacgaaaattagttgaacttactcagaagccagttcatcagctctttgattacatttgtggtgtaagcacaggtgccatattagctttcatgttggggttgtttcatatgcccttggatgaatgtgaggaactttatcgaaaattaggatcagatgtattttcacaaaatgtcattgttggaacagtaaaaatgagttggagccatgcattttatgacagtcaaacatgggaaaacattcttaaggataggatgggatctgcactgatgattgaaacagcaagaaaccccacatgtcctaaggtagctgctgtaagtaccatagtaaatagagggataacacccaaagcttttgtgttcagaaactatggtcattttcctggaatcaactctcattatttgggaggctgtcagtataaaatgtggcaggccattagagcctcatctgctgctccaggctactttgcagaatatgcattgggaaatgatcttcatcaagatggaggtttgcttctgaataacccttcggcattagctatgcatgagtgtaaatgtctttggccagatgtgccgttagagtgcatagtatccctgggcactggacgttatgagagtgatgtgagaaacacggtaacatacacaagcttgaaaactaaactttctaatgttatcaacagtgctacagatacagaagaagtccatataatgcttgatggcctgttacctcctgacacctattttagattcaatcctgtaatgtgtgaaaacatacctctagatgaaagtcgaaatgaaaagctggatcagctgcagttggaagggttgaaatacatagaaagaaatgaacaaaaaatgaaaaaagttgcaaaaatattaagtcaagaaaaaacaactctgcagaaaattaatgattggataaaattaaaaactgatatgtatgaaggacttccattcttttcaaaattgtgatgagtatatgcttatgttctcataaatgaaggtctgtttagaagatcaaccacattcaataaggaattgtggggttcgacatgagttaactttgaaatacgtatgaattctggagaatcctgaaaaagacggtgcttcaaccagcttgcatagcacagagaatattcttggttacagaattcatatgggaactaggcttttaagatgttaataattagctaagctttagtaacccttactgtgctagtagattttagtagatattggtgttatattgtttgatgtttgaaaatatattaatatatgtgccgaacaagaaaccgaaagctatattgtactgtgtatttttactttagtcctcataatcatgttgaatttatgtgatcattgattttatttcatatggaaaagctaatttcttcttaaatttacattacctaatattctcactagctatgttctccaatccacactgccttttattgtaatatcatctaaatagatgcagaaaaatggaattttctctattaaagtattttacatttgacataaaaaagaaccagatacagttttctattcagatatgtttattttaacattgtttggttaaaaaaggtgaagttccagtcaaccactttttacccctgaaatttcaagataatgctatattaacttttccagatctaacactagcttattcttccctgttataaaatggtttgaacttactgaggagatattcctatcattaacaaaaataaactatttaaataataaaaaagtcgacgcggccgcgaatttagtagtagta

SEQ ID NO: 20207 - DNA, 3720 bp, Homo sapiens
gcggccgcgccgggcaccaccctccaagagactggtatcgcagcccccagctccaaggaactcagcgcaggcaggggcttcagggacgcggagagggaggcttatctctgctgaaagggaatagcggcccgcaaacaagcaaaccaggacactgctccgaggtcccgcccaggaaggcaaaacgaagtcccaccgctctcacacccggcaaccaaccaaggcacagcacgccccaccagcaagccacgcctcgcgcatcacgcacgcacgcacgcacgcacacacgtctgtcgcggcttcccgccttgcgctccgtcatgctctattgcgcatatctcggggcgggggaggaacggagattgacaaggaggcagaggcctgagcgaggcggaaaatcctcaccccggcccgcgggtagacccaaacttctagcgcgtcacttccgctgggggcggagcggggcggggctgagtgggtggcgacctagctgctgcgccagtgtttgtgttggaagctcagctgatgcaggccggttggagtggacgtcattgccgggaacgagcgagtcgccgctgcagccctagtgactgcggcctgcatcccgtaatgcaagaagtgtttgtgggaagcagagaagcaagcaactgtatttcttgttctcacctaagcattactggaggataagccacatcagtctacaaagaggttttcatacaaacataataagatgtaaatggaccaaaagtgaagcacattcttgcagtaagcactgttactctccaagcaaccatggtttacatattgggattttgaaacttagcacttctgctcccaagggacttacaaaagtgaacatttgtatgtcccgtattaaaagtactttgaactctgtttcaaaggctgtttttggcaatcaaaatgaaatgatttcacgtttagctcaatttaagccaagttcccaaattttaagaaaagtatcggatagtggctggttaaaacagaaaaacatcaaacaagccatcaaatctctgaaaaaatatagtgacaaatcagcagaaaagagtccttttccagaagagaaaagtcacattatagacaaagaagaagatataggtaaacgcagtctttttcattacacaagttctataaccacaaaatttggagactcattctactttttatcaaatcatattaattcatatttcaaacgtaaggaaaaaatgtctcaacaaaaggaaaatgaacatttccgggacaaatcagaacttgaagataaaaaggtagaagaggggaaattaagatctccagatcctggcatcctggcttataagccaggctcagaatctgtacatacggtggacaagcctacaagtccttctgcgatacctgatgttcttcaagtttcaactaaacaaagtattgctaactttctttctcgtcccacggaaggtgtacaagctttagtaggtggttatattggtggacttgtccccaaattaaagtatgattcaaagagtcagtcagaagaacaggaagagcctgctaaaactgatcaggctgtcagcaaagacagaaatgcagaggagaaaaagcgtttatctcttcagcgagaaaagattatcgcaagggtgagtattgataacaggacccgggcattagttcaggcattaagaagaacaactgacccaaagctctgcattactagggttgaagaactgacttttcatcttctagaatttcctgaaggaaaaggagtggctgtcaaggaaagaattattccatatttattacgactgagacaaattaaggatgaaactcttcaggctgcagttagagaaattttggccctaattggctatgtggatccagtgaaagggagaggaatccgaattctctcaattgatggtggaggaacaaggggcgtggttgctctccagaccctacgaaaattagttgaacttactcagaagccagttcatcagctctttgattacatttgtggtgtaagcacaggtgccatattagctttcatgttggggttgtttcatatgcccttggatgaatgtgaggaactttatcgaaaattaggatcagatgtattttcacaaaatgtcattgttggaacagtaaaaatgagttggagccatgcattttatgacagtcaaacatgggaaaacattcttaaggataggatgggatctgcactgatgattgaaacagcaagaaaccccacatgtcctaaggtagctgctgtaagtaccatagtaaatagagggataacacccaaagcttttgtgttcagaaactatggtcattttcctggaatcaactctcattatttgggaggctgtcagtataaaatgtggcaggccattagagcctcatctgctgctccaggctactttgcagaatatgcattgggaaatgatcttcatcaagatggaggtttgcttctgaataacccttcggcattagctatgcatgagtgtaaatgtctttggccagatgtgccgttagagtgcatagtatccctgggcactggacgttatgagagtgatgtgagaaacacggtaacatacacaagcttgaaaactaaactttctaatgttatcaacagtgctacagatacagaagaagtccatataatgcttgatggcctgttacctcctgacacctattttagattcaatcctgtaatgtgtgaaaacatacctctagatgaaagtcgaaatgaaaagctggatcagctgcagttggaagggttgaaatacatagaaagaaatgaacaaaaaatgaaaaaagttgcaaaaatattaagtcaagaaaaaacaactctgcagaaaattaatgattggataaaattaaaaactgatatgtatgaaggacttccattcttttcaaaattgtgatgagtatatgcttatgttctcataaatgaaggtctgtttagaagatcaaccacattcaataaggaattgtggggttcgacatgagttaactttgaaatacgtatgaattctggagaatcctgaaaaagacggtgcttcaaccagcttgcatagcacagagaatattcttggttacagaattcatatgggaactaggcttttaagatgttaataattagctaagctttagtaacccttactgtgctagtagattttagtagatattggtgttatattgtttgatgtttgaaaatatattaatatatgtgccgaacaagaaaccgaaagctatattgtactgtgtatttttactttagtcctcataatcatgttgaatttatgtgatcattgattttatttcatatggaaaagctaatttcttcttaaatttacattacctaatattctcactagctatgttctccaatccacactgccttttattgtaatatcatctaaatagatgcagaaaaatggaattttctctattaaagtattttacatttgacataaaaaagaaccagatacagttttctattcagatatgtttattttaacattgtttggttaaaaaaggtgaagttccagtcaaccactttttacccctgaaatttcaagataatgctatattaacttttccagatctaacactagcttattcttccctgttataaaatggtttgaacttactgaggagatattcctatcattaacaaaaataaactatttaaataataaaaaagtcgacgcggccgcgaatttagtagtagta

SEQ ID NO: 20208 - DNA, 3652 bp, Homo sapiens
gcggccgcgccgggcaccaccctccaagagactggtatcgcagcccccagctccaaggaactcagcgcaggcaggggcttcagggacgcggagagggaggcttatctctgctgaaagggaatagcggcccgcaaacaagcaaaccaggacactgctccgaggtcccgcccaggaaggcaaaacgaagtcccaccgctctcacacccggcaaccaaccaaggcacagcacgccccaccagcaagccacgcctcgcgcatcacgcacgcacgcacgcacgcacacacgtctgtcgcggcttcccgccttgcgctccgtcatgctctattgcgcatatctcggggcgggggaggaacggagattgacaaggaggcagaggcctgagcgaggcggaaaatcctcaccccggcccgcgggtagacccaaacttctagcgcgtcacttccgctgggggcggagcggggcggggctgagtgggtggcgacctagctgctgcgccagtgtttgtgttggaagctcagctgatgcaggccggttggagtggacgtcattgccgggaacgagcgagtcgccgctgcagccctagtgactgcggcctgcatcccggtaagaccatgaattatggcatttcttaaatgaagcgttcaagaagtgagagaatgtcatagaaaataaatgatttttaagttatgtctattaatctgactgtagatatatatatttacctccttagtaatgcaagaagtgtttgtgggaagcagagaagcaagcaactgtatttcttgttctcacctaagcattactggaggataagccacatcagtctacaaagaggttttcatacaaacataataagatgtaaatggaccaaaagtgaagcacattcttgcagtaagcactgttactctccaagcaaccatggtttacatattgggattttgaaacttagcacttctgctcccaagggacttacaaaagtgaacatttgtatgtcccgtattaaaagtactttgaactctgtttcaaaggctgtttttggcaatcaaaatgaaatgatttcacgtttagctcaatttaagccaagttcccaaattttaagaaaagtatcggatagtggctggttaaaacagaaaaacatcaaacaagccatcaaatctctgaaaaaatatagtgacaaatcagcagaaaagagtccttttccagaagagaaaagtcacattatagacaaagaagaagatataggtaaacgcagtctttttcattacacaagttctataaccacaaaatttggagactcattctactttttatcaaatcatattaattcatatttcaaacgtaaggaaaaaatgtctcaacaaaaggaaaatgaacatttccgggacaaatcagaacttgaagataaaaaggtagaagaggggaaattaagatctccagatcctggcatcctggcttataagccaggctcagaatctgtacatacggtggacaagcctacaagtccttctgcgatacctgatgttcttcaagtttcaactaaacaaagtattgctaactttctttctcgtcccacggaaggtgtacaagctttagtaggtggttatattggtggacttgtccccaaattaaagtatgattcaaagagtcagtcagaagaacaggaagagcctgctaaaactgatcaggctgtcagcaaagacagaaatgcagaggagaaaaagcgtttatctcttcagcgagaaaagattatcgcaagggtgagtattgataacaggacccgggcattagttcaggcattaagaagaacaactgacccaaagctctgcattactagggttgaagaactgacttttcatcttctagaatttcctgaaggaaaaggagtggctgtcaaggaaagaattattccatatttattacgactgagacaaattaaggatgaaactcttcaggctgcagttagagaaattttggccctaattggctatgtggatccagtgaaagggagaggaatccgaattctctcaattgatggtggaggaacaaggggcgtggttgctctccagaccctacgaaaattagttgaacttactcagaagccagttcatcagctctttgattacatttgtggtgtaagcacaggtgccatattagctttcatgttggggttgtttcatatgcccttggatgaatgtgaggaactttatcgaaaattaggatcagatgtattttcacaaaatgtcattgttggaacagtaaaaatgagttggagccatgcattttatgacagtcaaacatgggaaaacattcttaaggataggatgggatctgcactgatgattgaaacagcaagaaaccccacatgtcctaaggatggaggtttgcttctgaataacccttcggcattagctatgcatgagtgtaaatgtctttggccagatgtgccgttagagtgcatagtatccctgggcactggacgttatgagagtgatgtgagaaacacggtaacatacacaagcttgaaaactaaactttctaatgttatcaacagtgctacagatacagaagaagtccatataatgcttgatggcctgttacctcctgacacctattttagattcaatcctgtaatgtgtgaaaacatacctctagatgaaagtcgaaatgaaaagctggatcagctgcagttggaagggttgaaatacatagaaagaaatgaacaaaaaatgaaaaaagttgcaaaaatattaagtcaagaaaaaacaactctgcagaaaattaatgattggataaaattaaaaactgatatgtatgaaggacttccattcttttcaaaattgtgatgagtatatgcttatgttctcataaatgaaggtctgtttagaagatcaaccacattcaataaggaattgtggggttcgacatgagttaactttgaaatacgtatgaattctggagaatcctgaaaaagacggtgcttcaaccagcttgcatagcacagagaatattcttggttacagaattcatatgggaactaggcttttaagatgttaataattagctaagctttagtaacccttactgtgctagtagattttagtagatattggtgttatattgtttgatgtttgaaaatatattaatatatgtgccgaacaagaaaccgaaagctatattgtactgtgtatttttactttagtcctcataatcatgttgaatttatgtgatcattgattttatttcatatggaaaagctaatttcttcttaaatttacattacctaatattctcactagctatgttctccaatccacactgccttttattgtaatatcatctaaatagatgcagaaaaatggaattttctctattaaagtattttacatttgacataaaaaagaaccagatacagttttctattcagatatgtttattttaacattgtttggttaaaaaaggtgaagttccagtcaaccactttttacccctgaaatttcaagataatgctatattaacttttccagatctaacactagcttattcttccctgttataaaatggtttgaacttactgaggagatattcctatcattaacaaaaataaactatttaaataataaaaaagtcgacgcggccgcgaatttagtagtagta

SEQ ID NO: 20209 - DNA, 2151 bp, Homo sapiens
gcaattcagtgaaaaaactgggcaaaagatttaaacagacacttcattaaagaagatatacaaatgactaataagtacatgaaaaccttctcaacataattagtcattagggaaataaaaattaaaccacaagataccactacctctataatgcaaaacttaagacttgacatactaactttgggcaaagatgtagagcagtgagaactctaatatattagtggttggaatacaaaaatggaagacagtgtggcaggttttttttaaaataagcataccctttaccatatgaaccagcaattttattcctaggtttttgcccaagggaaatgcaatcatatgcacatgaagacttatgtgtaaatgtttataatcgggttatttctagtagctaaaaactgaagagagccagaccagaactgcagagaacaaattgtgttgtatctatacaatggaacaccatttagcaatgaaaagaaaggaactattgatatatgctacaacatggatgaatctcaaaagtattttgtccataaaagaaggtagatacttttgattctgtttgtatgaaattctaggaaagggaaagtgggcaccaactataaagaggcttaaaggaactttttacagtgatggaaatggctatgtcatgattattgttgtgcttacacaagtgtatacatttgtcaaaacttgtcaaactatacagttaaaattggtgagttgcactggatgtaaatgatatgtcaatgaagttgatcccaaaaaaaaggaaagttggaaagggcatttcagcagtggtgaacagtatgaccaaaagcacagagagaatagaagaagtatactaatttcacagaataatgtattttggaagatgaattttatcttatagttttacccattattatggattacttctactgtcagtttgaataatgaaattagtgaatctttgtaatgtgcctaaaaagaagttaattttaaataaagacaaattaacagttcattgctcactttatcccctcttttcttatccccttatccttttcttttttgctttaacagaagtccatataatgcttgatggcctgttacctcctgacacctattttagattcaatcctgtaatgtgtgaaaacatacctctagatgaaagtcgaaatgaaaagctggatcagctgcagttggaagggttgaaatacatagaaagaaatgaacaaaaaatgaaaaaagttgcaaaaatattaagtcaagaaaaaacaactctgcagaaaattaatgattggataaaattaaaaactgatatgtatgaaggacttccattcttttcaaaattgtgatgagtatatgcttatgttctcataaatgaaggtctgtttagaagatcaaccacattcaataaggaattgtggggttcgacatgagttaactttgaaatacgtatgaattctggagaatcctgaaaaagacggtgcttcaaccagcttgcatagcacagagaatattcttggttacagaattcatatgggaactaggcttttaagatgttaataattagctaagctttagtaacccttactgtgctagtagattttagtagatattggtgttatattgtttgatgtttgaaaatatattaatatatgtgccgaacaagaaaccgaaagctatattgtactgtgtatttttactttagtcctcataatcatgttgaatttatgtgatcattgattttatttcatatggaaaagctaatttcttcttaaatttacattacctaatattctcactagctatgttctccaatccacactgccttttattgtaatatcatctaaatagatgcagaaaaatggaattttctctattaaagtattttacatttgacataaaaaagaaccagatacagttttctattcagatatgtttattttaacattgtttggttaaaaaaggtgaagttccagtcaaccactttttacccctgaaatttcaagataatgctatattaacttttccagatctaacactagcttattcttccctgttataaaatggtttgaacttactgaggagatattcctatcattaacaaaaataaactatttaaataataaaaaagtcgacgcggccgcgaatttagtagtagta

SEQ ID NO: 20210 - DNA, 2956 bp, Homo sapiens
gcggccgcgccgggcaccaccctccaagagactggtatcgcagcccccagctccaaggaactcagcgcaggcaggggcttcagggacgcggagagggaggcttatctctgctgaaagggaatagcggcccgcaaacaagcaaaccaggacactgctccgaggtcccgcccaggaaggcaaaacgaagtcccaccgctctcacacccggcaaccaaccaaggcacagcacgccccaccagcaagccacgcctcgcgcatcacgcacgcacgcacgcacgcacacacgtctgtcgcggcttcccgccttgcgctccgtcatgctctattgcgcatatctcggggcgggggaggaacggagattgacaaggaggcagaggcctgagcgaggcggaaaatcctcaccccggcccgcgggtagacccaaacttctagcgcgtcacttccgctgggggcggagcggggcggggctgagtgggtggcgacctagctgctgcgccagtgtttgtgttggaagctcagctgatgcaggccggttggagtggacgtcattgccgggaacgagcgagtcgccgctgcagccctagtgactgcggcctgcatcccggtaagaccatgaattatggcatttcttaaatgaagcgttcaagaagtgagagaatgtcatagaaaataaatgatttttaagttatgtctattaatctgactgtagatatatatatttacctccttagtaatgcaagaagtgtttgtgggaagcagagaagcaagcaactgtatttcttgttctcacctaagcattactggaggataagccacatcagtctacaaagaggttttcatacaaacataataagatgtaaatggaccaaaagtgaagcacattcttgcagtaagcactgttactctccaagcaaccatggtttacatattgggattttgaaacttagcacttctgctcccaagggacttacaaaagtgaacatttgtatgtcccgtattaaaagtactttgaactctgtttcaaaggctgtttttggcaatcaaaatgaaatgatttcacgtttagctcaatttaagccaagttcccaaattttaagaaaagtatcggatagtggctggttaaaacagaaaaacatcaaacaagccatcaaatctctgaaaaaatatagtgacaaatcagcagaaaagagtccttttccagaagagaaaagtcacattatagacaaagaagaagatataggtaaacgcagtctttttcattacacaagttctataaccacaaaatttggagactcattctactttttatcaaatcatattaattcatatttcaaacgtaaggaaaaaatgtctcaacaaaaggaaaatgaacatttccgggacaaatcagaacttgaagataaaaaggtagaagaggggaaattaagatctccagatcctggcatcctggcttataagccaggctcagaatctgtacatacggtggacaagcctacaagtccttctgcgatacctgatgttcttcaagtttcaactaaacaaagtattgctaactttctttctcgtcccacggaaggtgtacaagctttagtaggtggttatattggtggacttgtccccaaattaaagtatgattcaaagagtcagtcagaagaacaggaagagcctgctaaaactgatcaggctgtcagcaaagacagaaatgcagaggagaaaaagcgtttatctcttcagcgagaaaagattatcgcaagggtgagtattgataacaggacccgggcattagttcaggcattaagaagaacaactgacccaaagctctgcattactagggttgaagaactgacttttcatcttctagaatttcctgaaggaaaaggagtggctgtcaaggaaagaattattccatatttattacgactgagacaaattaaggatgaaactcttcaggctgcagttagagaaattttggccctaattggctatgtggatccagtgaaagggagaggaatccgaattctctcaattgatggtggaggaacaaggggcgtggttgctctccagaccctacgaaaattagttgaacttactcagaagccagttcatcagctctttgattacatttgtggtgtaagcacaggtgccatattagctttcatgttggggttgtttcatatgcccttggatgaatgtgaggaactttatcgaaaattaggatcagatgtattttcacaaaatgtcattgttggaacagtaaaaatgagttggagccatgcattttatgacagtcaaacatgggaaaacattcttaagtaagttacaattactctttttaaatcttctgattatataggtagtatgtgcatattataatttgaaaaatgtcaatattaaattatattcttgcatattataatttgaaaaatatcaagaatattaaattatttgactaattagagataaccactgttagtattttggtgaatcatagtttagtaattgttttggggggtttgtgtgtgtgagatttgcatgtaaaagttgcaattgccttttttaaaaatatgagatacttgcatcctgttgtttttacttaacatattaaatgtgtctcaagtcattctaaaatattcaattatttttatttttatttgtttttcgacacacgctctcactcccgttgcccagggtagagtacagtggtgctatcttggctcactgcagcctcaacttcccaggctcaagtgatcctcccacgtcagccctcccaagtagctgggaccacacgtgtgcaccaccatgcccagctaattttttctgtttttagtagagagaagatttcaccatgttgctcaggctcctaacctcaagtgattggcctgcctcccaaagtatatattatcattatatcttcctctatttattaaacccttttcattttgattaccgaattaaa

SEQ ID NO: 20211 - DNA, 2970 bp, Homo sapiens
gcggccgcgccgggcaccaccctccaagagactggtatcgcagcccccagctccaaggaactcagcgcaggcaggggcttcagggacgcggagagggaggcttatctctgctgaaagggaatagcggcccgcaaacaagcaaaccaggacactgctccgaggtcccgcccaggaaggcaaaacgaagtcccaccgctctcacacccggcaaccaaccaaggcacagcacgccccaccagcaagccacgcctcgcgcatcacgcacgcacgcacgcacgcacacacgtctgtcgcggcttcccgccttgcgctccgtcatgctctattgcgcatatctcggggcgggggaggaacggagattgacaaggaggcagaggcctgagcgaggcggaaaatcctcaccccggcccgcgggtagacccaaacttctagcgcgtcacttccgctgggggcggagcggggcggggctgagtgggtggcgacctagctgctgcgccagtgtttgtgttggaagctcagctgatgcaggccggttggagtggacgtcattgccgggaacgagcgagtcgccgctgcagccctagtgactgcggcctgcatcccggtaagaccatgaattatggcatttcttaaatgaagcgttcaagaagtgagagaatgtcatagaaaataaatgatttttaagttatgtctattaatctgactgtagatatatatatttacctccttagtaatgcaagaagtgtttgtgggaagcagagaagcaagcaactgtatttcttgttctcacctaagcattactggaggataagccacatcagtctacaaagaggttttcatacaaacataataagatgtaaatggaccaaaagtgaagcacattcttgcagtaagcactgttactctccaagcaaccatggtttacatattgggattttgaaacttagcacttctgctcccaagggacttacaaaagtgaacatttgtatgtcccgtattaaaagtactttgaactctgtttcaaaggctgtttttggcaatcaaaatgaaatgatttcacgtttagctcaatttaagccaagttcccaaattttaagaaaagtatcggatagtggctggttaaaacagaaaaacatcaaacaagccatcaaatctctgaaaaaatatagtgacaaatcagcagaaaagagtccttttccagaagagaaaagtcacattatagacaaagaagaagatataggtaaacgcagtctttttcattacacaagttctataaccacaaaatttggagactcattctactttttatcaaatcatattaattcatatttcaaacgtaaggaaaaaatgtctcaacaaaaggaaaatgaacatttccgggacaaatcagaacttgaagataaaaaggtagaagaggggaaattaagatctccagatcctggcatcctggcttataagccaggctcagaatctgtacatacggtggacaagcctacaagtccttctgcgatacctgatgttcttcaagtttcaactaaacaaagtattgctaactttctttctcgtcccacggaaggtgtacaagctttagtaggtggttatattggtggacttgtccccaaattaaagtatgattcaaagagtcagtcagaagaacaggaagagcctgctaaaactgatcaggctgtcagcaaagacagaaatgcagaggagaaaaagcgtttatctcttcagcgagaaaagattatcgcaagggtgagtattgataacaggacccgggcattagttcaggcattaagaagaacaactgacccaaagctctgcattactagggttgaagaactgacttttcatcttctagaatttcctgaaggaaaaggagtggctgtcaaggaaagaattattccatatttattacgactgagacaaattaaggatgaaactcttcaggctgcagttagagaaattttggccctaattggctatgtggatccagtgaaagggagaggaatccgaattctctcaattgatggtggaggaacaaggggcgtggttgctctccagaccctacgaaaattagttgaacttactcagaagccagttcatcagctctttgattacatttgtggtgtaagcacaggtgccatattagctttcatgttggggttgtttcatatgcccttggatgaatgtgaggaactttatcgaaaattaggatcagatgtattttcacaaaatgtcattgttggaacagtaaaaatgagttggagccatgcattttatgacagtcaaacatgggaaaacattcttaagtaagttacaattactctttttaaatcttctgattatataggtagtatgtgcatattataatttgaaaaatgtcaatattaaattatattcttgcatattataatttgaaaaatatcaagaatattaaattatttgactaattagagataaccactgttagtattttggtgaatcatagtttagtaattgttttggggggtttgtgtgtgtgagatttgcatgtaaaagttgcaattgccttttttaaaaatatgagatacttgcatcctgttgtttttacttaacatattaaatgtgtctcaagtcatttcccgttgcccagggtagagtacagtggtgctatcttggctcactgcagcctcaacttcccaggctcaagtgatcctcccacgtcagccctcccaagtagctgggaccacacgtgtgcaccaccatgcccagctaattttttctgtttttagtagagagaagatttcaccatgttgctcaggctcctaacctcaagtgattggcctgcctcccaaagtatatattatcataaaatataagcataaaatcatccacaatcctgttattcagagctgtagactttaatatatctccttctagtttattagaccttatacattttgtatagctgatattagattgtagttg

SEQ ID NO: 20212 - DNA, 425 bp, Homo sapiens
tttgtgttcagaaactatggtcattttcctggaatcaactctcattatttgggaggctgtcagtataaaatgtggcaggccattagagcctcatctgctgctccaggctactttgcagaatatgcattgggaaatgatcttcatcaagtaagttgacttgtatgtcttatttttttaaattttacatgattaaaagaatcagcacttattaaatgtcattgatcttcagaaggatcaacctaggagactttcttctttgtgtcttcatatctcaaaagaagaacaatttaggatatttttatttgttgtttttcttaacaagcctctgacatgcaaacatattttaagaaagtttttgtgttttatatagtgtgattcgtagcccattatgataattttatgatggaaaagtgagagtatgtatg

SEQ ID NO: 20213 - DNA, 3928 bp, Homo sapiens
gcggccgcgccgggcaccaccctccaagagactggtatcgcagcccccagctccaaggaactcagcgcaggcaggggcttcagggacgcggagagggaggcttatctctgctgaaagggaatagcggcccgcaaacaagcaaaccaggacactgctccgaggtcccgcccaggaaggcaaaacgaagtcccaccgctctcacacccggcaaccaaccaaggcacagcacgccccaccagcaagccacgcctcgcgcatcacgcacgcacgcacgcacgcacacacgtctgtcgcggcttcccgccttgcgctccgtcatgctctattgcgcatatctcggggcgggggaggaacggagattgacaaggaggcagaggcctgagcgaggcggaaaatcctcaccccggcccgcgggtagacccaaacttctagcgcgtcacttccgctgggggcggagcggggcggggctgagtgggtggcgacctagctgctgcgccagtgtttgtgttggaagctcagctgatgcaggccggttggagtggacgtcattgccgggaacgagcgagtcgccgctgcagccctagtgactgcggcctgcatcccgattgtcttctcctccaaggtctacatgattacctgaagtttaataagtaagaccatgaattatggcatttcttaaatgaagcgttcaagaagtgagagaatgtcatagaaaataaatgatttttaagttatgtctattaatctgactgtagatatatatatttacctccttagtaatgcaagaagtgtttgtgggaagcagagaagcaagcaactgtatttcttgttctcacctaagcattactggaggataagccacatcagtctacaaagaggttttcatacaaacataataagatgtaaatggaccaaaagtgaagcacattcttgcagtaagcactgttactctccaagcaaccatggtttacatattgggattttgaaacttagcacttctgctcccaagggacttacaaaagtgaacatttgtatgtcccgtattaaaagtactttgaactctgtttcaaaggctgtttttggcaatcaaaatgaaatgatttcacgtttagctcaatttaagccaagttcccaaattttaagaaaagtatcggatagtggctggttaaaacagaaaaacatcaaacaagccatcaaatctctgaaaaaatatagtgacaaatcagcagaaaagagtccttttccagaagagaaaagtcacattatagacaaagaagaagatataggtaaacgcagtctttttcattacacaagttctataaccacaaaatttggagactcattctactttttatcaaatcatattaattcatatttcaaacgtaaggaaaaaatgtctcaacaaaaggaaaatgaacatttccgggacaaatcagaacttgaagataaaaaggtagaagaggggaaattaagatctccagatcctggcatcctggcttataagccaggctcagaatctgtacatacggtggacaagcctacaagtccttctgcgatacctgatgttcttcaagtttcaactaaacaaagtattgctaactttctttctcgtcccacggaaggtgtacaagctttagtaggtggttatattggtggacttgtccccaaattaaagtatgattcaaagagtcagtcagaagaacaggaagagcctgctaaaactgatcaggctgtcagcaaagacagaaatgcagaggagaaaaagcgtttatctcttcagcgagaaaagattatcgcaagggtgagtattgataacaggacccgggcattagttcaggcattaagaagaacaactgacccaaagctctgcattactagggttgaagaactgacttttcatcttctagaatttcctgaaggaaaaggagtggctgtcaaggaaagaattattccatatttattacgactgagacaaattaaggatgaaactcttcaggctgcagttagagaaattttggccctaattggctatgtggatccagtgaaagggagaggaatccgaattctctcaattgatggtggaggaacaaggggcgtggttgctctccagaccctacgaaaattagttgaacttactcagaagccagttcatcagctctttgattacatttgtggtgtaagcacaggtgccatattagctttcatgttggggttgtttcatatgcccttggatgaatgtgaggaactttatcgaaaattaggatcagatgtattttcacaaaatgtcattgttggaacagtaaaaatgagttggagccatgcattttatgacagtcaaacatgggaaaacattcttaaggataggatgggatctgcactgatgattgaaacagcaagaaaccccacatgtcctaaggtagctgctgtaagtaccatagtaaatagagggataacacccaaagcttttgtgttcagaaactatggtcattttcctggaatcaactctcattatttgggaggctgtcagtataaaatgtggcaggccattagagcctcatctgctgctccaggctactttgcagaatatgcattgggaaatgatcttcatcaagatggaggtttgcttctgaataacccttcggcattagctatgcatgagtgtaaatgtctttggccagatgtgccgttagagtgcatagtatccctgggcactggacgttatgagagtgatgtgagaaacacggtaacatacacaagcttgaaaactaaactttctaatgttatcaacagtgctacagatacagaagaagtccatataatgcttgatggcctgttacctcctgacacctattttagattcaatcctgtaatgtgtgaaaacatacctctagatgaaagtcgaaatgaaaagctggatcagctgcagttggaagggttgaaatacatagaaagaaatgaacaaaaaatgaaaaaagttgcaaaaatattaagtcaagaaaaaacaactctgcagaaaattaatgattggataaaattaaaaactgatatgtatgaaggacttccattcttttcaaaattgtgatgagtatatgcttatgttctcataaatgaaggtctgtttagaagatcaaccacattcaataaggaattgtggggttcgacatgagttaactttgaaatacgtatgaattctggagaatcctgaaaaagacggtgcttcaaccagcttgcatagcacagagaatattcttggttacagaattcatatgggaactaggcttttaagatgttaataattagctaagctttagtaacccttactgtgctagtagattttagtagatattggtgttatattgtttgatgtttgaaaatatattaatatatgtgccgaacaagaaaccgaaagctatattgtactgtgtatttttactttagtcctcataatcatgttgaatttatgtgatcattgattttatttcatatggaaaagctaatttcttcttaaatttacattacctaatattctcactagctatgttctccaatccacactgccttttattgtaatatcatctaaatagatgcagaaaaatggaattttctctattaaagtattttacatttgacataaaaaagaaccagatacagttttctattcagatatgtttattttaacattgtttggttaaaaaaggtgaagttccagtcaaccactttttacccctgaaatttcaagataatgctatattaacttttccagatctaacactagcttattcttccctgttataaaatggtttgaacttactgaggagatattcctatcattaacaaaaataaactatttaaataatctgttgttaaaaggctaatgtcattttaaaattaatttttgttcataatgtagctcccctttagcctttga

SEQ ID NO: 20214 - DNA, 3766 bp, Homo sapiens
gcggccgcgccgggcaccaccctccaagagactggtatcgcagcccccagctccaaggaactcagcgcaggcaggggcttcagggacgcggagagggaggcttatctctgctgaaagggaatagcggcccgcaaacaagcaaaccaggacactgctccgaggtcccgcccaggaaggcaaaacgaagtcccaccgctctcacacccggcaaccaaccaaggcacagcacgccccaccagcaagccacgcctcgcgcatcacgcacgcacgcacgcacgcacacacgtctgtcgcggcttcccgccttgcgctccgtcatgctctattgcgcatatctcggggcgggggaggaacggagattgacaaggaggcagaggcctgagcgaggcggaaaatcctcaccccggcccgcgggtagacccaaacttctagcgcgtcacttccgctgggggcggagcggggcggggctgagtgggtggcgacctagctgctgcgccagtgtttgtgttggaagctcagctgatgcaggccggttggagtggacgtcattgccgggaacgagcgagtcgccgctgcagccctagtgactgcggcctgcatcccgattgtcttctcctccaaggtctacatgattacctgaagtttaataataatgcaagaagtgtttgtgggaagcagagaagcaagcaactgtatttcttgttctcacctaagcattactggaggataagccacatcagtctacaaagaggttttcatacaaacataataagatgtaaatggaccaaaagtgaagcacattcttgcagtaagcactgttactctccaagcaaccatggtttacatattgggattttgaaacttagcacttctgctcccaagggacttacaaaagtgaacatttgtatgtcccgtattaaaagtactttgaactctgtttcaaaggctgtttttggcaatcaaaatgaaatgatttcacgtttagctcaatttaagccaagttcccaaattttaagaaaagtatcggatagtggctggttaaaacagaaaaacatcaaacaagccatcaaatctctgaaaaaatatagtgacaaatcagcagaaaagagtccttttccagaagagaaaagtcacattatagacaaagaagaagatataggtaaacgcagtctttttcattacacaagttctataaccacaaaatttggagactcattctactttttatcaaatcatattaattcatatttcaaacgtaaggaaaaaatgtctcaacaaaaggaaaatgaacatttccgggacaaatcagaacttgaagataaaaaggtagaagaggggaaattaagatctccagatcctggcatcctggcttataagccaggctcagaatctgtacatacggtggacaagcctacaagtccttctgcgatacctgatgttcttcaagtttcaactaaacaaagtattgctaactttctttctcgtcccacggaaggtgtacaagctttagtaggtggttatattggtggacttgtccccaaattaaagtatgattcaaagagtcagtcagaagaacaggaagagcctgctaaaactgatcaggctgtcagcaaagacagaaatgcagaggagaaaaagcgtttatctcttcagcgagaaaagattatcgcaagggtgagtattgataacaggacccgggcattagttcaggcattaagaagaacaactgacccaaagctctgcattactagggttgaagaactgacttttcatcttctagaatttcctgaaggaaaaggagtggctgtcaaggaaagaattattccatatttattacgactgagacaaattaaggatgaaactcttcaggctgcagttagagaaattttggccctaattggctatgtggatccagtgaaagggagaggaatccgaattctctcaattgatggtggaggaacaaggggcgtggttgctctccagaccctacgaaaattagttgaacttactcagaagccagttcatcagctctttgattacatttgtggtgtaagcacaggtgccatattagctttcatgttggggttgtttcatatgcccttggatgaatgtgaggaactttatcgaaaattaggatcagatgtattttcacaaaatgtcattgttggaacagtaaaaatgagttggagccatgcattttatgacagtcaaacatgggaaaacattcttaaggataggatgggatctgcactgatgattgaaacagcaagaaaccccacatgtcctaaggtagctgctgtaagtaccatagtaaatagagggataacacccaaagcttttgtgttcagaaactatggtcattttcctggaatcaactctcattatttgggaggctgtcagtataaaatgtggcaggccattagagcctcatctgctgctccaggctactttgcagaatatgcattgggaaatgatcttcatcaagatggaggtttgcttctgaataacccttcggcattagctatgcatgagtgtaaatgtctttggccagatgtgccgttagagtgcatagtatccctgggcactggacgttatgagagtgatgtgagaaacacggtaacatacacaagcttgaaaactaaactttctaatgttatcaacagtgctacagatacagaagaagtccatataatgcttgatggcctgttacctcctgacacctattttagattcaatcctgtaatgtgtgaaaacatacctctagatgaaagtcgaaatgaaaagctggatcagctgcagttggaagggttgaaatacatagaaagaaatgaacaaaaaatgaaaaaagttgcaaaaatattaagtcaagaaaaaacaactctgcagaaaattaatgattggataaaattaaaaactgatatgtatgaaggacttccattcttttcaaaattgtgatgagtatatgcttatgttctcataaatgaaggtctgtttagaagatcaaccacattcaataaggaattgtggggttcgacatgagttaactttgaaatacgtatgaattctggagaatcctgaaaaagacggtgcttcaaccagcttgcatagcacagagaatattcttggttacagaattcatatgggaactaggcttttaagatgttaataattagctaagctttagtaacccttactgtgctagtagattttagtagatattggtgttatattgtttgatgtttgaaaatatattaatatatgtgccgaacaagaaaccgaaagctatattgtactgtgtatttttactttagtcctcataatcatgttgaatttatgtgatcattgattttatttcatatggaaaagctaatttcttcttaaatttacattacctaatattctcactagctatgttctccaatccacactgccttttattgtaatatcatctaaatagatgcagaaaaatggaattttctctattaaagtattttacatttgacataaaaaagaaccagatacagttttctattcagatatgtttattttaacattgtttggttaaaaaaggtgaagttccagtcaaccactttttacccctgaaatttcaagataatgctatattaacttttccagatctaacactagcttattcttccctgttataaaatggtttgaacttactgaggagatattcctatcattaacaaaaataaactatttaaataataaaaaagtcgacgcggccgcgaatttagtagtagta

SEQ ID NO: 20215 - DNA, 3585 bp, Homo sapiens
tcagcagggtcagaacctataatttcattcggtatattctgtgaagatgtacagccagcaaaagctttttaattcgggaaaacacgattggacttgcactttcaaaagattaccgtggttgcacagaagagactgactgggtcagaggttagttacaggctggaaaaccagtttagatgaaactgaagagcaaggatgaaagcctgaactagagcagtggaaatgcgaatgtggagcagaggaacgattcaagaaattctgcggtaaaactcatcagacttcatgactgattaaagattgtcttctcctccaaggtctacatgattacctgaagtttaataagtaagaccatgaattatggcatttcttaaatgaagcgttcaagaagtgagagaatgtcatagaaaataaatgatttttaagttatgtctattaatctgactgtagatatatatatttacctccttagtaatgcaagaagtgtttgtgggaagcagagaagcaagcaactgtatttcttgttctcacctaagcattactggaggataagccacatcagtctacaaagaggttttcatacaaacataataagatgtaaatggaccaaaagtgaagcacattcttgcagtaagcactgttactctccaagcaaccatggtttacatattgggattttgaaacttagcacttctgctcccaagggacttacaaaagtgaacatttgtatgtcccgtattaaaagtactttgaactctgtttcaaaggctgtttttggcaatcaaaatgaaatgatttcacgtttagctcaatttaagccaagttcccaaattttaagaaaagtatcggatagtggctggttaaaacagaaaaacatcaaacaagccatcaaatctctgaaaaaatatagtgacaaatcagcagaaaagagtccttttccagaagagaaaagtcacattatagacaaagaagaagatataggtaaacgcagtctttttcattacacaagttctataaccacaaaatttggagactcattctactttttatcaaatcatattaattcatatttcaaacgtaaggaaaaaatgtctcaacaaaaggaaaatgaacatttccgggacaaatcagaacttgaagataaaaaggtagaagaggggaaattaagatctccagatcctggcatcctggcttataagccaggctcagaatctgtacatacggtggacaagcctacaagtccttctgcgatacctgatgttcttcaagtttcaactaaacaaagtattgctaactttctttctcgtcccacggaaggtgtacaagctttagtaggtggttatattggtggacttgtccccaaattaaagtatgattcaaagagtcagtcagaagaacaggaagagcctgctaaaactgatcaggctgtcagcaaagacagaaatgcagaggagaaaaagcgtttatctcttcagcgagaaaagattatcgcaagggtgagtattgataacaggacccgggcattagttcaggcattaagaagaacaactgacccaaagctctgcattactagggttgaagaactgacttttcatcttctagaatttcctgaaggaaaaggagtggctgtcaaggaaagaattattccatatttattacgactgagacaaattaaggatgaaactcttcaggctgcagttagagaaattttggccctaattggctatgtggatccagtgaaagggagaggaatccgaattctctcaattgatggtggaggaacaaggggcgtggttgctctccagaccctacgaaaattagttgaacttactcagaagccagttcatcagctctttgattacatttgtggtgtaagcacaggtgccatattagctttcatgttggggttgtttcatatgcccttggatgaatgtgaggaactttatcgaaaattaggatcagatgtattttcacaaaatgtcattgttggaacagtaaaaatgagttggagccatgcattttatgacagtcaaacatgggaaaacattcttaaggataggatgggatctgcactgatgattgaaacagcaagaaaccccacatgtcctaaggtagctgctgtaagtaccatagtaaatagagggataacacccaaagcttttgtgttcagaaactatggtcattttcctggaatcaactctcattatttgggaggctgtcagtataaaatgtggcaggccattagagcctcatctgctgctccaggctactttgcagaatatgcattgggaaatgatcttcatcaagatggaggtttgcttctgaataacccttcggcattagctatgcatgagtgtaaatgtctttggccagatgtgccgttagagtgcatagtatccctgggcactggacgttatgagagtgatgtgagaaacacggtaacatacacaagcttgaaaactaaactttctaatgttatcaacagtgctacagatacagaagaagtccatataatgcttgatggcctgttacctcctgacacctattttagattcaatcctgtaatgtgtgaaaacatacctctagatgaaagtcgaaatgaaaagctggatcagctgcagttggaagggttgaaatacatagaaagaaatgaacaaaaaatgaaaaaagttgcaaaaatattaagtcaagaaaaaacaactctgcagaaaattaatgattggataaaattaaaaactgatatgtatgaaggacttccattcttttcaaaattgtgatgagtatatgcttatgttctcataaatgaaggtctgtttagaagatcaaccacattcaataaggaattgtggggttcgacatgagttaactttgaaatacgtatgaattctggagaatcctgaaaaagacggtgcttcaaccagcttgcatagcacagagaatattcttggttacagaattcatatgggaactaggcttttaagatgttaataattagctaagctttagtaacccttactgtgctagtagattttagtagatattggtgttatattgtttgatgtttgaaaatatattaatatatgtgccgaacaagaaaccgaaagctatattgtactgtgtatttttactttagtcctcataatcatgttgaatttatgtgatcattgattttatttcatatggaaaagctaatttcttcttaaatttacattacctaatattctcactagctatgttctccaatccacactgccttttattgtaatatcatctaaatagatgcagaaaaatggaattttctctattaaagtattttacatttgacataaaaaagaaccagatacagttttctattcagatatgtttattttaacattgtttggttaaaaaaggtgaagttccagtcaaccactttttacccctgaaatttcaagataatgctatattaacttttccagatctaacactagcttattcttccctgttataaaatggtttgaacttactgaggagatattcctatcattaacaaaaataaactatttaaataataaaaaagtcgacgcggccgcgaatttagtagtagta

SEQ ID NO: 20216 - DNA, 2708 bp, Homo sapiens
gcggccgcgccgggcaccaccctccaagagactggtatcgcagcccccagctccaaggaactcagcgcaggcaggggcttcagggacgcggagagggaggcttatctctgctgaaagggaatagcggcccgcaaacaagcaaaccaggacactgctccgaggtcccgcccaggaaggcaaaacgaagtcccaccgctctcacacccggcaaccaaccaaggcacagcacgccccaccagcaagccacgcctcgcgcatcacgcacgcacgcacgcacgcacacacgtctgtcgcggcttcccgccttgcgctccgtcatgctctattgcgcatatctcggggcgggggaggaacggagattgacaaggaggcagaggcctgagcgaggcggaaaatcctcaccccggcccgcgggtagacccaaacttctagcgcgtcacttccgctgggggcggagcggggcggggctgagtgggtggcgacctagctgctgcgccagtgtttgtgttggaagctcagctgatgcaggccggttggagtggacgtcattgccgggaacgagcgagtcgccgctgcagccctagtgactgcggcctgcatcccgattatcgcaagggtgagtattgataacaggacccgggcattagttcaggcattaagaagaacaactgacccaaagctctgcattactagggttgaagaactgacttttcatcttctagaatttcctgaaggaaaaggagtggctgtcaaggaaagaattattccatatttattacgactgagacaaattaaggatgaaactcttcaggctgcagttagagaaattttggccctaattggctatgtggatccagtgaaagggagaggaatccgaattctctcaattgatggtggaggaacaaggggcgtggttgctctccagaccctacgaaaattagttgaacttactcagaagccagttcatcagctctttgattacatttgtggtgtaagcacaggtgccatattagctttcatgttggggttgtttcatatgcccttggatgaatgtgaggaactttatcgaaaattaggatcagatgtattttcacaaaatgtcattgttggaacagtaaaaatgagttggagccatgcattttatgacagtcaaacatgggaaaacattcttaaggataggatgggatctgcactgatgattgaaacagcaagaaaccccacatgtcctaaggtagctgctgtaagtaccatagtaaatagagggataacacccaaagcttttgtgttcagaaactatggtcattttcctggaatcaactctcattatttgggaggctgtcagtataaaatgtggcaggccattagagcctcatctgctgctccaggctactttgcagaatatgcattgggaaatgatcttcatcaagatggaggtttgcttctgaataacccttcggcattagctatgcatgagtgtaaatgtctttggccagatgtgccgttagagtgcatagtatccctgggcactggacgttatgagagtgatgtgagaaacacggtaacatacacaagcttgaaaactaaactttctaatgttatcaacagtgctacagatacagaagaagtccatataatgcttgatggcctgttacctcctgacacctattttagattcaatcctgtaatgtgtgaaaacatacctctagatgaaagtcgaaatgaaaagctggatcagctgcagttggaagggttgaaatacatagaaagaaatgaacaaaaaatgaaaaaagttgcaaaaatattaagtcaagaaaaaacaactctgcagaaaattaatgattggataaaattaaaaactgatatgtatgaaggacttccattcttttcaaaattgtgatgagtatatgcttatgttctcataaatgaaggtctgtttagaagatcaaccacattcaataaggaattgtggggttcgacatgagttaactttgaaatacgtatgaattctggagaatcctgaaaaagacggtgcttcaaccagcttgcatagcacagagaatattcttggttacagaattcatatgggaactaggcttttaagatgttaataattagctaagctttagtaacccttactgtgctagtagattttagtagatattggtgttatattgtttgatgtttgaaaatatattaatatatgtgccgaacaagaaaccgaaagctatattgtactgtgtatttttactttagtcctcataatcatgttgaatttatgtgatcattgattttatttcatatggaaaagctaatttcttcttaaatttacattacctaatattctcactagctatgttctccaatccacactgccttttattgtaatatcatctaaatagatgcagaaaaatggaattttctctattaaagtattttacatttgacataaaaaagaaccagatacagttttctattcagatatgtttattttaacattgtttggttaaaaaaggtgaagttccagtcaaccactttttacccctgaaatttcaagataatgctatattaacttttccagatctaacactagcttattcttccctgttataaaatggtttgaacttactgaggagatattcctatcattaacaaaaataaactatttaaataataaaaaagtcgacgcggccgcgaatttagtagtagta

SEQ ID NO: 20217 - DNA, 2969 bp, Homo sapiens
gcggccgcgccgggcaccaccctccaagagactggtatcgcagcccccagctccaaggaactcagcgcaggcaggggcttcagggacgcggagagggaggcttatctctgctgaaagggaatagcggcccgcaaacaagcaaaccaggacactgctccgaggtcccgcccaggaaggcaaaacgaagtcccaccgctctcacacccggcaaccaaccaaggcacagcacgccccaccagcaagccacgcctcgcgcatcacgcacgcacgcacgcacgcacacacgtctgtcgcggcttcccgccttgcgctccgtcatgctctattgcgcatatctcggggcgggggaggaacggagattgacaaggaggcagaggcctgagcgaggcggaaaatcctcaccccggcccgcgggtagacccaaacttctagcgcgtcacttccgctgggggcggagcggggcggggctgagtgggtggcgacctagctgctgcgccagtgtttgtgttggaagctcagctgatgcaggccggttggagtggacgtcattgccgggaacgagcgagtcgccgctgcagccctagtgactgcggcctgcatcccggtaagaccatgaattatggcatttcttaaatgaagcgttcaagaagtgagagaatgtcatagaaaataaatgatttttaagttatgtctattaatctgactgtagatatatatatttacctccttagtaatgcaagaagtgtttgtgggaagcagagaagcaagcaactgtatttcttgttctcacctaagcattactggaggataagccacatcagtctacaaagaggttttcatacaaacataataagatgtaaatggaccaaaagtgaagcacattcttgcagtaagcactgttactctccaagcaaccatggtttacatattgggattttgaaacttagcacttctgctcccaagggacttacaaaagtgaacatttgtatgtcccgtattaaaagtactttgaactctgtttcaaaggctgtttttggcaatcaaaatgaaatgatttcacgtttagctcaatttaagccaagttcccaaattttaagaaaagtatcggatagtggctggttaaaacagaaaaacatcaaacaagccatcaaatctctgaaaaaatatagtgacaaatcagcagaaaagagtccttttccagaagagaaaagtcacattatagacaaagaagaagatataggtaaacgcagtctttttcattacacaagttctataaccacaaaatttggagactcattctactttttatcaaatcatattaattcatatttcaaacgtaaggaaaaaatgtctcaacaaaaggaaaatgaacatttccgggacaaatcagaacttgaagataaaaaggtagaagaggggaaattaagatctccagatcctggcatcctggcttataagccaggctcagaatctgtacatacggtggacaagcctacaagtccttctgcgatacctgatgttcttcaagtttcaactaaacaaagtattgctaactttctttctcgtcccacggaaggtgtacaagctttagtaggtggttatattggtggacttgtccccaaattaaagtatgattcaaagagtcagtcagaagaacaggaagagcctgctaaaactgatcaggctgtcagcaaagacagaaatgcagaggagaaaaagcgtttatctcttcagcgagaaaagattatcgcaagggtgagtattgataacaggacccgggcattagttcaggcattaagaagaacaactgacccaaagctctgcattactagggttgaagaactgacttttcatcttctagaatttcctgaaggaaaaggagtggctgtcaaggaaagaattattccatatttattacgactgagacaaattaaggatgaaactcttcaggctgcagttagagaaattttggccctaattggctatgtggatccagtgaaagggagaggaatccgaattctctcaattgatggtggaggaacaaggggcgtggttgctctccagaccctacgaaaattagttgaacttactcagaagccagttcatcagctctttgattacatttgtggtgtaagcacaggtgccatattagctttcatgttggggttgtttcatatgcccttggatgaatgtgaggaactttatcgaaaattaggatcagatgtattttcacaaaatgtcattgttggaacagtaaaaatgagttggagccatgcattttatgacagtcaaacatgggaaaacattcttaagtaagttacaattactctttttaaatcttctgattatataggtagtatgtgcatattataatttgaaaaatgtcaatattaaattatattcttgcatattataatttgaaaaatatcaagaatattaaattatttgactaattagagataaccactgttagtattttggtgaatcatagtttagtaattgttttggggggtttgtgtgtgtgagatttgcatgtaaaagttgcaattgccttttttaaaaatatgagatacttgcatcctgttgtttttacttaacatattaaatgtgtctcaagtcattctaaaatattcaattatttttatttttatttgtttttcgacacacgctctcactcccgttgcccagggtagagtacagtggtgctatcttggctcactgcagcctcaacttcccaggctcaagtgatcctcccacgtcagccctcccaagtagctgggaccacacgtgtgcaccaccatgcccagctaattttttctgtttttagtagagccaaagtatatattatcataaaatataagcataaaatcatccacaatcctgttattcagagctgtagactttaatatatctccttctagtttattagaccttatacattttgtatagctgatattagattgtagttg

SEQ ID NO: 20218 - DNA, 1680 bp, Homo sapiens
gcggccgcgccgggcaccaccctccaagagactggtatcgcagcccccagctccaaggaactcagcgcaggcaggggcttcagggacgcggagagggaggcttatctctgctgaaagggaatagcggcccgcaaacaagcaaaccaggacactgctccgaggtcccgcccaggaaggcaaaacgaagtcccaccgctctcacacccggcaaccaaccaaggcacagcacgccccaccagcaagccacgcctcgcgcatcacgcacgcacgcacgcacgcacacacgtctgtcgcggcttcccgccttgcgctccgtcatgctctattgcgcatatctcggggcgggggaggaacggagattgacaaggaggcagaggcctgagcgaggcggaaaatcctcaccccggcccgcgggtagacccaaacttctagcgcgtcacttccgctgggggcggagcggggcggggctgagtgggtggcgacctagctgctgcgccagtgtttgtgttggaagctcagctgatgcaggccggttggagtggacgtcattgccgggaacgagcgagtcgccgctgcagccctagtgactgcggcctgcatcccggaaagaattattccatatttattacgactgagacaaattaaggatgaaactcttcaggctgcagttagagaaattttggccctaattggctatgtggatccagtgaaagggagaggaatccgaattctctcaattgatggtggaggaacaaggggcgtggttgctctccagaccctacgaaaattagttgaacttactcagaagccagttcatcagctctttgattacatttgtggtgtaagcacaggtgccatattagctttcatgttggggttgtttcatatgcccttggatgaatgtgaggaactttatcgaaaattaggatcagatgtattttcacaaaatgtcattgttggaacagtaaaaatgagttggagccatgcattttatgacagtcaaacatgggaaaacattcttaagtaagttacaattactctttttaaatcttctgattatataggtagtatgtgcatattataatttgaaaaatgtcaatattaaattatattcttgcatattataatttgaaaaatatcaagaatattaaattatttgactaattagagataaccactgttagtattttggtgaatcatagtttagtaattgttttggggggtttgtgtgtgtgagatttgcatgtaaaagttgcaattgccttttttaaaaatatgagatacttgcatcctgttgtttttacttaacatattaaatgtgtctcaagtcattctaaaatattcaattatttttatttttatttgtttttcgacacacgctctcactcccgttgcccagggtagagtacagtggtgctatcttggctcactgcagcctcaacttcccaggctcaagtgatcctcccacgtcagccctcccaagtagctgggaccacacgtgtgcaccaccatgcccagctaattttttctgtttttagtagagccaaagtatatattatcataaaatataagcataaaatcatccacaatcctgttattcagagctgtagactttaatatatctccttctagtttattagaccttatacattttgtatagctgatattagattgtagttg

SEQ ID NO: 20219 - DNA, 4398 bp, Homo sapiens
ggagtccggggcctcctggcgtcactcttcgccttcaactctttccgggagaactggcagcgggcttgggtgcgagcgctgaacgagcaggcctgcagaaacgggagctccatccaaatcgcctttgaggaggtgccccaactcccacccagagccagcatcagtcatgtgacctgcgtagaccaatctgagcataccatggtgctgcgttgccagctctctgctgaggaggtgcggttcccagtctctgtgacccagcagtcccccgctgccgtctccatggagacctaccacgtcactctgacactgccaccaacacagttggaagtcaacctggaggaaatccctggtgaggggctgctcatatcctgggccttcactgatcgcccagatctcagcctaacggtgcttcccaagcttcaggccagggagagaggtgaagaacaagtggagctctccacaattgaggaactgatcaaggatgccatagtcagcacccagccagccatgatggtcaacctcagggcttgctctgccccaggaggcctggtacccagtgagaagccacccatgatgccccaggctcagccagccatccccagacctaaccggttattcctacggcagcttcgggcatctcacttgggaaatgagctggaaggcaccgaggaactgtgctgtgtagctgaactcgacaaccccatgcagcagaagtggaccaagcccgcgagggctggatccgaggtggagtggacagaagacctggcactggatctgggcccccagagccgggagctgaccctcaaagtgctgaggagcagcagctgtggagacaccgaactcctaggccaggccacactgcctgtgggctccccctccagaccactgtctcgaagacagttgtgcccactcaccccagggccagggaaagccctgggaccagcagccaccatggcagtggaggtgagaagctgacccctggggtaggtgggaggacacaggggatgggcagtctccgaggctctgtctcttctctctcccacccctgggcagcttcactatgaggagggctctccccggaacctgggtactcccacctcctccactccacgccccagcatcacacctaccaagaagattgagcttgaccggaccatcatgcccgatggcaccattgtcaccacagtcaccactgtccagtcccggccccgtatagacggcaaattagactccccctcccgctccccgtccaaggtggaggtgaccgagaagacgacaactgtgctgagtgagagcagtggccccagcaatacctcccatagcagcagccgtgagtggggaatggggtgcatgagtgtgggttggccctggtgccccagcatcaaaaagtactctgggtgggataggaggagttccaatccaagaaagagccagggagaagtcaggttattcattctctgcacccctagcaggggacagccacctttccaacggcttggaccctgtagcagagacagcgattcgccagctgacagagcccagtgggcgggtggccaagaagacacccaccaagcgcagcactctcatcatctctggtgtttccaaggtgcccattgctcaggacgagttggcgctatccctgggctatgcggcatccctggaagcctcagtgcaggatgatgcagggaccagcggaggcccctcttcacctccctcagacccaccagccatgtctccaggaccgctagatgccctctctagtcccacaagtgtccaggaagcagacgagacaacccgttcggatatttctgagaggccatctgtggatgatattgagtcggaaacggggtccactggtgccctggagacccgcagcctcaaggatcacaaagtgagtttcctgcgcagcggcactaagctcatcttccgccggaggcctaggcagaaggaagctggcctgagccaatcacacgatgacctctccaacgcaacggccacgcccagtgtccgaaagaaggccggcagcttttctcgccgccttatcaagcgcttttccttcaaatccaaacccaaggccaatggtaaccccagcccccagctctgaggacccagctctgaaagggcacgagttctctcagcccattccccacctccccttccataccccttcctggatctccagtgcctgggccaggaaagccctctgggttccgggaagccccgtccaccctgggccatggggccggttggaaggatacttggaacgggaagcacatgagaggtgggcacccggtgccgaggacatggacgagggactggtggctgggagggagaggagggccctgtccggcatgtgtgggtattccccagaagcatttgcctcctgctgagcctggtccctgagcggagtcccagggtgctcagctcttcagctgacccttcttcccttatttattctcttttctatttatatgtgtggcttaggaccctccgtgaacagatgatagagggcatctctcccaggtgacccttcttttctgtcccaggagggtgggtaattccctttgggatggggctcccacacctccctcaggtccccactcagaccagcaccagtgtctgcctctgagaatgttggcagctcacagagagcagggccggcccgggatggggggcaggtactccccaccttcctgcctcccctcctgctcctcatccctccctccccctttattaccgttttttgtacttgatgccttctctgtgagcagtggctctgtgggaaggagggagccgggagcctggtgggaagccttccccagagagatggctttaggggctttatttaaagactgtgatgatggagccacgcaaggctgcacctctgtgtgttgggagacgatgatgatgtccattgctgtgtgatggcttggaatttaatttattaaagtcaaattggagtttataaactggacaactggttatcctttgaaaggcagtaggcagccaggctgtgacatggatggtgtgggaggatgagacaggggcccggataatgaggttgggtagatgacacacattgtggatctgctaagaagttcctgcaggaaagaaggggtgtgcagagaaaggatggaagagacaggaggctctggagtatgaaattgtagcaaaaaactcaatcaactagtacaggttagtcttcattcccctttctggaacaggctgctccttctaggatgtaatggagatcaaagcttggaccctgtaactagactgcctgcctgggtttgagtcccagctcttctaattacttgtgtgaccttgggcaagttatgtaacctctaagtgcctcagttttctcatctgtaaaatgggaacttcaatcatcatggctatcatttggttgtggatgagaagtaaatgaagtgctgagtgttaactgttgcctcagaagaaactgggagggggaagtcttagaagtgtttcaacataataaaagctctctcattctgaaatgtgggcaaatttcagggattgatagatcctagcaaactgtgtccctggttcccgtgcttgagatcttatacaggacttgaaccaggtaagctgctacaggatattgggcagaatgcaggaccaggaagcaagaaaactgagtctgccacagacaaaccaagtgatcttgagcaggcaacttctcctttggggacctcagtttcctcatatctaaaataagggtgacctggataaacattcaggtcacttccagccttgacattctatgactacctatatctcagggtgtttagggcacatgcctttgggtagatagcatgtggaaattgttactattccccatgctcctgtccacactactcaccaaatatgagatatccgggaagaatggagggtatagattttttttttcaattagataatttagttttatatatttggggggacaagtgcaggtttcttacatgcatatattgcatgcatagaggtgaagtctgggctttttttagtgtgcgcatcgcccaaatagtgaacatcatacccaataggtagtttttcaaccctcaccctcctcccaccttctcacctttcatagtctccgatgtcttttattccactctatatgtccatgtatacccattatttagctcccacttataaatgagaatatgccatatttgactttgtttctgagttatttcaccgaggataatggcgtccagttccacccatgttgctggaaaacacatgatttcattcttttttatggctgagtagtattccactgtgtgtgtgtgtgttgggcgatgataatgatgtccattgctgtgtgacagcttggaatttaatttattaaagtcaagttggagtttaaaaact

SEQ ID NO: 20220 - DNA, 4302 bp, Homo sapiens
ggagtccggggcctcctggcgtcactcttcgccttcaactctttccgggagaactggcagcgggcttgggtgcgagcgctgaacgagcaggcctgcagaaacggggtgctgcgttgccagctctctgctgaggaggtgcggttcccagtctctgtgacccagcagtcccccgctgccgtctccatggagacctaccacgtcactctgacactgccaccaacacagttggaagtcaacctggaggaaatccctggtgaggggctgctcatatcctgggccttcactgatcgcccagatctcagcctaacggtgcttcccaagcttcaggccagggagagaggtgaagaacaagtggagctctccacaattgaggaactgatcaaggatgccatagtcagcacccagccagccatgatggtcaacctcagggcttgctctgccccaggaggcctggtacccagtgagaagccacccatgatgccccaggctcagccagccatccccagacctaaccggttattcctacggcagcttcgggcatctcacttgggaaatgagctggaaggcaccgaggaactgtgctgtgtagctgaactcgacaaccccatgcagcagaagtggaccaagcccgcgagggctggatccgaggtggagtggacagaagacctggcactggatctgggcccccagagccgggagctgaccctcaaagtgctgaggagcagcagctgtggagacaccgaactcctaggccaggccacactgcctgtgggctccccctccagaccactgtctcgaagacagttgtgcccactcaccccagggccagggaaagccctgggaccagcagccaccatggcagtggaggtgagaagctgacccctggggtaggtgggaggacacaggggatgggcagtctccgaggctctgtctcttctctctcccacccctgggcagcttcactatgaggagggctctccccggaacctgggtactcccacctcctccactccacgccccagcatcacacctaccaagaagattgagcttgaccggaccatcatgcccgatggcaccattgtcaccacagtcaccactgtccagtcccggccccgtatagacggcaaattagactccccctcccgctccccgtccaaggtggaggtgaccgagaagacgacaactgtgctgagtgagagcagtggccccagcaatacctcccatagcagcagccgtgagtggggaatggggtgcatgagtgtgggttggccctggtgccccagcatcaaaaagtactctgggtgggataggaggagttccaatccaagaaagagccagggagaagtcaggttattcattctctgcacccctagcaggggacagccacctttccaacggcttggaccctgtagcagagacagcgattcgccagctgacagagcccagtgggcgggtggccaagaagacacccaccaagcgcagcactctcatcatctctggtgtttccaaggtgcccattgctcaggacgagttggcgctatccctgggctatgcggcatccctggaagcctcagtgcaggatgatgcagggaccagcggaggcccctcttcacctccctcagacccaccagccatgtctccaggaccgctagatgccctctctagtcccacaagtgtccaggaagcagacgagacaacccgttcggatatttctgagaggccatctgtggatgatattgagtcggaaacggggtccactggtgccctggagacccgcagcctcaaggatcacaaagtgagtttcctgcgcagcggcactaagctcatcttccgccggaggcctaggcagaaggaagctggcctgagccaatcacacgatgacctctccaacgcaacggccacgcccagtgtccgaaagaaggccggcagcttttctcgccgccttatcaagcgcttttccttcaaatccaaacccaaggccaatggtaaccccagcccccagctctgaggacccagctctgaaagggcacgagttctctcagcccattccccacctccccttccataccccttcctggatctccagtgcctgggccaggaaagccctctgggttccgggaagccccgtccaccctgggccatggggccggttggaaggatacttggaacgggaagcacatgagaggtgggcacccggtgccgaggacatggacgagggactggtggctgggagggagaggagggccctgtccggcatgtgtgggtattccccagaagcatttgcctcctgctgagcctggtccctgagcggagtcccagggtgctcagctcttcagctgacccttcttcccttatttattctcttttctatttatatgtgtggcttaggaccctccgtgaacagatgatagagggcatctctcccaggtgacccttcttttctgtcccaggagggtgggtaattccctttgggatggggctcccacacctccctcaggtccccactcagaccagcaccagtgtctgcctctgagaatgttggcagctcacagagagcagggccggcccgggatggggggcaggtactccccaccttcctgcctcccctcctgctcctcatccctccctccccctttattaccgttttttgtacttgatgccttctctgtgagcagtggctctgtgggaaggagggagccgggagcctggtgggaagccttccccagagagatggctttaggggctttatttaaagactgtgatgatggagccacgcaaggctgcacctctgtgtgttgggagacgatgatgatgtccattgctgtgtgatggcttggaatttaatttattaaagtcaaattggagtttataaactggacaactggttatcctttgaaaggcagtaggcagccaggctgtgacatggatggtgtgggaggatgagacaggggcccggataatgaggttgggtagatgacacacattgtggatctgctaagaagttcctgcaggaaagaaggggtgtgcagagaaaggatggaagagacaggaggctctggagtatgaaattgtagcaaaaaactcaatcaactagtacaggttagtcttcattcccctttctggaacaggctgctccttctaggatgtaatggagatcaaagcttggaccctgtaactagactgcctgcctgggtttgagtcccagctcttctaattacttgtgtgaccttgggcaagttatgtaacctctaagtgcctcagttttctcatctgtaaaatgggaacttcaatcatcatggctatcatttggttgtggatgagaagtaaatgaagtgctgagtgttaactgttgcctcagaagaaactgggagggggaagtcttagaagtgtttcaacataataaaagctctctcattctgaaatgtgggcaaatttcagggattgatagatcctagcaaactgtgtccctggttcccgtgcttgagatcttatacaggacttgaaccaggtaagctgctacaggatattgggcagaatgcaggaccaggaagcaagaaaactgagtctgccacagacaaaccaagtgatcttgagcaggcaacttctcctttggggacctcagtttcctcatatctaaaataagggtgacctggataaacattcaggtcacttccagccttgacattctatgactacctatatctcagggtgtttagggcacatgcctttgggtagatagcatgtggaaattgttactattccccatgctcctgtccacactactcaccaaatatgagatatccgggaagaatggagggtatagattttttttttcaattagataatttagttttatatatttggggggacaagtgcaggtttcttacatgcatatattgcatgcatagaggtgaagtctgggctttttttagtgtgcgcatcgcccaaatagtgaacatcatacccaataggtagtttttcaaccctcaccctcctcccaccttctcacctttcatagtctccgatgtcttttattccactctatatgtccatgtatacccattatttagctcccacttataaatgagaatatgccatatttgactttgtttctgagttatttcaccgaggataatggcgtccagttccacccatgttgctggaaaacacatgatttcattcttttttatggctgagtagtattccactgtgtgtgtgtgtgttgggcgatgataatgatgtccattgctgtgtgacagcttggaatttaatttattaaagtcaagttggagtttaaaaact

SEQ ID NO: 20221 - DNA, 2733 bp, Homo sapiens
ggagtccggggcctcctggcgtcactcttcgccttcaactctttccgggagaactggcagcgggcttgggtgcgagcgctgaacgagcaggcctgcagaaacgggagctccatccaaatcgcctttgaggaggtgccccaactcccacccagagccagcatcagtcatgtgacctgcgtagaccaatctgagcataccatggtgctgcgttgccagctctctgctgaggaggtgcggttcccagtctctgtgacccagcagtcccccgctgccgtctccatggagacctaccacgtcactctgacactgccaccaacacagttggaagtcaacctggaggaaatccctggtgaggggctgctcatatcctgggccttcactgatcgcccagatctcagcctaacggtgcttcccaagcttcaggccagggagagaggtgaagaacaagtggagctctccacaattgaggaactgatcaaggatgccatagtcagcacccagccagccatgatggtcaacctcagggcttgctctgccccaggaggcctggtacccagtgagaagccacccatgatgccccaggctcagccagccatccccagacctaaccggttattcctacggcagcttcgggcatctcacttgggaaatgagctggaaggcaccgaggaactgtgctgtgtagctgaactcgacaaccccatgcagcagaagtggaccaagcccgcgagggctggatccgaggtggagtggacagaagacctggcactggatctgggcccccagagccgggagctgaccctcaaagtgctgaggagcagcagctgtggagacaccgaactcctaggccaggccacactgcctgtgggctccccctccagaccactgtctcgaagacagttgtgcccactcaccccagggccagggaaagccctgggaccagcagccaccatggcagtggagcttcactatgaggagggctctccccggaacctgggtactcccacctcctccactccacgccccagcatcacacctaccaagaagattgagcttgaccggaccatcatgcccgatggcaccattgtcaccacagtcaccactgtccagtcccggccccgtatagacggcaaattagactccccctcccgctccccgtccaaggtggaggtgaccgagaagacgacaactgtgctgagtgagagcagtggccccagcaatacctcccatagcagcagccgggacagccacctttccaacggcttggaccctgtagcagagacagcgattcgccagctgacagagcccagtgggcgggtggccaagaagacacccaccaagcgcagcactctcatcatctctggtgtttccaaggtgcccattgctcaggacgagttggcgctatccctgggctatgcggcatccctggaagcctcagtgcaggatgatgcagggaccagcggaggcccctcttcacctccctcagacccaccagccatgtctccaggaccgctagatgccctctctagtcccacaagtgtccaggaagcagacgagacaacccgttcggatatttctgagaggccatctgtggatgatattgagtcggaaacggggtccactggtgccctggagacccgcagcctcaaggatcacaaagtgagtttcctgcgcagcggcactaagctcatcttccgccggaggcctaggcagaaggaagctggcctgagccaatcacacgatgacctctccaacgcaacggccacgcccagtgtccgaaagaaggccggcagcttttctcgccgccttatcaagcgcttttccttcaaatccaaacccaaggccaatggtaaccccagcccccagctctgaggacccagctctgaaagggcacgagttctctcagcccattccccacctccccttccataccccttcctggatctccagtgcctgggccaggaaagccctctgggttccgggaagccccgtccaccctgggccatggggccggttggaaggatacttggaacgggaagcacatgagaggtgggcacccggtgccgaggacatggacgagggactggtggctgggagggagaggagggccctgtccggcatgtgtgggtattccccagaagcatttgcctcctgctgagcctggtccctgagcggagtcccagggtgctcagctcttcagctgacccttcttcccttatttattctcttttctatttatatgtgtggcttaggaccctccgtgaacagatgatagagggcatctctcccaggtgacccttcttttctgtcccaggagggtgggtaattccctttgggatggggctcccacacctccctcaggtccccactcagaccagcaccagtgtctgcctctgagaatgttggcagctcacagagagcagggccggcccgggatggggggcaggtactccccaccttcctgcctcccctcctgctcctcatccctccctccccctttattaccgttttttgtacttgatgccttctctgtgagcagtggctctgtgggaaggagggagccgggagcctggtgggaagccttccccagagagatggctttaggggctttatttaaagactgtgatgatggagccacgcaaggctgcacctctgtgtgttgggagacgatgatgatgtccattgctgtgtgatggcttggaatttaatttattaaagtcaaattggagttta

SEQ ID NO: 20222 - DNA, 2103 bp, Homo sapiens
aaggctaggtacgaggctgggtgaatcggccgcaccgaggaactgtgctgtgtagctgaactcgacaaccccatgcagcagaagtggaccaagcccgcgagggctggatccgaggtggagtggacagaagacctggcactggatctgggcccccagagccgggagctgaccctcaaagtgctgaggagcagcagctgtggagacaccgaactcctaggccaggccacactgcctgtgggctccccctccagaccactgtctcgaagacagttgtgcccactcaccccagggccagggaaagccctgggaccagcagccaccatggcagtggagcttcactatgaggagggctctccccggaacctgggtactcccacctcctccactccacgccccagcatcacacctaccaagaagattgagcttgaccggaccatcatgcccgatggcaccattgtcaccacagtcaccactgtccagtcccggccccgtatagacggcaaattagactccccctcccgctccccgtccaaggtggaggtgaccgagaagacgacaactgtgctgagtgagagcagtggccccagcaatacctcccatagcagcagccgggacagccacctttccaacggcttggaccctgtagcagagacagcgattcgccagctgacagagcccagtgggcgggtggccaagaagacacccaccaagcgcagcactctcatcatctctggtgtttccaaggtgcccattgctcaggacgagttggcgctatccctgggctatgcggcatccctggaagcctcagtgcaggatgatgcagggaccagcggaggcccctcttcacctccctcagacccaccagccatgtctccaggaccgctagatgccctctctagtcccacaagtgtccaggaagcagacgagacaacccgttcggatatttctgagaggccatctgtggatgatattgagtcggaaacggggtccactggtgccctggagacccgcagcctcaaggatcacaaagtgagtttcctgcgcagcggcactaagctcatcttccgccggaggcctaggcagaaggaagctggcctgagccaatcacacgatgacctctccaacgcaacggccacgcccagtgtccgaaagaaggccggcagcttttctcgccgccttatcaagcgcttttccttcaaatccaaacccaaggccaatggtaaccccagcccccagctctgaggacccagctctgaaagggcacgagttctctcagcccattccccacctccccttccataccccttcctggatctccagtgcctgggccaggaaagccctctgggttccgggaagccccgtccaccctgggccatggggccggttggaaggatacttggaacgggaagcacatgagaggtgggcacccggtgccgaggacatggacgagggactggtggctgggagggagaggagggccctgtccggcatgtgtgggtattccccagaagcatttgcctcctgctgagcctggtccctgagcggagtcccagggtgctcagctcttcagctgacccttcttcccttatttattctcttttctatttatatgtgtggcttaggaccctccgtgaacagatgatagagggcatctctcccaggtgacccttcttttctgtcccaggagggtgggtaattccctttgggatggggctcccacacctccctcaggtccccactcagaccagcaccagtgtctgcctctgagaatgttggcagctcacagagagcagggccggcccgggatggggggcaggtactccccaccttcctgcctcccctcctgctcctcatccctccctccccctttattaccgttttttgtacttgatgccttctctgtgagcagtggctctgtgggaaggagggagccgggagcctggtgggaagccttccccagagagatggctttaggggctttatttaaagactgtgatgatggagccacgcaaggctgcacctctgtgtgttgggagacgatgatgatgtccattgctgtgtgatggcttggaatttaatttattaaagtcaaattggagttta

SEQ ID NO: 20223 - DNA, 1930 bp, Homo sapiens
ggcccagctcacagtgccatccctttccccagccgaactcctaggccaggccacactgcctgtgggctccccctccagaccactgtctcgaagacagttgtgcccactcaccccagggccagggaaagccctgggaccagcagccaccatggcagtggagcttcactatgaggagggctctccccggaacctgggtactcccacctcctccactccacgccccagcatcacacctaccaagaagattgagcttgaccggaccatcatgcccgatggcaccattgtcaccacagtcaccactgtccagtcccggccccgtatagacggcaaattagactccccctcccgctccccgtccaaggtggaggtgaccgagaagacgacaactgtgctgagtgagagcagtggccccagcaatacctcccatagcagcagccgggacagccacctttccaacggcttggaccctgtagcagagacagcgattcgccagctgacagagcccagtgggcgggtggccaagaagacacccaccaagcgcagcactctcatcatctctggtgtttccaaggtgcccattgctcaggacgagttggcgctatccctgggctatgcggcatccctggaagcctcagtgcaggatgatgcagggaccagcggaggcccctcttcacctccctcagacccaccagccatgtctccaggaccgctagatgccctctctagtcccacaagtgtccaggaagcagacgagacaacccgttcggatatttctgagaggccatctgtggatgatattgagtcggaaacggggtccactggtgccctggagacccgcagcctcaaggatcacaaagtgagtttcctgcgcagcggcactaagctcatcttccgccggaggcctaggcagaaggaagctggcctgagccaatcacacgatgacctctccaacgcaacggccacgcccagtgtccgaaagaaggccggcagcttttctcgccgccttatcaagcgcttttccttcaaatccaaacccaaggccaatggtaaccccagcccccagctctgaggacccagctctgaaagggcacgagttctctcagcccattccccacctccccttccataccccttcctggatctccagtgcctgggccaggaaagccctctgggttccgggaagccccgtccaccctgggccatggggccggttggaaggatacttggaacgggaagcacatgagaggtgggcacccggtgccgaggacatggacgagggactggtggctgggagggagaggagggccctgtccggcatgtgtgggtattccccagaagcatttgcctcctgctgagcctggtccctgagcggagtcccagggtgctcagctcttcagctgacccttcttcccttatttattctcttttctatttatatgtgtggcttaggaccctccgtgaacagatgatagagggcatctctcccaggtgacccttcttttctgtcccaggagggtgggtaattccctttgggatggggctcccacacctccctcaggtccccactcagaccagcaccagtgtctgcctctgagaatgttggcagctcacagagagcagggccggcccgggatggggggcaggtactccccaccttcctgcctcccctcctgctcctcatccctccctccccctttattaccgttttttgtacttgatgccttctctgtgagcagtggctctgtgggaaggagggagccgggagcctggtgggaagccttccccagagagatggctttaggggctttatttaaagactgtgatgatggagccacgcaaggctgcacctctgtgtgttgggagacgatgatgatgtccattgctgtgtgatggcttggaatttaatttattaaagtcaaattggagttta

SEQ ID NO: 20224 - DNA, 1771 bp, Homo sapiens
aaggctaggtacgaggctgggtgaatcggccctgggtactcccacctcctccactccacgccccagcatcacacctaccaagaagattgagcttgaccggaccatcatgcccgatggcaccattgtcaccacagtcaccactgtccagtcccggccccgtatagacggcaaattagactccccctcccgctccccgtccaaggtggaggtgaccgagaagacgacaactgtgctgagtgagagcagtggccccagcaatacctcccatagcagcagccgggacagccacctttccaacggcttggaccctgtagcagagacagcgattcgccagctgacagagcccagtgggcgggtggccaagaagacacccaccaagcgcagcactctcatcatctctggtgtttccaaggtgcccattgctcaggacgagttggcgctatccctgggctatgcggcatccctggaagcctcagtgcaggatgatgcagggaccagcggaggcccctcttcacctccctcagacccaccagccatgtctccaggaccgctagatgccctctctagtcccacaagtgtccaggaagcagacgagacaacccgttcggatatttctgagaggccatctgtggatgatattgagtcggaaacggggtccactggtgccctggagacccgcagcctcaaggatcacaaagtgagtttcctgcgcagcggcactaagctcatcttccgccggaggcctaggcagaaggaagctggcctgagccaatcacacgatgacctctccaacgcaacggccacgcccagtgtccgaaagaaggccggcagcttttctcgccgccttatcaagcgcttttccttcaaatccaaacccaaggccaatggtaaccccagcccccagctctgaggacccagctctgaaagggcacgagttctctcagcccattccccacctccccttccataccccttcctggatctccagtgcctgggccaggaaagccctctgggttccgggaagccccgtccaccctgggccatggggccggttggaaggatacttggaacgggaagcacatgagaggtgggcacccggtgccgaggacatggacgagggactggtggctgggagggagaggagggccctgtccggcatgtgtgggtattccccagaagcatttgcctcctgctgagcctggtccctgagcggagtcccagggtgctcagctcttcagctgacccttcttcccttatttattctcttttctatttatatgtgtggcttaggaccctccgtgaacagatgatagagggcatctctcccaggtgacccttcttttctgtcccaggagggtgggtaattccctttgggatggggctcccacacctccctcaggtccccactcagaccagcaccagtgtctgcctctgagaatgttggcagctcacagagagcagggccggcccgggatggggggcaggtactccccaccttcctgcctcccctcctgctcctcatccctccctccccctttattaccgttttttgtacttgatgccttctctgtgagcagtggctctgtgggaaggagggagccgggagcctggtgggaagccttccccagagagatggctttaggggctttatttaaagactgtgatgatggagccacgcaaggctgcacctctgtgtgttgggagacgatgatgatgtccattgctgtgtgatggcttggaatttaatttattaaagtcaaattggagttta

SEQ ID NO: 20225 - DNA, 1640 bp, Homo sapiens
  misc_feature (1503)..(1503): n is a, c, g, or t
ggagtccggggcctcctggcgtcactcttcgccttcaactctttccgggagaactggcagcgggcttgggtgcgagcgctgaacgagcaggcctgcagaaacgggagctccatccaaatcgcctttgaggaggtgccccaactcccacccagagccagcatcagtcatgtgacctgcgtagaccaatctgagcataccatggtgctgcgttgccagctctctgctgaggaggtgcggttcccagtctctgtgacccagcagtcccccgctgccgtctccatggagacctaccacgtcactctgacactgccaccaacacagttggaagtcaacctggaggaaatccctggtgaggggctgctcatatcctgggccttcactgatcgcccagatctcagcctaacggtgcttcccaagcttcaggccagggagagaggtgaagaacaagtggagctctccacaattgaggaactgatcaaggatgccatagtcagcacccagccagccatgatggtcaacctcagggcttgctctgccccaggaggcctggtacccagtgagaagccacccatgatgccccaggctcagccagccatccccagacctaaccggttattcctacggcagcttcgggcatctcacttgggaaatgagctggaaggcaccgaggaactgtgctgtgtagctgaactcgacaaccccatgcagcagaagtggaccaagcccgcgagggctggatccgaggtggagtggacagaagacctggcactggatctgggcccccagagccgggagctgaccctcaaagtgctgaggagcagcagctgtggagacaccgaactcctaggccaggccacactgcctgtgggctccccctccagaccactgtctcgaagacagttgtgcccactcaccccagggccagggaaagccctgggaccagcagccaccatggcagtggagcttcactatgaggagggctctccccggaacctgggtactcccacctcctccactccacgccccagcatcacacctaccaagaagattgagcttgaccggaccatcatgcccgatggcaccattgtcaccacagtcaccactgtccagtcccggccccgtatagacggcaaattagactccccctcccgctccccgtccaaggtggaggtgaccgagaagacgacaactgtgctgagtgagagcagtggccccagcaatacctcccatagcagcagccgggacagccacctttccaacggcttggaccctgtagcagagacagcgattcgccagctgacagagcccagtgggcgggtggccaagaagacacccaccaagcgcagcactctcatcatctctggtgtttccaaggtgcccattgctcaggacgagttggcgctatccctgggctatgcggcatccctggaagcctcagtgcaggatgatgcagggaccagcggaggcccctcttcacctccctcagacacagcatgttcaggncgtaatgcctttgtcaaaggccgacgaaaaaacgtgatttgagcctggtattgcaaacggcggcggaccctaagaagggtcaggcgatcggagaagggaccaaaaagggaacgcacaagacgcccgttctgcgggga

SEQ ID NO: 20226 - DNA, 1616 bp, Homo sapiens
ggagtccggggcctcctggcgtcactcttcgccttcaactctttccgggagaactggcagcgggcttgggtgcgagcgctgaacgagcaggcctgcagaaacgggagctccatccaaatcgcctttgaggaggtgccccaactcccacccagagccagcatcagtcatgtgacctgcgtagaccaatctgagcataccatggtgctgcgttgccagctctctgctgaggaggtgcggttcccagtctctgtgacccagcagtcccccgctgccgtctccatggagacctaccacgtcactctgacactgccaccaacacagttggaagtcaacctggaggaaatccctggtgaggggctgctcatatcctgggccttcactgatcgcccagatctcagcctaacggtgcttcccaagcttcaggccagggagagaggtgaagaacaagtggagctctccacaattgaggaactgatcaaggatgccatagtcagcacccagccagccatgatggtcaacctcagggcttgctctgccccaggaggcctggtacccagtgagaagccacccatgatgccccaggctcagccagccatccccagacctaaccggttattcctacggcagcttcgggcatctcacttgggaaatgagctggaaggcaccgaggaactgtgctgtgtagctgaactcgacaaccccatgcagcagaagtggaccaagcccgcgagggctggatccgaggtggagtggacagaagacctggcactggatctgggcccccagagccgggagctgaccctcaaagtgctgaggagcagcagctgtggagacaccgaactcctaggccaggccacactgcctgtgggctccccctccagaccactgtctcgaagacagttgtgcccactcaccccagggccagggaaagccctgggaccagcagccaccatggcagtggagcttcactatgaggagggctctccccggaacctgggtactcccacctcctccactccacgccccagcatcacacctaccaagaagattgagcttgaccggaccatcatgcccgatggcaccattgtcaccacagtcaccactgtccagtcccggccccgtatagacggcaaattagactccccctcccgctccccgtccaaggtggaggtgaccgagaagacgacaactgtgctgagtgagagcagtggccccagcaatacctcccatagcagcagccgggacagccacctttccaacggcttggaccctgtagcagagacagcgattcgccagctgacagagcccagtgggcgggtggccaagaagacacccaccaagcgcagcactctcatcatctctggtgtttccaaggtgcccattgctcaggacgagttggcgctatccctgggctatgcggcatccctggaagcctcagtgcaggatgatgcagggaccagcggaggcccctcttcacctccctcagacccaccagccatgtctccaggaccgctagatgccctctctagtcccacaagtgtccaggaagcagacgagacaatccagcagcccaggaggtcgacgcggccgcgaatttagtagtagtaggcggccgc

SEQ ID NO: 20227 - DNA, 1668 bp, Homo sapiens
gaaacttacttctcaatggacacttagaagaatttgatgatcttactgtcataaaatcagtaatgaaattctcagcaaaactatttggtaaacattgcaccctgtatttttacccaacatcttgttatgaaaattatcaaatacattaaaaagttaaaataattttatagtgtactcactacctagatgctaattagcattacctatgcttgctttgtcacatatccattcatcatttcatattattatttgatgcattttaaattgcatatcattaactagagttcattgttggcttttttacataaaattagcatgcaatgaagtgcatagaaatatgtgttcactgaggtttggcaaatgcatatagtgctatggaaataggaaacgttatcaccaccctagaaagtttccacactgccctttccagtcaattcctgtccctacttgaccctcaaaggcaaccactgttcctttttctaccataagatttttctgttctaaaactttatataaatagagtcacgcaacatgtacgcttttctacaaggcttcatttttttattgctgttcttttttattgctgagtagtattccactgtatgacaatattacagtttgttttcttaatttcctattattgatagatacctgggctgtttccaggattggccattataaataaagctgctatgaccattcttacgtaagtctttgtgaacataggttttcatttctttgcagtaaattccttggattagaattgctgggtcacagggtagttttaaaagaaactgccatacctttttccagttcagttttattgtgccctgtattttgtattttgatgtgcataaaggtgtaaactatttttatgatccatattgaagtattagaagaagtgagtttggaataacaatggcattgttcatggtcaaggatgacaattggaactatctgaggaaagcaaagacctgtctgccccagacagctcctcaaggggttcctatgcctgaaactttagcaatatttcactccttgaaaggttaaagcccaaccatggtgatatgttagctagaagaaacagcactggtttgtttatgttactaactttcaccacccgttttcagtaggtaaagtaagactgatcattgaacagaaaaggttatttctgtgatgaggttgagggggtagtggaaagcatgtattgctagtaagccccaggtacagctatgtgagagagagtcacctggacagggaagtcccccaaatggtggccagaagagcagaaaacggggtgggaaaaattctacctcacagttttgcataggggatagctatgcttttacgggacattttagcgtttaaaaatattttcaatattgtctctttattcaataccacccagctgtagttttttcacactctgatgactctcttatccactcttttacctctcccagctgttctattacatacagcattcacctgtattagtctatagaattataatcatctgtgtgtttctaatgctcattttcaaaaatatgtatggtttattcgatttttcctattaaaattttaagggctgggaaatttggcttctactgtaaatccttataatgttccacacattgtaaatatgcaataaaaatgttaacaactata

SEQ ID NO: 20228 - DNA, 2505 bp, Homo sapiens
gaaacttacttctcaatggacacttagaagaatttgatgatcttactgtcataaaatcagtaatgaaattctcagcaaaactatttggtaaacattgcaccctgtatttttacccaacatcttgttatgaaaattatcaaatacattaaaaagttaaaataattttatagtgtactcactacctagatgctaattagcattacctatgcttgctttgtcacatatccattcatcatttcatattattatttgatgcattttaaattgcatatcattaactagagttcattgttggcttttttacataaaattagcatgcaatgaagtgcatagaaatatgtgttcactgaggtttggcaaatgcatatagtgctatggaaataggaaacgttatcaccaccctagaaagtttccacactgccctttccagtcaattcctgtccctacttgaccctcaaaggcaaccactgttcctttttctaccataagatttttctgttctaaaactttatataaatagagtcacgcaacatgtacgcttttctacaaggcttcatttttttattgctgttcttttttattgctgagtagtattccactgtatgacaatattacagtttgttttcttaatttcctattattgatagatacctgggctgtttccaggattggccattataaataaagctgctatgaccattcttacgtaagtctttgtgaacataggttttcatttctttgcagtaaattccttggattagaattgctgggtcacagggtagttttaaaagaaactgccatacctttttccagttcagttttattgtgccctgtattttgtattttgatgtgcataaaggtgtaaactatttttatgatccatattgaagtattagaagaagtgagtttggaataacaatggcattgttcatggtcaaggatgacaattggaactatctgaggaaagcaaagacctgtctgccccagacagctcctcaaggggttcctatgcctgaaactttagcaatatttcactccttgaaaggttaaagcccaaccatggtgatatgttagctagaagaaacagcactggtttgtttatgttactaactttcaccacccgttttcagtaggtaaagtaagactgatcattgaacagaaaaggttatttctgtgatgaggttgagggggtagtggaaagcatgtattgctagtaagccccaggtacagctatgtgagagagagtcacctggacagggaagtcccccaaatggtggccagaagagcagaaaacggggtgggaaaaattctacctcacagttttgcataggggatagctatgcttttacgggacattttagcgtttaaaaatattttcaatattgtctctttattcaataccacccagctgtagttttttcacactctgatgactctcttatccactcttttacctctcccagctgttctattacatacagcattcacctgtattagtctatagaattataatcatctgtgtgtttctaatgctcattttcaaaaatatgtatggtttattcgatttttcctattaaaattttaagggctgggaaatttggcttctactgtaaatccttataatgttccacacattgtaaatatgcaataaaaatgttaacaactataatggcagcaggttttggtatgtatttctttgatatattgtcactttggacaataagtttgatttctgttaataaaagttgttcataaaatctagggagaattaagtcacactggtctctataagataatctgatgaattctgcatctttgaatcaatttgagttattttttgtaaaggtttaaattgtttctaacagtgttacctaaaacctttcattaaatcaaaaatgtaacttgtatattctgaaataacctggagtcttagaagacagaggcttctgcttccctctcccgtgaccccaacaatcccttcccacaggcttggcacagaagttcagtgctttctctacgtctcatgttgtcagaaataggttctcaccataatagacagtggtgaaatttccattgttcctactgagaagtccatttttaaggcatcaaaggtgaatgtgtatttagggatggaggaggcatattacaacaaagctgtatttaaaataacacaatccatatcatgctataaacaatagcagttccagaatggctactaaggattttggactgccagactttggaaattggcaagccttataccttgtccaatgaagttaagtacatttgagtgacagttcaacatacaagcaaaaaaatatatagaagacattgtacatttgttattaatggacatgtttactttacatgttagagtatccatccatctctaggttttccattagatgcttcattgtatccacaaacctgtttcaaaccattgaagtgatcttaccattgtgtttgttcaaaataaaattgggagaaaatgtgaatgagtcaata

SEQ ID NO: 20229 - DNA, 2450 bp, Homo sapiens
gaaacttacttctcaatggacacttagaagaatttgatgatcttactgtcataaaatcagtaatgaaattctcagcaaaactatttggtaaacattgcaccctgtatttttacccaacatcttgttatgaaaattatcaaatacattaaaaagttaaaataattttatagtgtactcactacctagatgctaattagcattacctatgcttgctttgtcacatatccattcatcatttcatattattatttgatgcattttaaattgcatatcattaactagagttcattgttggcttttttacataaaattagcatgcaatgaagtgcatagaaatatgtgttcactgaggtttggcaaatgcatatagtgctatggaaataggaaacgttatcaccaccctagaaagtttccacactgccctttccagtcaattcctgtccctacttgaccctcaaaggcaaccactgttcctttttctaccataagatttttctgttctaaaactttatataaatagagtcacgcaacatgtacgcttttctacaaggcttcatttttttattgctgttcttttttattgctgagtagtattccactgtatgacaatattacagtttgttttcttaatttcctattattgatagatacctgggctgtttccaggattggccattataaataaagctgctatgaccattcttacgtaagtctttgtgaacataggttttcatttctttgcagtaaattccttggattagaattgctgggtcacagggtagttttaaaagaaactgccatacctttttccagttcagttttattgtgccctgtattttgtattttgatgtgcataaaggtgtaaactatttttatgatccatattgaagtattagaagaagtgagtttggaataacaatggcattgttcatggtcaaggatgacaattggaactatctgaggaaagcaaagacctgtctgccccagacagctcctcaaggggttcctatgcctgaaactttagcaatatttcactccttgaaaggttaaagcccaaccatggtgatatgttagctagaagaaacagcactggtttgtttatgttactaactttcaccacccgttttcagtaggtaaagtaagactgatcattgaacagaaaaggttatttctgtgatgaggttgagggggtagtggaaagcatgtattgctagtaagccccaggtacagctatgtgagagagagtcacctggacagggaagtcccccaaatggtggccagaagagcagaaaacggggtgggaaaaattctacctcacagttttgcataggggatagctatgcttttacgggacattttagcgtttaaaaatattttcaatattgtctctttattcaataccacccagctgtagttttttcacactctgatgactctcttatccactcttttacctctcccagctgttctattacatacagcattcacctgtattagtctatagaattataatcatctgtgtgtttctaatgctcattttcaaaaatatgtatggtttattcgatttttcctattaaaattttaagggctgggaaatttggcttctactgtaaatccttataatgttccacacattgtaaatatgcaataaaaatgttaacaactataatggcagcaggttttggtatgtatttctttgatatattgtcactttggacaataagtttgatttctgttaataaaagttgttcataaaatctagggagaattaagtcacactggtctctataagataatctgatgaattctgcatctttgaatcaatttgagttattttttgtaaaggtttaaattgtttctaacagtgttacctaaaacctttcattaaatcaaaaatgtaacttgtatattctgaaataacctggagtcttagaagacagaggcttctgcttccctctcccgtgaccccaacaatcccttcccacaggcttggcacagaagttcagtgctttctctacgtctcatgttgtcagaaataggttctcaccataatagacagtggtgaaatttccattgttcctactgagaagtccatttttaaggcatcaaaggtgaatgtgtatttagggatggaggaggcatattacaacaaagctgtatttaaggattttggactgccagactttggaaattggcaagccttataccttgtccaatgaagttaagtacatttgagtgacagttcaacatacaagcaaaaaaatatatagaagacattgtacatttgttattaatggacatgtttactttacatgttagagtatccatccatctctaggttttccattagatgcttcattgtatccacaaacctgtttcaaaccattgaagtgatcttaccattgtgtttgttcaaaataaaattgggagaaaatgtgaatgagtcaata

SEQ ID NO: 20230 - DNA, 2196 bp, Homo sapiens
cccttttcaatgaaaagtcactgagcttggtgagtcaagattcactgaaatattcttccatgttgatgggcctctttggtgaggtgaccttattcctgtcctgccccctaagggtgggcagggtggacagaacgcagcctggacttccggacgcagccccctaccgccccggactcgcctacccctctggcctctgaggagggccctaagcccaggacagacgtggaaaaagggcagtaaaaaggatgcagttcttctctttaatccctaacccaatttctcgggaaaagctgcgttcccacacagaaggcgaaccctgtaaagctgtggcttggctgccgcgcacgcagtcgctttacgaattcccaaagcatctagcggaagtttagaccgttcactaggggtcacatgggccacttcgcgagcagctggcgaacagttcctttcagtttgaaagtatctttgaaactcggaaattgtgctccttggtctttcagttcataagcctagagagtggctactgaaattggaatcgtcatcttcttccctcggccccaactagtagaccacgaccagaagacacatcctaacctacacctaccgtagtgtcacacccggcacagcgcgaccaggtccaccaactgcgcctgcgcgaaccggccgctcccgcgacatcacaggaaggctgagagaaagggcaggtccccgctgcgtggggctgggcttaaaggctcgtcgcgcctgcgcaaaggacctgacgacgtgctgcgtcgttacttttgaaacgcttggcggggaagtgctgttggagccgctgtggttgctgtccgcggagtggaagcgcgtgcttttgtttgtgtccctggccatggcgctgcagctctcccgggagcagggaatcaccctgcgcgggagcgccgaaatcgtggccgagttcttctcattcggcatcaacagcattttatatcagcgtggcatatatccatctgaaacctttactcgagtgcagaaatacggactcaccttgcttgtaactactgatcttgagctcataaaatacctaaataatgtggtggaacaactgaaagattggttatacaagtgttcagttcagaaactggttgtagttatctcaaatattgaaagtggtgaggtcctggaaagatggcagtttgatattgagtgtgacaagactgcaaaagatgacagtgcacccagagaaaagtctcagaaagctatccaggatgaaatccgttcagtgatcagacagatcacagctacggtgacatttctgccactgttggaagtttcttgttcatttgatctgctgatttatacagacaaagatttggttgtacctgaaaaatgggaagagtcgggaccacagtttattaccaattctgaggaagtccgccttcgttcatttactactacaatccacaaagtaaatagcatggtggcctacaaaattcctgtcaatgactgaggatgacatgaggaaaataatgtaattgtaattttgaaatgtggttttcctgaaatcaggtcatctatagttgatatgttttatttcattggttaatttttacatggagaaaaccaaaatgatacttactgaactgtgtgtaattgttccttttatttttttggtacctatttgacttaccatggagttaacatcatgaatttattgcacattgttcaaaaggaaccaggaggtttttttgtcaacattgtgatgtatattcctttgaagatagtaactgtagatggaaaaacttgtgctataaagctagatgctttcctaaatcagatgttttggtcaagtagtttgactcagtataggtagggagatatttaagtataaaatacaacaaaggaagtctaaatattcagaatctttgttaaggtcctgaaagtaactcataatctataaacaatgaaatattgctgtatagctccttttgaccttcatttcatgtatagttttccctattgaatcagtttccaattatttgactttaatttatgtaacttgaacctatgaagcaatggatatttgtactgtttaatgttctgtgatacagaactcttaaaaatgttttttcatgtgttttataaaatcaagttttaagtgaaagtgaggaaataaagttaagtttgttttaaatttgtcttaaaacattttgatactgg

SEQ ID NO: 20231 - DNA, 1928 bp, Homo sapiens
cccttttcaatgaaaagtcactgagcttggtgagtcaagattcactgaaatattcttccatgttgatgggcctctttggtgaggtgaccttattcctgtcctgccccctaagggtgggcagggtggacagaacgcagcctggacttccggacgcagccccctaccgccccggactcgcctacccctctggcctctgaggagggccctaagcccaggacagacgtggaaaaagggcagtaaaaaggatgcagttcttctctttaatccctaacccaatttctcgggaaaagctgcgttcccacacagaaggcgaaccctgtaaagctgtggcttggctgccgcgcacgcagtcgctttacgaattcccaaagcatctagcggaagtttagaccgttcactaggggtcacatgggccacttcgcgagcagctggcgaacagttcctttcagtttgaaagtatctttgaaactcggaaattgtgctccttggtctttcagttcataagcctagagagtggctactgaaattggaatcgtcatcttcttccctcggccccaactagtagaccacgaccagaagacacatcctaacctacacctaccgtagtgtcacacccggcacagcgcgaccaggtccaccaactgcgcctgcgcgaaccggccgctcccgcgacatcacaggaaggctgagagaaagggcaggtccccgctgcgtggggctgggcttaaaggctcgtcgcgcctgcgcaaaggacctgacgacgtgctgcgtcgttacttttgaaacgcttggcggggaagtgctgttggagccgctgtggttgctgtccgcggagtggaagcgcgtgcttttgtttgtgtccctggccatggcgctgcagctctcccgggagcagggaatcaccctgcgcgggagcgccgaaatcgtggccgagttcttcttgcacccagagaaaagtctcagaaagctatccaggatgaaatccgttcagtgatcagacagatcacagctacggtgacatttctgccactgttggaagtttcttgttcatttgatctgctgatttatacagacaaagatttggttgtacctgaaaaatgggaagagtcgggaccacagtttattaccaattctgaggaagtccgccttcgttcatttactactacaatccacaaagtaaatagcatggtggcctacaaaattcctgtcaatgactgaggatgacatgaggaaaataatgtaattgtaattttgaaatgtggttttcctgaaatcaggtcatctatagttgatatgttttatttcattggttaatttttacatggagaaaaccaaaatgatacttactgaactgtgtgtaattgttccttttatttttttggtacctatttgacttaccatggagttaacatcatgaatttattgcacattgttcaaaaggaaccaggaggtttttttgtcaacattgtgatgtatattcctttgaagatagtaactgtagatggaaaaacttgtgctataaagctagatgctttcctaaatcagatgttttggtcaagtagtttgactcagtataggtagggagatatttaagtataaaatacaacaaaggaagtctaaatattcagaatctttgttaaggtcctgaaagtaactcataatctataaacaatgaaatattgctgtatagctccttttgaccttcatttcatgtatagttttccctattgaatcagtttccaattatttgactttaatttatgtaacttgaacctatgaagcaatggatatttgtactgtttaatgttctgtgatacagaactcttaaaaatgttttttcatgtgttttataaaatcaagttttaagtgaaagtgaggaaataaagttaagtttgttttaaatttgtcttaaaacattttgatactgg

SEQ ID NO: 20232 - DNA, 2319 bp, Homo sapiens
cccttttcaatgaaaagtcactgagcttggtgagtcaagattcactgaaatattcttccatgttgatgggcctctttggtgaggtgaccttattcctgtcctgccccctaagggtgggcagggtggacagaacgcagcctggacttccggacgcagccccctaccgccccggactcgcctacccctctggcctctgaggagggccctaagcccaggacagacgtggaaaaagggcagtaaaaaggatgcagttcttctctttaatccctaacccaatttctcgggaaaagctgcgttcccacacagaaggcgaaccctgtaaagctgtggcttggctgccgcgcacgcagtcgctttacgaattcccaaagcatctagcggaagtttagaccgttcactaggggtcacatgggccacttcgcgagcagctggcgaacagttcctttcagtttgaaagtatctttgaaactcggaaattgtgctccttggtctttcagttcataagcctagagagtggctactgaaattggaatcgtcatcttcttccctcggccccaactagtagaccacgaccagaagacacatcctaacctacacctaccgtagtgtcacacccggcacagcgcgaccaggtccaccaactgcgcctgcgcgaaccggccgctcccgcgacatcacaggaaggctgagagaaagggcaggtccccgctgcgtggggctgggcttaaaggctcgtcgcgcctgcgcaaaggacctgacgacgtgctgcgtcgttacttttgaaacgcttggcggggaagtgctgttggagccgctgtggttgctgtccgcggagtggaagcgcgtgcttttgtttgtgtccctggccatggcgctgcagctctcccgggagcagggaatcaccctgcgcgggagcgccgaaatcgtggccgagttcttctcattcggcatcaacagcattttatatcagcgtggcatatatccatctgaaacctttactcgagtgcagaaatacggactcaccttgcttgtaactactgatcttgagctcataaaatacctaaataatgtggtggaacaactgaaagattggttatacaagtgttcagttcagaaactggttgtagttatctcaaatattgaaagtggtgaggtcctggaaagatggcagtttgatattgagtgtgacaagactgcaaaagatgacagtgcacccagagaaaagtctcagaaagctatccaggatgaaatccgttcagtgatcagacagatcacagctacggtgacatttctgccactgttggaagtttcttgttcatttgatctgctgatttatacagacaaagatttggttgtacctgaaaaatgggaagagtcgggaccacagtttattaccaattctgaggaagtccgccttcgttcatttactactacaatccacaaagtaaatagcatggtggcctacaaaattcctgtcaatgactgaggatgacatgaggaaaataatgtaattgtaattttgaaatgtggttttcctgaaatcaggtcatctatagttgatatgttttatttcattggttaatttttacatggagaaaaccaaaatgatacttactgaactgtgtgtaattgttccttttatttttttggtacctatttgacttaccatggagttaacatcatgaatttattgcacattgttcaaaaggaaccaggaggtttttttgtcaacattgtgatgtatattcctttgaagatagtaactgtagatggaaaaacttgtgctataaagctagatgctttcctaaatcagatgttttggtcaagtagtttgactcagtataggtagggagatatttaagtataaaatacaacaaaggaagtctaaatattcagaatctttgttaaggtcctgaaagtaactcataatctataaacaatgaaatattgctgtatagctccttttgaccttcatttcatgtatagttttccctattgaatcagtttccaattatttgactttaatttatgtaacttgaacctatgaagcaatggatatttgtactgtttaatgttctgtgatacagaacagattaatactccctttttatcattacagttagctaaaaaattgccaggcagtccacaaaacagaatttgctttaagaccaacccacagagtcagctggagactaacggcgctggggcctgctgggccgggatatagtcgtgtttagctaagtgtcgagagcattaagaagaaagtcctggttggaggcgcaaggcctgcagcaccagctgtggaatccccaataatgt

SEQ ID NO: 20233 - DNA, 2142 bp, Homo sapiens
cccttttcaatgaaaagtcactgagcttggtgagtcaagattcactgaaatattcttccatgttgatgggcctctttggtgaggtgaccttattcctgtcctgccccctaagggtgggcagggtggacagaacgcagcctggacttccggacgcagccccctaccgccccggactcgcctacccctctggcctctgaggagggccctaagcccaggacagacgtggaaaaagggcagtaaaaaggatgcagttcttctctttaatccctaacccaatttctcgggaaaagctgcgttcccacacagaaggcgaaccctgtaaagctgtggcttggctgccgcgcacgcagtcgctttacgaattcccaaagcatctagcggaagtttagaccgttcactaggggtcacatgggccacttcgcgagcagctggcgaacagttcctttcagtttgaaagtatctttgaaactcggaaattgtgctccttggtctttcagttcataagcctagagagtggctactgaaattggaatcgtcatcttcttccctcggccccaactagtagaccacgaccagaagacacatcctaacctacacctaccgtagtgtcacacccggcacagcgcgaccaggtccaccaactgcgcctgcgcgaaccggccgctcccgcgacatcacaggaaggctgagagaaagggcaggtccccgctgcgtggggctgggcttaaaggctcgtcgcgcctgcgcaaaggacctgacgacgtgctgcgtcgttacttttgaaacgcttggcggggaagtgctgttggagccgctgtggttgctgtccgcggagtggaagcgcgtgcttttgtttgtgtccctggccatggcgctgcagctctcccgggagcagggaatcaccctgcgcgggagcgccgaaatcgtggccgagttcttctcattcggcatcaacagcattttatatcagcgtggcatatatccatctgaaacctttactcgagtgcagaaatacggactcaccttgcttgtaactactgatcttgagctcataaaatacctaaataatgtggtggaacaactgaaagattggttatacaagtgttcagttcagaaactggttgtagttatctcaaatattgaaagtggtgaggtcctggaaagatggcagtttgatattgagtgtgacaagactgcaaaagatgacagtgcacccagagaaaagtctcagaaagctatccaggatgaaatccgttcagtgatcagacagatcacagctacggtgacatttctgccactgttggaagtttcttgttcatttgatctgctgatttatacagacaaagatttggttgtacctgatcgttcatttactactacaatccacaaagtaaatagcatggtggcctacaaaattcctgtcaatgactgaggatgacatgaggaaaataatgtaattgtaattttgaaatgtggttttcctgaaatcaggtcatctatagttgatatgttttatttcattggttaatttttacatggagaaaaccaaaatgatacttactgaactgtgtgtaattgttccttttatttttttggtacctatttgacttaccatggagttaacatcatgaatttattgcacattgttcaaaaggaaccaggaggtttttttgtcaacattgtgatgtatattcctttgaagatagtaactgtagatggaaaaacttgtgctataaagctagatgctttcctaaatcagatgttttggtcaagtagtttgactcagtataggtagggagatatttaagtataaaatacaacaaaggaagtctaaatattcagaatctttgttaaggtcctgaaagtaactcataatctataaacaatgaaatattgctgtatagctccttttgaccttcatttcatgtatagttttccctattgaatcagtttccaattatttgactttaatttatgtaacttgaacctatgaagcaatggatatttgtactgtttaatgttctgtgatacagaactcttaaaaatgttttttcatgtgttttataaaatcaagttttaagtgaaagtgaggaaataaagttaagtttgttttaaatttgtcttaaaacattttgatactgg

SEQ ID NO: 20234 - DNA, 1464 bp, Homo sapiens
cattctgttgagacgctctggcgccgagaaatgttgttgaacgactggtgatgagtcttggtgtcctgcggagatgccatggctcgttgcctttgggtctgtgattcctggccaattggagctagcgacgcctgcgtcgccgggccgcagcgtactgacccatgtgccggaatgccgccttctgtcgtcgtcgctgtcttcttctcttcgggatctcccagcgtttctctatcatccgtgggtaatatatccatctgaaacctttactcgagtgcagaaatacggactcaccttgcttgtaactactgatcttgagctcataaaatacctaaataatgtggtggaacaactgaaagattggttatacaagtgttcagttcagaaactggttgtagttatctcaaatattgaaagtggtgaggtcctggaaagatggcagtttgatattgagtgtgacaagactgcaaaagatgacagtgcacccagagaaaagtctcagaaagctatccaggatgaaatccgttcagtgatcagacagatcacagctacggtgacatttctgccactgttggaagtttcttgttcatttgatctgctgatttatacagacaaagatttggttgtacctgaaaaatgggaagagtcgggaccacagtttattaccaattctgaggaagtccgccttcgttcatttactactacaatccacaaagtaaatagcatggtggcctacaaaattcctgtcaatgactgaggatgacatgaggaaaataatgtaattgtaattttgaaatgtggttttcctgaaatcaggtcatctatagttgatatgttttatttcattggttaatttttacatggagaaaaccaaaatgatacttactgaactgtgtgtaattgttccttttatttttttggtacctatttgacttaccatggagttaacatcatgaatttattgcacattgttcaaaaggaaccaggaggtttttttgtcaacattgtgatgtatattcctttgaagatagtaactgtagatggaaaaacttgtgctataaagctagatgctttcctaaatcagatgttttggtcaagtagtttgactcagtataggtagggagatatttaagtataaaatacaacaaaggaagtctaaatattcagaatctttgttaaggtcctgaaagtaactcataatctataaacaatgaaatattgctgtatagctccttttgaccttcatttcatgtatagttttccctattgaatcagtttccaattatttgactttaatttatgtaacttgaacctatgaagcaatggatatttgtactgtttaatgttctgtgatacagaactcttaaaaatgttttttcatgtgttttataaaatcaagttttaagtgaaagtgaggaaataaagttaagtttgttttaaatttgtcttaaaacattttgatactgg

SEQ ID NO: 20235 - DNA, 2049 bp, Homo sapiens
cccttttcaatgaaaagtcactgagcttggtgagtcaagattcactgaaatattcttccatgttgatgggcctctttggtgaggtgaccttattcctgtcctgccccctaagggtgggcagggtggacagaacgcagcctggacttccggacgcagccccctaccgccccggactcgcctacccctctggcctctgaggagggccctaagcccaggacagacgtggaaaaagggcagtaaaaaggatgcagttcttctctttaatccctaacccaatttctcgggaaaagctgcgttcccacacagaaggcgaaccctgtaaagctgtggcttggctgccgcgcacgcagtcgctttacgaattcccaaagcatctagcggaagtttagaccgttcactaggggtcacatgggccacttcgcgagcagctggcgaacagttcctttcagtttgaaagtatctttgaaactcggaaattgtgctccttggtctttcagttcataagcctagagagtggctactgaaattggaatcgtcatcttcttccctcggccccaactagtagaccacgaccagaagacacatcctaacctacacctaccgtagtgtcacacccggcacagcgcgaccaggtccaccaactgcgcctgcgcgaaccggccgctcccgcgacatcacaggaaggctgagagaaagggcaggtccccgctgcgtggggctgggcttaaaggctcgtcgcgcctgcgcaaaggacctgacgacgtgctgcgtcgttacttttgaaacgcttggcggggaagtgctgttggagccgctgtggttgctgtccgcggagtggaagcgcgtgcttttgtttgtgtccctggccatggcgctgcagctctcccgggagcagggaatcaccctgcgcgggagcgccgaaatcgtggccgagttcttctattggttatacaagtgttcagttcagaaactggttgtagttatctcaaatattgaaagtggtgaggtcctggaaagatggcagtttgatattgagtgtgacaagactgcaaaagatgacagtgcacccagagaaaagtctcagaaagctatccaggatgaaatccgttcagtgatcagacagatcacagctacggtgacatttctgccactgttggaagtttcttgttcatttgatctgctgatttatacagacaaagatttggttgtacctgaaaaatgggaagagtcgggaccacagtttattaccaattctgaggaagtccgccttcgttcatttactactacaatccacaaagtaaatagcatggtggcctacaaaattcctgtcaatgactgaggatgacatgaggaaaataatgtaattgtaattttgaaatgtggttttcctgaaatcaggtcatctatagttgatatgttttatttcattggttaatttttacatggagaaaaccaaaatgatacttactgaactgtgtgtaattgttccttttatttttttggtacctatttgacttaccatggagttaacatcatgaatttattgcacattgttcaaaaggaaccaggaggtttttttgtcaacattgtgatgtatattcctttgaagatagtaactgtagatggaaaaacttgtgctataaagctagatgctttcctaaatcagatgttttggtcaagtagtttgactcagtataggtagggagatatttaagtataaaatacaacaaaggaagtctaaatattcagaatctttgttaaggtcctgaaagtaactcataatctataaacaatgaaatattgctgtatagctccttttgaccttcatttcatgtatagttttccctattgaatcagtttccaattatttgactttaatttatgtaacttgaacctatgaagcaatggatatttgtactgtttaatgttctgtgatacagaactcttaaaaatgttttttcatgtgttttataaaatcaagttttaagtgaaagtgaggaaataaagttaagtttgttttaaatttgtcttaaaacattttgatactgg

SEQ ID NO: 20236 - DNA, 2075 bp, Homo sapiens
cccttttcaatgaaaagtcactgagcttggtgagtcaagattcactgaaatattcttccatgttgatgggcctctttggtgaggtgaccttattcctgtcctgccccctaagggtgggcagggtggacagaacgcagcctggacttccggacgcagccccctaccgccccggactcgcctacccctctggcctctgaggagggccctaagcccaggacagacgtggaaaaagggcagtaaaaaggatgcagttcttctctttaatccctaacccaatttctcgggaaaagctgcgttcccacacagaaggcgaaccctgtaaagctgtggcttggctgccgcgcacgcagtcgctttacgaattcccaaagcatctagcggaagtttagaccgttcactaggggtcacatgggccacttcgcgagcagctggcgaacagttcctttcagtttgaaagtatctttgaaactcggaaattgtgctccttggtctttcagttcataagcctagagagtggctactgaaattggaatcgtcatcttcttccctcggccccaactagtagaccacgaccagaagacacatcctaacctacacctaccgtagtgtcacacccggcacagcgcgaccaggtccaccaactgcgcctgcgcgaaccggccgctcccgcgacatcacaggaaggctgagagaaagggcaggtccccgctgcgtggggctgggcttaaaggctcgtcgcgcctgcgcaaaggacctgacgacgtgctgcgtcgttacttttgaaacgcttggcggggaagtgctgttggagccgctgtggttgctgtccgcggagtggaagcgcgtgcttttgtttgtgtccctggccatggcgctgcagctctcccgggagcagggaatcaccctgcgcgggagcgccgaaatcgtggccgagttcttctcattcggcatcaacagcattttatatcagcgtggcatatatccatctgaaacctttactcgagtgcagaaatacggactcaccttgcttgtaactactgatcttgagctcataaaatacctaaataatgtggtggaacaactgaaagtgcacccagagaaaagtctcagaaagctatccaggatgaaatccgttcagtgatcagacagatcacagctacggtgacatttctgccactgttggaagtttcttgttcatttgatctgctgatttatacagacaaagatttggttgtacctgaaaaatgggaagagtcgggaccacagtttattaccaattctgaggaagtccgccttcgttcatttactactacaatccacaaagtaaatagcatggtggcctacaaaattcctgtcaatgactgaggatgacatgaggaaaataatgtaattgtaattttgaaatgtggttttcctgaaatcaggtcatctatagttgatatgttttatttcattggttaatttttacatggagaaaaccaaaatgatacttactgaactgtgtgtaattgttccttttatttttttggtacctatttgacttaccatggagttaacatcatgaatttattgcacattgttcaaaaggaaccaggaggtttttttgtcaacattgtgatgtatattcctttgaagatagtaactgtagatggaaaaacttgtgctataaagctagatgctttcctaaatcagatgttttggtcaagtagtttgactcagtataggtagggagatatttaagtataaaatacaacaaaggaagtctaaatattcagaatctttgttaaggtcctgaaagtaactcataatctataaacaatgaaatattgctgtatagctccttttgaccttcatttcatgtatagttttccctattgaatcagtttccaattatttgactttaatttatgtaacttgaacctatgaagcaatggatatttgtactgtttaatgttctgtgatacagaactcttaaaaatgttttttcatgtgttttataaaatcaagttttaagtgaaagtgaggaaataaagttaagtttgttttaaatttgtcttaaaacattttgatactgg

SEQ ID NO: 20237 - DNA, 190 bp, Homo sapiens
tcctggcagagaaaggcacactcctcccagcagggagtcaggcccccgaacttgccagccattgggccacgcctagccttgactgggtgctctcggctcagcccttcacaagggctcttcccagagacagatctcaagggcctcagatgccaccaagtgcaaactgttcgttttgccctgaggatatggg

SEQ ID NO: 20238 - DNA, 401 bp, Homo sapiens
  misc_feature (401)..(401): n is a, c, g, or t
gcccagcccaaaatttactacctcttaaaaacagttttttcccatgattaaagcatgtggaaaaactgatctaactccttaacttcatcttacttttgctgagacacttaaaaatttatagtactggcaagaagttccacttcccccaattcgctgtacatgtaaacttgatttagacacctggtgatttgtagtaaacagtcttacataaaccgttggtttgttgacttaggaatatatctaatcaaggatgtgaaagacctctacaaggaaaactacgaaacactgctgaaggaagtcatagatgccacaaccattagagccacaccccatgctcatggatggggagatcaatattgtgacagtgccaccttcaaaggctctctccagtgtagtgcatn

SEQ ID NO: 20239 - DNA, 2298 bp, Homo sapiens
  misc_feature (752)..(752): n is a, c, g, or t
  misc_feature (1292)..(1292): n is a, c, g, or t
  misc_feature (1478)..(1478): n is a, c, g, or t
tatgtacttagaatttgagttctgataattcatttttttatgggaggtggggaggtttattttttaaattgcagtccaaaggagtaaatttgatgttacattggacagtttattcagataccacaaactttacagatttaattagatagataatggatgatgttaaaaactaagcagcatcttaagtttaaatttttatttttatttctttttctgtcatcattatttatgaaaactggttgaaaatgaagttaaaagattttctgtacatcataagattggacagaaatattatttaccttaaaactttttctgagtaaaaatttaaacataaactagaactcagcctgaatttttttttaaaccatctttggaagcacatataaaagtagagtaaatacatcgaatgtagcttacctactgcatttgaagaaaatcttttgtgtatgtctgtaagctatttgtgtgttttgaaacagtttaccagaatagactgaaactggtagaaacaggcataagtaactctgcagtggtagttgtattgaaaactggaatggtagtctctttcaaaatcttgaagagatggaaactaatgaatctttttttttttttggtaaaatagtatttttttttgttcacttaaatgaaattatttgtactttaagttttgttccaggaaattacttcagttgtagctaatttattggcaccctttactaacaaatttctgttctgtattaagattagtattngaaaaaaaaggagatgtatggaaattaagaaagcaacaaaaattataagaataattgcccttataaagaagtcattatatgaaaaagatacttgcacacgcatgtttatagcggcacaattcgcaatggcaaaaatgtggaaccaacccaaatacccatcaatcaacgagttaataaagaaactgtggcatatgtatacgatggaatattactcagccataaaaaggaatgaattaatggcattcgcagtgacctggatgagattggagactgttattctaagtgaagtaactcgggaatggaaaaccaaacatcctatgttctcactcataagtgggagctaaaccacgagtatgtaaaggcataagaatgacacaatggactttggggattcaaggggagagggtgggtagagggtgagggataaaagatgttgggtgcaatgtatactgctcaggtgatgagtacatcaaaatctcacacatcaccactaaagaacttactcgtaaccaaagaccatctgttccccaataacctatngagataaaaaaaattcaaaaaaagaaaattgtccttatatacatgtcagacaaaagatttaattatatttggtaagaacattgtagattgttttgtagtgtattctgagaacttatgtcagaggccagaaatggccattgttaccagaagtaatggaaggaaaggaaaagtaagggtatgcttacnattttaggtaatctgatttctgcatattgtagtgtaaaaatatgatagttctattcaaaattttggagaaacatttgaacttcgtttattttaaattaggaaatcagctcaaataggcattggcctttgatttaagagtgttaagtcattcttatgtagaaatgtgctatctcccgagaaagcatcagtgtgggatgccttcagctcatgccatcccctcttccattaggaagcatttgtaaatgcttagccgtgttagggatcatgttagatattgggggcagtgactctgaagagattgtgcgacataatctcaaagagcttagggtctggtagggagacaaccaagcaaacagctactctaaaatagagacatgcttatggcttgagtgagtacataagaggggcacctgacccagactgggagggaaggaggcacttgtgagatgcttatgcttgaactgactcctgaagaacaaataagaattagattaataaagatgagagagaaggctgggtgaggtggctcctgcctgtattcccagcaccctgggaggctgaggtgggtagatcacctgaggtcagcagctcaagaccagcccggccaacatggtgaaaccttctttctactaaaagtacgaaaattagctgggcttggtggtgcatgcctgtaatcctagccactagggaggctgaggcaggagaatcgcttgaacctgggaacctgggaggcggaggttgcagtgagccgagattgtgccactgcactccagcctggacaacagacaacaaagcaagagtccatctcaaaaaaaaaaaa

SEQ ID NO: 20240 - DNA, 397 bp, Homo sapiens
cagtagatttttcaggtttgcccctggccttgtcactttacacattagcagctactgcttccatgtggctctgctaatactccccccttaaaaagattaatatgctacatgcttatatagagacagtatagtataggaattaatagcatgggctctggaataagaatgcctgaattcagaaactagatttactgcatattagctgtgcttttctcatcagtaaaatggatatactagtactttgggattgtcatgaggttgtcatcatcattaaaatttcagtaataggctgggcgtggtggttcatgcctataatcccagcgctttgggaggccaaagcaggaggattgcttacatacaggagttcaagtatgtgagaccgtgtttgtataaaaaa

SEQ ID NO: 20241 - DNA, 340 bp, Homo sapiens
tgcactcttaactgggtgacagagtgagatcctgtctcgaaaaaacaaaaacaacaaaccaaaaaaaaaggtgacattgagaataaagagatggtggttggatttgtggctatttttccagctgctcaatagttgtacaaaatgtagcttgatatgatgagtgtttccaaaattcctaaattacatgtcatgtttgttgattatttgtatatgttttaatgtgtattaaaaagacaccaaaggtgtgagttcataaattaatacttaggataaacttaagatttggaaggaatttaaagttgaagagagttgaagtaggtgatagtttaggtggtctttg

SEQ ID NO: 20242 - DNA, 247 bp, Homo sapiens
atagcagcccaaaactagaaacaacccaaatgcccatcaatgcatgaatggataaactgtggtatatttatacagtgaaatactattagcaataaaaaggagcaaattactaatatatgaaacactatgaatgaatttccataacaagccagataacagaagccagaaataaggcatgaagctaggcatggtggctcatgcctgtaattctagcattttgggagtccaaggtgggtgaatcacttga

SEQ ID NO: 20243 - DNA, 449 bp, Homo sapiens
ggtccaaacatgaaaacatcctccccttgtgaaatctctgccttctgttatgtgcctgaggatgatcagaggcagcacttccactgccactttgtcagagaacatttctcagggaaggtctgccagggctttctgccagatgcctcctgctctgactgaggtggctcaagaagccatctcaagctaaagacctgcccacagggaagttaatatgacgttttcaactcctatttgatttctactctatttctgtgaggtccttttcaaacctatgtgggttcattaaatgctcccatagacctacgtgaggaggaaaaaactagtaagccaaacaggccacgtcattctttcttccatagctgccatatcaaagggctggtggatgtggtcatagttgccatttcccaggagctgatatcacagaggaaaagaattttatttaaggcaaa

SEQ ID NO: 20244 - DNA, 316 bp, Homo sapiens
ccagccacttgaatgttatgggaaagcccaggagcaggtggaagattctgccctggacactgaagggtcccactgcggaggcactatcccatcgtcccagggaaacttgtctagacgctacttcacctccgtcccctaaggggggatgtgacccccctcttacctctgggcatgaccttcagcacattgctaccttccctctctgccctcaattttcctaagggaggtgagctccaggatctctgcagggcttttgaactcagtgttttctgctagctttgagcactttggaaggatgatgttagagaacttgtga

SEQ ID NO: 20245 - DNA, 757 bp, Homo sapiens
gagaattgatccaatgactgctggtgtgtagaatgaattgcgatgaaacatctcatcctacctgctcctcattcccttttctgccaacgatttatcttcagaagacaagcagatgaggagacaaaacctactgatgtgggtacccaagcaggaacccccctcttgcaccggcgactcacgtgggaagaagaattcactgagctgaaatggagtgagagctaagatgctctcagaatattcttaaaatgactgtgctgcaaagaagcccgggtgaatagaagaaaatagaaggaatggtggatacaagtgaaggttaaaatgagaccccatttatcgcaccagctgttggtgatttcagcgcacctttccaagcctcttgagagttctgctctaaccacactgccccctagtgttctctcgctttggtgcaactgcaggtttctcatacttccggagaaatagaaagcaccagatgacagccaccacacacttttgtccccattgcaataggatgcttctaacaatcgtaaaattatgaaacactgaattccttaaaagttgtccatttgtggatttatctgatggtaactattaaatatttaaaagtaactttaatgaatctacttatgatgattgagtaatctattctctgaattccaccaaaaaaccattttatgaccacagtcataacgaacatatttctatagtcctaagctggcaagataaatagagaacagttcataatataaacaatata

SEQ ID NO: 20246 - DNA, 402 bp, Homo sapiens
ttccagtccgcgtctgaaggtgcaagaatcagagcatggatgtctgaagcagggaaaatatggtgtcccacctcaaagaagagcaaatttgcccttcctctgcctttttattctattcaggtccttaacagattaaattatgcctgcccatagcggtgagggcggtcttctttactcagtctactgattcaaatactaatctcttccagaaacagcctcacaaatacacctagaaataacattttaccagctatttgagcatcccttagcccagtcaagttgacacttaaaattaaccatcacggtggctcaagcctgtaatcccagcactttgggaggccgaggcgggcggatcacttgaggccgggagttccagacctgcctgaccaacatggtgaaacc

SEQ ID NO: 20247 - DNA, 426 bp, Homo sapiens
aaaaagtagccgggcgtggtgctgcccgtcaataatcccagctactcgggaggctgagacaggagaatcgcttgaacccgggaggcggaagtttcagcgagccgagatcacgccgttgcagtccaacctgagcgtccgagcgagactctatctcagaaaataaagacagaatgaaagagcccggcgcggtggcttacgcctgtaatcccagcgctttgggaggccgaggcgggcggatcgcctgaggtcaggagctcgagaccagcctggccgacatggcgaaaccccctaaaaatacaaaaattagccgggcgtggtggcctgcgcctgtaatcccagctacccaggaggctgaggcaggagaatcgctggaacccgggaggtagaggctgcagtgagccgagatcgcgccactgcactccagcc

SEQ ID NO: 20248 - DNA, 535 bp, Homo sapiens
ctgtcatgatagaaagaaattttttgcatgtaggtaaaattctgtgacagatgtaagagattttaaaatatctatactatgagtttgcgtgtgtgtgtgtgttggagtctcactctgtcacccaggttggagtacagtggcacgatctcggctcgctgcaacctccgcctcccgggttcaagcggttctcctgcctcggcatcccgagtagctgggactgcaggcaactgccaccacgcccggctaattttttgtatttttggtagagatagggtttcaccgcgttggccgggatggtcttgatctactgaccttgtgatccgcctgcctcagcctcccaaagtgctgagattataggcgtgagccaccactcccggctgagtttgatatttttttaagctgcaatttgacagcattttatcatacatttggaaatcctttgaggcaaaacacccaaagtattaattggacagcatcttttatgtcacacagttcacctaaagctaaagaaaaatacttaatatttttcaaattt

SEQ ID NO: 20249 - DNA, 258 bp, Homo sapiens
ggatgaggtgggagggttgcttgaacccaggagcttgaggctgcagtgagctgtgatcactgcattgcagcatgggggacagggagaccctgtctcacaattttttttttttactaaattccagactacagtttttggattacagatgtaattcagcaatgaaaaagtttagaactttgtaaacattatttcagttttagaaatctaatgttacagagaaagacttgtgtctcaaatgaagagttttatcaggctttg

SEQ ID NO: 20250 - DNA, 353 bp, Homo sapiens
tacaaagaggtatgagaaatccctcctattgataagaggtataagaataaaattaaaaaagaaatccctgacctctagagagttcacatgttgagaggggtgtgcagtttgtatttgcagagcaggttaaatagtcttttatgaatggataataaattcttgatgctctgtaatgctacactctcacaaatgatcgaaaaatttagatttgaatttaaaatgtattttggggtcgggcgcagtagctcacacctgtaatcccagcactttggtaggctgaggcgggtggatcacgtgaggtcaggagttcgagactggcctggccaacatggcaaaaaccccgtctctactaa

SEQ ID NO: 20251 - DNA, 451 bp, Homo sapiens
aaaaatgcccaaaaccatggcagaactaactggcatgctgttcccatcaagctccaaatatcaggagctcgacttttcttcatttgctcctgctcccaggatcagtgtcaattctgtgtctggaacttgatcttgtagccagaagagtagtagctgtctgcagagcttgtatcctcacattccttacatttccatgggtacatctagtaagtagagccaatgtcacaggcctgcattctaaccgcaagagaggcaggaaatttgagttcgcaattctatcctgggtaggtaggacctataatcagaaaagtatcccaaatatagaaaggttatttaaaagattatggcaaccatgactataacacaatccattactgatacacatgttaaacatttaaaggtattcaccaaaataaaagaactagtatgtggaacttccaaacctatagag

SEQ ID NO: 20252 - DNA, 417 bp, Homo sapiens
atcacaaagggagacggcgcagtggcccttgcttccttccgtcttggagttgttccagcctccttcccctgctgttggcttatgtgaagttgatacacatgtatcattcattcatccgttcatctagtagacatttattaagtaccgctgattagacaccttgctaacccatagatctaaatgttaaagatatactcctgatggctctcagatctcatgaacctggaaacaaataatatttcaggaactaaagctgtagggatacgttcttagccgtaattgtgaagataacccttccgcaagtggagggctctccagccgcatacaacactgccatcttgtgggaagtgctccgtagagccacttcaggaagccttgaccaaagctgcggtaaaaataattgaatctgtactttta

SEQ ID NO: 20253 - DNA, 280 bp, Homo sapiens
tctctactaaaaatacaaaaatttgccaggtgtggtggtgtgcatctgtaatcccaggctgaggcaggagaattgcttgaactcaggaggtggaggttgcagtgaaccgagagtggaatgatggtttgagctcaggagttcaagataagcctgggcaagatggcaagaccctatcttttcaaaaacagaatttttaattagccaggtatgatagcgaacacttgtaaagacatagaggatgcagtgagttgtgattgcagtactgcataccaccctgagc

SEQ ID NO: 20254 - DNA, 340 bp, Homo sapiens
tttttttgagatggaggctcactctgtcgcccaggctggagtggagtggtgcgatctcggctcactgcaagctccgtctcccaggttcatgccattctcctgcctcagcctcccgagtagctgggactacaggcgcccaccaccacgcccggctagttttttgtatttttagtagagatggggtttcaccgtgttagccaggatggtcttgatctcctgacctcgtgatccacctgcctcggcctcccaaagtgctgggattacaggtgtgagccactgtgcccagcccagagcttctgtatttatattgctggttgtaggcctcagaaaagcctttggg

SEQ ID NO: 20255 - DNA, 587 bp, Homo sapiens
tccaagactgctagtggatgcctgaaaccatgaataatattgaaccttatatataccgtgtttttttcgatccggtaacatagatggctactaagtgattaatgggcagggagcatatacggtgtggatatgctggacaaagggatgatgtccttggcaggacagagtgggatttcatcaccatactcagaatgttgtataattggaaacttatgaattatttatttttggaattttctatttaatatttttggactgctgctaagtaacagaaactgcaggaaattaaaccctggataaggggacactactttaatttctttatacttttcaatgaaaacattgacactggaggctggaagataatagagcaaagccttcaaaatgagaggaaatttatccctagctaaacttacaaatgtgaggatagaagaaaaatgtgtcccacaccacgcaccctttcttagatattggtggataaaagaaaaaaaagaaaagggagacttaaaagacttaaaattcagtgaggatagaggtagagggttgttcctagataccagtggtacagcaggcctagaaatcagcca

SEQ ID NO: 20256 - DNA, 1993 bp, Homo sapiens
gctgggcctggagaggcgcgtccctggcccatcttatcagcgctctgcagggtctgggcctgctgctcgcgtcctcctgggctcccaaggccacgggtgggttaatggcttgacagccggcctcctggcccagcagacgctgagcagcccgatggcacaatccacctcttctctccaaggccagctggagggacgaggcacgacaaggccatccctacagctggcacttcccctacagctgagagggggcctaaactacaggacacactcccaagacccttaagccctggcagcatcccgggggaggggggcagcaggtggaagtggaaagaagcctgtggagctgccagcagggagagggagtcggacatgaggctgagaggcctctgggaacccctgtgccaaggggctgctggcactgggcagcagcaccccagagcccacgaggagtgtgcccagagcaagtggctcagacctgggtcatggctcgagggtgtcgggctgtagctgctggtcccagagagtgcagcccagggcaggcatcaggacaggagtaggaggagaaagagtgttctaggaagagtctagtcccctaatcctggtggtggctggctgtagcctagtgcacgctgtctggcttgtgtggctgtgctgcctgagtatacataccctagcaacattctccttgctcagcactggacatcagctctccacctggccccttcctctagggaggggatggggaggcctcctagggttagcagcaggagttgggcctcaggaatcaggagcccttgaaaggaggatgcgtggttcccataaaactgagggttgccctgggccctacccttcctgagtcagctcttgcttcaattccttgaagcaccccagcatcctttcaataaatgcctgccctttgtggcctgcaaccagaggaactgcaactagcacactcactgaaggaatcctgctgctgctgctgctgctaaaaacaaccgaggtcatggatgagggggtggaggatactctcatcccacctccagactgacaacaaaaagacctaaagatctctgtgtacctgggactgtctaccattgaagattagccatggtaacttgttgacttagtgatcaacttcctgcagaagcccataggtccacctggactctgcccaggccagcgtgttctgaaaatggagggctctgtcaccattcactcaacaaatgtttattctgcactgaccgagggccagatgtaccaagagctgtggacacagcactccaacttactccagggctactgaaatcagggatggcttccccaaaaggcacactaaggaaagtctatgtcactagcagagaagaggcaccaaagacaaaaaatcaaaaaagaaaaaataccagaaacagtttgacatttgattttttttaagtagtcctcgtgggaaaaatcagaactttgttgtacttccttacattcatttcctgattacatgatgcttttgttttgaatcacgtgtggagggtgtcaccaaaatctttagatgctttgtccttatgtggatctggacccagatcctagcaaatgttaccatctctgcctcacaaagatctgacagaatgcaggcagttggggctatccttaggagagacagctctccttcgcagtagatgcacctgggtgataaatccaactctgaccacaaggtggcaaaagagtaaatgacaattcctcatatatgttttgtatgtttatataaaactattggtttatataaaatgctctctaaaaatattaagaaaaacgtgtgctccttcacacatttttgggttgatgtctgatattttgcatcacaaatgtcaattggctacaaataatgtaatttgtgacaaatgttaatattcaaaaataaaactgttatgtcactatttcacatgaatccggtgaaacctaaataccttagtgacttgagagccaccatcatctgttttaa

SEQ ID NO: 20257 - DNA, 372 bp, Homo sapiens
caaatggagtgatttctgcatccctggttgaacaacatgagaccactggtgtcacgggtgacccagttcagaggacgatgatgagcacttccatgtgcatggtccttcacgttacaaaacgctttcctatgcatgttgccctttgatcctccagtcagctggatgaagtatcctccttcttctccagatgaagagactgaggcctggtcattacacaccatgttcagggtcacttgtgaaattggaactcctggctgggcacagtggctcatgtctgtaatcccaaaactttgggaggctgaatggacagatcatctgaggtcaggcattcaagaggagcctggccaacatggcgaaaacccatctctacta

SEQ ID NO: 20258 - DNA, 356 bp, Homo sapiens
gccataaaaaggaatgaagtaacagcatttgcagtgacctggataagattggagactcttattctaagtgaagtaactcaggaatggaaaaccaaacatcgtacgttctcattgatatgtgggagctaagctatgaggatgcaagggcataagaatgatacaaaagcataagaatgatacaatggggagaatagtgggaggcgggaaagggataaaagactacaaatagggtgcagtgtatactgctcgggtgttgagtgcaccaaaatctcacaaatcaccactaaagaacttactcatgtaaccaaataccacctgtaccccaataacttatggaaaaaaagaatttaaaaaaa

SEQ ID NO: 20259 - DNA, 282 bp, Homo sapiens
tgagaggttcgcagggtcagacgctgaactatgtgctcgggaagcgtggcccacattatgttccgcccaggtggctgcctggttctttgctacgctggcggcggtcgccgagtctctgatccctgtcccgggtgctccgcgtctggtgcacgcagctcgccacgcgggtttcaccaccgtcctcctggctacccctgagccccctcgccgcctcaatgactgattggcattttgcaaatcttgaatttgatagtgccacacctctcgcgaaaccttgcgacg

SEQ ID NO: 20260 - DNA, 2078 bp, Homo sapiens
agcagggccaaaagagtgattgagctctgactggcgacccgacccggcggaaaccacctcgacagcctccagaaaggggcgtggctgaaaatgtaggggcgtggccacgtgggcatcaggaagaagtaacctgttgaatctatttctgctccccacccttactgcttcccataagggggaagccgcagactaataagcctcttccaaaaaagaggtaaagggaggtagacaaggggcggcagcggaggctggctactgcattccgtaggaggagccaacagttactttttacctgctgagtccggtgaaccagttcatgggggcggggacctgcctatgagaaaagggccaggatagaagaggtatttatttgttcattttgaggactaaatttagaacccatcatctacagacccatttgtaggttgtgtctggggcactcgctcggcctcaggaagagggaagaacggggacgactttgtggcagcaaagccacctcccttccgtgttttccgcagcccaaagcgatagaaccgcatggcttccgcagtctgggggagtgccccctggtggggcccgccgcccccggccccagctcggccgctcacggacatcgacttctgctccggggcgcagctgcaggaattgacccagctgatccaggagctgggtgtgcaggagagctggagtgacgggcccaagccgggagccgatctcctccgggccaaggactttgtcttctctttgcttggtctagttcaccgccgggaccctcgctttcctccccaggcagagctcttgctgcttcgtggtgggattcgcgagggctccctggatctggggcatgcacccctgggtccctacgcccggggacctcactacgatgccggcttcacactcctagtgcccatgttttcactggacggcactgaactgcaactggacctggaatcctgttacgcacaggtctgcctcccagagatggtgtgcggaacccccatccgggagatgtggcaggattgcttaggacccccagtcccaggagcacgtgattcgatccaccgaacggagagcgaagaaagttccaaggactggcaaagctctgtagaccagccgcacagctacgtcactgagcacgaggcgccggtgtctttggaaaaatcgcctagtgacgtttcagcgtccgagtcgcctcagcatgacgtcgtcgaccttggctctaccgcacctttgaaaacaatgagtagtgacgtcaccaaggcagccgtcgaaagcccagtcccaaagccgtcggaggctcgggaagcgtggcccacattatgttccgcccaggtggctgcctggttctttgctacgctggcggcggtcgccgagtctctgatccctgtcccgggtgctccgcgtctggtgcacgcagctcgccacgcgggtttcaccaccgtcctcctggctacccctgagccccctcgccgcctcctgctcttcgacctgatcccagttggtgtccgtggcgggctggccgagggggcttcggagccactcgtgggccggtccgctggcctctgagtcggcttccttctacctggtgcccggtggcggcaccgagcggccgtgcgcctccgcctggcagctctgttttgcccgccaggagctggcgctcaaagcgcgcataccagcgccgctgctgcaggcgcacgcggcggcccaggcgctactgcgcccgctggtggccgggacccgggcggcggcgccctacctcctgcggacgctgctgtactgggcgtgcgagcggctgcctgcgctctacctggcgcggccagaaaatgcgggcgcctgctgcctcgggctgctagacgagctcggccgagtgctcgaggccgggacgttgcctcactattttctgaacggccgacagctccgtacgggggacgactccgctgcgctgctcggagaattggcccggctccgcggggacccggcccgggccctccgtgccgcggtggaggaggccaaagtggcccgcaaggggggcggtttggcgggcgtggggggcggggcccattaaagacgctgttcct

SEQ ID NO: 20261 - DNA, 1999 bp, Homo sapiens
agcagggccaaaagagtgattgagctctgactggcgacccgacccggcggaaaccacctcgacagcctccagaaaggggcgtggctgaaaatgtaggggcgtggccacgtgggcatcaggaagaagtaacctgttgaatctatttctgctccccacccttactgcttcccataagggggaagccgcagactaataagcctcttccaaaaaagaggtaaagggaggtagacaaggggcggcagcggaggctggctactgcattccgtaggaggagccaacagttactttttacctgctgagtccggtgaaccagttcatgggggcggggacctgcctatgagaaaagggccaggatagaagaggtatttatttgttcattttgaggactaaatttagaacccatcatctacagacccatttgtaggttgtgtctggggcactcgctcggcctcaggaagagggaagaacggggacgactttgtggcagcaaagccacctcccttccgtgttttccgcagcccaaagcgatagaaccgcatggcttccgcagtctgggggagtgccccctggtggggcccgccgcccccggccccagctcggccgctcacggacatcgacttctgctccggggcgcagctgcaggaattgacccagctgatccaggagctgggtgtgcaggagagctggagtgacgggcccaagccgggagccgatctcctccgggccaaggactttgtcttctctttgcttggtctagttcaccgccgggaccctcgctttcctccccaggcagagctcttgctgcttcgtggtgggattcgcgagggctccctggatctggggcatgcacccctgggtccctacgcccggggacctcactacgatgccggcttcacactcctagtgcccatgttttcactggacggcactgaactgcaactggacctggaatcctgttacgcacaggtctgcctcccagagatggtgtgcggaacccccatccgggagatgtggcaggattgcttaggacccccagtcccaggagcacgtgattcgatccaccgaacggagagcgaagaaagttccaaggactggcaaagctctgtagaccagccgcacagctacgtcactgagcacgaggcgccggtgtctttggaaaaatcgcctagtgacgtttcagcgtccgagtcgcctcagcatgacgtcgtcgaccttggctctaccgcacctttgaaaacaatgagtagtgacgtcaccaaggcagccgtcgaaagcccagtcccaaagccgtcggaggctcgggaagcgtggcccacattatgttccgcccaggtggctgcctggttctttgctacgctggcggcggtcgccgagtctctgatccctgtcccgggtgctccgcgtctggtgcacgcagctcgccacgcgggtttcaccaccgtcctcctggttcggagccactcgtgggccggtccgctggcctctgagtcggcttccttctacctggtgcccggtggcggcaccgagcggccgtgcgcctccgcctggcagctctgttttgcccgccaggagctggcgctcaaagcgcgcataccagcgccgctgctgcaggcgcacgcggcggcccaggcgctactgcgcccgctggtggccgggacccgggcggcggcgccctacctcctgcggacgctgctgtactgggcgtgcgagcggctgcctgcgctctacctggcgcggccagaaaatgcgggcgcctgctgcctcgggctgctagacgagctcggccgagtgctcgaggccgggacgttgcctcactattttctgaacggccgacagctccgtacgggggacgactccgctgcgctgctcggagaattggcccggctccgcggggacccggcccgggccctccgtgccgcggtggaggaggccaaagtggcccgcaaggggggcggtttggcgggcgtggggggcggggcccattaaagacgctgttcct

SEQ ID NO: 20262 - DNA, 2352 bp, Homo sapiens
agcagggccaaaagagtgattgagctctgactggcgacccgacccggcggaaaccacctcgacagcctccagaaaggggcgtggctgaaaatgtaggggcgtggccacgtgggcatcaggaagaagtaacctgttgaatctatttctgctccccacccttactgcttcccataagggggaagccgcagactaataagcctcttccaaaaaagaggtaaagggaggtagacaaggggcggcagcggaggctggctactgcattccgtaggaggagccaacagttactttttacctgctgagtccggtgaaccagttcatgggggcggggacctgcctatgagaaaagggccaggatagaagaggtatttatttgttcattttgaggactaaatttagaacccatcatctacagacccatttgtaggttgtgtctggggcactcgctcggcctcaggaagagggaagaacggggacgactttgtggcagcaaagccacctcccttccgtgttttccgcagcccaaagcgatagaaccgcatggcttccgcagtctgggggagtgccccctggtggggcccgccgcccccggccccagctcggccgctcacggacatcgacttctgctccggggcgcagctgcaggaattgacccagctgatccaggagctgggtgtgcaggagagctggagtgacgggcccaagccgggagccgatctcctccgggccaaggactttgtcttctctttgcttggtctagttcaccgccgggaccctcgctttcctccccaggcagagctcttgctgcttcgtggtgggattcgcgagggctccctggatctggggcatgcacccctgggtccctacgcccggggacctcactacgatgccggcttcacactcctagtgcccatgttttcactggacggcactgaactgcaactggacctggaatcctgttacgcacaggtctgcctcccagagatggtgtgcggaacccccatccgggagatgtggcaggattgcttaggacccccagtcccaggagcacgtgattcgatccaccgaacggagagcgaagaaagttccaaggactggcaaagctctgtagaccagccgcacagctacgtcactgagcacgaggcgccggtgtctttggaaaaatcgcctagtgacgtttcagcgtccgagtcgcctcagcatgacgtcgtcgaccttggctctaccgcacctttgaaaacaatgagtagtgacgtcaccaaggcagccgtcgaaagcccagtcccaaagccgtcggaggctcgggaagcgtggcccacattatgttccgcccaggtggctgcctggttctttgctacgctggcggcggtcgccgagtctctgatccctgtcccgggtgctccgcgtctggtgcacgcagctcgccacgcgggtttcaccaccgtcctcctggctacccctgagccccctcgccgcctcctgctcttcgacctgatcccagttggtgtccgtggcgggctggccgagggggcttcggagccactcgtgggccggtccgctggcctctgagtcggcttccttctacctggtgcccggtggcggcaccgagcggccgtgcgcctccgcctggcagctctgttttgcccgccaggagctggcgctcaaagcgcgcataccagcgccgctgctgcaggcgcacgcggcggcccaggcgctactgcgcccgctggtggccgggacccgggcggcggcgccctacctcctgcggacgctgctgtactgggcgtgcgagcggctgcctgcgctctacctggcgcggccagaaaatgcgggcgcctgctgcctcgggctgctagacgagctcggccgagtgctcgaggccgggacgttgcctcactattttctgaacggccgacagctccgtacgggggacgactccgctgcgctgctcggagaattggcccggctccgcggggacccggcccgggccctccgtgccgcggtggaggaggccaaagtggcccgcaaggggggcggtttggcgggcgtggggggcggggcccattaaagacgctgttcctcctcgtgccgaattcggcacgaggcccacgcagaggagagaacttgcttctggacccgggtgggtgccggctcggctctccttgtcttccagagcggtggcccggaagcacagtcctcccagacgccagcgccagaagctcggatcgcggctgcaccgggagagcgccgatctgggtgcgaggcaggtgcggggccatgaatgggaccgcaaacccgctgctggaccgcgaggaacattgcctgaggctcggggagagcttcgagaagcggccg

SEQ ID NO: 20263 - DNA, 2186 bp, Homo sapiens
agcagggccaaaagagtgattgagctctgactggcgacccgacccggcggaaaccacctcgacagcctccagaaaggggcgtggctgaaaatgtaggggcgtggccacgtgggcatcaggaagaagtaacctgttgaatctatttctgctccccacccttactgcttcccataagggggaagccgcagactaataagcctcttccaaaaaagaggtaaagggaggtagacaaggggcggcagcggaggctggctactgcattccgtaggaggagccaacagttactttttacctgctgagtccggtgaaccagttcatgggggcggggacctgcctatgagaaaagggccaggatagaagaggtatttatttgttcattttgaggactaaatttagaacccatcatctacagacccatttgtaggttgtgtctggggcactcgctcggcctcaggaagagggaagaacggggacgactttgtggcagcaaagccacctcccttccgtgttttccgcagcccaaagcgatagaaccgcatggcttccgcagtctgggggagtgccccctggtggggcccgccgcccccggccccagctcggccgctcacggacatcgacttctgctccggggcgcagctgcaggaattgacccagctgatccaggagctgggtgtgcaggagagctggagtgacgggcccaagccgggagccgatctcctccgggccaaggactttgtcttctctttgcttggtaagtaaccctacttgcctttgggaactcacagctctcagcctcaccacgcccccgcccccgccccggctttgggcgacgccctcacgatccgttccctttttttaggtctagttcaccgccgggaccctcgctttcctccccaggcagagctcttgctgcttcgtggtgggattcgcgagggctccctggatctggggcatgcacccctgggtccctacgcccggggacctcactacgatgccggcttcacactcctagtgcccatgttttcactggacggcactgaactgcaactggacctggaatcctgttacgcacaggtctgcctcccagagatggtgtgcggaacccccatccgggagatgtggcaggattgcttaggacccccagtcccaggagcacgtgattcgatccaccgaacggagagcgaagaaagttccaaggactggcaaagctctgtagaccagccgcacagctacgtcactgagcacgaggcgccggtgtctttggaaaaatcgcctagtgacgtttcagcgtccgagtcgcctcagcatgacgtcgtcgaccttggctctaccgcacctttgaaaacaatgagtagtgacgtcaccaaggcagccgtcgaaagcccagtcccaaagccgtcggaggctcgggaagcgtggcccacattatgttccgcccaggtggctgcctggttctttgctacgctggcggcggtcgccgagtctctgatccctgtcccgggtgctccgcgtctggtgcacgcagctcgccacgcgggtttcaccaccgtcctcctggctacccctgagccccctcgccgcctcctgctcttcgacctgatcccagttggtgtccgtggcgggctggccgagggggcttcggagccactcgtgggccggtccgctggcctctgagtcggcttccttctacctggtgcccggtggcggcaccgagcggccgtgcgcctccgcctggcagctctgttttgcccgccaggagctggcgctcaaagcgcgcataccagcgccgctgctgcaggcgcacgcggcggcccaggcgctactgcgcccgctggtggccgggacccgggcggcggcgccctacctcctgcggacgctgctgtactgggcgtgcgagcggctgcctgcgctctacctggcgcggccagaaaatgcgggcgcctgctgcctcgggctgctagacgagctcggccgagtgctcgaggccgggacgttgcctcactattttctgaacggccgacagctccgtacgggggacgactccgctgcgctgctcggagaattggcccggctccgcggggacccggcccgggccctccgtgccgcggtggaggaggccaaagtggcccgcaaggggggcggtttggcgggcgtggggggcggggcccattaaagacgctgttcct

SEQ ID NO: 20264 - DNA, 1437 bp, Homo sapiens
agcagggccaaaagagtgattgagctctgactggcgacccgacccggcggaaaccacctcgacagcctccagaaaggggcgtggctgaaaatgtaggggcgtggccacgtgggcatcaggaagaagtaacctgttgaatctatttctgctccccacccttactgcttcccataagggggaagccgcagactaataagcctcttccaaaaaagaggtaaagggaggtagacaaggggcggcagcggaggctggctactgcattccgtaggaggagccaacagttactttttacctgctgagtccggtgaaccagttcatgggggcggggacctgcctatgagaaaagggccaggatagaagaggtatttatttgttcattttgaggactaaatttagaacccatcatctacagacccatttgtaggttgtgtctggggcactcgctcggcctcaggaagagggaagaacggggacgactttgtggcagcaaagccacctcccttccgtgttttccgcagcccaaagcgatagaaccgcatggcttccgcagtctgggggagtgccccctggtggggcccgccgcccccggccccagctcggccgctcacggacatcgacttctgctccggggcgcagctgcaggaattgacccagctgatccaggagctgggtgtgcaggagagctggagtgacgggcccaagccgggagccgatctcctccgggccaaggactttgtcttctctttgcttggtctagttcaccgccgggaccctcgctttcctccccaggcagagctcttgctgcttcgtggtgggattcgcgagggctccctggatctggggcatgcacccctgggtccctacgcccggggacctcactacgatgccggcttcacactcctagtgcccatgttttcactggacggcactgaactgcaactggacctggaatcctgttacgcacaggtctgcctcccagagatggtgtgcggaacccccatccgggagatgtggcaggattgcttaggacccccagtcccaggagcacgtgattcgatccaccgaacggagagcgaagaaagttccaaggactggcaaagctctgtagaccagccgcacagctacgtcactgagcacgaggcgccggtgtctttggaaaaatcgcctagtgacgtttcagcgtccgagtcgcctgctgcctcgggctgctagacgagctcggccgagtgctcgaggccgggacgttgcctcactattttctgaacggccgacagctccgtacgggggacgactccgctgcgctgctcggagaattggcccggctccgcggggacccggcccgggccctccgtgccgcggtggaggaggccaaagtggcccgcaaggggggcggtttggcgggcgtggggggcggggcccattaaagacgctgttcct

SEQ ID NO: 20265 - DNA, 438 bp, Homo sapiens
atgggtgcctgtagtcccagctactcgggaggctgaggcaggagactggcgtgaacctgggtggcagagcttgcagtgagccaagatcacgccactgcactccagcctgggcgacagagcaagactccgtctcaaaaaaaaaaaaagaaggaaggaaggaagaaagaaagaaagaaagaaagaaagaaagaaagaaagaaagaaagaaagaaagaaagaaagaaagaaaaagaaagaaagaaggaagtgactatgaacatctttaaatgtgtatctttaccttaagagttcactgtctccttagggccaattatttttatttattattttttctgagaccctgtctccaaaaaaagaaaagaaaagaaaagaaaggaaaagaaaggaagaaaggaaggaagaaagaaagaaagaaagaaagaaagaaagaaagaaaga

SEQ ID NO: 20266 - DNA, 358 bp, Homo sapiens
tcctgagaaaggtgttaatacctcttaacaaccctatcacctcctaaagacaccaccttccaacaccaccacattggagatgaagccacagcatgagctttggtggggacaaaccatattcaaaccatagcaattacctactgggaaaaaaagacttattccttcagatacacttacgaggtgaacaaattattcctacagactaactggttagttttccagtaacccagttgggcaaaatattttgtgacaggccaggcgtggtggctcatgcctgtagtcccagcactttgggaggctgaggtgggaggatgacttgagcctaggagttcaaaaccagcctaggcaacatggtggg

SEQ ID NO: 20267 - DNA, 139 bp, Homo sapiens
tctgtgggaagttgtcatcctccacaagatcttgcccacactcaaaacaaacttgcttcccatcacattcttggtttgtcagcactctgtaaaaggaaatctcatctcctgtctgttgatagtagagcttatatcaaac

SEQ ID NO: 20268 - DNA, 377 bp, Homo sapiens
ttcatttgtggaaaatatttatgaataaatagttttatatgacggctggcacagcggcctctcctgtaccccctcaggagtcagtgagtaaggtgagggtcctgctggcgggggcccgggccagctgggggttgaattgggagttgtaccgccgccgccggtcatccgtctcgtcttcttccggctgaccctcctgtagtgcccggccttggacccgggccagcagggctgctgccgaggacctctcagctgcttccctccgcagacgttcagctcgaagctggtccagggatggagactccttgggtcgctgcttctcagacccctccttttcctttctgctgcgactgccttcatcaccgccgtgctgtctcttc

SEQ ID NO: 20269 - DNA, 629 bp, Homo sapiens
cccaggtgcccaccaagggccgcccagcaggcaggcctttctaggacagcagccctctcagctgtgccacataagctgtgggcaccacacgcttccttatcgtgcaggcagcaataagtaaataagatgaaccccactccccacagtcccgctgtcgctacaaattaaatgtttctttctttttggcatctaattctgttcatatttaaacacagtgagtagggttgaaatcagtattatatagacagttttggattcttttaaaaaatacgtattatttaaaataataaaccccattatatgctgatacattgcatatttatgaaaagtaacttttctaaagccaaataaatagaagagtggcattgacataagagggctggcatctcagccgctcgggccctccgtccattacaaccacacagcccagggccttgggaaggttctgccgcacacttgggagaggcgatgaggccttagcctttcgaggtcgagggcttgaccctgagattcctgggaaggcctcaggatgcctgggccgcatgtggagaactgtgagggcagacccaggtgcactcccattcccaggcgtgtggagggtttgtttttaaaagttaccaaaacacttg

SEQ ID NO: 20270 - DNA, 217 bp, Homo sapiens
actctgtgtcccaacccaaatctcatctcaaattgtaatccccacatgtcgagggaccgagctggtgggaagtgattggatcaggggggtggtctcccctgtgctgttctcgtgataataagggagttctcacgaaatctgatggtctaaaagtgacagtttcccctgcactctctctctctcctgctgccttgtggagaaggtacttgctttctcg

SEQ ID NO: 20271 - DNA, 315 bp, Homo sapiens
gggaatacagcagtgaataaaacaagtccttctgcttacattctagtgtttgagagtacagtgttacggaaacttttaaaaaaaaaaaactcaaaaaagagattagtcaacagtaaaacgcttagaggtgtaagatgaagttaggccgagtgaggtggctcatgcctgtaatccccgcacttttggaggctgaggtgggaggattgcttgagcccaggaattcaaggctgccttgagccatgattgtgccactgcgcagcacttcagcccaggagacagagcaagaccctgactcaaaaaaaaaaaaaaaaacag

SEQ ID NO: 20272 - DNA, 435 bp, Homo sapiens
gcccaagttccagggtaattaatcaactctaaaatggatgcaacaagtattggcactggatgcagacttgaaattaattatttaaaaggtggacctgattgtttttttaaggcagaaagacagaaattaaagaattttcttctttcatgaaatgcacgtggctggctgcaaggattagagcagatgctatgtttcagtgataacctaatacctgactgtgctcagacatctacgttgggaaagggagttgtaataagagttgggagtttgaggttatcagtgacccagaaacaaggtgatgtgaaaaaagaagagttgtgctagactgaagaaaaaaaattagatgatctataaaatgactgtgagtggagaagccctttgtcctagtccagctactaacagcataagcaatcagcacaggtgttgttgtcgttg

SEQ ID NO: 20273 - DNA, 316 bp, Homo sapiens
tttttttttaaaaaaaaaaaggtagtctctttttttttcaaatgtttttcccccatccatccagaaaatgaatttcccagaaaacaagaaatacattttctttgttgattgatttagttggttaggtgtggtcactggtgctgtcacaataatctctgtggttaaatgttaatcccacaagtcaaagccagataggcaaggaataaagtagcaatatgttaaggttcctgcaggaagagttttctatgcatcctactggtaaaagtgtgagagctccagatgataagataaaagggatatagaatatatgaaaagt

SEQ ID NO: 20274 - DNA, 414 bp, Homo sapiens
aatgagcaggaggggtgagattagttgcttccctgtactcacccatctccatcaggagctccgtgggcacgaatgcagaggaaggacatgcgatactgactgctgcctgctgataagtttttagttcttgattccaatagcagatggaaagttacaatgaaaccagttgtagtcagggaatttttctcttctcttccataaactaaaatgtcccattcaccagacaccttcttccatccgctccccaaagctccaatgtacaatggaacatacctcagacctagggataccaatcatgggattcccctgctatggctttgtttaaaaaaacgtttagaggatttttaaaaacagaatttaacacatgcttattatattaaaaactcaagcaataatgaaagccacaaatcacct

SEQ ID NO: 20275 - DNA, 1503 bp, Homo sapiens
agacactgagttttaagtctcaagtggatgaaggcagagatcgtgatacacttgagttaaagcagtagggttctgtcattttctattcctgttgtaaacattttctttaatgttattatttttaccactaaactaacgtggcctggtcacgactttcattggtaaagtgtgctgttcctcaccctccaccgttgctcctttggtccactgatcataagagcatttacctgaaggtcgtcagacctcgaatgccaacaggtcaactgcagtggcctgcagttaccacccagtctgttccaatgaacagaatcgctgttgccccaactcatctcccttcacctaggctgtaaattgaaagtcccacccctgagcggaacacaggccatcttgtgtgctgtgcaccaccagggggtggggaagtttccagactgacttcctggctccagtcatcctaggaaaagagttctccagtcgctccccacccccaccccttcccattccaggagtctattaaggaggcaaagcaggcctaacgggtatcaaagcaaaggagtgaatggagactgggagagtcttcaacctctcctctccttggtaggagctgaggctgcatgccaggtaccttcccttcgaggaatctaataaagctaggtcactggtgttttcaggtgcttctcaaaggattgccgtaggggtaggatatcaggatgtgggagcacaggtgccaccacagcactagtgatggagagtcattgcccctagacttctgggacagtgagactgtgaggaaagctgaaatgatactgggaaagggtgaaagaaaggatgtaggtggaatttatttagtattaatgtaggtacacataccttatggcaacattcctagcactctaaattctagatttgtatagtttctgtcaatatcttttgtaagcttaatcaatacagggcatgacaagtatgtgtcacatacttttttttccacgaagaaaaaaaataagtaggaattgggtgctttgtttatcaaaatttgtatttcctttataaataaactttgaaataaaggttgaaaattagtatcttttctagccgagccaccattgtttttaaaaatcctctttgaagcaggtgtgtgtgtgtgtgtgtgtgtgtgtgtgtgtgtgtgtgtgacgtttttcaacaaaatttttaaaaatcgaaatgtcagggtcaggtgcagtggctcatgcctctaattccagcactttgggaggccgatgtgggaggattgcctgagctcaggagttaaagaccaccctgggcaacatggtgagacctgatttctactaaaaattaaaaagattagctaagaatggtggtgtgtggttgtagtcccagctactcaggaggctgagaaagaaggatcacttcagcctggaagattgaggctgcaatgagtcatgatcacaccactgaactccagcctcagcaacagggtgagaccatgtttcaaaaaaaagaaaa

SEQ ID NO: 20276 - DNA, 476 bp, Homo sapiens
agcatgtgggcagacagaatcgtgggggcagaaggttcagcagacgcgattgcgggcaccagttaacattccagatcattcccggtaccttcattattagcctggataggggtaaagtacaaattaactcttttgtcttacaacggatattggtttgaatccagcagacattccctctggcccagaaacacccagggcagttaatcagggctaacctagaactgatctacgggtttctaatccgccaagcagtaatccgaaaaagtacacgcttcccacgatgacgtcgtgcccccaacgaacgcaggcacgcccaggcatcagcactttatatcttcagttttgtaggaagttctctgactggaagcaaacacaacgactcaaacctatcccaaagtatttttaaaatagtgtctttttttaaaaagtaaactagaaattgtcatcagaaaaatataaaatgatgtgtcaaactg

SEQ ID NO: 20277 - DNA, 713 bp, Homo sapiens
aggcctccccagccatgtgaaactgagtcaattaagcctctttcctttaaaaattacccaacctcaggtgtttctttatatcagtgtgaaaacagactgctatactttctgataatcatgcttaagcaattggggaattcagactacctgggatcaaactatggccccacccttagcagtcatgtgaccttgggggggtttacttaccttctctgtcccaacaacttctgtaaaatctgtaacatgagattgtttctgagggttaaatgagcatagcacagtggggacactgtcaggcacacactacttgccagatgtcgagtattcatctttattgaaataggactgtggtaagccactttatggctctcgattttgtatgagaaaatcatgtttagtgccttgttagtaaaagaaagaaaatctgaaagtccctgccatggaaggaagaaatagcggggagaaaagggagttggtaagtttcagcatttcagagcttggagggacaagttaggtttctattttatggagaaggaggtggaggcaggatgggtcctaaggtgtcattcaaaacacacagccataactctttattgagagtagagctagggccccagggattgctgtgatcaagttgcggacaaaaatgaccactcgttggaagacaggagaggagtgtttagttacaaaagcagtcaacaattcaggtgtat

SEQ ID NO: 20278 - DNA, 358 bp, Homo sapiens
ccagccaagttctctcagctcaggccaccctgcccagtcacatggcaaggacccatggatgagcgcttgacgcacttgctctcctgcatccaagtcacctgcctgcctccctgtcaaacccaccatgttcatctgcccccaccactgcaacctccatctcctgggctcaagtgattctcctgcctcagcctccagagtagctgggattacaggcatggtggtgggcacctgtaattccaactacttgggaggctgaagcaggagaattgcttgaacctgggaggcagaggttatgagccaagatcataccattgcactccagcctgagtgacctgactgagactgtctcaaaaagagt

SEQ ID NO: 20279 - DNA, 314 bp, Homo sapiens
ccagccaagttctctcagctcaggccaccctgcccagtcacatggcaaggacccatggatgagcgcttgacgcacttgctctcctgcatccaagtcacctgcctgcctccctgtcaaacccaccatgttcatctgcccccaccactgcaacctccatctcctgggctcaagtgattctcctgcctcagcctccagagtagctgggattacaggcatgcaccaccatgcccagctagtttttgtattttcagtagagatggagtttcagcatgttggccaggctgatctcaaactcctgacctcaagggatccac

SEQ ID NO: 20280 - DNA, 424 bp, Homo sapiens
ttgtaactttcctcatcttacataagcaaatcaaacactgtaaaataaaaactagatgaaattaaacattatcacaagacatgaaaaagatgtgtgctgtcattttaggattcataataaagataaatcagttgtttttagcagtgtgctatgagtctatgaagggcatgacagataataggctcgaaatttctgaagttattgtacagcaaaatttgttttttcctcaggcattcaatctttttctccagtaattttgaacatgacaaactttttagtggatgcattaataatctataagtaatgggttgtcaggtgtcagttagataagattaaaagactgtttaagcattatccatttgcttctttgcatgagttttataggtcagcagaaataactttttgaattgtgggttgtgtgtac

SEQ ID NO: 20281 - DNA, 146 bp, Homo sapiens
cacgcttccacttgtaccttttatccctcccttttgccctctactggacagcattgctcagcatttacctcattcctcagcatttttccagtccttcccatcagctgttaccactccaccctgcaaagaaaactgcgtcttatctc

SEQ ID NO: 20282 - DNA, 343 bp, Homo sapiens
ccaaacggaaatagcatggcttcactcggctgagatgcccccaaggcttgggtttgcttgaagatgggaaaccccactctgttgtagtggacggtgtaaatactttagttcaggccggtgcatgagtcatgtgcttctcctgggtggctgacctcccttttactcaagactacgctttgtttttttaagatttttatttgcttgtttacttgtttacgtttcgtgcagcctggtggggtgtctggtcttgggttcatttctctgcgtgtgtgttggatgctagtgaccccttggaatgtatgcctcacgagaattggaatgtctttgcttaccttcgacaggg

SEQ ID NO: 20283 - DNA, 435 bp, Homo sapiens
accgacaaaaccgactcttgtaacaacaaaataccaaattataaacaggacctaagaccatgcaggcaggggttaagtgatacatgcctacacccaaagtgctggagttacaggcgtgagccaacgagcgcggccagatggtgagattttatacagcatcaaaagatcttggcggggcacggtcgtcacgcctgtaatcctagcactttgcgagactgaggcaggtggatctcttgagctcaggagtttgagaccaacctttcgcaatgtggcgaaaccccgtctctacaaaaaatactaaaaattagcctgtagttgcagctacttaggggctgaggtgggaggatggtttgaacctaggaagtcagggctgcagtgagctgagatcatgccactgctttctggcctgggtgacgaaagtgagaccttgtctca

SEQ ID NO: 20284 - DNA, 181 bp, Homo sapiens
gttccgtgcttgtaatgggcaggatcccagtgggcaagaagagtaacaggaaggaggtggcagctggcccagggttctcctgcttcctctgcatgtgccaggaattagagtctcgctctattgcccaggctgaagtgcagtggcacggtctccgctcactgcaagctccgcctcccgggtt

SEQ ID NO: 20285 - DNA, 552 bp, Homo sapiens
  misc_feature (548)..(548): n is a, c, g, or t
  misc_feature (550)..(552): n is a, c, g, or t
gcgtttcaggaccgtggctatggagtccggcgtggcagcggcaatccctggccaaaggtacttggggtcattttccgcggggggttacgtgcgggagcgtgtcctccacaaacggattttccccccttaagcggacttatttccatccggagtgacagaatttaattccaaaccgagagctttccagactgacgaatttttaccgggactaacagagaattacctcagcctgacaacattttatctcgtgcgccacttcgggatccgagtggagccgaaagtcgagatagagcgcagttgggccttgggttcgaaaagactggacagaggtttcagtgagccgagatcgcgccactgcaccccggcctgggcgacagagcgagactccgtctcaaaaaaagaaaaagaaaaaagcctggaaagaaattctgcggaatagaagtctttaagaaatgagatcgtgccctttaaaactaagtttaacaatagtgagggcttaataaacgataggtgttatctctgggttggaggggaataccttcaaaaanannn

SEQ ID NO: 20286 - DNA, 385 bp, Homo sapiens
gtttcagctctcccttggagtcccgggaaacgtatctcttgggatcaggagctgggatggaacccagggctcctgagatgggacaaagctatgctctgtgcacctgtcttgcctcctcactttgtacaatgagtgtgccttcagccaaaagcagaactggaaacatcctaagtgggccggtaacgaggctagctctgtcgactagttcaagacccctgagcgctttgggcctgaggttcctcagcttccaagtgaaaggcttcgacttggcattctaagagacaatctctgtgaccatcagtttcctcatctgtaaaactggcatcatgataactttgaaggtaattgtgaagattaaagggagtcatgcatgtaaaaaaaattg

SEQ ID NO: 20287 - DNA, 1119 bp, Homo sapiens
gtggtctattcatacaacggaatattattcagcaataaacaggaatgacatacaacatggatggaccttgaaagcattgtgttaagtgaaagcagccagacccaaaagcctggccaacatggtgaaatcccatctctactaaaaatacaaaatttagccaggcgtggtggcacacgtctgtaatcccagctactcaagaggctgaggcaggagaatcacttgaacctggcaggtggaggttgcagtgagctgagatcacgccactgcactccagcctgggtgacagaatgagactctggaaaagaaagaaagagagagagagagagagagcgatggagggagggaggggaaggaaggaaagaaaggaaagaaaggaaggaaaggaagagaatgtaagcaatatacatatatcacagtaactttggaaaataaagaagataaaaagtttccgttaagggagggaccatgtttgtcttattcattgtaacaacccttgtacccaacaaagtgcttggcacataggtgctcaggatacacatgttgagtgaatgagtaaatcatagatgcatcattgtaatagcacaagtttaagcatattggtgacttcttctccctctccaaacattaggtttatttattgtttttagtgcttttattctacttataaaagtaatacatgttgattgtagaaaacttggaaaattaaaaagcaaaccaaaaagaaaatgaaaatcacctgtgtttctaccacttacagaaaaatccactattgatattttatgtttttccttccaggttttattctgggcatatatatgtttggaggtgtgtgtatgtttggggaacctttgaatttggaagtaccaaggtgaggagagacttatggaatttagaagctttggcaggaactaagcactgtgtttcttagaatgagcagctctttctacttgaaaggctgaggcagaggatcgcttgatcccagggatttgaagctggctgcagtgagctatgatcacaccactactctccagcctaggtgacacagcaagactctgtaaaaaatgaagaagaagaaagaagaagaagaagaagaagaagaagaagaggaagaggaagagg

SEQ ID NO: 20288 - DNA, 504 bp, Homo sapiens
cccaggccagaaacctgccaaatcctgtccagtactatgatctacaaaacggatctgcctcaggaaagccagggaaggtggggctggatggagtgtgttccagctggaacatctgctctgggccaggcacagtggggaaagccaaggtggattcactatggccctgatctcatgattggggttttattctgggcatatatatgtttggaggtgtgtgtatgtttggggaacctttgaatttggaagtaccaaggtgaggagagacttatggaatttagaagctttggcaggaactaagcactgtgtttcttagaatgagcagctctttctacttgaaaggctgaggcagaggatcgcttgatcccagggatttgaagctggctgcagtgagctatgatcacaccactactctccagcctaggtgacacagcaagactctgtaaaaaatgaagaagaagaaagaagaagaagaagaagaagaagaagaagaggaagaggaagagg

SEQ ID NO: 20289 - DNA, 506 bp, Homo sapiens
gcgtttcaggaccgtggctatggagtccggcgtggcagcggcaatccctggccaaagtgtgccttcagccaaaagcagaactggaaacatcctaagtgggccggtaacgaggctagctctgtcgactagttcaagacccctgagcgctttgggcctgaggttcctcagcttccaagtgaaaggcttcgacttggcattctaagagacaatctctgtgaccatcagtttcctcatctgtaaaactggcatcatgataactttgaaggttttattctgggcatatatatgtttggaggtgtgtgtatgtttggggaacctttgaatttggaagtaccaagagacaagaacttgctgtgttgcccaggctggtcttgaacttctggcctcaagaagatcctcccacctcgacctctcaaagtgttggtattacagacgtgagccactgggccccactgtgttctgttcttattgcccatgacaattaaagttagctctatctcatctcc

SEQ ID NO: 20290 - DNA, 355 bp, Homo sapiens
agaagtccgagaaacccccgtaaatatgcctgtccactttttttaaagcaaattacaaaatgtgaaattccccagaaatgcacagcaataccttctctaacaatgtgccttcagccaaaagcagaactggaaacatcctaagtgggccggtaacgaggctagctctgtcgactagttcaagacccctgagcgctttgggcctgaggttcctcagcttccaagtgaaaggcttcgacttggcattctaagagacaatctctgtgaccatcagtttcctcatctgtaaaactggcatcatgataactttgaaggtaattgtgaagattaaagggagtcatgcatgtaaaaaaaattg

SEQ ID NO: 20291 - DNA, 510 bp, Homo sapiens
ggacctgctggcaaatccccatggctccagcaccaggcctgtctggctcctgaacctctgacctactgctgctcatccatatctatctcctgagacctcgagacatgaatccaccttgggtaacctgtaaagacttatttgcctaaaacctgcccaggagtcttaatgtccccatcccgttttaatagatgaacactttgcttttggaaactttctgttccttggatattgatggtcatattgcttctggaatcattacagtgtgccttcagccaaaagcagaactggaaacatcctaagtgggccggtaacgaggctagctctgtcgactagttcaagacccctgagcgctttgggcctgaggttcctcagcttccaagtgaaaggcttcgacttggcattctaagagacaatctctgtgaccatcagtttcctcatctgtaaaactggcatcatgataactttgaaggtaattgtgaagattaaagggagtcatgcatgtaaaaaaaa

SEQ ID NO: 20292 - DNA, 909 bp, Homo sapiens
cgtggctcagcccagctgggcaggtggaatgaagagagcagtattactgtaagaaaacacaaggacagccaggagtagtggtggggtgggtggggtgggaggtgttgatttttgtgtgtttctgtgtgtgtggttttgttttggattggtaggtttcactgtggcgtggttttgctgttgttattttgcttgattctggaaaatgctgaggagatggactgagctatgaagttcaatggttcaccctttaccatgtttgcaggagatgatcgaatacagatgaccctgctgtcgtgtcttcatttgtaaaattctcctacaaatggagacattgaaggattatgtgtatggaaatttttacaaaattcctttctgtacctattctgtagatgcctgtataatcggtctggatgtacagctataaatgtgttgtgagagcaagagagagagaatgcgtagagcctgctgtaccttttttcttttaaattcttcgagttggtaaatgagtaagatattggaaaccttaatgaaaagctgctgttcatgatttgtgtgtatagtgagctgactgtagtattttactattgtctgttaaaaaaagaaaaactgtaatttatatcccctttgaactttattgtgtttaattggtacacatttctgtgtgtgtgtgtgtgtatgtgttttagaatacaaactgtgtaattcagattttaaaaaaaaaaaaaaaaaaaaaaaaacctccgaggccatcaactagtcaggctgccgcgaaacagcggggtcagcgaagggggcccagggtcatacgcgaggtgaccggaagccaggctgctgtgatacaagcgggacaaaccgcgcgggccccctaaagggagccggatgacctcgcaaaagccggttacctgctag

SEQ ID NO: 20293 - DNA, 535 bp, Homo sapiens
atatcttccttatcagaatgtaagctctgcaggctaagtctgcatttcgcatttcttttgcttccgtattctcagcatttggagctctacctgacagatgatacattcttaacaaagagttgtggaaagaataattgaaccaggattccataatcaatatgcagcaaaacttagcacattggtgccaactagcacttagtaagctggaatctgcctatgatttttaagtgaatcaagtaaaaataattctaaagattattaatgtttctagcctccttggagaatcaacaaaaacaagagttaagaaactttagctggaaaaacagaactactattcaacccagcgatcccattactggggatatacccaaagaaatataaattgttctatcataaacacacatgcatatgtatgttcattgcagcattattcacaatagtaaagacgtggaatcaacctaaatgcccatcaatgacagattgaataaagaaaatgtgatgtatacacaccatggaatactatgaagccataaaa

SEQ ID NO: 20294 - DNA, 298 bp, Homo sapiens
gcttcagcacatgaatttggggtgggaagaaggtacaacgtttagtccataacaagtgagcaggtctaatctccttgtcaattctacctcccctgggtaaatagactaatggtatttgctagaaggaagagggttgtctttgggcccttagtaggatatctgactaaggattacctataatagatagaaccagaatttataagggatggcttcctggaaaatggcatatagtgtttgcagtgctggggtataaaatggagatgttttataattgaagcattaccaactgtatgaggaa

SEQ ID NO: 20295 - DNA, 471 bp, Homo sapiens
gtagagacagggtttcaccacgttggccaggctctcaggccatctgtcccccttgccctcccaaagtgctaggattacaggtgtgtgccactgcgcctggctgcctttttgtttcttgagcctgtttggcatttgtgaagggtacggtaaacttttccaggccacatacagggtgcaaggttttgtctaattttatccttttttttcctttttttttggagactgggtctcactctatcacccaggctggggtgcagtggcataatcatggctcactgcagccttgacctcctgggctcaatcaatcctcccaccttagcctaccaagtagctgggactacaggcacctgccaccacacctgggtaattttttgtatttcttgtaaagatgaggttttgtcgtgttttcccaggctggtttcgtcatgtttcccaggctggtttcaaactcctggggcagccattccacca

SEQ ID NO: 20296 - DNA, 386 bp, Homo sapiens
ccctcccttgacacgtggggattacaattcgagatgagatttggatggggacacagagccaaaccaaatcaataggtattaattttgtgtacctaatttatgaaacttttagcctaaaattagttcagtattttcctttttaccaaccctatgaaataggtgtattttcctcattttatatgtgagaaaactgcaacacagataaataaaagaatcaactccagttcctataattattaagtttcagggttatgggttaaaattaattctgtttatttccaaaacagatgcctttcttaaggaaagcatcacacagataaaatcagtaaaagttaatatgtcttatgtttttctcattaagaaaaataaaagtttttttcctaaca

SEQ ID NO: 20297 - DNA, 322 bp, Homo sapiens
gctcagagtggaggcggtgggtgggggtgatttggcccatggatccctgatgtgtgctcatgttgaagagtgggattcctccactgtcctgtcctgtcagggtagccaaggaagggcttctgcttccagtgggaatgagacatgatgacctttacagttccttctaactttcagaggttgcacactgcagtagtaaagtgcacagagtggagctagcctggatgggtttgagtcctggctctctcacctgtcagctctgtgacttggggccagtgacttaacctctctgtgcctcagtttcctcatctagaaaaaaatagag

SEQ ID NO: 20298 - DNA, 467 bp, Homo sapiens
gtgacacaagtactcatgtttattggccaaagcaagtcataccctgaccgttgtggagtgaggacggcaatagggaaatacattccctgccctccccaggagaactgggatatttgtgaacctgctatagtcattaccacacttggcttagcagcaaagagtcttgttgtaaacaaaatactggcagattttgctttagctatatcataaagatggggagggggggaatagatagtggaaatggggaaattaacatctgtcacaatagacagtgtataaaattgataactgatggagtagcagtataaacatgttaaaaacatgagggtaaatatcagagaaaacagctaagagagttaaaattattttgcttccatggagtaggactagtggtgagaagcgttgaataggaaactgcagtatttcattataagcttttgaagattatttaccatgacaaaaaaaaa

SEQ ID NO: 20299 - DNA, 371 bp, Homo sapiens
gtttcagtaaacacaatgtgaatgttggacatttgaagatatgaatgctagtttgtatgtcagtgtctgtgtatatgtatttatataaatgagtcattttatatacaaatatatgcatttatgtaaatttgtaaatgtaagtataaacatgtttactgtcttggtgtttgagatgattccatttgtggtgaatgatggtgacttctgttttaaggatgtttggaatgatttaaagtaaaatcctgttcctaaatctaaagattgtgataattttagatgaatacttttcccttttcattattattttttggtgtctaccagaatatttatacatagtgatagaaacagtgattttttttgtatggagagaa

SEQ ID NO: 20300 - DNA, 293 bp, Homo sapiens
cttatgttgagtcagtattgcaatatgcctcgaacgagtagttaatacaatgattgccagaattaatagaagaataacttcacaacatacttactcctgtacttatggcaagctgatatgaatgaagatggaacagaaaacttgactgctcacacggtttgataatcactgaattctactctgtgcttctgatatctcagttccttaagtgctttttaaaaaatgtgaactattcctgcaagagatgatttggtcaagcatggctaagagagtagactgttttcattcagtga

SEQ ID NO: 20301 - DNA, 224 bp, Homo sapiens
aaaaagcctggtcgactttgcagactatttggactatagattggaatataggtgcaaagaagtagatttactgtgtccaaatgcaaaactaatcaactcagaatgacaatttcatatggttatgcccattacaactttgtttgacttctctcatctctttgagtatatgggatgtcattaatgttaccagctgcatgactttctctgaataccaataacagagg

SEQ ID NO: 20302 - DNA, 366 bp, Homo sapiens
gtaaagacaaaaaatgttccagcaggcccagaagaggattctcttgaccttaatggctaagttttcatttaagttcctagaatgtagaaactagaatttgattgcagagcactataataatatttgaagtctgttgtattattccaggctttattaacaatagagcaagtgtattttaattacatactattggcctagtaactcttcatgcatgtttgttgtattcagaaagtcccaagttaattaattcctctgggtcagtgtctctcaaactttagtacatattagaatcacttggagggcttgttaaaacatagatttctgggatccatccccagaatttctgaatcattgtgtggagtggag

SEQ ID NO: 20303 - DNA, 532 bp, Homo sapiens
gctgggctgcgctcctgaaatgcgtgaggaagcccagcctgggccaggatacgccgctctcagtgaagaggtcgaagatggccctcctggatgcgccatagtaatacgcggctgccacaaactcctgcagggacaggtgggtgaagcagtaggccactgacgatgccaacgtctcctctctctgcaggaagcagctgcacggggcgccctgcagcagagcgaggtctacaccaaacgccttcatgtcttgctcgtaaaacacgtatttcttcttgagcagcccatggaaggccagacggcccaatgtccccaccatcttgcggccaccatgggccacctgctcgatgcgagggcttgccttgcccttctcctgcccctccccgctgagggccatcctaaagtaccatgagtagagctcgcacagggtcctcgggggccacagctctgcatcctggggccccgtcctgctgcgccacaggtggcctagcgccatccccgtgagcctgcagaaggctgggacggtgcacatcag

SEQ ID NO: 20304 - DNA, 140 bp, Homo sapiens
aggaggcagagctcaggaagcagtgcttgctcgcctgctgctcacctcctgctgtgcagtccagttcctaacaggccacagacaagtaccagtccacagtctgggtgttggggttagacagtgttagcaattattattaa

SEQ ID NO: 20305 - DNA, 890 bp, Homo sapiens
ttaagtatattaggaagatagtatggaaataatggagattttgtttagaaattcatttctttgaggagagtaagcatttataatagtagatacagttaatggttaatgtaatttaaagtattttgtcttgttgctatttctttgtggttgggtaattggggattttggttttgtttgtaaatattctggaataatacttgcattgttctggtacttattctgagaaatgaatttttatgaaaagttctttccttccatgttttttacatacttactactgttttgtctcttcacactgaaaaacagtaagtagattcaaaaattttattgccttctataaactttccaataaatacaacctatagtcttaactcagaatttatgtagcattctgaagcacatttacattaagctttggttaactggctattatagttctcattatgacagacaattcagaggatttttaaaatctttgtttttacaactctattatggtttctgaaaaaattatacaacttcagtttttaaggttctgttaaaaaaaaaaaaagtgttcatagccattatacttaggcactaagttattccagaatcacttttgtaacttcccctttgtctgtcaaatgattgttattgtgggaatgtgcacgtaaggttaggtgttgctttagatactgatattgctgctggtagttcttacatattcatttaatattcttcatattgtacaatttctgtaactgattcaatagcagtatactcagctgattcttcctttatagcattgcttatcctttaccaatatttggcacttagaatatgttatctacataggaagataatagctgtgtggaatgcttactaatgaccctgaatagctaattctt

SEQ ID NO: 20306 - DNA, 608 bp, Homo sapiens
gaggattcagttgagcggccaggagcgggcaggcacacaggcttagcaaggataacctagctaagtgttgggaaagttccactttccaaccaaacccagcaacgtcagattctctttgggagagaaggacaaggcttccctggaggttaagttagatcttgaaggcagaagggcagagaaaagccttccaggcccacaagactccaggttcaaaggcgacaaggtttgagacaatgtggtgctctttaagctagcataactagtgtgatgtaccatgagcaaaaagggctttagcaagtatttataacagtttgtgggtttgaaggggtgacacggttggagaatgctgagttgctgggtttggttggaaagtggaactttcccaacacttagctaggttatccttgctaaccctgtgtgcctgcccactcctggccgctcaactgaatcctcctgggagcatttggggaacaatcaatcttggcatccaaagctcattacagtctgtttctaatctttctttcctctaatctcgtacatcaagacatctcaatcaggtgcagtggctcatgcctgtaatcacagcactttgggaagccgaggtggga

SEQ ID NO: 20307 - DNA, 525 bp, Homo sapiens
gcccatgaggtatatttctttcattttatgaaaagcattttgacaacacgttaacatttaataaactttagattaaaatatatagtgcaagcaacatgccatttcaaatccgtagacttgtttctttgatactcttgctgtaggtcgccgtgaggggtagggaagcatatatactgtagggagaagtatcaaaatcatttaaggtcttttttccaaactagtgttcccctcccacatcccaataactcttggaagtctggtgctccctctaggtgaaaatcatttgctggcttatggagtcactgttgctgagtcccatcccccagttacagtgcagtggaaaacaggtttagaatctagaacttgtttgtatgttgtcacttggttatgttccaagtaggttagaaccatggaaaagagattgcaaatggtagtttcttctagatattcaaatgcatatatgtatgtacatgtaattataaataaataatgaatttttattaaagtgttgtatgaacataaaaa

SEQ ID NO: 20308 - DNA, 490 bp, Homo sapiens
gaaagatacctatagtaagtgaggtaaatttgaagcagttttcttaccaaaacataatctccatgcagtcaaatacattgtctggattacttttgtcttcctagtgccaagcacttactctagcacttagtaagcattcagtgaatatttgttgatacatcaaaagaatgaatggatgggaaaaacttggataaattattgttgatattatggacttatggcatagatttgataacactggtaaaattgcattgcacgtgaaaaaacaaaaatagttgcttactattgtgactgaagaaaagactttcattatagagatgtaatctgtataatgattcatattttcccatgtgaatacagtctgataaagatgggactatttagccttaaaagaattgctacttttaaccaaatccagcattgcctttttgcaaatacaatttttataaaatctttaataaaattaacaaaaaacaaagttagatgtaaa

SEQ ID NO: 20309 - DNA, 713 bp, Homo sapiens
caactgatgcttttggttctacagaggaaggtgaaaaaaggtggaaagacttgaagaacagagttgttgaacataatattagaataatggccaagtattatactcggataacaatgaaaaggatggcacagcttctggatctatctgttgatgagtccgaagcctttctctcaaatctagtagttaacaagaccatctttgctaaagtagacagattagcaggaattatcaacttccagagacccaaggatccaaataatttattaaatgactggtctcagaaactgaactcattaatgtctctggttaacaaaactacgcatctcatagccaaagaggagatgatacataatctacaataagggtcttagtgctttagaaaaaagttaaaattggaagtcattaaaaaaagactgttataatggtgtatatgttggggttttttttctaagcttctttgtcttaaattttaaaatagtgaatatgtttgagactccctttgacctttcagttccccaagttcattgttaactttgcatttgcaattggtgcaaaaatacagatttctgtcgtctgaatacacaaaaagttgtgtcataacttacccagatatgtttttctatcatttgaaacctttttagctactgtttgttttcattcaactaacaaacatattccaataataaaagcagtatatacatatttcctttcta

SEQ ID NO: 20310 - DNA, 860 bp, Homo sapiens
atattcatagtaattcagaataactacagaaacccaaatatctaagtatttagttttgttattgaaacttagaactagctttgctccagtgatggactgtagaaaaataaaagctctgagtctaacattttaagtaaacttacttggatatgaaaataaatggacttttagacttactgacaaatgttacgtgttctccctgctctctatcctctccccataatattagaataatggccaagtattatactcggataacaatgaaaaggatggcacagcttctggatctatctgttgatgagtccgaagcctttctctcaaatctagtagttaacaagaccatctttgctaaagtagacagattagcaggaattatcaacttccagagacccaaggatccaaataatttattaaatgactggtctcagaaactgaactcattaatgtctctggttaacaaaactacgcatctcatagccaaagaggagatgatacataatctacaataagggtcttagtgctttagaaaaaagttaaaattggaagtcattaaaaaaagactgttataatggtgtatatgttggggttttttttctaagcttctttgtcttaaattttaaaatagtgaatatgtttgagactccctttgacctttcagttccccaagttcattgttaactttgcatttgcaattggtgcaaaaatacagatttctgtcgtctgaatacacaaaaagttgtgtcataacttacccagatatgtttttctatcatttgaaacctttttagctactgtttgttttcattcaactaacaaacatattccaataataaaagcagtatatacatatttcctttcta

SEQ ID NO: 20311 - DNA, 2908 bp, Homo sapiens
aaactgtgagctttatttcatgttatttttggtggatgttgacttagttcatgaatgttgtcacttctaaatgtggacagttgggctgcaggatgcaactcaacctcttttggatcctagagacccctgccaagcccccatcagtcctatttttaaatgaagacatcgccatttctagaagacctgagattttcttccctctgtgcttcgatgtattttaacctcaacattttgaaacggaaaatgcaaggaggggccaagaaatgtcctggggatttgatgccaggaagtacctggtaaggattggagattgctccagaatctactgcatgtcccaatttgcagtttgctcactagggctatatacaaaagctatacccttgagggtttttttttttttcttttgatttcctcaggaccttagagggaaaacaaacagtagcagctaatattctcaagtatattgctgcttagaaagatcctcaggaacaattagcagcaataagcaagcctttgaaaagatctgaattctttttcctgaaatatttacgatacacaggtgctttttatctgaaatctgttgtgtcctccttttaggcagtctctgtgggcagagagtgggacttgcgaggtggacagctgtggggatcctgggcaagggagtttcagaaggtgtggctcaggggctggtagaaacccccttttgttaggacttgttttttaaaaaagaaagccctaggccaggcgcagtggctgatgcctgtaatcccagcgctttgggaggccgaggagtatggatcacctgaggtcaggagttcaagaccagcctggccaacatggtgaaacccccgtctctactaaaaatacaaaaattagtcaggcatggtggtgggtgcctgtagtccagctactcaggaggctgaggcaggagaattgcttgaacctgggaggtggaggttgcggtgagccgagatcacgccactgcactccagcctaggcaacagagcaagacttcatcttaaaaaaaaaaaaaaaaagcccagcattttgcagctttgaagctgctggggatcacgactgtctctgtggcccttacctggccacagatgtaccctggcaacccgctcacagtgccctgcgtgcaggtttatagataacccctgccagacctgctacaaccaagaccttatggtccaggtctcagtttggagaagatttagctgtctaccacttcttgtgtagtgttcctgtgaagttttatttttggttgcaagtatctggaaaacagatgcagatgtttttgtggatgttgttgagacttttgagacttctgtttctaaggtacacatgatgggacccaaactctcctggagagttccattcacttcctgaaacgtgcacctgtttcaggtgcatgtttattcagtgtgcatggatatttaagatttgctggagcaggctgggcggggtggctcacccctgtgatcccaaggtgctgggattacaggcgtgagccaccgcgctgggcctagatcaaatctttatccatgcacattggaacacaggattactgggttgaaatcattctagttttgtcatttagatacttgtagatgaatctattttagcacaaggtataaataactcgggaggtcatctctatcttctttccttttgtgcatttggctataccacgtttaggtactaaaacagctttgcttatgttggccaggggaaaacatggcattctgtgcgcaaagctaatgatcgccagccctgccttggcccctcccttgtttatggtcattgtaagatgcccgcatgttaaggcttaagctgtcactgggctgggtgtaatacccgcttcattcctcctcccaccctcttacccgaaacatgaagggcactgtgctctattgagatctcgataagatcatcattttaacttgtattcaactgagggaggtaacatgatatctgggtgctggtggattgagacctcaagcatcaattcaaaattgctgtcgaaaatatgcactattttttttttccactctggctaagtgtaggctctgaagccagttttatagcttgatacattctggtgaaagatgtcttcatttttaatgaaagaacctacagttagtaggtgtcacctcagggtagaaattctgatagaaattctgattatttgaaactctgatagaaatcctagatgctagatttgaagaaaacctgggttttattgcatagatttcaccttttctggggcacatcttaccccaaaataattggggatttttttgttccttctccattccatggaaccttgtagggtgttgggattgggcctcccctcgccacccgccacatgtctttgtttttttctctcttttgtatgtggaaaaatgtatttttgtaccatatctcatacctggagagaaaccttttttctatcttcagggctgtagaatatattagcgtaacacttcactgaatgtgacgtaaaagcattctgatgaaaactggttctgttataattaagactcagtgtttaaaatatcttaatcagtgttaatttcccagtgtttcagtatcacagtaaatacttgttttactgagaacagaaaataatccagaaaaggaaaaggaccagccctctctagattgctggaattgtatggatgtgttggggttggtttagtgatctcttccttgacaccctagcaaagatgcttttgtggagtgcaaacctttcataaatatactttccaggctgggtgcagtggctcaagcttgtaatcccagcactttgggaggccaaggcgggtggatcacttgcggtcgggagttcgagaccagcctggccaacatagtgaaatcccgtctctacaaaaatacaaaaaaa

SEQ ID NO: 20312 - DNA, 835 bp, Homo sapiens
cggtcgatctaaggatccccctgatattctggtgaaagatgtcttcatttttaatgaaagaacctacagttagtaggtgtcacctcagggtagaaattctgatagaaattctgattatttgaaactctgatagaaatcctagatgctagatttgaagaaaacctgggttttattgcatagatttcaccttttctggggcacatcttaccccaaaataattggggatttttttgttccttctccattccatggaaccttgtagggtgttgggattgggcctcccctcgccacccgccacatgtctttgtttttttctctcttttgtatgtggaaaaatgtatttttgtaccatatctcatacctggagagaaaccttttttctatcttcagggctgtagaatatattagcgtaacacttcactgaatgtgacgtaaaagcattctgatgaaaactggttctgttataattaagactcagtgtttaaaatatcttaatcagtgttaatttcccagtgtttcagtatcacagtaaatacttgttttactgagaacagaaaataatccagaaaaggaaaaggaccagccctctctagattgctggaattgtatggatgtgttggggttggtttagtgatctcttccttgacaccctagcaaagatgcttttgtggagtgcaaacctttcataaatatactttccaggctgggtgcagtggctcaagcttgtaatcccagcactttgggaggccaaggcgggtggatcacttgcggtcgggagttcgagaccagcctggccaacatagtgaaatcccgtctctacaaaaatacaaaaaaa

SEQ ID NO: 20313 - DNA, 541 bp, Homo sapiens
ttgctagaggatccccagtacacctccacaaactaggaaaaatgtatttttgtaccatatctcatacctggagagaaaccttttttctatcttcagggctgtagaatatattagcgtaacacttcactgaatgtgacgtaaaagcattctgatgaaaactggttctgttataattaagactcagtgtttaaaatatcttaatcagtgttaatttcccagtgtttcagtatcacagtaaatacttgttttactgagaacagaaaataatccagaaaaggaaaaggaccagccctctctagattgctggaattgtatggatgtgttggggttggtttagtgatctcttccttgacaccctagcaaagatgcttttgtggagtgcaaacctttcataaatatactttccaggctgggtgcagtggctcaagcttgtaatcccagcactttgggaggccaaggcgggtggatcacttgcggtcgggagttcgagaccagcctggccaacatagtgaaatcccgtctctacaaaaatacaaaaaaa

SEQ ID NO: 20314 - DNA, 1625 bp, Homo sapiens
gcagtggcaccatctcggctcactgcaagctccgcctcctgggttcacgccattctcctacctcagcctcccaagtagccgggactacaggcgcccaccatcatgcccggctaattttttatatttttagtagagacggggtttcaccgtgttggccaggatggtctcgatctcctgacctcgtgatccgcccgcctcggcctcccaaagtgctgggattacaggcgtgagccaccgcgctgggcctagatcaaatctttatccatgcacattggaacacaggattactgggttgaaatcattctagttttgtcatttagatacttgtagatgaatctattttagcacaaggtataaataactcgggaggtcatctctatcttctttccttttgtgcatttggctataccacgtttaggtactaaaacagctttgcttatgttggccaggggaaaacatggcattctgtgcgcaaagctaatgatcgccagccctgccttggcccctcccttgtttatggtcattgtaagatgcccgcatgttaaggcttaagctgtcactgggctgggtgtaatacccgcttcattcctcctcccaccctcttacccgaaacatgaagggcactgtgctctattgagatctcgataagatcatcattttaacttgtattcaactgagggaggtaacatgatatctgggtgctggtggattgagacctcaagcatcaattcaaaattgctgtcgaaaatatgcactattttttttttccactctggctaagtgtaggctctgaagccagttttatagcttgatacattctggtgaaagatgtcttcatttttaatgaaagaacctacagttagtaggtgtcacctcagggtagaaattctgatagaaattctgattatttgaaactctgatagaaatcctagatgctagatttgaagaaaacctgggttttattgcatagatttcaccttttctggggcacatcttaccccaaaataattggggatttttttgttccttctccattccatggaaccttgtagggtgttgggattgggcctcccctcgccacccgccacatgtctttgtttttttctctcttttgtatgtggaaaaatgtatttttgtaccatatctcatacctggagagaaaccttttttctatcttcagggctgtagaatatattagcgtaacacttcactgaatgtgacgtaaaagcattctgatgaaaactggttctgttataattaagactcagtgtttaaaatatcttaatcagtgttaatttcccagtgtttcagtatcacagtaaatacttgttttactgagaacagaaaataatccagaaaaggaaaaggaccagccctctctagattgctggaattgtatggatgtgttggggttggtttagtgatctcttccttgacaccctagcaaagatgcttttgtggagtgcaaacctttcataaatatactttccaggctgggtgcagtggctcaagcttgtaatcccagcactttgggaggccaaggcgggtggatcacttgcggtcgggagttcgagaccagcctggccaacatagtgaaatcccgtctctacaaaaatacaaaaaaa

SEQ ID NO: 20315 - DNA, 2417 bp, Homo sapiens
acagaagggacctgatagtgcgggttctggcccagaaggcctcaggggtggctgtgtagcaagatgagggaggtttggagccctgcataaagagaaggacgggaccacagctgactgctgtgtccccacagatctgggcctcctgctgccaccatggccaaaggtggagaagccctgccacagggcagcccagcaccagtccaggatccccacctcatcaaggtgacagtgaagacgcccaaagacaaggaggatttctcagttacagacacatgcactatccagcagctgaaggaagagatatctcagcgctttaaggcccaccccgatcagcttgttctaatctttgctggcaaaatcctcaaggatcctgactcactggcacagtgtggagtgcgagatggcctcactgtccacctggtcatcaagaggcagcaccgtgccatgggcaatgagtgcccagctgcctctgtccctacccagggcccaagtcctggatcactccctcagccaagctccatttacccagcagatgggccccctgcctttagcttaggtctcctcacaggcctcagtaggctgggcttggcctatcgtggcttccctgaccagccaagctccctgatgcggcagcatgtgtctgtgcctgagtttgtgactcagctcattgatgaccccttcatcccgggtctgctgtccaacacaggcctagtacgccagctggttcttgacaacccccatatgcagcagctgatccagcacaaccctgagattgggcatattcttaacaacccggaaattatgcggcagacactggagtttttacgtaaccctgccatgatgcaggagatgatacgtagccaggaccgggtgctcagtaacttggagagcattcctggtggctacaatgtgctttgcactatgtacacagatattatggacccaatgcttaacgcagtccaggagcagtttggcggcaatccctttgccactgccactactgataatgccaccaccaccaccagccaaccttcaaggatggagaattgtgaccctctccccaacccctggacttctacacatggaggctcaggtagcaggcaaggaaggcaggatggggatcaggatgcacctgacattagaaataggtttccaaactttctgggtattataaggctctatgactatctccagcaattacacgagaacccccagtccctaggaacttatctacaggggactgcatctgccctcagccaaagccaggaaccaccaccatcagtaaacagagttcccccatcgtcaccctcatctcaggagcctgggtcaggccagcctctccccgaggagtcagtagcaatcaagggaaggtcctcctgcccagctttcctgagataccccacagagaacagtactggacaaggtggagaccaagatggtgcagggaaaagctctactggacatagcacaaacttgcctgatcttgtctcggggctgggagattctgccaacagggttccatttgctcccttatctttttcccccacggcagccattcctggaatccctgagcctccctggctgccatccccggcttatccaagatctctgaggccagatggcatgaatccagctccacagttacaggatgagatacaaccacagctgccactgctgatgcaccttcaggcagccatggcaaacccccgtgccctgcaagccctgcggcagattgagcagggtctacaggtcctagctactgaagcacctcgcctcctactctggttcatgccttgcctagcagggacgggtagtgtggcaggaggtatagagtctagagaagatccccttatgtctgaggatcctctcccaaatccacctcctgaggtgttcccagcactggactctgcagagctgggcttcctttcccctccctttctccatatgctgcaagatttagttagtacaaatccccagcagctgcagcctgaggctcactttcaggtgcagctggagcaactgcggtccatgggctttctgaatcgtgaagccaatcttcaggccctcattgctacggggggcgacgtggatgctgctgtggagaagctgagacagtcgtaggagccttattcattcaaaccatacgttttcctctgtgcctttttcccatatcctagttccctagctctcccatttttgaatacagctgcattataaaccaaatttactatgaagtcctttgctgtggaggcaatgttgttccagagtcaacgaggaagactaatggccaaaacatagtggaggtgctgtgtgtgagtcaaccacttgtaccactataccactggggggccccagtctaagctctgcttatgcctatcttgagatgcaattacacccaatttccaatgtgaaaaaat

SEQ ID NO: 20316 - DNA, 2450 bp, Homo sapiens
acagaagggacctgatagtgcgggttctggcccagaaggcctcaggggtggctgtgtagcaagatgagggaggtttggagccctgcataaagagaaggacgggaccacagctgactggatgatcttggtctccaatccccatgcccctagctgtgtccccacagatctgggcctcctgctgccaccatggccaaaggtggagaagccctgccacagggcagcccagcaccagtccaggatccccacctcatcaaggtgacagtgaagacgcccaaagacaaggaggatttctcagttacagacacatgcactatccagcagctgaaggaagagatatctcagcgctttaaggcccaccccgatcagcttgttctaatctttgctggcaaaatcctcaaggatcctgactcactggcacagtgtggagtgcgagatggcctcactgtccacctggtcatcaagaggcagcaccgtgccatgggcaatgagtgcccagctgcctctgtccctacccagggcccaagtcctggatcactccctcagccaagctccatttacccagcagatgggccccctgcctttagcttaggtctcctcacaggcctcagtaggctgggcttggcctatcgtggcttccctgaccagccaagctccctgatgcggcagcatgtgtctgtgcctgagtttgtgactcagctcattgatgaccccttcatcccgggtctgctgtccaacacaggcctagtacgccagctggttcttgacaacccccatatgcagcagctgatccagcacaaccctgagattgggcatattcttaacaacccggaaattatgcggcagacactggagtttttacgtaaccctgccatgatgcaggagatgatacgtagccaggaccgggtgctcagtaacttggagagcattcctggtggctacaatgtgctttgcactatgtacacagatattatggacccaatgcttaacgcagtccaggagcagtttggcggcaatccctttgccactgccactactgataatgccaccaccaccaccagccaaccttcaaggatggagaattgtgaccctctccccaacccctggacttctacacatggaggctcaggtagcaggcaaggaaggcaggatggggatcaggatgcacctgacattagaaataggtttccaaactttctgggtattataaggctctatgactatctccagcaattacacgagaacccccagtccctaggaacttatctacaggggactgcatctgccctcagccaaagccaggaaccaccaccatcagtaaacagagttcccccatcgtcaccctcatctcaggagcctgggtcaggccagcctctccccgaggagtcagtagcaatcaagggaaggtcctcctgcccagctttcctgagataccccacagagaacagtactggacaaggtggagaccaagatggtgcagggaaaagctctactggacatagcacaaacttgcctgatcttgtctcggggctgggagattctgccaacagggttccatttgctcccttatctttttcccccacggcagccattcctggaatccctgagcctccctggctgccatccccggcttatccaagatctctgaggccagatggcatgaatccagctccacagttacaggatgagatacaaccacagctgccactgctgatgcaccttcaggcagccatggcaaacccccgtgccctgcaagccctgcggcagattgagcagggtctacaggtcctagctactgaagcacctcgcctcctactctggttcatgccttgcctagcagggacgggtagtgtggcaggaggtatagagtctagagaagatccccttatgtctgaggatcctctcccaaatccacctcctgaggtgttcccagcactggactctgcagagctgggcttcctttcccctccctttctccatatgctgcaagatttagttagtacaaatccccagcagctgcagcctgaggctcactttcaggtgcagctggagcaactgcggtccatgggctttctgaatcgtgaagccaatcttcaggccctcattgctacggggggcgacgtggatgctgctgtggagaagctgagacagtcgtaggagccttattcattcaaaccatacgttttcctctgtgcctttttcccatatcctagttccctagctctcccatttttgaatacagctgcattataaaccaaatttactatgaagtcctttgctgtggaggcaatgttgttccagagtcaacgaggaagactaatggccaaaacatagtggaggtgctgtgtgtgagtcaaccacttgtaccactataccactggggggccccagtctaagctctgcttatgcctatcttgagatgcaattacacccaatttccaatgtgaaaaaat

SEQ ID NO: 20317 - DNA, 408 bp, Homo sapiens
gaggcaagggtcccccattttacacagaagagaaacagattcacagttgcctaagatcacatagctggccaggaacagaacgtggttcaaacacaggcctctctctagccagagcccaatgctctgtttaccatgcaactgaaacggcttgagtctccatccaaaatcattgagggctttaacgttgtagggagcctgttaaaggtttccattcttacctgccccactccctggtgcccagttttataagggcagtgaacggtgatggtcatttttgctctcgctttgaaatcaagtgagcttggctgagggcctggctatcccagacctttagagcaggaagtgcctgcacccttggctacctaagaagaaagtgggttccctataggtatgggctggggcttcaca

SEQ ID NO: 20318 - DNA, 371 bp, Homo sapiens
atctcaaaccaaccataggatccttccccaaattctttccctgctgtttatcttttgatattgcaagagctctgatgggtcccttgtgtagtggtatcttttggcaaaagtggtttcctcaggttgagttgagctctggctcttcaaagttaattagaaccacaccacacagtatctcgagtatgctgatagaaaatgcctgtggtgtgatgttaacgagagacaattaaatttctctttgttctcttcagaagacaattacatttctcatcttttatttgcataccagccactcaataaaaaccagcctacagcctagtaaaaaaaaggccaagaatgggccttgcccacagctgcagctaccacccact

SEQ ID NO: 20319 - DNA, 305 bp, Homo sapiens
tttttttttaagagatgaggtctcactatgttgcccaggctggtctcaaactcctgggctcaaaccatcctcccacttcagcctcccaaagggagcagcattcctcatctacttaatttcttatgagcaagcaattggaactgctcctttcctttttcataaggagctgtgtcccttgagggaaggccacaggtgctgggaccctacagcctgggattcagaatctcaggccctcacttaccagctgtgtgggctgggtaaagttactctgtctgagccttggttttctcacctggaaaataggg

SEQ ID NO: 20320 - DNA, 213 bp, Homo sapiens
ttatataaaatatgtagagagctagattcttcactttggggattagactcttaagaatatgggagttgaggccgggtgcagtggcttgtgcctgtaatcccagcactttgggaggccaagatggcaggattgcttgagcccaggagttcaagaccagcctggccaacatagcaagacccccatctctataaaaaaattaaaaattttttcata

SEQ ID NO: 20321 - DNA, 376 bp, Homo sapiens
aactgcttgagcccaggagtttgagaccagccagggaaacatagtgagacctcatctcaatttattattatttttaaagcttatttctgaaaacatatacacatacttctaaactagtccctagaccatcatgtcttgacagaaatactgtggaagggggttaaggaaaagaactcagatgtacactcaagacacaggatggagagaaggaaaaatgtctttttgctggttaactagctcaaatgctccaaatcaaatatacatgctaaatttaaaaaagagaaagaaaagaaaaatcaggtactctgaaatgtctttcatccacattcattttccttagaactacatcaaatctttaaaaagttttatgagattc

SEQ ID NO: 20322 - DNA, 278 bp, Homo sapiens
aaggagtgaatgttttcctgcactctcacccttccaggacttaatttttttaatttctatttaaaatgatacagaagttggccaggtgcggtggctcacacctgtaatcccagcactttgggagcctgaggtgggcggatcatgaggtcaggagttcaagaccagcctggccaacacagtgaaacctcgtctgtactaaaaatacaaaaattagccagatgtggtagtgggcgcctgtagtcccaactacctgggagactgaggtaggagaatccctt

SEQ ID NO: 20323 - DNA, 602 bp, Homo sapiens
aaaacaaagaaaattgccaatgggctgtcattttgtttaaaaaaaaaatttttttttttttttgacttggcactggcccctgctgccttctggagaagtcatcaaattcagtgggaagaaatgtcaaacatatttactgtgtgtcttttgccagccatagaaacttaaaaatttaaacttactccattgattgaagtgaattatgaagcttagctttcctatgtggaaagtgtggaaaaggattggaattaagtatatgtaagactttctttgctttagagttatagctggtatctcagttaaaataagcataattaaggcggggggtggtggctcatgcctgtaatcccagcactttgggaggccaaggtgggcggatcacctgaggtcaagagcttgagaccattctggccaacgtggtgaaaccccttctctactaaaattacaaaaattagctaggcatggtggtgtgtgcctgtactcctaactactcaggaggctgaggcaggagaatggcttgaacccaggaggcggaggttgcagtgagccgagattgtgccactgcactccagcctggcgacagagcaaaactccatctcaaa

SEQ ID NO: 20324 - DNA, 375 bp, Homo sapiens
ccttctctactaaaaataccaaaatcagccaggtatgatggcacatgcctgtagtcccagctactcctgaggaggaggaacgagaattgcttgaacctgggagacagtgagctgagatcgtaccactgcactccagcctgggcgacagagcgagactctgtctccaaaaactcccaaacacctcattttaatactttcatattaattccgtgattcttaaccctgacccacactttagaatccctggggagttctttaaaaaagctactgattatattggccccaccctaaagtaactggatcaggatatggacagagttggaaatcgctgcgtcgggattgcttttgtagtaggatggcagctgccttttatgg

SEQ ID NO: 20325 - DNA, 433 bp, Homo sapiens
tgtaagccccacaatctgggaaaaaatatttacaaaagacttataaaggtctgttatccaaactataaaagaactttaaggaatgcaaacaacaaatttaaaaaatgagccaaagaccttaacagacaccttaccaaaaatgtatagatggcaaataagcatatgaaaagatgttctatatcatatgccatcaaggaaatgcaaattaaacaacagtgatatacccctacacacccattagatgaccaaaatccagaacactggcaccaccaaatgctggagaagatgtggagcaacaggaatgctcattcgttgccagtgggaatgcaaaatggtacagccactttggaaaacagtttggcgattttatacaacattaaatatgctcttactatatgattccacaatcatgctatttaatatttacccaaag

SEQ ID NO: 20326 - DNA, 732 bp, Homo sapiens
gtgagaccatggacatggctgtgactgttaagggaaagaagaatgacagaagggcctaaggctgcttggtgggacatcaacatttaatggccagatacaggagaataagccagccaaaaaaaaaaaaaaattgagagtggtaggaggaaaatgaagaactgtcacgaaccattaagcaagaggaaagagcgtctcaagagtaagaagtcactccctgcaggttgatgtgtagttggggggttggggaggacatggattatgggtactactcagcaggccagtttttactccacctctttctagctgacttgacacaagcaacaacccaacagaaaaccaatacttctgagaatggctgcaagtttgtttgtgctgtcttttgaggtaagaaatcaaggctgagctcttctttctcctaattctcaggaaggaggaaggcagatgtgagaacactgattgggtctgagtgtactgggcagcatcactgttaaaaggtcagcacacagatgcaagctcacttgtctgcttctttcatgtgactgaagtggttaagaaggttgtcaactcccccctgcacccccctcaccaccgcagtaagggagagacagggccaaacctgcagcttcggtagaagaggccaaggcaggtgtccaaggccagatcagcagtcagccagggcaaatgggctcactctggttacatgacctcgagcaactgacagaaaggagtgaa

SEQ ID NO: 20327 - DNA, 510 bp, Homo sapiens
tatgcagaaactcatttcactacatcctcatatcatgactctgtttactcccatccccagggcctaagcaaggccctgtaaagcgtcgtcttcagcccccacattcactgctgctcggaaacagcactgctgcactacctttttggaagtgggatctcccacaaatgctgatttctgaggagactccctttgacagctcttgactggtgcccttcaagcagtatgggagccagctaacagtgtggaggtcactggcaccaagctgttctgatgagagtagaacacctgggaaaattttcttctgtccatttcagatgggtggtgtttttccaatgacagaagaaaagtatgtaaaaaatacttaaacccttccctacacttaataggtatggtagtagactcctttgggctcactcattgttcttgcttctcagtaagtgacaatgattaaatatcattcatttttcagtgttaactgtgtaaaattaataactaatgaccaaaaaaaaa

SEQ ID NO: 20328 - DNA, 355 bp, Homo sapiens
ggacctctgcgttctgggccaggccttgggaggattccgctctgtcctccttccatgtctggtctggatgccagactaaatgtcagtagatttcagtaaaggctcagcgttgatgataatgcatgagctcataacattttataaccagtggaaccgtaaaccatttataaacatgaaatcctattgatttagagaaccattaatcctagacaaattttgacattttggaaagacagaaacagccaagctatattatctggagttttaaaacaagttcaggacccatctaatgggccatttcatgttttaaatccactgttccatttttctcattgtcagtgactctaatattact

SEQ ID NO: 20329 - DNA, 1051 bp, Homo sapiens
ctggtgttgaactcctaacctcaggtgatccacccaccttggcctcccaaagtgctgggattacaggcgtgagccactgcgcccggccagattttgtgtatttcttatagccctttacttcactgcgccactgcctggtgtagacatcacatatcggagctaatacacgacactggcaacaaggctgaatccttgaactgttgtcgcctgttgagaaaggattccttttccggaacagaagtgcagaggaggagagagcggagagttaaaagctggcacccaggcatgtgcctgtctgagaaatcagagccgtgctcctgagcctcggtggggtgagaacgacagggccgacctcccagctgcaaacacaaggacactgagatgcacagaaaggagagtccacgttgaagaaacccacgttgaggggcctcttctccctccgttcccagctcggtgatggtgaagggtaaggaaatggatcctcccattgcaacattaaaccaggccaaacctgtatttttctcttccttcctttttcttgttttgtaattgatgtctcctcgggactactgataatgtcctagaaagaataaaataaagtttcccaaggctttgtgactcagagctctttggaggtgttcaccgaatgcacgggccgcccggaggccttggccctccagggaaacaccaccagaagtccccagaagcggaacatgtagcaaggaggctccccgagatctcccagagggagcacagccctgccaagttattggttttggacttccggcttccagagctacgagaaaataaatatttgttatttaagtcaccaggtttgtggcgattgttacggcagcctcaggaaactcctacaaggaagtgagttacgctcacggcagaaagtgctacagcaaaccaaggcagaacaaaaacagacgaaacctaatacagaccggactaagtagaagactgtgtgtttgggtggtgaatatacaaaaaacataaatataaattaaaccttagagaaactttgtcattttcttgtcatgtt

SEQ ID NO: 20330 - DNA, 450 bp, Homo sapiens
cacctgggcacggcagccacggggacaaagtccacggggaggcaggggtgtggtctgtgggcagaaggtgaaccctgaggggacagtgtctggagagggtggccagcctcgtgcaggcacgctgcaaagacctgtgcacccttctctctgctgtgccacaggtggggtgagaacgacagggccgacctcccagctgcaaacacaaggacactgagatgcacagaaaggagagtccacgttgaagaaacccacgttgaggggcctcttctccctccgttcccagctcggtgatggtgaagggtaaggaaatggatcctcccattgcaacattaaaccaggccaaacctgtatttttctcttccttcctttttcttgttttgtaattgatgtctcctcgggactactgataatgtcctagaaagaataaaataaagtttcccaaggctttgt

SEQ ID NO: 20331 - DNA, 515 bp, Homo sapiens
atgaaatcatatcctttacagcaacatggatgcagctggagaccattatcataagcaaattaatgcaggaacagaaaactgaatcctgcacgtactcacttataagtgggagataaacattgagtacacgtggatacaaaaaggggaacaatagacactggggtttactagagggtggagggtgggagattggaaaactacctactgggcaccatgcttactacctgggtgacaaaatgatttctacaccaaaccccagtgacatgcaatttacccatgtaacaaacctgaacatgtaccctctgaaatgagaaaagttggaaggaaaaaataaaagaaattaaggttactaagagtatactaattctatatacagagtgtataaggaaaagcaagggctgggtgtggtggctcatgcctgtaatcccagcactttgggaggctgaagtgggaggattgcttgagcccagaaattcaagaccagcctgagcaacatggcaaaaacctgtctctac

SEQ ID NO: 20332 - DNA, 2107 bp, Homo sapiens
gaaaagcacgaactccgagccatccgcctctcacgagaggactgtggctgtgactgccgagtgttctgtgatccagacacgtgcacctgcagcctggctggcattaagtgccaggtggatcgtatgtctttcccatgcggctgcactaaagaaggatgtagtaacacagcaggtagaattgaatttaatcctatccgtgttcggactcactttttgcacacaataatgaaacttgaactggagaaaaaccgagagcagcaaatccccacgctgaatggctgccacagtgagataagtgctcacagtagttctatgggccctgtcgctcactccgtagaatattcaatcgcagacagttttgagattgaaactgagccccaggctgcagtgctgcacctgcagtcggctgaagaattagattgccaaggagaggaggaggaagaagaggaggatgggagcagcttttgcagcggagtcacagattctagcacgcaaagcttggcacctagtgagtcagacgaggaggaggaggaagaagaagaggaagaggaggaggaggatgacgatgatgacaaaggagatggcttcgtggaaggtttgggcacccatgccgaagttgtccctcttccttcagttctttgttattctgatggcaccgccgttcacgaaagccatgcaaagaatgcttctttttatgccaactcttcaactctgtattaccaaatagatagccacattccaggaactccaaatcagatctctgagaactattctgaaagagacactgtcaaaaatggtaccctttcgctggtgccttacactatgaccccggagcaattcgttgactatgcccgacaagcagaagaggcctatggtgcctcccactacccagctgccaacccctctgtaatcgtttgctgctcctcttccgaaaatgatagcggtgtgccctgcaatagtttatatcctgaacacaggtccaatcaccctcaagtggaatttcactcatacttgaaaggcccctcccaagaagggtttgtctctgcattgaatggtgacagtcacatttcagagcatcctgctgaaaattctttgagccttgcagaaaagagcatattgcatgaagagtgcatcaaatcacccgtggttgagacagtccctgtttagtagcttaaattattctaggaccaactcttctcttatttaaggcactgtatttaattggatttcctgggctcatcattgtttaaactgaagaccaagaaaacttggacggtggttaatcttccagactgtattttgttttttcctttctagccacatgactgtggcattgcacaaatacagtctctgtagggattttaaaagatttcagactgttttgatagaaaaagctaaattttaaaatgcatatctcacagttgcctacctgtcaaactgtgtgaaacctgccaatctgtgtagatcagagctccaaattttggattatcgggcctgtgcaagattgttaactaaggctgggaaataataagatttagagtcctaattttcaatatatctgaagataatgatgactttttaatgtaaaagtaattattgtaagaaaaagatttaattgttccatgtgtattttatttatggtagtttagaagacatgttttgatgaaaatgaacagcctcatgttcattcaagctgaagatgcatagctagttccacagagcatgcccacatggattgcatctggaatccattcacatttttatgatcatgactgatcagatttgcaaattcttaagggtgaaataggcctatttttgctattttggacaaataaatgattctatatgtgcaggtccttacacagttttctctaaagttaagagttaggacaatcctctggggagagtctagttcactgccctccctcagctgactccagagatggaggtagaaggaattgcctttcttttttaaacagcatcatcttgattcttagcttggacagcacctttaagctctaccccctacatcaaaatgtactttagtgccccttcacggtacctcgtgtggggtggggactgagaactctttgagatgaaaaaattt

SEQ ID NO: 20333 - DNA, 206 bp, Homo sapiens
taagaatacaatgcaacaaaatattcatatattgcacaaacagtgatgtgcatacaaagatgctaacaacattggctggtaataggctttaccatgttatcatctttgtatgcacatcactgtttgtgcaatatatgaatattttgttgcattgtattcttatataaaaataagtagaaaacataaaattgaaattgctgatgaga

SEQ ID NO: 20334 - DNA, 3861 bp, Homo sapiens
cacgagggcgaatcctgtggaattcatgtgtcaggcctttaaaattgtgccctacaacacagagacccttgataaactgctaaccgaatccctgaagaacaatatccctgcaagcggactgcacctctttggaatcaaccagctggaagaagaagatatgatgacaaatcagagggatgaagagctgcccaccctgttgcattttgctgcgaagtatggactgaagaacctcactgccttgttgctcacctgcccaggagccctgcaggcgtacagcgtggccaacaagcatggccactaccccaacaccatcgctgagaaacacggcttcagggacctgcggcagttcatcgacgagtatgtggaaacggtggacatgctcaagagtcacattaaagaggaactgatgcacggggaggaggctgatgctgtgtacgagtccatggcccacctttccacagacctgcttatgaaatgctcgctcaaccccggctgtgacgaggatctctatgagtccatggctgcctttgtcccagctgccactgaagacctctatgttgaaatgcttcaggccagtacatctaacccaatccctggagatggtttctctcgggccactaaggactctatgatccgcaagtttttagaaggcaacagcatgggaatgaccaatctggagagagatcagtgccatcttggtcaggaagaagatgtttatcacacggtggatgacgatgaggccttttctgtggacttggccagcaggccccctgtcccagtgcccagaccagagaccactgctcctggtgctcaccagctgcctgacaacgaaccatacatttttaaagtttttgcagaaaaaagtcaagagcggcctgggaatttctacgtttcctcagagagcatcaggaaagggccgcccgtcagaccatggagggacaggccccagtcgagtatatatgacccttttgcgggaatgaaaacgccaggccagcggcagcttatcaccctccaggagcaggtgaagctgggcattgtcaacgtggatgaggctgtgctccacttcaaagagtggcagctcaaccagaagaaacgatcggagtcctttcgtttccagcaggaaaatcttaaacggctaagagacagcatcacccgaagacagagagagaagcaaaaatcaggaaagcagacagacttggagatcacggtcccaattcggcactcacagcacctgcctgcaaaagtggagtttggagtctatgagagtggccccaggaaaagtgtcattccccctaggacggagctgagacgaggagactggaaaacagacagcacctccagcacagcaagtagcacaagtaaccgctccagcacccggagcctcctcagtgtgagcagcgggatggaaggggacaacgaggataatgaagtccctgaggttaccagaagtcgcagtccaggccccccacaagtggatgggacacccaccatgtccctcgagagaccccccagggtgcctccgagagctgcctcacagaggcctccgaccagggagaccttccatcctcctccacctgttccacccagaggacgctgattccacctcctaaaacctgcctacttcaggactttaagactcacagtcttcagcctgttaatgatgtcttcatgttgagttttatagcatgactgttgaccttaagatccattctcattgctgataatgctgcagccctgctggtttgggcttgcctcgaagattttattaaggcacgaagaagtgaaaaactaagggcttcattcaccatcaccaagtatatcgaaccatatacttgtttgccaaaaggatgaagacttaatcgaaatacttacctctaatttgccatatcagaagcctaaaaagaatgatcataaatgtacttcaccagtgattttactgaaatgcacttatattagtctttatgtatttgctagttcagcctgatttctagaagaggttatagtgtgagacttgtagtattcaagtaagataagtgacctaattttaaaataattcttctacttttctgtatattcagcagggtatttaagtgctagggctggtcacacacaaccaactgaaaaagactagagggattagtacaaactcctcttatacagaaggcaaatctgaggttccacagaagtctggaaccaagactattcagttggttaaataaagaggttagtctagactgggcctgctcattctaggtcaccacattttccatctccaaatagccaggccctctctccctcaagaaatgcccagatgtagaaattcatcagtgcctattggtcttccagaattttccatcttccgtatctcccaggcatgagactaccaagtttgtttgttttctttccaatttgggaatttatacttcagtatggtttcaacgcagttatgtttccagagaacatctagaagtggctggaaaccagaagctggggattccagggaccccacttagtgctctatttcctttataggttttatttctggtcatagagagagaaggacctttgactttttcttcgttgaggcttctgaggaggaaaaacaaacctaaaatagaaatacagtcagcctttcaaatccatgggttctgtgtccgtggattcaaccaaccttggatcaaaaatatttgaaaaaaaatctacaaagtttcaaaaagcaaaacttgaatttgctgcatgccaagaagtatgttgaattcatgtaaatgaagtgatgtgtaggcattgtattagatattataagaaatctagaaatgatttaaagcatacaggaggatgtgcataggttatatgcaaatactatgctattttatatatgggacttgagcatttgtggattttgatactgggggatcctggaaccaatcccccatggataccaaagtacgactgtagttatctattttttacatacttattattaccaccatgctcagtaagtccatttttgcatggaatatggagccttaaaacatgtcatgaatttggagtccctggcacataaatctaccttcaaatcagaggtccttaatgatgcctaaacatacagtaaaattagaatcagaaatacttctttaaaaaatattcaaaatgtgtttgtttcccatgggattattctctatcccacacgaatgtaaaaaaatccacattaatgatccatttaagtatagttttattgggtccttttctaatgattaaaggttctttctcaatttcattcctcagtcctgcaagtaaggactcatactgaagagtactgaaacaaggacttcttgtcagaaacagcttctggaatcttgggttttgtttttgttttttgacaaaatacactattggccatgtccatcacgagagtgtttgtagtaattaattaccttgtacaggacctggcacttagtagcattcttcaaatgttccctcagtgatccttttactctccttgtcacttatttgggagaaataggggcacgtgagataagaagaagaataattttgatgttggtatgcttgccctgttacttatagacagtctttgtcataggcaaacttgaatttgatttaaaatagggctgggaaaaatattcaataactgtaagcccccttttggatgccaaacttagaattttgtacattctctgatgaacaagcatttagatcataacatggtaaagcctattaccagccaatgttgttagcatctttgtatgcacatcactgtttgtgcaatatatgaatattttgttgcattgtattcttatataaaaataagtagaaaacataaaattgaaattgctgatgaga

SEQ ID NO: 20335 - DNA, 3807 bp, Homo sapiens
cacgagggcgaatcctgtggaattcatgtgtcaggcctttaaaattgtgccctacaacacagagacccttgataaactgctaaccgaatccctgaagaacaatatccctgcaagcggactgcacctctttggaatcaaccagctggaagaagaagatatgatgacaaatcagagggatgaagagctgcccaccctgttgcattttgctgcgaagtatggactgaagaacctcactgccttgttgctcacctgcccaggagccctgcaggcgtacagcgtggccaacaagcatggccactaccccaacaccatcgctgagaaacacggcttcagggacctgcggcagttcatcgacgagtatgtggaaacggtggacatgctcaagagtcacattaaagaggaactgatgcacggggaggaggctgatgctgtgtacgagtccatggcccacctttccacagacctgcttatgaaatgctcgctcaaccccggctgtgacgaggatctctatgagtccatggctgcctttgtcccagctgccactgaagacctctatgttgaaatgcttcaggccagtacatctaacccaatccctggagatggtttctctcgggccactaaggactctatgatccgcaagtttttagaaggcaacagcatgggaatgaccaatctggagagagatcagtgccatcttggtcaggaagaagatgtttatcacacggtggatgacgatgaggccttttctgtggacttggccagcaggccccctgtcccagtgcccagaccagagaccactgctcctggtgctcaccagctgcctgacaacgaaccatacatttttaaagtttttgcagaaaaaagtcaagagcggcctgggaatttctacgtttcctcagagagcatcaggaaagggccgcccgtcagaccatggagggacaggccccagtcgagtatatatgacccttttgcgggaatgaaaacgccaggccagcggcagcttatcaccctccaggagcaggtgaagctgggcattgtcaacgtggatgaggctgtgctccacttcaaagagtggcagctcaaccagaagaaacgatcggagtcctttcgtttccagcaggaaaatcttaaacggctaagagacagcatcacccgaagacagagagagaagcaaaaatcaggaaagcagacagacttggagatcacggtcccaattcggcactcacagcacctgcctgcaaaagtggagtttggagtctatgagagtggccccaggaaaagtgtcattccccctaggacggagctgagacgaggagactggaaaacagacagcacctccagcacagcaagtagcacaagtaaccgctccagcacccggagcctcctcagtgtgagcagcgggatggaaggggacaacgaggataatgaagtccctgaggttaccagaagtcgcagtccaggccccccacaagtggatgggacacccaccatgtccctcgagagaccccccagggtgcctccgagagctgcctcacagaggcctccgaccagggagaccttccatcctcctccacctgttccacccagaggacgctgattccacctcctaaaacctgcctacttcaggactttaagactcacagtcttcagcctgttaatgatgtcttcatgttgagttttatagcatgactgttgaccttaagatccattctcattgctgataatgctgcagccctgctggtttgggcttgcctcgaagattttattaaggcacgaagaagtgaaaaactaagggcttcattcaccatcaccaagtatatcgaaccatatacttgtttgccaaaaggatgaagacttaatcgaaatacttacctctaatttgccatatcagaagcatattagtctttatgtatttgctagttcagcctgatttctagaagaggttatagtgtgagacttgtagtattcaagtaagataagtgacctaattttaaaataattcttctacttttctgtatattcagcagggtatttaagtgctagggctggtcacacacaaccaactgaaaaagactagagggattagtacaaactcctcttatacagaaggcaaatctgaggttccacagaagtctggaaccaagactattcagttggttaaataaagaggttagtctagactgggcctgctcattctaggtcaccacattttccatctccaaatagccaggccctctctccctcaagaaatgcccagatgtagaaattcatcagtgcctattggtcttccagaattttccatcttccgtatctcccaggcatgagactaccaagtttgtttgttttctttccaatttgggaatttatacttcagtatggtttcaacgcagttatgtttccagagaacatctagaagtggctggaaaccagaagctggggattccagggaccccacttagtgctctatttcctttataggttttatttctggtcatagagagagaaggacctttgactttttcttcgttgaggcttctgaggaggaaaaacaaacctaaaatagaaatacagtcagcctttcaaatccatgggttctgtgtccgtggattcaaccaaccttggatcaaaaatatttgaaaaaaaatctacaaagtttcaaaaagcaaaacttgaatttgctgcatgccaagaagtatgttgaattcatgtaaatgaagtgatgtgtaggcattgtattagatattataagaaatctagaaatgatttaaagcatacaggaggatgtgcataggttatatgcaaatactatgctattttatatatgggacttgagcatttgtggattttgatactgggggatcctggaaccaatcccccatggataccaaagtacgactgtagttatctattttttacatacttattattaccaccatgctcagtaagtccatttttgcatggaatatggagccttaaaacatgtcatgaatttggagtccctggcacataaatctaccttcaaatcagaggtccttaatgatgcctaaacatacagtaaaattagaatcagaaatacttctttaaaaaatattcaaaatgtgtttgtttcccatgggattattctctatcccacacgaatgtaaaaaaatccacattaatgatccatttaagtatagttttattgggtccttttctaatgattaaaggttctttctcaatttcattcctcagtcctgcaagtaaggactcatactgaagagtactgaaacaaggacttcttgtcagaaacagcttctggaatcttgggttttgtttttgttttttgacaaaatacactattggccatgtccatcacgagagtgtttgtagtaattaattaccttgtacaggacctggcacttagtagcattcttcaaatgttccctcagtgatccttttactctccttgtcacttatttgggagaaataggggcacgtgagataagaagaagaataattttgatgttggtatgcttgccctgttacttatagacagtctttgtcataggcaaacttgaatttgatttaaaatagggctgggaaaaatattcaataactgtaagcccccttttggatgccaaacttagaattttgtacattctctgatgaacaagcatttagatcataacatggtaaagcctattaccagccaatgttgttagcatctttgtatgcacatcactgtttgtgcaatatatgaatattttgttgcattgtattcttatataaaaataagtagaaaacataaaattgaaattgctgatgaga

SEQ ID NO: 20336 - DNA, 3474 bp, Homo sapiens
cacgagggcgaatcctgtggaattcatgtgtcaggcctttaaaattgtgccctacaacacagagacccttgataaactgctaaccgaatccctgaagaacaatatccctgcaagcggactgcacctctttggaatcaaccagctggaagaagaagatatgatgacaaatcagagggatgaagagctgcccaccctgttgcattttgctgcgaagtatggactgaagaacctcactgccttgttgctcacctgcccaggagccctgcaggcgtacagcgtggccaacaagcatggccactaccccaacaccatcgctgagaaacacggcttcagggacctgcggcagttcatcgacgagtatgtggaaacggtggacatgctcaagagtcacattaaagaggaactgatgcacggggaggaggctgatgctgtgtacgagtccatggcccacctttccacagacctgcttatgaaatgctcgctcaaccccggctgtgacgaggatctctatgagtccatggctgcctttgtcccagctgccactgaagacctctatgttgaaatgcttcaggccagtacatctaacccaatccctggagatggtttctctcgggccactaaggactctatgatccgcaagtttttagaagtcaacgtggatgaggctgtgctccacttcaaagagtggcagctcaaccagaagaaacgatcggagtcctttcgtttccagcaggaaaatcttaaacggctaagagacagcatcacccgaagacagagagagaagcaaaaatcaggaaagcagacagacttggagatcacggtcccaattcggcactcacagcacctgcctgcaaaagtggagtttggagtctatgagagtggccccaggaaaagtgtcattccccctaggacggagctgagacgaggagactggaaaacagacagcacctccagcacagcaagtagcacaagtaaccgctccagcacccggagcctcctcagtgtgagcagcgggatggaaggggacaacgaggataatgaagtccctgaggttaccagaagtcgcagtccaggccccccacaagtggatgggacacccaccatgtccctcgagagaccccccagggtgcctccgagagctgcctcacagaggcctccgaccagggagaccttccatcctcctccacctgttccacccagaggacgctgattccacctcctaaaacctgcctacttcaggactttaagactcacagtcttcagcctgttaatgatgtcttcatgttgagttttatagcatgactgttgaccttaagatccattctcattgctgataatgctgcagccctgctggtttgggcttgcctcgaagattttattaaggcacgaagaagtgaaaaactaagggcttcattcaccatcaccaagtatatcgaaccatatacttgtttgccaaaaggatgaagacttaatcgaaatacttacctctaatttgccatatcagaagcctaaaaagaatgatcataaatgtacttcaccagtgattttactgaaatgcacttatattagtctttatgtatttgctagttcagcctgatttctagaagaggttatagtgtgagacttgtagtattcaagtaagataagtgacctaattttaaaataattcttctacttttctgtatattcagcagggtatttaagtgctagggctggtcacacacaaccaactgaaaaagactagagggattagtacaaactcctcttatacagaaggcaaatctgaggttccacagaagtctggaaccaagactattcagttggttaaataaagaggttagtctagactgggcctgctcattctaggtcaccacattttccatctccaaatagccaggccctctctccctcaagaaatgcccagatgtagaaattcatcagtgcctattggtcttccagaattttccatcttccgtatctcccaggcatgagactaccaagtttgtttgttttctttccaatttgggaatttatacttcagtatggtttcaacgcagttatgtttccagagaacatctagaagtggctggaaaccagaagctggggattccagggaccccacttagtgctctatttcctttataggttttatttctggtcatagagagagaaggacctttgactttttcttcgttgaggcttctgaggaggaaaaacaaacctaaaatagaaatacagtcagcctttcaaatccatgggttctgtgtccgtggattcaaccaaccttggatcaaaaatatttgaaaaaaaatctacaaagtttcaaaaagcaaaacttgaatttgctgcatgccaagaagtatgttgaattcatgtaaatgaagtgatgtgtaggcattgtattagatattataagaaatctagaaatgatttaaagcatacaggaggatgtgcataggttatatgcaaatactatgctattttatatatgggacttgagcatttgtggattttgatactgggggatcctggaaccaatcccccatggataccaaagtacgactgtagttatctattttttacatacttattattaccaccatgctcagtaagtccatttttgcatggaatatggagccttaaaacatgtcatgaatttggagtccctggcacataaatctaccttcaaatcagaggtccttaatgatgcctaaacatacagtaaaattagaatcagaaatacttctttaaaaaatattcaaaatgtgtttgtttcccatgggattattctctatcccacacgaatgtaaaaaaatccacattaatgatccatttaagtatagttttattgggtccttttctaatgattaaaggttctttctcaatttcattcctcagtcctgcaagtaaggactcatactgaagagtactgaaacaaggacttcttgtcagaaacagcttctggaatcttgggttttgtttttgttttttgacaaaatacactattggccatgtccatcacgagagtgtttgtagtaattaattaccttgtacaggacctggcacttagtagcattcttcaaatgttccctcagtgatccttttactctccttgtcacttatttgggagaaataggggcacgtgagataagaagaagaataattttgatgttggtatgcttgccctgttacttatagacagtctttgtcataggcaaacttgaatttgatttaaaatagggctgggaaaaatattcaataactgtaagcccccttttggatgccaaacttagaattttgtacattctctgatgaacaagcatttagatcataacatggtaaagcctattaccagccaatgttgttagcatctttgtatgcacatcactgtttgtgcaatatatgaatattttgttgcattgtattcttatataaaaataagtagaaaacataaaattgaaattgctgatgaga

SEQ ID NO: 20337 - DNA, 3808 bp, Homo sapiens
cacgagggcgaatcctgtggaattcatgtgtcaggcctttaaaattgtgccctacaacacagagacccttgataaactgctaaccgaatccctgaagaacaatatccctgcaagcggactgcacctctttggaatcaaccagctggaagaagaagatatgatgacaaatcagagggatgaagagctgcccaccctgttgcattttgctgcgaagtatggactgaagaacctcactgccttgttgctcacctgcccaggagccctgcaggcgtacagcgtggccaacaagcatggccactaccccaacaccatcgctgagaaacacggcttcagggacctgcggcagttcatcgacgagtatgtggaaacggtggacatgctcaagagtcacattaaagaggaactgatgcacggggaggaggctgatgctgtgtacgagtccatggcccacctttccacagacctgcttatgaaatgctcgctcaaccccggctgtgacgaggatctctatgagtccatggctgcctttgtcccagctgccactgaagacctctatgttgaaatgcttcaggccagtacatctaacccaatccctggagatggtttctctcgggccactaaggactctatgatccgcaagtttttagaaggcaacagcatgggaatgaccaatctggagagagatcagtgccatcttggtcaggaagaagatgtttatcacacggtggatgacgatgaggccttttctgtggacttggccagcaggccccctgtcccagtgcccagaccagagaccactgctcctggtgctcaccagctgcctgacaacgaaccatacatttttaaagtttttgcagaaaaaagtcaagagcggcctgggaatttctacgtttcctcagagagcatcaggaaagggccgcccgtcagaccatggagggacaggccccagtcgagtatatatgacccttttgcgggaatgaaaacgccaggccagcggcagcttatcaccctccaggagcaggtgaagctgggcattgtcaacgtggatgaggctgtgctccacttcaaagagtggcagctcaaccagaagaaacgatcggagtcctttcgtttccagcaggaaaatcttaaacggctaagagacagcatcacccgaagacagagagagaagcaaaaatcaggaaagcagacagacttggagatcacggtcccaattcggcactcacagcacctgcctgcaaaagtggagtttggagtctatgagagtggccccaggaaaagtgtcattccccctaggacggagctgagacgaggagactggaaaacagacagcacctccagcacagcaagtagcacaagtaaccgctccagcacccggagcctcctcagtgtgagcagcgggatggaaggggacaacgaggataatgaagtccctgaggttaccagaagtcgcagtccaggccccccacaagtggatgggacacccaccatgtccctcgagagaccccccagggtgcctccgagagctgcctcacagaggcctccgaccagggagaccttccatcctcctccacctgttccacccagaggacgctgattccacctcctaaaacctgcctacttcaggactttaagactcacagtcttcagcctgttaatgatgtcttcatgttgagttttatagcatgactgttgaccttaagatccattctcattgctgataatgctgcagccctgctggtttgggcttgcctcgaagattttattaaggcacgaagaagtgaaaaactaagggcttcattcaccatcaccaagtatatcgaaccatatacttgtttgccaaaaggatgaagacttaatcgaaatacttacctctaatttgccatatcagaagcctaaaaagaatgatcataaatgtacttcaccagtgattttactgaaatgcacttatattagtctttatgtatttgctagttcagcctgatttctagaagaggttatagtgtgagacttgtagtattcaagtaagataagtgacctaattttaaaataattcttctacttttctgtatattcagcagggtatttaagtgctagggctggtcacacacaaccaactgaaaaagactagagggattagtacaaactcctcttatacagaaggcaaatctgaggttccacagaagtctggaaccaagactattcagttggttaaataaagaggttagtctagactgggcctgctcattctaggtcaccacattttccatctccaaatagccaggccctctctccctcaagaaatgcccagatgtagaaattcatcagtgcctattggtcttccagaattttccatcttccgtatctcccaggcatgagactaccaagtttgtttgttttctttccaatttgggaatttatacttcagtatggtttcaacgcagttatgtttccagagaacatctagaagtggctggaaaccagaagctggggattccagggaccccacttagtgctctatttcctttataggttttatttctggtcatagagagagaaggacctttgactttttcttcgttgaggcttctgaggaggaaaaacaaacctaaaatagaaatacagtcagcctttcaaatccatgggttctgtgtccgtggattcaaccaaccttggatcaaaaatatttgaaaaaaaatctacaaagtttcaaaaagctgatgtgtaggcattgtattagatattataagaaatctagaaatgatttaaagcatacaggaggatgtgcataggttatatgcaaatactatgctattttatatatgggacttgagcatttgtggattttgatactgggggatcctggaaccaatcccccatggataccaaagtacgactgtagttatctattttttacatacttattattaccaccatgctcagtaagtccatttttgcatggaatatggagccttaaaacatgtcatgaatttggagtccctggcacataaatctaccttcaaatcagaggtccttaatgatgcctaaacatacagtaaaattagaatcagaaatacttctttaaaaaatattcaaaatgtgtttgtttcccatgggattattctctatcccacacgaatgtaaaaaaatccacattaatgatccatttaagtatagttttattgggtccttttctaatgattaaaggttctttctcaatttcattcctcagtcctgcaagtaaggactcatactgaagagtactgaaacaaggacttcttgtcagaaacagcttctggaatcttgggttttgtttttgttttttgacaaaatacactattggccatgtccatcacgagagtgtttgtagtaattaattaccttgtacaggacctggcacttagtagcattcttcaaatgttccctcagtgatccttttactctccttgtcacttatttgggagaaataggggcacgtgagataagaagaagaataattttgatgttggtatgcttgccctgttacttatagacagtctttgtcataggcaaacttgaatttgatttaaaatagggctgggaaaaatattcaataactgtaagcccccttttggatgccaaacttagaattttgtacattctctgatgaacaagcatttagatcataacatggtaaagcctattaccagccaatgttgttagcatctttgtatgcacatcactgtttgtgcaatatatgaatattttgttgcattgtattcttatataaaaataagtagaaaacataaaattgaaattgctgatgaga

SEQ ID NO: 20338 - DNA, 3195 bp, Homo sapiens
tttctgctggcattgatgataataatatttatttcttgggtgttgtgggggttaaatgaatgaaaaataccatagctctcagaactctgcttggtgcatagggcagcctgttattacagtcaaggatggagatacccctcctcagataaggggagtgattcagagaggagaactgtcttgctggagttccacagatgctaagtggcagggctgagagcccaaacctttctcttatggtttgttctttccactccctgatgcagaagcgcttctctgtccctttctcacattattctattcctctcttcagtctctcagtgacagccacacaggattcagtagtttcagtgctgaaggggagggggccaccaacccagggcccctccctctcccatcgtcttttcccttccccttccccttcccatgcaggctcctgtgagagaggcaggtggagggaagctgctgagcagcttggcaggtgacagtctggtatcttgacagcttatccctctttcctccaattccagacttggagatcacggtcccaattcggcactcacagcacctgcctgcaaaagtggagtttggagtctatgagagtggccccaggaaaagtgtcattccccctaggacggagctgagacgaggagactggaaaacagacagcacctccagcacagcaagtagcacaagtaaccgctccagcacccggagcctcctcagtgtgagcagcgggatggaaggggacaacgaggataatgaagtccctgaggttaccagaagtcgcagtccaggccccccacaagtggatgggacacccaccatgtccctcgagagaccccccagggtgcctccgagagctgcctcacagaggcctccgaccagggagaccttccatcctcctccacctgttccacccagaggacgctgattccacctcctaaaacctgcctacttcaggactttaagactcacagtcttcagcctgttaatgatgtcttcatgttgagttttatagcatgactgttgaccttaagatccattctcattgctgataatgctgcagccctgctggtttgggcttgcctcgaagattttattaaggcacgaagaagtgaaaaactaagggcttcattcaccatcaccaagtatatcgaaccatatacttgtttgccaaaaggatgaagacttaatcgaaatacttacctctaatttgccatatcagaagcctaaaaagaatgatcataaatgtacttcaccagtgattttactgaaatgcacttatattagtctttatgtatttgctagttcagcctgatttctagaagaggttatagtgtgagacttgtagtattcaagtaagataagtgacctaattttaaaataattcttctacttttctgtatattcagcagggtatttaagtgctagggctggtcacacacaaccaactgaaaaagactagagggattagtacaaactcctcttatacagaaggcaaatctgaggttccacagaagtctggaaccaagactattcagttggttaaataaagaggttagtctagactgggcctgctcattctaggtcaccacattttccatctccaaatagccaggccctctctccctcaagaaatgcccagatgtagaaattcatcagtgcctattggtcttccagaattttccatcttccgtatctcccaggcatgagactaccaagtttgtttgttttctttccaatttgggaatttatacttcagtatggtttcaacgcagttatgtttccagagaacatctagaagtggctggaaaccagaagctggggattccagggaccccacttagtgctctatttcctttataggttttatttctggtcatagagagagaaggacctttgactttttcttcgttgaggcttctgaggaggaaaaacaaacctaaaatagaaatacagtcagcctttcaaatccatgggttctgtgtccgtggattcaaccaaccttggatcaaaaatatttgaaaaaaaatctacaaagtttcaaaaagcaaaacttgaatttgctgcatgccaagaagtatgttgaattcatgtaaatgaagtgatgtgtaggcattgtattagatattataagaaatctagaaatgatttaaagcatacaggaggatgtgcataggttatatgcaaatactatgctattttatatatgggacttgagcatttgtggattttgatactgggggatcctggaaccaatcccccatggataccaaagtacgactgtagttatctattttttacatacttattattaccaccatgctcagtaagtccatttttgcatggaatatggagccttaaaacatgtcatgaatttggagtccctggcacataaatctaccttcaaatcagaggtccttaatgatgcctaaacatacagtaaaattagaatcagaaatacttctttaaaaaatattcaaaatgtgtttgtttcccatgggattattctctatcccacacgaatgtaaaaaaatccacattaatgatccatttaagtatagttttattgggtccttttctaatgattaaaggttctttctcaatttcattcctcagtcctgcaagtaaggactcatactgaagagtactgaaacaaggacttcttgtcagaaacagcttctggaatcttgggttttgtttttgttttttgacaaaatacactattggccatgtccatcacgagagtgtttgtagtaattaattaccttgtacaggacctggcacttagtagcattcttcaaatgttccctcagtgatccttttactctccttgtcacttatttgggagaaataggggcacgtgagataagaagaagaataattttgatgttggtatgcttgccctgttacttatagacagtctttgtcataggcaaacttgaatttgatttaaaatagggctgggaaaaatattcaataactgtaagcccccttttggatgccaaacttagaattttgtacattctctgatgaacaagcatttagatcataacatggtaaagcctattaccagccaatgttgttagcatctttgtatgcacatcactgtttgtgcaatatatgaatattttgttgcattgtattcttatataaaaataagtagaaaacataaaattgaaattgctgatgaga

SEQ ID NO: 20339 - DNA, 3661 bp, Homo sapiens
aaatggctcctgattggtaaattgcatctggaactgggaggatctgtacaggaactagaaatacttgaaagggacagcattctttgggctttcctgagggcattgactctggcatacctctcatggtgaccctggaagctccgcctctggagttgctatgagagaaattgctcttgtaggacatgaggtttttcaccagcgtggcctgctatggatcttgtctctttgcatctgagttgctgatcagatgcaaggactggctcaaaggaagaccagctctcttcactgccctgctagcttgtgtcctttatctttgtgagtggactggtgccaagcatgtcccagggtcatcttatgttgaaatgcttcaggccagtacatctaacccaatccctggagatggtttctctcgggccactaaggactctatgatccgcaagtttttagaaggcaacagcatgggaatgaccaatctggagagagatcagtgccatcttggtcaggaagaagatgtttatcacacggtggatgacgatgaggccttttctgtggacttggccagcaggccccctgtcccagtgcccagaccagagaccactgctcctggtgctcaccagctgcctgacaacgaaccatacatttttaaagtttttgcagaaaaaagtcaagagcggcctgggaatttctacgtttcctcagagagcatcaggaaagggccgcccgtcagaccatggagggacaggccccagtcgagtatatatgacccttttgcgggaatgaaaacgccaggccagcggcagcttatcaccctccaggagcaggtgaagctgggcattgtcaacgtggatgaggctgtgctccacttcaaagagtggcagctcaaccagaagaaacgatcggagtcctttcgtttccagcaggaaaatcttaaacggctaagagacagcatcacccgaagacagagagagaagcaaaaatcaggaaagcagacagacttggagatcacggtcccaattcggcactcacagcacctgcctgcaaaagtggagtttggagtctatgagagtggccccaggaaaagtgtcattccccctaggacggagctgagacgaggagactggaaaacagacagcacctccagcacagcaagtagcacaagtaaccgctccagcacccggagcctcctcagtgtgagcagcgggatggaaggggacaacgaggataatgaagtccctgaggttaccagaagtcgcagtccaggccccccacaagtggatgggacacccaccatgtccctcgagagaccccccagggtgcctccgagagctgcctcacagaggcctccgaccagggagaccttccatcctcctccacctgttccacccagaggacgctgattccacctcctaaaacctgcctacttcaggactttaagactcacagtcttcagcctgttaatgatgtcttcatgttgagttttatagcatgactgttgaccttaagatccattctcattgctgataatgctgcagccctgctggtttgggcttgcctcgaagattttattaaggcacgaagaagtgaaaaactaagggcttcattcaccatcaccaagtatatcgaaccatatacttgtttgccaaaaggatgaagacttaatcgaaatacttacctctaatttgccatatcagaagcctaaaaagaatgatcataaatgtacttcaccagtgattttactgaaatgcacttatattagtctttatgtatttgctagttcagcctgatttctagaagaggttatagtgtgagacttgtagtattcaagtaagataagtgacctaattttaaaataattcttctacttttctgtatattcagcagggtatttaagtgctagggctggtcacacacaaccaactgaaaaagactagagggattagtacaaactcctcttatacagaaggcaaatctgaggttccacagaagtctggaaccaagactattcagttggttaaataaagaggttagtctagactgggcctgctcattctaggtcaccacattttccatctccaaatagccaggccctctctccctcaagaaatgcccagatgtagaaattcatcagtgcctattggtcttccagaattttccatcttccgtatctcccaggcatgagactaccaagtttgtttgttttctttccaatttgggaatttatacttcagtatggtttcaacgcagttatgtttccagagaacatctagaagtggctggaaaccagaagctggggattccagggaccccacttagtgctctatttcctttataggttttatttctggtcatagagagagaaggacctttgactttttcttcgttgaggcttctgaggaggaaaaacaaacctaaaatagaaatacagtcagcctttcaaatccatgggttctgtgtccgtggattcaaccaaccttggatcaaaaatatttgaaaaaaaatctacaaagtttcaaaaagcaaaacttgaatttgctgcatgccaagaagtatgttgaattcatgtaaatgaagtgatgtgtaggcattgtattagatattataagaaatctagaaatgatttaaagcatacaggaggatgtgcataggttatatgcaaatactatgctattttatatatgggacttgagcatttgtggattttgatactgggggatcctggaaccaatcccccatggataccaaagtacgactgtagttatctattttttacatacttattattaccaccatgctcagtaagtccatttttgcatggaatatggagccttaaaacatgtcatgaatttggagtccctggcacataaatctaccttcaaatcagaggtccttaatgatgcctaaacatacagtaaaattagaatcagaaatacttctttaaaaaatattcaaaatgtgtttgtttcccatgggattattctctatcccacacgaatgtaaaaaaatccacattaatgatccatttaagtatagttttattgggtccttttctaatgattaaaggttctttctcaatttcattcctcagtcctgcaagtaaggactcatactgaagagtactgaaacaaggacttcttgtcagaaacagcttctggaatcttgggttttgtttttgttttttgacaaaatacactattggccatgtccatcacgagagtgtttgtagtaattaattaccttgtacaggacctggcacttagtagcattcttcaaatgttccctcagtgatccttttactctccttgtcacttatttgggagaaataggggcacgtgagataagaagaagaataattttgatgttggtatgcttgccctgttacttatagacagtctttgtcataggcaaacttgaatttgatttaaaatagggctgggaaaaatattcaataactgtaagcccccttttggatgccaaacttagaattttgtacattctctgatgaacaagcatttagatcataacatggtaaagcctattaccagccaatgttgttagcatctttgtatgcacatcactgtttgtgcaatatatgaatattttgttgcattgtattcttatataaaaataagtagaaaacataaaattgaaattgctgatgaga

SEQ ID NO: 20340 - DNA, 2910 bp, Homo sapiens
ccacgcgtcgcggacgcgtgggtcgacccacgcgtccggccagcggcagcttatcaccctccaggagcaggtgaagctgggcattgtcaacgtggatgaggctgtgctccacttcaaagagtggcagctcaaccagaagaaacgatcggagtcctttcgtttccagcaggaaaatcttaaacggctaagagacagcatcacccgaagacagagagagaagcaaaaatcaggaaagcagacagacttggagatcacggtcccaattcggcactcacagcacctgcctgcaaaagtggagtttggagtctatgagagtggccccaggaaaagtgtcattccccctaggacggagctgagacgaggagactggaaaacagacagcacctccagcacagcaagtagcacaagtaaccgctccagcacccggagcctcctcagtgtgagcagcgggatggaaggggacaacgaggataatgaagtccctgaggttaccagaagtcgcagtccaggccccccacaagtggatgggacacccaccatgtccctcgagagaccccccagggtgcctccgagagctgcctcacagaggcctccgaccagggagaccttccatcctcctccacctgttccacccagaggacgctgattccacctcctaaaacctgcctacttcaggactttaagactcacagtcttcagcctgttaatgatgtcttcatgttgagttttatagcatgactgttgaccttaagatccattctcattgctgataatgctgcagccctgctggtttgggcttgcctcgaagattttattaaggcacgaagaagtgaaaaactaagggcttcattcaccatcaccaagtatatcgaaccatatacttgtttgccaaaaggatgaagacttaatcgaaatacttacctctaatttgccatatcagaagcctaaaaagaatgatcataaatgtacttcaccagtgattttactgaaatgcacttatattagtctttatgtatttgctagttcagcctgatttctagaagaggttatagtgtgagacttgtagtattcaagtaagataagtgacctaattttaaaataattcttctacttttctgtatattcagcagggtatttaagtgctagggctggtcacacacaaccaactgaaaaagactagagggattagtacaaactcctcttatacagaaggcaaatctgaggttccacagaagtctggaaccaagactattcagttggttaaataaagaggttagtctagactgggcctgctcattctaggtcaccacattttccatctccaaatagccaggccctctctccctcaagaaatgcccagatgtagaaattcatcagtgcctattggtcttccagaattttccatcttccgtatctcccaggcatgagactaccaagtttgtttgttttctttccaatttgggaatttatacttcagtatggtttcaacgcagttatgtttccagagaacatctagaagtggctggaaaccagaagctggggattccagggaccccacttagtgctctatttcctttataggttttatttctggtcatagagagagaaggacctttgactttttcttcgttgaggcttctgaggaggaaaaacaaacctaaaatagaaatacagtcagcctttcaaatccatgggttctgtgtccgtggattcaaccaaccttggatcaaaaatatttgaaaaaaaatctacaaagtttcaaaaagcaaaacttgaatttgctgcatgccaagaagtatgttgaattcatgtaaatgaagtgatgtgtaggcattgtattagatattataagaaatctagaaatgatttaaagcatacaggaggatgtgcataggttatatgcaaatactatgctattttatatatgggacttgagcatttgtggattttgatactgggggatcctggaaccaatcccccatggataccaaagtacgactgtagttatctattttttacatacttattattaccaccatgctcagtaagtccatttttgcatggaatatggagccttaaaacatgtcatgaatttggagtccctggcacataaatctaccttcaaatcagaggtccttaatgatgcctaaacatacagtaaaattagaatcagaaatacttctttaaaaaatattcaaaatgtgtttgtttcccatgggattattctctatcccacacgaatgtaaaaaaatccacattaatgatccatttaagtatagttttattgggtccttttctaatgattaaaggttctttctcaatttcattcctcagtcctgcaagtaaggactcatactgaagagtactgaaacaaggacttcttgtcagaaacagcttctggaatcttgggttttgtttttgttttttgacaaaatacactattggccatgtccatcacgagagtgtttgtagtaattaattaccttgtacaggacctggcacttagtagcattcttcaaatgttccctcagtgatccttttactctccttgtcacttatttgggagaaataggggcacgtgagataagaagaagaataattttgatgttggtatgcttgccctgttacttatagacagtctttgtcataggcaaacttgaatttgatttaaaatagggctgggaaaaatattcaataactgtaagcccccttttggatgccaaacttagaattttgtacattctctgatgaacaagcatttagatcataacatggtaaagcctattaccagccaatgttgttagcatctttgtatgcacatcactgtttgtgcaatatatgaatattttgttgcattgtattcttatataaaaataagtagaaaacataaaattgaaattgctgatgaga

SEQ ID NO: 20341 - DNA, 2884 bp, Homo sapiens
acagtagttaagaacagccagggctctagagctggcagcctgaatttacatctttattctgctatttgatgaccttgaccttgctgtgcctcatatgaaaggggaggactaggtgatataagctactgtaagcagcataactggaaaatcttaaacggctaagagacagcatcacccgaagacagagagagaagcaaaaatcaggaaagcagacagacttggagatcacggtcccaattcggcactcacagcacctgcctgcaaaagtggagtttggagtctatgagagtggccccaggaaaagtgtcattccccctaggacggagctgagacgaggagactggaaaacagacagcacctccagcacagcaagtagcacaagtaaccgctccagcacccggagcctcctcagtgtgagcagcgggatggaaggggacaacgaggataatgaagtccctgaggttaccagaagtcgcagtccaggccccccacaagtggatgggacacccaccatgtccctcgagagaccccccagggtgcctccgagagctgcctcacagaggcctccgaccagggagaccttccatcctcctccacctgttccacccagaggacgctgattccacctcctaaaacctgcctacttcaggactttaagactcacagtcttcagcctgttaatgatgtcttcatgttgagttttatagcatgactgttgaccttaagatccattctcattgctgataatgctgcagccctgctggtttgggcttgcctcgaagattttattaaggcacgaagaagtgaaaaactaagggcttcattcaccatcaccaagtatatcgaaccatatacttgtttgccaaaaggatgaagacttaatcgaaatacttacctctaatttgccatatcagaagcctaaaaagaatgatcataaatgtacttcaccagtgattttactgaaatgcacttatattagtctttatgtatttgctagttcagcctgatttctagaagaggttatagtgtgagacttgtagtattcaagtaagataagtgacctaattttaaaataattcttctacttttctgtatattcagcagggtatttaagtgctagggctggtcacacacaaccaactgaaaaagactagagggattagtacaaactcctcttatacagaaggcaaatctgaggttccacagaagtctggaaccaagactattcagttggttaaataaagaggttagtctagactgggcctgctcattctaggtcaccacattttccatctccaaatagccaggccctctctccctcaagaaatgcccagatgtagaaattcatcagtgcctattggtcttccagaattttccatcttccgtatctcccaggcatgagactaccaagtttgtttgttttctttccaatttgggaatttatacttcagtatggtttcaacgcagttatgtttccagagaacatctagaagtggctggaaaccagaagctggggattccagggaccccacttagtgctctatttcctttataggttttatttctggtcatagagagagaaggacctttgactttttcttcgttgaggcttctgaggaggaaaaacaaacctaaaatagaaatacagtcagcctttcaaatccatgggttctgtgtccgtggattcaaccaaccttggatcaaaaatatttgaaaaaaaatctacaaagtttcaaaaagcaaaacttgaatttgctgcatgccaagaagtatgttgaattcatgtaaatgaagtgatgtgtaggcattgtattagatattataagaaatctagaaatgatttaaagcatacaggaggatgtgcataggttatatgcaaatactatgctattttatatatgggacttgagcatttgtggattttgatactgggggatcctggaaccaatcccccatggataccaaagtacgactgtagttatctattttttacatacttattattaccaccatgctcagtaagtccatttttgcatggaatatggagccttaaaacatgtcatgaatttggagtccctggcacataaatctaccttcaaatcagaggtccttaatgatgcctaaacatacagtaaaattagaatcagaaatacttctttaaaaaatattcaaaatgtgtttgtttcccatgggattattctctatcccacacgaatgtaaaaaaatccacattaatgatccatttaagtatagttttattgggtccttttctaatgattaaaggttctttctcaatttcattcctcagtcctgcaagtaaggactcatactgaagagtactgaaacaaggacttcttgtcagaaacagcttctggaatcttgggttttgtttttgttttttgacaaaatacactattggccatgtccatcacgagagtgtttgtagtaattaattaccttgtacaggacctggcacttagtagcattcttcaaatgttccctcagtgatccttttactctccttgtcacttatttgggagaaataggggcacgtgagataagaagaagaataattttgatgttggtatgcttgccctgttacttatagacagtctttgtcataggcaaacttgaatttgatttaaaatagggctgggaaaaatattcaataactgtaagcccccttttggatgccaaacttagaattttgtacattctctgatgaacaagcatttagatcataacatggtaaagcctattaccagccaatgttgttagcatctttgtatgcacatcactgtttgtgcaatatatgaatattttgttgcattgtattcttatataaaaataagtagaaaacataaaattgaaattgctgatgaga

SEQ ID NO: 20342 - DNA, 4209 bp, Homo sapiens
cacgagggcgaatcctgtggaattcatgtgtcaggcctttaaaattgtgccctacaacacagagacccttgataaactgctaaccgaatccctgaagaacaatatccctgcaagcggactgcacctctttggaatcaaccagctggaagaagaagatatgatgacaaatcagagggatgaagagctgcccaccctgttgcattttgctgcgaagtatggactgaagaacctcactgccttgttgctcacctgcccaggagccctgcaggcgtacagcgtggccaacaagcatggccactaccccaacaccatcgctgagaaacacggcttcagggacctgcggcagttcatcgacgagtatgtggaaacggtggacatgctcaagagtcacattaaagaggaactgatgcacggggaggaggctgatgctgtgtacgagtccatggcccacctttccacagacctgcttatgaaatgctcgctcaaccccggctgtgacgaggatctctatgagtccatggctgcctttgtcccagctgccactgaagacctctatgttgaaatgcttcaggccagtacatctaacccaatccctggagatggtttctctcgggccactaaggactctatgatccgcaagtttttagaaggcaacagcatgggaatgaccaatctggagagagatcagtgccatcttggtcaggaagaagatgtttatcacacggtggatgacgatgaggccttttctgtggacttggccagcaggccccctgtcccagtgcccagaccagagaccactgctcctggtgctcaccagctgcctgacaacgaaccatacatttttaaagtttttgcagaaaaaagtcaagagcggcctgggaatttctacgtttcctcagagagcatcaggaaagggccgcccgtcagaccatggagggacaggccccagtcgagtatatatgacccttttgcgggaatgaaaacgccaggccagcggcagcttatcaccctccaggagcaggtgaagctgggcattgtcaacgtggatgaggctgtgctccacttcaaagagtggcagctcaaccagaagaaacgatcggagtcctttcgtttccagcaggaaaatcttaaacggctaagagacagcatcacccgaagacagagagagaagcaaaaatcaggaaagcagacagacttggagatcacggtcccaattcggcactcacagcacctgcctgcaaaagtggagtttggagtctatgagagtggccccaggaaaagtgtcattccccctaggacggagctgagacgaggagactggaaaacagacagcacctccagcacagcaagtagcacaagtaaccgctccagcacccggagcctcctcagtgtgagcagcgggatggaaggggacaacgaggataatgaagtccctgaggttaccagaagtcgcagtccaggccccccacaagtggatgggacacccaccatgtccctcgagagaccccccagggtgcctccgagagctgcctcacagaggcctccgaccagggagaccttccatcctcctccacctgttccacccagaggacgctgattccacctcctaaaacctgcctacttcaggactttaagactcacagtcttcagcctgttaatgatgtcttcatgttgagttttatagcatgactgttgaccttaagatccattctcattgctgataatgctgcagccctgctggtttgggcttgcctcgaagattttattaaggcacgaagaagtgaaaaactaagggcttcattcaccatcaccaagtatatcgaaccatatacttgtttgccaaaaggatgaagacttaatcgaaatacttacctctaatttgccatatcagaagcctaaaaagaatgatcataaatgtacttcaccagtgattttactgaaatgcacttatattagtctttatgtatttgctagttcagcctgatttctagaagaggttatagtgtgagacttgtagtattcaagtaagataagtgacctaattttaaaataattcttctacttttctgtatattcagcagggtatttaagtgctagggctggtcacacacaaccaactgaaaaagactagagggattagtacaaactcctcttatacagaaggcaaatctgaggttccacagaagtctggaaccaagactattcagttggttaaataaagaggttagtctagactgggcctgctcattctaggtcaccacattttccatctccaaatagccaggccctctctccctcaagaaatgcccagatgtagaaattcatcagtgcctattggtcttccagaattttccatcttccgtatctcccaggcatgagactaccaagtttgtttgttttctttccaatttgggaatttatacttcagtatggtttcaacgcagttatgtttccagagaacatctagaagtggctggaaaccagaagctggggattccagggaccccacttagtgctctatttcctttataggttttatttctggtcatagagagagaaggacctttgactttttcttcgttgaggcttctgaggaggaaaaacaaacctaaaatagaaatacagtcagcctttcaaatccatgggttctgtgtccgtggattcaaccaaccttggatcaaaaatatttgaaaaaaaatctacaaagtttcaaaaagcaaaacttgaatttgctgcatgccaagaagtatgttgaattcatgtaaatgaagtgatgtgtaggcattgtattagatattataagaaatctagaaatgatttaaagcatacaggaggatgtgcataggttatatgcaaatactatgctattttatatatgggacttgagcatttgtggattttgatactgggggatcctggaaccaatcccccatggataccaaagtacgactgtagttatctattttttacatacttattattaccaccatgctcagtaagtccatttttgcatggaatatggagccttaaaacatgtcatgaatttggagtccctggcacataaatctaccttcaaatcagaggtccttaatgatgcctaaacatacagtaaaattagaatcagaaatacttctttaaaaaatattcaaaatgtgtttgtttcccatgggattattctctatcccacacgaatgtaaaaaaatccacattaatgatccatttaagtatagttttattgggtccttttctaatgattaaaggttctttctcaatttcattcctcagtcctgcaagtaaggactcatactgaagagtactgaaacaaggacttcttgtcagaaacagcttctggaatcttgggttttgtttttgttttttgacaaaatacactattggccatgtccatcacgagagtgtttgtagtaattaattaccttgtacaggacctggcacttagtagcattcttcaaatgttccctcagtgatccttttactctccttgtcacttatttgggagaaataggggcacgtgagataagaagaagaataattttgatgttggtatgcttgccctgttacttatagacagtctttgtcataggcaaacttgaatttgatttaaaatagggctgggaaaaatattcaataactgtaagcccccttttggatgccaaacttagaattttgtacattctctgatgaacaagcatttagatcataacatggtaaagcctattaccagccaatgttgttagcatctttgtatgcacatcactgtttgtgcaatatatgaatattttgttgcattgtattcttatataaaaataagtagaaaacataaaattgaaattgctgatgagaagccttgtctcgtgaatgtgatacacttgagacacggatggaactgatcaggagtgccaagtcaaaagcagcagatcttaagccctcactggttgttcctttaacatccaaaatggttggttatatgtaaaagaagaaaatgaaataatctggatgaaacactgggactgtgttatcaaagaatgtctgtagtgatgaggtgaaaattttcattttccagaaacagaactgctcatttataacataaatatattcaacttccacatactcaaacatgtgtatacatttttaggagtacattatgtaacaaaaccatggatttccaatacaatgagaagcagaaatgac

SEQ ID NO: 20343 - DNA, 3716 bp, Homo sapiens
  misc_feature (3702)..(3702): n is a, c, g, or t
  misc_feature (3707)..(3707): n is a, c, g, or t
cacgagggcgaatcctgtggaattcatgtgtcaggcctttaaaattgtgccctacaacacagagacccttgataaactgctaaccgaatccctgaagaacaatatccctgcaagcggactgcacctctttggaatcaaccagctggaagaagaagatatgatgacaaatcagagggatgaagagctgcccaccctgttgcattttgctgcgaagtatggactgaagaacctcactgccttgttgctcacctgcccaggagccctgcaggcgtacagcgtggccaacaagcatggccactaccccaacaccatcgctgagaaacacggcttcagggacctgcggcagttcatcgacgagtatgtggaaacggtggacatgctcaagagtcacattaaagaggaactgatgcacggggaggaggctgatgctgtgtacgagtccatggcccacctttccacagacctgcttatgaaatgctcgctcaaccccggctgtgacgaggatctctatgagtccatggctgcctttgtcccagctgccactgaagacctctatgttgaaatgcttcaggccagtacatctaacccaatccctggagatggtttctctcgggccactaaggactctatgatccgcaagtttttagaaggcaacagcatgggaatgaccaatctggagagagatcagtgccatcttggtcaggaagaagatgtttatcacacggtggatgacgatgaggccttttctgtggacttggccagcaggccccctgtcccagtgcccagaccagagaccactgctcctggtgctcaccagctgcctgacaacgaaccatacatttttaaagtttttgcagaaaaaagtcaagagcggcctgggaatttctacgtttcctcagagagcatcaggaaagggccgcccgtcagaccatggagggacaggccccagtcgagtatatatgacccttttgcgggaatgaaaacgccaggccagcggcagcttatcaccctccaggagcaggtgaagctgggcattgtcaacgtggatgaggctgtgctccacttcaaagagtggcagctcaaccagaagaaacgatcggagtcctttcgtttccagcaggaaaatcttaaacggctaagagacagcatcacccgaagacagagagagaagcaaaaatcaggaaagcagacagacttggagatcacggtcccaattcggcactcacagcacctgcctgcaaaagtggagtttggagtctatgagagtggccccaggaaaagtgtcattccccctaggacggagctgagacgaggagactggaaaacagacagcacctccagcacagcaagtagcacaagtaaccgctccagcacccggagcctcctcagtgtgagcagcgggatggaaggggacaacgaggataatgaagtccctgaggttaccagaagtcgcagtccaggccccccacaagtggatgggacacccaccatgtccctcgagagaccccccagggtgcctccgagagctgcctcacagaggcctccgaccagggagaccttccatcctcctccacctgttccacccagaggacgctgattccacctcctaaaacctgcctacttcaggactttaagactcacagtcttcagcctgttaatgatgtcttcatgttgagttttatagcatgactgttgaccttaagatccattctcattgctgataatgctgcagccctgctggtttgggcttgcctcgaagattttattaaggcacgaagaagtgaaaaactaagggcttcattcaccatcaccaagtatatcgaaccatatacttgtttgccaaaaggatgaagacttaatcgaaatacttacctctaatttgccatatcagaagcctaaaaagaatgatcataaatgtacttcaccagtgattttactgaaatgcacttatattagtctttatgtatttgctagttcagcctgatttctagaagaggttatagtgtgagacttgtagtattcaagtaagataagtgacctaattttaaaataattcttctacttttctgtatattcagcagggtatttaagtgctagggctggtcacacacaaccaactgaaaaagactagagggattagtacaaactcctcttatacagaaggcaaatctgaggttccacagaagtctggaaccaagactattcagttggttaaataaagaggttagtctagactgggcctgctcattctaggtcaccacattttccatctccaaatagccaggccctctctccctcaagaaatgcccagatgtagaaattcatcagtgcctattggtcttccagaattttccatcttccgtatctcccaggcatgagactaccaagtttgtttgttttctttccaatttgggaatttatacttcagtatggtttcaacgcagttatgtttccagagaacatctagaagtggctggaaaccagaagctggggattccagggaccccacttagtgctctatttcctttataggttttatttctggtcatagagagagaaggacctttgactttttcttcgttgaggcttctgaggaggaaaaacaaacctaaaatagaaatacagtcagcctttcaaatccatgggttctgtgtccgtggattcaaccaaccttggatcaaaaatatttgaaaaaaaatctacaaagtttcaaaaagcaaaacttgaatttgctgcatgccaagaagtatgttgaattcatgtaaatgaagtgatgtgtaggcattgtattagatattataagaaatctagaaatgatttaaagcatacaggaggatgtgcataggttatatgcaaatactatgctattttatatatgggacttgagcatttgtggattttgatactgggggatcctggaaccaatcccccatggataccaaagtacgactgtagttatctattttttacatacttattattaccaccatgctcagtaagtccatttttgcatggaatatggagccttaaaacatgtcatgaatttggagtccctggcacataaatctaccttcaaatcagaggtccttaatgatgcctaaacatacagtaaaattagaatcagaaatacttctttaaaaaatattcaaaatgtgtttgtttcccatgggattattctctatcccacacgaatgtaaaaaaatccacattaatgatccatttaagtatagttttattgggtccttttctaatgattaaaggttctttctcaatttcattcctcagtcctgcaagtaaggactcatactgaagagtactgaaacaaggacttcttgtcagaaacagcttctggaatcttgggttttgtttttgttttttgacaaaatacactattggccatgtccatcacgagagtgtttgtagtaattaattaccttgtacaggacctggcacttagtagcattcttcaaatgttccctcagtgatccttttactctccttgtcacttatttgggagaaataggggcacgtgagataagaagaagaataattttgatgttggtatgcttgccctgttacttatagacagtctttgtcataggcaaacttgaatttgatttaaaatagggctgggaaaaatattcaataactgtaagcccccttttaaatcaaattcaagtttgcccggcacgaggcctcgtnaaaanttcttggcc

SEQ ID NO: 20344 - DNA, 3832 bp, Homo sapiens
cacgagggcgaatcctgtggaattcatgtgtcaggcctttaaaattgtgccctacaacacagagacccttgataaactgctaaccgaatccctgaagaacaatatccctgcaagcggactgcacctctttggaatcaaccagctggaagaagaagatatgatgacaaatcagagggatgaagagctgcccaccctgttgcattttgctgcgaagtatggactgaagaacctcactgccttgttgctcacctgcccaggagccctgcaggcgtacagcgtggccaacaagcatggccactaccccaacaccatcgctgagaaacacggcttcagggacctgcggcagttcatcgacgagtatgtggaaacggtggacatgctcaagagtcacattaaagaggaactgatgcacggggaggaggctgatgctgtgtacgagtccatggcccacctttccacagacctgcttatgaaatgctcgctcaaccccggctgtgacgaggatctctatgagtccatggctgcctttgtcccagctgccactgaagacctctatgttgaaatgcttcaggccagtacatctaacccaatccctggagatggtttctctcgggccactaaggactctatgatccgcaagtttttagaaggcaacagcatgggaatgaccaatctggagagagatcagtgccatcttggtcaggaagaagatgtttatcacacggtggatgacgatgaggccttttctgtggacttggccagcaggccccctgtcccagtgcccagaccagagaccactgctcctggtgctcaccagctgcctgacaacgaaccatacatttttaaagtttttgcagaaaaaagtcaagagcggcctgggaatttctacgtttcctcagagagcatcaggaaagggccgcccgtcagaccatggagggacaggccccagtcgagtatatatgacccttttgcgggaatgaaaacgccaggccagcggcagcttatcaccctccaggagcaggtgaagctgggcattgtcaacgtggatgaggctgtgctccacttcaaagagtggcagctcaaccagaagaaacgatcggagtcctttcgtttccagcaggaaaatcttaaacggctaagagacagcatcacccgaagacagagagagaagcaaaaatcaggaaagcagacagacttggagatcacggtcccaattcggcactcacagcacctgcctgcaaaagtggagtttggagtctatgagagtggccccaggaaaagtgtcattccccctaggacggagctgagacgaggagactggaaaacagacagcacctccagcacagcaagtagcacaagtaaccgctccagcacccggagcctcctcagtgtgagcagcgggatggaaggggacaacgaggataatgaagtccctgaggttaccagaagtcgcagtccaggccccccacaagtggatgggacacccaccatgtccctcgagagaccccccagggtgcctccgagagctgcctcacagaggcctccgaccagggagaccttccatcctcctccacctgttccacccagaggacgctgattccacctcctaaaacctgcctacttcaggactttaagactcacagtcttcagcctgttaatgatgtcttcatgttgagttttatagcatgactgttgaccttaagatccattctcattgctgataatgctgcagccctgctggtttgggcttgcctcgaagattttattaaggcacgaagaagtgaaaaactaagggcttcattcaccatcaccaagtatatcgaaccatatacttgtttgccaaaaggatgaagacttaatcgaaatacttacctctaatttgccatatcagaagcctaaaaagaatgatcataaatgtacttcaccagtgattttactgaaatgcacttatattagtctttatgtatttgctagttcagcctgatttctagaagaggttatagtgtgagacttgtagtattcaagtaagataagtgacctaattttaaaataattcttctacttttctgtatattcagcagggtatttaagtgctagggctggtcacacacaaccaactgaaaaagactagagggattagtacaaactcctcttatacagaaggcaaatctgaggttccacagaagtctggaaccaagactattcagttggttaaataaagaggttagtctagactgggcctgctcattctaggtcaccacattttccatctccaaatagccaggccctctctccctcaagaaatgcccagatgtagaaattcatcagtgcctattggtcttccagaattttccatcttccgtatctcccaggcatgagactaccaagtttgtttgttttctttccaatttgggaatttatacttcagtatggtttcaacgcagttatgtttccagagaacatctagaagtggctggaaaccagaagctggggattccagggaccccacttagtgctctatttcctttataggttttatttctggtcatagagagagaaggacctttgactttttcttcgttgaggcttctgaggaggaaaaacaaacctaaaatagaaatacagtcagcctttcaaatccatgggttctgtgtccgtggattcaaccaaccttggatcaaaaatatttgaaaaaaaatctacaaagtttcaaaaagcaaaacttgaatttgctgcatgccaagaagtatgttgaattcatgtaaatgaagtgatgtgtaggcattgtattagatattataagaaatctagaaatgatttaaagcatacaggaggatgtgcataggttatatgcaaatactatgctattttatatatgggacttgagcatttgtggattttgatactgggggatcctggaaccaatcccccatggataccaaagtacgactgtagttatctattttttacatacttattattaccaccatgctcagtaagtccatttttgcatggaatatggagccttaaaacatgtcatgaatttggagtccctggcacataaatctaccttcaaatcagaggtccttaatgatgcctaaacatacagtaaaattagaatcagaaatacttctttaaaaaatattcaaaatgtgtttgtttcccatgggattattctctatcccacacgaatgtaaaaaaatccacattaatgatccatttaagtatagttttattgggtccttttctaatgattaaaggttctttctcaatttcattcctcagtcctgcaagtaaggactcatactgaagagtactgaaacaaggacttcttgtcagaaacagcttctggaatcttgggttttgtttttgttttttgacaaaatacactattggccatgtccatcacgagagtgtttgtagtaattaattaccttgtacaggacctggcacttagtagcattcttcaaatgttccctcagtgatccttttactctccttgtcacttatttgggagaaataggggcacgtgagataagaagaagaataattttgatgttggtatgcttgccgcaaacttgaatttgatttaaaatagggctgggaaaaatattcaataactgtaagcccccttttggatgccaaacttagaattttgtacattctctgatgaacaagcatttagatcataacatggtaaagcctattaccagccaatgttgttagcatctttgtatgcacatcactgtttgtgcaatatatgaatattttgttgcattgtattcttatataaaaataagtagaaaacataaaattgaaattgctgatgaga

SEQ ID NO: 20345 - DNA, 1668 bp, Homo sapiens
cacgagggcgaatcctgtggaattcatgtgtcaggcctttaaaattgtgccctacaacacagagacccttgataaactgctaaccgaatccctgaagaacaatatccctgcaagcggactgcacctctttggaatcaaccagctggaagaagaagatatgatgacaaatcagagggatgaagagctgcccaccctgttgcattttgctgcgaagtatggactgaagaacctcactgccttgttgctcacctgcccaggagccctgcaggcgtacagcgtggccaacaagcatggccactaccccaacaccatcgctgagaaacacggcttcagggacctgcggcagttcatcgacgagtatgtggaaacggtggacatgctcaagagtcacattaaagaggaactgatgcacggggaggaggctgatgctgtgtacgagtccatggcccacctttccacagacctgcttatgaaatgctcgctcaaccccggctgtgacgaggatctctatgagtccatggctgcctttgtcccagctgccactgaagacctctatgttgaaatgcttcaggccagtacatctaacccaatccctggagatggtttctctcgggccactaaggactctatgatccgcaagtttttagaaggcaacagcatgggaatgaccaatctggagagagatcagtgccatcttggtcaggaagaagatgtttatcacacggtggatgacgatgaggccttttctgtggacttggccagcaggccccctgtcccagtgcccagaccagagaccactgctcctggtgctcaccagctgcctgacaacgaaccatacatttttaaagtttttgcagaaaaaagtcaagagcggcctgggaatttctacgtttcctcagagagcatcaggaaagggccgcccgtcagaccatggagggacaggccccagtcgagtatatatgacccttttgcgggaatgaaaacgccaggccagcggcagcttatcaccctccaggagcaggtgaagctgggcattgtcaacgtggatgaggctgtgctccacttcaaagagtggcagctcaaccagaagaaacgatcggagtcctttcgtttccagcaggaaaatcttaaacggctaagagacagcatcacccgaagacagagagagaagcaaaaatcaggaaagcagacagacttggagatcacggtcccaattcggcactcacagcacctgcctgcaaaagtggagtttggagtctatgagagtggccccaggaaaagtgtcattccccctaggacggagctgagacgaggagactggaaaacagacagcacctccagcacagcaagtagcacaagtaaccgctccagcacccggagcctcctcagtgtgagcagcgggatggaaggggacaacgaggtgagagctgggactccaccccacctatcctgtcctaggggtcgtttcatcgcaagagatagaaacccaggtgaaaggagccaggcacaaaaggtcatatattataggattccatttatatgaaatgccagagtgggcaaatccacagagacagtttgaagattggtggttgccagcggctggagggaggaggaatgggaagaaactgcttaatggggacaggtgtattagggttctctagagggaca

SEQ ID NO: 20346 - DNA, 1962 bp, Homo sapiens
attacaatgaaaaattttgtgttccaaggcaactgtatcataggtgtaaacataaagcatataaattatgacaatccttttagaggtagggtcaatatagtggataaacctgtctatcagacgtattgattatagcagtactatagttattctgctgtcattattaaagatgattatattcattcaaagctttagatgtgtcccatgtggcaagaaaggagacagtgaattttgtcaaacaataaaaatgtgtcaggaacacaaggatgaaggggatgtcatttgcctggtaagaactgggttatttccactgaaatttgttatgtttaaggaaattaagattttaagcttgaaattatacaagcagaatctaatttaattttgattgactgaagaaccagggtcttttgctctcctttggtatttcactctcctttggtattcaatcatgtgtcttttagtgctttttaaaattttacccattctttaattcagcatctccctatgtatgtgtcatagaatacttagttctgctagatattctgcaaatatatttgggaattacttcctgctgtttcgccttcttaggttcatagtacacatcagcatatgagaatctctgagaggtcctctagaaaggagagaaaaagcacctcttttggctcaatgttttccaaacttatttgaccccaaaacctttttcatatacccaataataagctacagaactaatattctgcaaatgtctcttggaacacactgccttaaacagatatttctatagctgtcagtatagttatgttgctcccaagcctagttatctccagttgttttaagggtgttatgaaaaattcttaaaatatatatgaatttgtgtaacacacacagagacacacacacatactactttaagggggtgaggatcattaattcagataatttttaagtttcctagtgattctcaatctctttgaattttacttacatttacacacacacgcacacacatatgtatatacacatatcattttaagaagctgaggatcactaattcagataatgtataagtttcccagtgattctcaacctctttgaattttacttataattacatacacacacacactgctacttatataaatgttctcatgtaatcatggtaacagctcaaattcccaaagcaagggaagacttctcattgtcagttaaacctgttaaaacatgaaaatattcattgagcctagttccttgttataaaatacaagaaataagacattcaggcattttccctttatgaagatgttcagtcatcctttccttgaactacaattaggaaaagtatatgtctttattccattgaagttctcgagagtgatataaatactttggggggtatctactatgtgcctaactagtcctgttctaggcttagtggaagctagtaaagaaatataattcatggatcaggctcataaagattttataatatttttagttaaacaagagttgggaaacaggtggagaataatgcaagagagtttgtaattaagtgccaattataccaattgctagacccaggatgtatctttaattcttgtcatccaggtcaacatatgatgctgctataagtctggggctcaaattgatatcccagtagcaataaacatataatataggaggagtctgaatgtagagatgaaaaatacagaatgtaatggcttctcttttctctcttgtggaattgcattcaaaccagaacagtgccttagaatggatgtgcccaactgctctgtatttatgcaatatttgaataaagcggaaatgtatgtgctcttcctgcttcacttgcactaattaattatttgaacaacttagagcttcttccctgaacagtggcaacaagcatggcaattgactctgtcctcatcccaagttggaatcgcttttctctctgcaaccatg

SEQ ID NO: 20347 - DNA, 396 bp, Homo sapiens
ctcgtgccgaattcggcacgagattattttgtataatattgcaaatgtaaaatgacaatttgggtctatttttttatatggattgtagatcaatccatacgtgtatgtgctggtctcatcctccccagtttatatttttgtgcaaatgaacttctccttttgaccagtaaccaccttccttcaagccttcagcccctccagctccaagtctcagatctcgaccattgaaaaggtttcttcatctgggtcttgcaggaggcaggcaacaccaggagcagaaatgaaagaggcaagaaagaagtgctatgtggcgagaaaaaaagttttaatgtattggagaagttttaaaaaacccagaaaaacgccttttttttttaataaagaagaaatttaaaa

SEQ ID NO: 20348 - DNA, 2433 bp, Homo sapiens
gacttctataccgtggaaaccatcacctcaggctcgtcgtgcaagtgtgcctgtgtagcacccccatcggccctcaatccctgcgagggagacttcaggctccagaagctgcgggaggcagacagccaggacttgaagctctccacaatcatagacatgttggaaggagcgttctatggcctggatctcctgaagctacattcagtcaccaccaaactggtggggcgagtggataaactggaggaggaagtgtctaaaaacctcaccaaggaaaatgaacaaatcaaagaggacatggaagaaattcgaaccgagatgaataagcgaggcaaagaaaattgctctgaaaacatcctagatagcatgccagacatccgctcagccctgcagagggatgcagcagcagcctacgcccacccagagtatgaagagcggtttctgcaggaagaaaccgtgtcccagcagatcaactccatcgaacttctgcagacgcgacccctggctctgcctgaggtggtgaagtcacagcggcccctgcagaggcaggtccacctgagaggccggccggcctcccagcccactgtcatccggggcatcacctactataaagccaaggtctctgaagaagagaatgacattgaagagcagcaagatgagtttttcagcggtgacaatggagtggatttgctgattgaagatcagctcctgagacacaacggcctgatgaccagtgtcacccggaggcctgcagccacccgtcagggacacagcactgctgtgacaagcgacctgaacgctcggaccgcaccctggtcctcagcactgccacagccctcgacctcagatcccagcatcgccaaccatgcctcagtgggaccaacactccaaacaacctcggtgtctccagatcccacaagggagtcagtcctgcagccttctcctcaggtaccagccaccactgtggcccacacagccacccagcaaccagcagccccagctcctccggcagtgtctcccagggaggcattgatggaagctatgcacacagtcccagtgcctcccaccacagtcagaacagactcgctggggaaagatgctcctgctgggcggggaacaacccctgccagccccacgctgagccccgaagaagaagatgacatccggaatgtcataggaaggtgcaaggacactctctccacaatcacggggccgaccacccagaacacatatgggcggaatgaaggggcctggatgaaggaccccctggccaaggatgagcggatttacgtaaccaactattactacggcaacaccctggtagagttccggaacctggagaacttcaaacaaggtcgctggagcaattcctacaagctcccgtacagctggatcggcacaggccacgtggtatacaatggcgccttctactacaatcgcgccttcacccgcaacatcatcaagtacgacctgaagcagcgctacgtggctgcctgggccatgctgcatgacgtggcctacgaggaggccaccccctggcgatggcagggccactcagacgtggactttgctgtggacgagaatggcctatggctcatctacccggccctggacgatgagggcttcagccaggaggtcattgtcctgagcaagctcaatgccgcggacctgagcacacagaaggagaccacatggcgcacggggctccggaggaatttctacggcaactgcttcgtcatctgtggggtgctgtatgccgtggatagctacaaccagcggaatgccaacatctcctacgctttcgacacccacaccaacacacagatcgtccccaggctgctgttcgagaatgagtattcctatacgacccagatagactacaaccccaaggaccgcctgctctatgcctgggacaatggccaccaggtcacttaccatgtcatctttgcctactgacacccttgtccccacaagcagaagcacagaggggtcactagcaccttgtgtgtatgtgtgtgcgcgcacgtgtgtgtaggtgggtatgtgttgtttaaaaatatatattattttgtataatattgcaaatgtaaaatgacaatttgggtctatttttttatatggattgtagatcaatccatacgtgtatgtgctggtctcatcctccccagtttatatttttgtgcaaatgaacttctccttttgaccagtaaccaccttccttcaagccttcagcccctccagctccaagtctcagatctcgaccattgaaaaggtttcttcatctgggtcttgcaggaggcaggcaacaccaggagcagaaatgaaagaggcaagaaagaagtgctatgtggcgagaaaaaaagttttaatgtattggagaagttttaaaaaacccagaaaaacgccttttttttttaataaagaagaaatttaaaa

SEQ ID NO: 20349 - DNA, 1995 bp, Homo sapiens
cttccctccccgtgtccggtccccgtgcgtcccgaggctccccgccgcccgtcccggcgcgcaccgcgggcgtctgtccgaacgccttccagccacctgagccctcctgcgggcgactcgctcagctagcccgtgcccgcctccaccttctccgtcatcccctactataaagccaaggtctctgaagaagagaatgacattgaagagcagcaagatgagtttttcagcggtgacaatggagtggatttgctgattgaagatcagctcctgagacacaacggcctgatgaccagtgtcacccggaggcctgcagccacccgtcagggacacagcactgctgtgacaagcgacctgaacgctcggaccgcaccctggtcctcagcactgccacagccctcgacctcagatcccagcatcgccaaccatgcctcagtgggaccaacactccaaacaacctcggtgtctccagatcccacaagggagtcagtcctgcagccttctcctcaggtaccagccaccactgtggcccacacagccacccagcaaccagcagccccagctcctccggcagtgtctcccagggaggcattgatggaagctatgcacacagtcccagtgcctcccaccacagtcagaacagactcgctggggaaagatgctcctgctgggcggggaacaacccctgccagccccacgctgagccccgaagaagaagatgacatccggaatgtcataggaaggtgcaaggacactctctccacaatcacggggccgaccacccagaacacatatgggcggaatgaaggggcctggatgaaggaccccctggccaaggatgagcggatttacgtaaccaactattactacggcaacaccctggtagagttccggaacctggagaacttcaaacaaggtcgctggagcaattcctacaagctcccgtacagctggatcggcacaggccacgtggtatacaatggcgccttctactacaatcgcgccttcacccgcaacatcatcaagtacgacctgaagcagcgctacgtggctgcctgggccatgctgcatgacgtggcctacgaggaggccaccccctggcgatggcagggccactcagacgtggactttgctgtggacgagaatggcctatggctcatctacccggccctggacgatgagggcttcagccaggaggtcattgtcctgagcaagctcaatgccgcggacctgagcacacagaaggagaccacatggcgcacggggctccggaggaatttctacggcaactgcttcgtcatctgtggggtgctgtatgccgtggatagctacaaccagcggaatgccaacatctcctacgctttcgacacccacaccaacacacagatcgtccccaggctgctgttcgagaatgagtattcctatacgacccagatagactacaaccccaaggaccgcctgctctatgcctgggacaatggccaccaggtcacttaccatgtcatctttgcctactgacacccttgtccccacaagcagaagcacagaggggtcactagcaccttgtgtgtatgtgtgtgcgcgcacgtgtgtgtaggtgggtatgtgttgtttaaaaatatatattattttgtataatattgcaaatgtaaaatgacaatttgggtctatttttttatatggattgtagatcaatccatacgtgtatgtgctggtctcatcctccccagtttatatttttgtgcaaatgaacttctccttttgaccagtaaccaccttccttcaagccttcagcccctccagctccaagtctcagatctcgaccattgaaaaggtttcttcatctgggtcttgcaggaggcaggcaacaccaggagcagaaatgaaagaggcaagaaagaagtgctatgtggcgagaaaaaaagttttaatgtattggagaagttttaaaaaacccagaaaaacgccttttttttttaataaagaagaaatttaaaa

SEQ ID NO: 20350 - DNA, 1536 bp, Homo sapiens
ctttgaaggataggactgagaagtcagaacaggagcaaagcatagtggtgtgaaagttgccaaagatgggcatggtggaggctcaagtgtagggtcaagtgtagggtggatcaggggagtagcaggagatggtgtggaaaaatgtttggggtcaggttatacagggctgttaaagcctgccgaggagtccagactctaaatggatgaacagcaaaggtttaaggggtgaggcatcactagatcagcccaaaacctccatccacctcttctccaccaggaaggtgcaaggacactctctccacaatcacggggccgaccacccagaacacatatgggcggaatgaaggggcctggatgaaggaccccctggccaaggatgagcggatttacgtaaccaactattactacggcaacaccctggtagagttccggaacctggagaacttcaaacaaggtcgctggagcaattcctacaagctcccgtacagctggatcggcacaggccacgtggtatacaatggcgccttctactacaatcgcgccttcacccgcaacatcatcaagtacgacctgaagcagcgctacgtggctgcctgggccatgctgcatgacgtggcctacgaggaggccaccccctggcgatggcagggccactcagacgtggactttgctgtggacgagaatggcctatggctcatctacccggccctggacgatgagggcttcagccaggaggtcattgtcctgagcaagctcaatgccgcggacctgagcacacagaaggagaccacatggcgcacggggctccggaggaatttctacggcaactgcttcgtcatctgtggggtgctgtatgccgtggatagctacaaccagcggaatgccaacatctcctacgctttcgacacccacaccaacacacagatcgtccccaggctgctgttcgagaatgagtattcctatacgacccagatagactacaaccccaaggaccgcctgctctatgcctgggacaatggccaccaggtcacttaccatgtcatctttgcctactgacacccttgtccccacaagcagaagcacagaggggtcactagcaccttgtgtgtatgtgtgtgcgcgcacgtgtgtgtaggtgggtatgtgttgtttaaaaatatatattattttgtataatattgcaaatgtaaaatgacaatttgggtctatttttttatatggattgtagatcaatccatacgtgtatgtgctggtctcatcctccccagtttatatttttgtgcaaatgaacttctccttttgaccagtaaccaccttccttcaagccttcagcccctccagctccaagtctcagatctcgaccattgaaaaggtttcttcatctgggtcttgcaggaggcaggcaacaccaggagcagaaatgaaagaggcaagaaagaagtgctatgtggcgagaaaaaaagttttaatgtattggagaagttttaaaaaacccagaaaaacgccttttttttttaataaagaagaaatttaaaa

SEQ ID NO: 20351 - DNA, 1108 bp, Homo sapiens
acagcagttagttgtgttagcgtctgaaacttgctgagtgtcgttactggtgtagattatacatgtcatgatgtattatatggcaatcatagatcaagcgtttccttcttccgtaccacaaatcattacagtcattaagtgttgccataatgaaagacatggagacatagcataggaaatgacagtggcctacgaggaggccaccccctggcgatggcagggccactcagacgtggactttgctgtggacgagaatggcctatggctcatctacccggccctggacgatgagggcttcagccaggaggtcattgtcctgagcaagctcaatgccgcggacctgagcacacagaaggagaccacatggcgcacggggctccggaggaatttctacggcaactgcttcgtcatctgtggggtgctgtatgccgtggatagctacaaccagcggaatgccaacatctcctacgctttcgacacccacaccaacacacagatcgtccccaggctgctgttcgagaatgagtattcctatacgacccagatagactacaaccccaaggaccgcctgctctatgcctgggacaatggccaccaggtcacttaccatgtcatctttgcctactgacacccttgtccccacaagcagaagcacagaggggtcactagcaccttgtgtgtatgtgtgtgcgcgcacgtgtgtgtaggtgggtatgtgttgtttaaaaatatatattattttgtataatattgcaaatgtaaaatgacaatttgggtctatttttttatatggattgtagatcaatccatacgtgtatgtgctggtctcatcctccccagtttatatttttgtgcaaatgaacttctccttttgaccagtaaccaccttccttcaagccttcagcccctccagctccaagtctcagatctcgaccattgaaaaggtttcttcatctgggtcttgcaggaggcaggcaacaccaggagcagaaatgaaagaggcaagaaagaagtgctatgtggcgagaaaaaaagttttaatgtattggagaagttttaaaaaacccagaaaaacgccttttttttttaataaagaagaaatttaaaa

SEQ ID NO: 20352 - DNA, 692 bp, Homo sapiens
agggttcttgcggtgctcgttgagccaggccttgagggtatccttggcgtcccgattttgacgcgttctccaacacacagatcgtccccaggctgctgttcgagaatgagtattcctatacgacccagatagactacaaccccaaggaccgcctgctctatgcctgggacaatggccaccaggtcacttaccatgtcatctttgcctactgacacccttgtccccacaagcagaagcacagaggggtcactagcaccttgtgtgtatgtgtgtgcgcgcacgtgtgtgtaggtgggtatgtgttgtttaaaaatatatattattttgtataatattgcaaatgtaaaatgacaatttgggtctatttttttatatggattgtagatcaatccatacgtgtatgtgctggtctcatcctccccagtttatatttttgtgcaaatgaacttctccttttgaccagtaaccaccttccttcaagccttcagcccctccagctccaagtctcagatctcgaccattgaaaaggtttcttcatctgggtcttgcaggaggcaggcaacaccaggagcagaaatgaaagaggcaagaaagaagtgctatgtggcgagaaaaaaagttttaatgtattggagaagttttaaaaaacccagaaaaacgccttttttttttaataaagaagaaatttaaaa

SEQ ID NO: 20353 - DNA, 2243 bp, Homo sapiens
gacttctataccgtggaaaccatcacctcaggctcgtcgtgcaagtgtgcctgtgtagcacccccatcggccctcaatccctgcgagggagacttcaggctccagaagctgcgggaggcagacagccaggacttgaagctctccacaatcatagacatgttggaaggagcgttctatggcctggatctcctgaagctacattcagtcaccaccaaactggtggggcgagtggataaactggaggaggaagtgtctaaaaacctcaccaaggaaaatgaacaaatcaaagaggacatggaagaaattcgaaccgagatgaataagcgaggcaaagaaaattgctctgaaaacatcctagatagcatgccagacatccgctcagccctgcagagggatgcagcagcagcctacgcccacccagagtatgaagagcggtttctgcaggaagaaaccgtgtcccagcagatcaactccatcgaacttctgcagacgcgacccctggctctgcctgaggtggtgaagtcacagcggcccctgcagaggcaggtccacctgagaggccggccggcctcccagcccactgtcatccggggcatcacctactataaagccaaggtctctgaagaagagaatgacattgaagagcagcaagatgagtttttcagcggtgacaatggagtggatttgctgattgaagatcagctcctgagacacaacggcctgatgaccagtgtcacccggaggcctgcagccacccgtcagggacacagcactgctgtgacaagcgacctgaacgctcggaccgcaccctggtcctcagcactgccacagccctcgacctcagatcccagcatcgccaaccatgcctcagtgggaccaacactccaaacaacctcggtgtctccagatcccacaagggagtcagtcctgcagccttctcctcaggtaccagccaccactgtggcccacacagccacccagcaaccagcagccccagctcctccggcagtgtctcccagggaggcattgatggaagctatgcacacagtcccagtgcctcccaccacagtcagaacagactcgctggggaaagatgctcctgctgggcggggaacaacccctgccagccccacgctgagccccgaagaagaagatgacatccggaatgtcataggaaggtgcaaggacactctctccacaatcacggggccgaccacccagaacacatatgggcggaatgaaggggcctggatgaaggaccccctggccaaggatgagcggatttacgtaaccaactattactacggcaacaccctggtagagttccggaacctggagaacttcaaacaaggtcgctggagcaattcctacaagctcccgtacagctggatcggcacaggccacgtggtatacaatggcgccttctactacaatcgcgccttcacccgcaacatcatcaagtacgacctgaagcagcgctacgtggctgcctgggccatgctgcatgacgtggcctacgaggaggccaccccctggcgatggcagggccactcagacgtggactttgctgtggacgagaatggcctatggctcatctacccggccctggacgatgagggcttcagccaggaggtcattgtcctgagcaagctcaatgccgcggacctgagcacacagaaggagaccacatggcgcacggggctccggaggaatttctacggcaactgcttcgtcatctgtggggtgctgtatgccgtggatagctacaaccagcggaatgccaacatctcctacgctttcgacacccacaccaacacacagatcgtccccaggctgctgttcgagaatgagtattcctatacgacccagatagactacaaccccaaggaccgcctgctctatgcctgggacaatggccaccaggtcacttaccatgtcatctttgcctactgacacccttgtccccacaagcagaagcacagaggggtcactagcaccttgtgtgtatgtgtgtgcgcgcacgtgtgtgtagccttcagcccctccagctccaagtctcagatctcgaccattgaaaaggtttcttcatctgggtcttgcaggaggcaggcaacaccaggagcagaaatgaaagaggcaagaaagaagtgctatgtggcgagaaaaaaagttttaatgtattggagaagttttaaaaaacccagaaaaacgccttttttttttaataaagaagaaatttaaaa

SEQ ID NO: 20354 - DNA, 2173 bp, Homo sapiens
gacttctataccgtggaaaccatcacctcaggctcgtcgtgcaagtgtgcctgtgtagcacccccatcggccctcaatccctgcgagggagacttcaggctccagaagctgcgggaggcagacagccaggacttgaagctctccacaatcatagacatgttggaaggagcgttctatggcctggatctcctgaagctacattcagtcaccaccaaactggtggggcgagtggataaactggaggaggaagtgtctaaaaacctcaccaaggaaaatgaacaaatcaaagaggacatggaagaaattcgaaccgagatgaataagcgaggcaaagaaaattgctctgaaaacatcctagatagcatgccagacatccgctcagccctgcagagggatgcagcagcagcctacgcccacccagagtatgaagagcggtttctgcaggaagaaaccgtgtcccagcagatcaactccatcgaacttctgcagacgcgacccctggctctgcctgaggtggtgaagtcacagcggcccctgcagaggcaggtccacctgagaggccggccggcctcccagcccactgtcatccggggcatcacctactataaagccaaggtctctgaagaagagaatgacattgaagagcagcaagatgagtttttcagcggtgacaatggagtggatttgctgattgaagatcagctcctgagacacaacggcctgatgaccagtgtcacccggaggcctgcagccacccgtcagggacacagcactgctgtgacaagcgacctgaacgctcggaccgcaccctggtcctcagcactgccacagccctcgacctcagatcccagcatcgccaaccatgcctcagtgggaccaacactccaaacaacctcggtgtctccagatcccacaagggagtcagtcctgcagccttctcctcaggtaccagccaccactgtggcccacacagccacccagcaaccagcagccccagctcctccggcagtgtctcccagggaggcattgatggaagctatgcacacagtcccagtgcctcccaccacagtcagaacagactcgctggggaaagatgctcctgctgggcggggaacaacccctgccagccccacgctgagccccgaagaagaagatgacatccggaatgtcataggaaggtgcaaggacactctctccacaatcacggggccgaccacccagaacacatatgggcggaatgaaggggcctggatgaaggaccccctggccaaggatgagcggatttacgtaaccaactattactacggcaacaccctggtagagttccggaacctggagaacttcaaacaaggtcgctggagcaattcctacaagctcccgtacagctggatcggcacaggccacgtggtatacaatggcgccttctactacaatcgcgccttcacccgcaacatcatcaagtacgacctgaagcagcgctacgtggctgcctgggccatgctgcatgacgtggcctacgaggaggccaccccctggcgatggcagggccactcagacgtggactttgctgtggacgagaatggcctatggctcatctacccggccctggacgatgagggcttcagccaggaggtcattgtcctgagcaagctcaatgccgcggacctgagcacacagaaggagaccacatggcgcacggggctccggaggaatttctacggcaactgcttcgtcatctgtggggtgctgtatgccgtggatagctacaaccagcggaatgccaacatctcctacgctttcgacacccacaccaacacacagatcgtccccaggctgctgttcgagaatgagtattcctatacgacccagatagactacaaccccaaggaccgcctgctctatgcctgggacaatggccaccaggtcacttaccatgtcatctttgcctactgacacccttgtccccacaagcagaagcacagaggggtcactagcaccttgtgtgtatgtgtgtgcgcgcacgtgtgtgtaggaggcaggcaacaccaggagcagaaatgaaagaggcaagaaagaagtgctatgtggcgagaaaaaaagttttaatgtattggagaagttttaaaaaacccagaaaaacgccttttttttttaataaagaagaaatttaaaa

SEQ ID NO: 20355 - DNA, 417 bp, Homo sapiens
aaggaaactctgccctgtgtctgtgtgccccagccctggactaaccccttgccttgtttcatagctctccacaatcatagacatgttggaaggagcgttctatggcctggatctcctgaagctacattcagtcaccaccaaactggtggggcgagtggataaactggaggaggtaaggaagattctggtttctatatctttttcttgattgagcccaaaagcatatcaaacgtcccacagtaaattttcagctagcacatgtgctgactagacttaacccatcctattctatgaaagggaaaatatacataaaagattcattcaaaattatgccaaattgttggtgacaaagaaaatcagttaagtagaaatgccaatactgtaccttctttttttcataaaatccccttaatcata

SEQ ID NO: 20356 - DNA, 5320 bp, Homo sapiens
tagaattttcagtgaaggtatctgtcagtatttatggcagctgggtgcttcttgcccttctttaagcagttcagggactccaaatctgtcaaccgttgtgagtatggaagagccctcattacgggtgagagggatgcttactttaacttcgaaggagggtataatttctcttaaaaaaggaaacattgtacttaacccgactacctagtgcatagtactggttgagtgagtgaactaggtttttgttgattgtagtagtggtggttttgttggttttgttgtgtttttctgctttttggttgaacgtgtaaatgaaggcctgaggtgatttaattatttgcaaattcagtaagtaaaatattttcaaaaagagaatattacagaaatctgaagaaaggctgaaagtggcagtgaaggtatttgttagataataattgggaagaatttcctggcagaatagttcaaacattttctaaggttccaaatatggttgtataatctccttccatggcggtctttaaaagaaagattatttctttccttgaaatattttaaaggtgagtctttctgtagcacatggtgtagtttgtagcattctgtaatcatgtcagattcaaaaagtgagataaacttttatatttatttgcagaaggatagctaatcattctcaataagaatatttaaaatagtgtaggatgaagggattgtttaaccactgtaccacttataaactattaatctttatttgggattaaaaatatcctagcaggtttttttttttgtttgtttgtttgttttttttttttttttggagacagtatctcactctttcacccaggctggagtatagtgacatgatcacagctcactgtagccttgacttccgagactcaagcaatcctcccccttcaacctcctcagtaactgggactacaagtgcatgcctgtgtacccagctagaataataataggaaatagtttattctctcctcatctttttttttttttaatagaaaggtgttaatctttacttggaattaagaatttgctactcagtatttttttttttttttttgagatggagtctcgccctgtcacccaggctggagtgcagtggtgtgatcttagctcactgcaacctctgcctcctgggttcaagtgatcgtcctgcctcagcctcccgagtagctggaattataggtgtgtgccaccatgtctggctaattttttgtatttttagtagagatgggatttcaattcaccatgttggccaggctgatctcgaattcctgacctcaagtgatctacccacctcggcctcccaaagtgctgggattacaggcgtgagccaccatctccggcctgctagtcagtattttaatagaagtttggtaattgtatctcttgttttaaaaaaacactaattattagaaatggattgtgtctgtaagtatatgtatatacataaatatgccacattttgtaatttcttgtcaaaaattatccaaattctaggaattatatgtaatgaaaggagcacagtaaaaaagctgttcattaggttctttagggattctcattttttaattgaaaaaagacatttgtttaattgaaagttgttgacattgatcatattaatacagaaaatgttgagtgattatacttaggggttctcattttttaactgaaaaaatcttatttgtttaattgaaagtggttgacattgatcatattaatacagtaaatgttaagggtgattatatatagtagtaatgtgtgcttttaaaactaaacatttgaaaattaaaagaagaaagattgtgaattttttgttagatttagtttttcctttttattacaaggaatacatacatacaaattaaattattgccataaatgaagaaattgtcatttatgtagcatttgtataattttattacttacctttaggcattactatcacgttaacttgggaagatagaaatgactagagtaaattttctcttctataatatttgtctagttgtgttttgtttttttttttttaatcctgtagtttaagaatgatgtttaaaaaacacttttgtttctctcagcctctggaattgctttggcactcgttagatgaatggctagttttaatagccacagaattgatgaaaaacaaaagagactcaacagagatcacttctattttactgaaacaaaaaggccaagatcaagatgctgcttccattcctccatttgaacctccaggacctgggagctatgaaaatctgtccactggcacaagggaatctaaaccagatgctcttgcagggagacaggaagccagtgcagattgtcaggatgttatttctatgacagctaaccggctaagtgctgtcattcaagctttttacatgtgctgttcttgtcagatgcctccgggaatgacttcacctcgtttcattgaatttgtctgcaaacatgatgaagttttaaaatgctttgttaatagaaatcccaaaattatatttgaccactttcactttctccttgaatgtcctgagttgatgtcaagattcatgcatatcataaaagcacagccttttaaagatcgctgtgaatggttctatgaacatttgcattcaggacagccagattcagatatggtgcacaggccagtgaatgaaaatgatatcctgctggttcacagagattctatttttaggagtagctgtgaagttgtgtcaaaagcaaattgtgcaaagctaaagcaagggattgctgtacggttccatggagaagaaggcatgggtcaaggtgttgtgcgtgagtggtttgatattctgtccaatgagatagtcaatcctgattatgcattgtttacccagtcagctgatggaacaacttttcagcctaatagcaactcttatgtaaatcctgatcacttgaactattttcggtttgctgggcagatcttgggattagcgttgaaccacaggcagctggtcaatatttacttcacacgatccttctacaagcacattcttggtattcctgtaaattaccaagatgtggcatccattgatccagaatatgcgaaaaatttgcaatggattttagataatgatataagtgatctgggtctagaactaactttttctgttgagactgatgtgtttggagcaatggaagaggtgcctttgaaacctgggggtgggagtattcttgtgacacaaaataataaagcggagtacgtccagcttgttactgaacttcgaatgacaagagccattcagcctcagatcaatgcttttttacagggctttcatatgttcattccaccctccctcatacagctttttgatgaatatgaattggagctactgctttctggcatgccagaaattgatgtgagtgattggataaaaaatacagaatacacaagtggctatgaaagagaagatccagttattcagtggttctgggaagttgtagaagacattactcaagaggagagagttcttctcttacagtttgttacgggcagttccagggtcccacatggtgggtttgctaatatcatgggtggaagtggattgcaaaactttacaatcgctgctgtgccatatactccaaatcttttaccaacttcaagcacatgcatcaacatgctcaagttacctgaatacccaagtaaagaaatactcaaggacagacttcttgtggcactacattgtggcagctatggttacacaatggcataatgaagtctggaaaactcctctgactactgatgcacaattcagaatggcagaagtaatttgggaaaatgtcaacaaaaaagcagcctaaatgcaacccataggcagggctgatgcttccaatttataaaggatcatcaggttttctgtttctctcttttcccttttatgttttctctgtttgtgatacaattagaaaatataaaatcacagtagattttattttttaaaatgctaactgaaagtaatagagactgtcctttttcataattaattttatccaagattgtattaaggcaaaatctgattctacattccacctctgctatgtaactgtcttgttaaaagggtgttttctcctaatttctgatatattatatgaggtcatccagctggtgtgttcttttgcatgtaaactgccatttatattttagaaaactattgtatagaatggatttagattgtctataaagccacaaatacgtattttgccacagtgtattctatattgcaatgatttttttagcattttaatattttaatatatattgtaaaatttagactgatgatactaacagttgatgaaatgacatataatttatatatgaaagcttacgctatattgtatgaattatttgcatctttcagtggccagttttccatatgtatatattatggtctcaatgtttttcttacgcctcattttaatttataatgaaggtaaaattaaaatgtattttaccacgtttcttttcattacttttatctgtgagctctgacacatctgaaaaagtaatctgatgtgcaaattataatttaaatatgttaatttttttgcttcttaaatttgcttttcatcattaaaatgtcaagttcaagtgatatgtgcctaatatcacttggatgttggtgggtttttgaatttttgggtggttaatcagttttattttgaaaagacgtacttgaatagttacagcatatgtttgaacaggaagtaggaacatgcatacacgaagaaatgctaacggaaggatttgttatgtttaggatcttcccttggaaactaaaaatagaatattaatgacattactgtttgtagaatgacatatgcagattttctcataagcagtcattgtgtttgccagtaatgtttgagagacatgtaagttgaaagttttgctaaattataaagctcctttaattcgttggttttgattctcttattctcttgtcttttctaaatgttaacaaaatatatcttaacagattacatgaaatttaggaattatttaaaagttaccattagctctaaaattaagattcggatgctttatttatagtaactgaagctaataatgttttatgttttgattttttgaaatttaattgtagaagtcactgccttctgagttttcaaatagataaccacctttaatattacactgcttataatactaatgtttacagatatgtttctgtttataaccatataatacattggctttgtcatattagttttttttgcaagtagttatgtaaaagagatagataataaaatattaaataactga

SEQ ID NO: 20357 - DNA, 2605 bp, Homo sapiens
cagtacctaaagattctaacaagccttgctgaagttgctacaacaaatggtcataaactgcttagcctctctagcaattatgatgctcaaatgaagagccttttaaggattgtgagaatgttttgtcacgtctttcgaattggtccatcctcccccagtaatggaattgatatgggctacaatgggaataaaactccaagaagccaggtgttcaagcctctggaattgctttggcactcgttagatgaatggctagttttaatagccacagaattgatgaaaaacaaaagagactcaacagagatcacttctattttactgaaacaaaaaggccaagatcaagatgctgcttccattcctccatttgaacctccaggacctgggagctatgaaaatctgtccactggcacaagggaatctaaaccagatgctcttgcagggagacaggaagccagtgcagattgtcaggatgttatttctatgacagctaaccggctaagtgctgtcattcaagctttttacatgtgctgttcttgtcagatgcctccgggaatgacttcacctcgtttcattgaatttgtctgcaaacatgatgaagttttaaaatgctttgttaatagaaatcccaaaattatatttgaccactttcactttctccttgaatgtcctgagttgatgtcaagattcatgcatatcataaaagcacagccttttaaagatcgctgtgaatggttctatgaacatttgcattcaggacagccagattcagatatggtgcacaggccagtgaatgaaaatgatatcctgctggttcacagagattctatttttaggagtagctgtgaagttgtgtcaaaagcaaattgtgcaaagctaaagcaagggattgctgtacggttccatggagaagaaggcatgggtcaaggtgttgtgcgtgagtggtttgatattctgtccaatgagatagtcaatcctgattatgcattgtttacccagtcagctgatggaacaacttttcagcctaatagcaactcttatgtaaatcctgatcacttgaactattttcggtttgctgggcagatcttgggattagcgttgaaccacaggcagctggtcaatatttacttcacacgatccttctacaagcacattcttggtattcctgtaaattaccaagatgtggcatccattgatccagaatatgcgaaaaatttgcaatggattttagataatgatataagtgatctgggtctagaactaactttttctgttgagactgatgtgtttggagcaatggaagaggtgcctttgaaacctgggggtgggagtattcttgtgacacaaaataataaagcggagtacgtccagcttgttactgaacttcgaatgacaagagccattcagcctcagatcaatgcttttttacagggctttcatatgttcattccaccctccctcatacagctttttgatgaatatgaattggagctactgctttctggcatgccagaaattgatgtgagtgattggataaaaaatacagaatacacaagtggctatgaaagagaagatccagttattcagtggttctgggaagttgtagaagacattactcaagaggagagagttcttctcttacagtttgttacgggcagttccagggtcccacatggtgggtttgctaatatcatgggtggaagtggattgcaaaactttacaatcgctgctgtgccatatactccaaatcttttaccaacttcaagcacatgcatcaacatgctcaagttacctgaatacccaagtaaagaaatactcaaggacagacttcttgtggcactacattgtggcagctatggttacacaatggcataatgaagtctggaaaactcctctgactactgatgcacaattcagaatggcagaagtaatttgggaaaatgtcaacaaaaaagcagcctaaatgcaacccataggcagggctgatgcttccaatttataaaggatcatcaggttttctgtttctctcttttcccttttatgttttctctgtttgtgatacaattagaaaatataaaatcacagtagattttattttttaaaatgctaactgaaagtaatagagactgtcctttttcataattaattttatccaagattgtattaaggcaaaatctgattctacattccacctctgctatgtaactgtcttgttaaaagggtgttttctcctaatttctgatatattatatgaggtcatccagctggtgtgttcttttgcatgtaaactgccatttatattttagaaaactattgtatagaatggatttagattgtctataaagccacaaatacgtattttgccacagtgtattctatattgcaatgatttttttagcattttaatattttaatatatattgtaaaatttagactgatgatactaacagttgatgaaatgacatataatttatatatgaaagcttacgctatattgtatgaattatttgcatctttcagtggccagttttccatatgtatatattatggtctcaatgtttttcttacgcctcattttaatttataatgaaggtaaaattaaaatgta

SEQ ID NO: 20358 - DNA, 591 bp, Homo sapiens
aaaaatttgcaatggattttagataatgatataagtgatctgggtctagaactaactttttctgttgagactgatgtgtttggagcaatggaagaggtgcctttgaaacctgggggtgggagtattcttgtgacacaaaataataaagtgagtatttcagtttttaccttaaccattgtttgtaacttggccctgatagtttgctagttactctaaattcttctggcacttgtagaaaaacttttactattacagtatcatagcagataaaacgtttaagttaataaaacaatcaaatgttaaattttgaattagaaaggattattttgataattgtgctagctgtgctgagttggttcctaaaaaatcgagagcacttcagctgatagtataaattgggcatatgcattttgagaaatttgattagaaatataagcttaaatgaagatatttgcaaaaattgctctttcatgtttttaaagtgtaatattaaagaattctaatagagaaaagaaatgccagtgtttaagctttccacatacttttgggatccagtaagtttgttcgaccttttgatatttttttgactgt

SEQ ID NO: 20359 - DNA, 3440 bp, Homo sapiens
cagtacctaaagattctaacaagccttgctgaagttgctacaacaaatggtcataaactgcttagcctctctagcaattatgatgctcaaatgaagagccttttaaggattgtgagaatgttttgtcacgtctttcgaattggtccatcctcccccagtaatggaattgatatgggctacaatgggaataaaactccaagaagccaggtgttcaagcctctggaattgctttggcactcgttagatgaatggctagttttaatagccacagaattgatgaaaaacaaaagagactcaacagagatcacttctattttactgaaacaaaaaggccaagatcaagatgctgcttccattcctccatttgaacctccaggacctgggagctatgaaaatctgtccactggcacaagggaatctaaaccagatgctcttgcagggagacaggaagccagtgcagattgtcaggatgttatttctatgacagctaaccggctaagtgctgtcattcaagctttttacatgtgctgttcttgtcagatgcctccgggaatgacttcacctcgtttcattgaatttgtctgcaaacatgatgaagttttaaaatgctttgttaatagaaatcccaaaattatatttgaccactttcactttctccttgaatgtcctgagttgatgtcaagattcatgcatatcataaaagcacagccttttaaagatcgctgtgaatggttctatgaacatttgcattcaggacagccagattcagatatggtgcacaggccagtgaatgaaaatgatatcctgctggttcacagagattctatttttaggagtagctgtgaagttgtgtcaaaagcaaattgtgcaaagctaaagcaagggattgctgtacggttccatggagaagaaggcatgggtcaaggtgttgtgcgtgagtggtttgatattctgtccaatgagatagtcaatcctgattatgcattgtttacccagtcagctgatggaacaacttttcagcctaatagcaactcttatgtaaatcctgatcacttgaactattttcggtttgctgggcagatcttgggattagcgttgaaccacaggcagctggtcaatatttacttcacacgatccttctacaagcacattcttggtattcctgtaaattaccaagatgtggcatccattgatccagaatatgcgaaaaatttgcaatggattttagataatgatataagtgatctgggtctagaactaactttttctgttgagactgatgtgtttggagcaatggaagaggtgcctttgaaacctgggggtgggagtattcttgtgacacaaaataataaagcggagtacgtccagcttgttactgaacttcgaatgacaagagccattcagcctcagatcaatgcttttttacagggctttcatatgttcattccaccctccctcatacagctttttgatgaatatgaattggagctactgctttctggcatgccagaaattgatgtgagtgattggataaaaaatacagaatacacaagtggctatgaaagagaagatccagttattcagtggttctgggaagttgtagaagacattactcaagaggagagagttcttctcttacagtttgttacgggcagttccagggtcccacatggtgggtttgctaatatcatgggtggaagtggattgcaaaactttacaatcgctgctgtgccatatactccaaatcttttaccaacttcaagcacatgcatcaacatgctcaagttacctgaatacccaagtaaagaaatactcaaggacagacttcttgtggcactacattgtggcagctatggttacacaatggcataatgaagtctggaaaactcctctgactactgatgcacaattcagaatggcagaagtaatttgggaaaatgtcaacaaaaaagcagcctaaatgcaacccataggcagggctgatgcttccaatttataaaggatcatcaggttttctgtttctctcttttcccttttatgttttctctgtttgtgatacaattagaaaatataaaatcacagtagattttattttttaaaatgctaactgaaagtaatagagactgtcctttttcataattaattttatccaagattgtattaaggcaaaatctgattctacattccacctctgctatgtaactgtcttgttaaaagggtgttttctcctaatttctgatatattatatgaggtcatccagctggtgtgttcttttgcatgtaaactgccatttatattttagaaaactattgtatagaatggatttagattgtctataaagccacaaatacgtattttgccacagtgtattctatattgcaatgatttttttagcattttaatattttaatatatattgtaaaatttagactgatgatactaacagttgatgaaatgacatataatttatatatgaaagcttacgctatattgtatgaattatttgcatctttcagtggccagttttccatatgtatatattatggtctcaatgtttttcttacgcctcattttaatttataatgaaggtaaaattaaaatgtattttaccacgtttcttttcattacttttatctgtgagctctgacacatctgaaaaagtaatctgatgtgcaaattataatttaaatatgttaatttttttgcttcttaaatttgcttttcatcattaaaatgtcaagttcaagtgatatgtgcctaatatcacttggatgttggtgggtttttgaatttttgggtggttaatcagttttattttgaaaagacgtacttgaatagttacagcatatgtttgaacaggaagtaggaacatgcatacacgaagaaatgctaacggaaggatttgttatgtttaggatcttcccttggaaactaaaaatagaatattaatgacattactgtttgtagaatgacatatgcagattttctcataagcagtcattgtgtttgccagtaatgtttgagagacatgtaagttgaaagttttgctaaattataaagctcctttaattcgttggttttgattctcttattctcttgtcttttctaaatgttaacaaaatatatcttaacagattacatgaaatttaggaattatttaaaagttaccattagctctaaaattaagattcggatgctttatttatagtaactgaagctaataatgttttatgttttgattttttgaaatttaattgtagaagtcactgccttctgagttttcaaatagataaccacctttaatattacactgcttataatactaatgtttacagatatgtttctgtttataaccatataatacattggctttgtcatattagttttttttgcaagtagttatgtaaaagagatagataataaaatattaaataactga

SEQ ID NO: 20360 - DNA, 1644 bp, Homo sapiens
  misc_feature (72)..(72): n is a, c, g, or t
gggtataaccaattggtatgatgaacgctgcaagaatccttctgtaatactggatgactcactgctagtacntgaggagaaatcctatggttctggtgacatatgttccttggaattcatccacgcccataaaatgcacagcccagtagggcagggcgtgactgcttctctgaaattaataatccaggtgtcatctacggtagtgctctgttactgtcatcttatcccatctatgatgtcctacgtcggatctgtgattcaattagaggcactagtcctgtcacagtagattttattttttaaaatgctaactgaaagtaatagagactgtcctttttcataattaattttatccaagattgtattaaggcaaaatctgattctacattccacctctgctatgtaactgtcttgttaaaagggtgttttctcctaatttctgatatattatatgaggtcatccagctggtgtgttcttttgcatgtaaactgccatttatattttagaaaactattgtatagaatggatttagattgtctataaagccacaaatacgtattttgccacagtgtattctatattgcaatgatttttttagcattttaatattttaatatatattgtaaaatttagactgatgatactaacagttgatgaaatgacatataatttatatatgaaagcttacgctatattgtatgaattatttgcatctttcagtggccagttttccatatgtatatattatggtctcaatgtttttcttacgcctcattttaatttataatgaaggtaaaattaaaatgtattttaccacgtttcttttcattacttttatctgtgagctctgacacatctgaaaaagtaatctgatgtgcaaattataatttaaatatgttaatttttttgcttcttaaatttgcttttcatcattaaaatgtcaagttcaagtgatatgtgcctaatatcacttggatgttggtgggtttttgaatttttgggtggttaatcagttttattttgaaaagacgtacttgaatagttacagcatatgtttgaacaggaagtaggaacatgcatacacgaagaaatgctaacggaaggatttgttatgtttaggatcttcccttggaaactaaaaatagaatattaatgacattactgtttgtagaatgacatatgcagattttctcataagcagtcattgtgtttgccagtaatgtttgagagacatgtaagttgaaagttttgctaaattataaagctcctttaattcgttggttttgattctcttattctcttgtcttttctaaatgttaacaaaatatatcttaacagattacatgaaatttaggaattatttaaaagttaccattagctctaaaattaagattcggatgctttatttatagtaactgaagctaataatgttttatgttttgattttttgaaatttaattgtagaagtcactgccttctgagttttcaaatagataaccacctttaatattacactgcttataatactaatgtttacagatatgtttctgtttataaccatataatacattggctttgtcatattagttttttttgcaagtagttatgtaaaagagatagataataaaatattaaataactga

SEQ ID NO: 20361 - DNA, 492 bp, Homo sapiens
gctcaggtcacctggcaagttagaggtcatgctgggacctgaacttgtctcccacatattcgtcctttgtccttcccttcatagctgcctgatgtgggttgtaatttaccccctgacttccctttaataagctccctccttccttaaggatcgcacaccccagggcagttggattcattccatgcacactgttttctcagtcgttcatccttgctcaggcccaaacttaacttacagagcagtcagggaaaccaggaactgtctttccactctgtggacctccaatgtggcggttacctgcagctccaccatctgctacgttgggataaaatgttctccccccagtaatgagtttgctcccagggcggtgctttgaaaacactcagagatcttcaaatgggaaagcaggatttcagagggcaaattagctggccctggcccgaacaatgagctctccactcacagaccacctcttgtcaattccattaatct

SEQ ID NO: 20362 - DNA, 803 bp, Homo sapiens
caggaatccaggagaaacttaactggatagttttggcatagggcctctcaaaaggatgctttttaaggaataaaggtaatatgcatacttgaggatcacattaacgtggcacagcttttcttaaagagtgttaaagagaagaatgcagaagtggcaaagaattgcagcaagtatctgagattctactggggctcaaaaatctgctttcaggctcacctaatggttgttggtaagcctcagttcttcaccacgtgggtctctccgtagggttggtaggcatggcagctgtctttccccaaagcagttaatctaagagagaaaaggggagcgagagcccaggatggaagccatagtatcatgtataacctaatctcaagtaacatatcatttctaatggtcacacagaccaaccctgttgcaatgtggaaagggactatatgagtgtgtgaataccagattggggtccatcttgcaggctggtaccacagttgcacagctagtaagctgcataactaaggttaaaattcatgtctgaccccggaggctgttctcttaatcatgtctgtgataagtgatggaggaaagatttgtgtagagtgactatgctgactggagcattagagaagatatcggaaggttgcatttgacctgagtctgcaaaacctcggagttcgcgggggggacgggaggctacactagggacccccgtttgtctgggggcgacagggtctggcacaacaaccccgcgcagtaaaacaaccggcaaacatcccacccggcaccggcggacacacccccccgct

SEQ ID NO: 20363 - DNA, 921 bp, Homo sapiens
caggaatccaggagaaacttaactggatagttttggcatagggcctctcaaaaggatgctttttaaggaataaaggtaatatgcatacttgaggatcacattaacgtggcacagcttttcttaaagagtgttaaagagaagaatgcagaagtggcaaagaattgcagcaagtatctgagattctactggggctcaaaaatctgctttcaggctcacctaatggttgttggtaagcctcagttcttcaccacgtgggtctctccgtagggttggtaggcatggcagctgtctttccccaaagcagttaatctaagagagaaaaggggagcgagagcccaggatggaagccatagtatcatgtataacctaatctcaagtaacatatcatttctaatggtcacacagaccaaccctgttgcaatgtggaaagggactatatgagtgtgtgaataccagattggggtccatcttgcaggctggtaccacagttgcacagctagtaagctgcataactaaggttaaaattcatgtctgaccccggaggctgttctcttaatcatgtctgtgataagtgatggaggaaagatttgtgtagagtgactatgctgactggagcattagagaagatatcggaaggttgcatttgacctgagtcatgaagaaacactagggattttctgtgtggaggagtcagggaaggacataccacgtaggggaccagcatgtttaggtgcttggaggctagaaaatgtggtatgtttggagaatagagcataattccaggtggttagagtgtagagtgcatggagggaggataagagagtagaaaaaaagcttgcccaagattaagtggatgatgaggaacagttgaaggtggggctgatatgataagattgtatgttcattactgtaaagttacag

SEQ ID NO: 20364 - DNA, 461 bp, Homo sapiens
gcccacctcggcctcccaaagtgctgggattacaggcgtgagccgccgtacccagccacctttgttattaatgaaaagcttttccccttctaatttcttatctgtggattgataatagtgccattcatttcactttgagaaatacgcagaactcattgtccagtggtcactgctttgttagagtataagttattggcctcaatagtttgttctctggtctcctcagttaaaaaggacttttttatgggtctaagacaggctaaaggtagtatgtggactttaatagatacatatatccaacgggcaatatttgacactaggcaagctgaagaaagtgtgaattttgaatatcttatgttttgtggaaggtgagggatgagtgcttcccccccacacacatatcaattagttatttttgacaaagttagtgttagtgtcatctggaagctacagaaattatt

SEQ ID NO: 20365 - DNA, 404 bp, Homo sapiens
tcctgcttcacactgccccaggtccatgactcattctccttccagccacgacccagaggccacaagtctgctccagcccctggtggcttggtgaggacatgttcacatactcagtgccaaaaccggctctgggcctagtaacgatttttttctttagtttggaattgcgttggtgtgaaaacattcacaaatgtgtaaagatcaactcagttacacaggacctactgtgcagaccctcgcgtcctgttgccatagcaacacctacctggttcctaccctcccaaccctgggaggccacttgcagctctcatcccagtaacagagcaggaacctggcgtggggtgggggtgcgtgattccccaggtgctggccagaggggtcccgcaggcaggctgggctcccag

SEQ ID NO: 20366 - DNA, 594 bp, Homo sapiens
agacagtggagaaggcagcctcccaaagcactcaggttcccaccatcactgaaggggttgccgcagccttgttgctcttaaagttgtcagtggctgactcacaggctggtatgagtccagaggtgtctaggatggtagagacaggggcctctgacaagagtccttgggaggtgtgtcttgatgttcaggattagcttggtcctgaccacactggatcagccacaggtttgcttgtcatctgcaggatgaacctcatggttgcatgggcagtgggaatgcagtcaggggactgtgtcactgtcctccttcattctgttgctccagtgctacacaggcttgtagatgatacctagatggaccagggtttagtattgggactgtttgtttcagttggttatacattcatacagtacaaaattcaaaaggatataacatgagaagcttccccttagccctgtcttttcccgtagccgttaagtttccctctgtaaacggtgttaccaattttgcactttgggaggccgaggcaggcggatcacgaagtcaagatttcgagaccattctggccaacatggtgaaaccccgtctttacta

SEQ ID NO: 20367 - DNA, 418 bp, Homo sapiens
ctcaaacatcaagttctacatccagaactgcccctcaaccctcaccctctcgaactcagtaaaaaacaaccctctttctagctctgcatttccaatgaatgcctcttcctccagacatccctagtttttgttcatgatactaggacattcctaaactggaaatgtgagaatcatgtggactgctcgctccctccttcattgcctgagtttaagcaaataatattgattagttttccccaatattttctgtaatcaactatttcgtttttgtttctacaatgagcagtcttgttcatgcacctgttactctcacttcaaccattcagaaagattcttagctcccatttactcatgagttcatttgatgcatatttgagcatctgttgtgtgctggaggcactatgctaggtgttgagga

SEQ ID NO: 20368 - DNA, 395 bp, Homo sapiens
ccaccctttatagcagttacctgttaccaacctggacagcctgagacaacatgaataagattccatcaattctcagatgcttttcggctagccatactctcaagaaaaatgtgtgtgcttttcttagcacggaacaccagcaaaaagactacatccatctcctgccaactggattgattcatttatgacaagaacttagaattcgaacattacccccgattgttttggaaattattaaaagattgtcaatggaaagatttacaaaaacactggagaaaatgaggggctaacacactgcaattctagtgacagagcccctcatgttaaagagtgaccctcccattatgtaaacattgttggaaaacaattataaaacaggatgcattgtataagct

SEQ ID NO: 20369 - DNA, 381 bp, Homo sapiens
aagcgcggggccactctggccgcgcgcctgggggctgctaggaatcccataactttgtctagctaggaaaaaatgaacaagtccgagcctcagcgcgcagactcagcgactggtgcccgcggctccgcaaccgcgagccaaggggctgggtggcgggcagaaccgccttctcccggcttcggccctgcgtcccctgtgctaggcgcgtgactttccctgggccttggggagcgcacagacagcccgccagccgcatcttctcctgacatgtcgtgcctttcttttcgcggacctggagctcagagctcccacggacagaagaatccagccctggggaagggccgcgtccaagtgctaagcagctcatacttctcccccacc

SEQ ID NO: 20370 - DNA, 913 bp, Homo sapiens
ttttttttttggctcatcagcgatcattagtgttagtgtattttatgtgtggcccaaggcaattcttcttccaatgtgacccagggaagccaaaagattggacacccctggcttagactaacactcattatgatgatttcccataggatgatacataatcaccaccatcctgtgggtcattaacaatgacctcacacttctgtatatgtaaaagggatatgaatattccttctacctacatcctaggagagttgtgaagacaaatgaataacttatgtgaaaagctatctaaatctgtggtactatatttgccagatggtacaagaggtgattttatggttgctccccgcttcaagtgaatatataattttagatggtttgacaaacctgaaatgctctagacgttgaaccatggtagtgcaattgcaaatgtttacagactgtctcattaacccctctgtgtcttcattcctagtctagaatactctgtcttctctatcagggctctgatcaagttgcacaacttgattttctgagagatttaatgcagtctttggtagttcttaagctgtgagatcattatcactgcatgttctcaagcagagactagatgttcatctgtcagaggatgtcacagaaggatcctgtgtttggtagtttagcccaaataatctcctaggtccaatccagttctaagacttcgtgatttctcttcagcctttcctgatactctcctcctctgaataataatcataataacaatgatggcaataatgatacctactaatttttgagtgcctagaatgtgccaggcactgggagcacaatgatctattaaattattggaagaatcctgcaaagtagatattatttcacagataaggaaaagaagacacagagtagtccagttttc

SEQ ID NO: 20371 - DNA, 306 bp, Homo sapiens
ggggtggagacacgcatcacatgactctcagatgattcttggcaataagaagacaaagattttcatgttgggagcttaaacactgaagaatttgcaggtatctttttaaagcattcttgtgattcttctttaaatcaatggttctcaaccctggctgcctgctacaaccatgtgggagcttttgaaacataccagtgcagagactgttccccattgtaattctgatttaatcagtctagggttttagagtgaggagctcttcaggagatgcaaatgtgcagacagggcgttgaatcatttcaggtc

SEQ ID NO: 20372 - DNA, 1702 bp, Homo sapiens
gtccaaaacaaacaatttgggaacatgtgaaaggagaccttaggtctgttaaggaagaggatgacactacgtgacaacttccgattccagaaacagtctggacttcagggattatatctggggggataaaaagcgcatgcaagtcttcaccgttttcaggaaaatcaaattggccagtagcaactgtcctcctgccaactaatgaaaggtcttcttatttattagcagtgattagataaagcagttaaaccacattccaatcaattttggttgctttttttgcatccaacatttggaatgcaactccttatgtaatttctggtatcctatgttcaatgaaaggtggagttacttttttcccctcagaatttaaagaaagcaatatatttatagggagctcttctttgggcttcccaaatcctggttattattgggcttgatactccttcagtctccgcctcctcctgttgggtaggctcaattaaaaccttttgaatttatttacttttgtttctgattaggattaataggctctaattttgtgcctggcttttgctcttccaaatgctgtctcaattggaaatgaatgatctcttgacaacgtaatacttgtcgctcaaagccctctgactctcaggagaaacgttttgtatctggacactgtgcgctgattagcagttttaagaggactgagttagaccaggcgatgagaaggatctctgatttaagcgaattccccttccccagtccttctcacacacaactcctcttccccatttccgatggtatgtgcagttcccgggtcccccttgatgtttaggttctgtgtctgtttgacactagtaggtagagtcagtggggagacctgtggacgggaggggaagggtgtgaacaggcattcagagtggcagggagacacactctactcatgctgctgttgctcccatgggcccccattgagagcagcctcttgtccttacagaccttggaaactggaagaaggggcatagaggttccccatgagtttacgttatctgttaggatgaacactggcactggaagcgtgatgccatgtggtttaacagaaatgccatctctctaatggtgaatttagttacaggtggtcctctagttgcagagtattaactgtgttcctacagttttttaaaaaaaatcttgaacagatccaaattggcacttttgctctttttagcgattttaactgtggagaaaatgggttaattttgtgattctgttgcagagcttcagccacaagtgtgctccatggaggatgatgaatatttcattttctgtatatacccaagtccccactgtatgcttagggatccccccagttattacttaacatcttttattttcttcattcaaacatagcttctaaccaaaccatcataaattcattttcgtttcttgatctctgcgtgtgttttttcaagagttcccaaaagtcctcactagcaggttgttaaggatctttctctgtgtcagtgttatgttaactgatgactgtaggaataaatgtgtgcgccgggattttattagctgctatttgcagcatcttttttatatcagctctgtgggagcgtatgtgtgtatatgtgtgtgtgtttgctctccatggttgttgcttcaactaggcaatttgacatttcaagaaaacaagaggcccatcctagtatga

SEQ ID NO: 20373 - DNA, 468 bp, Homo sapiens
ctccatagaacagactttacgttctcctcaggcaagcatgatcagtgtctggagccagcaaagctttgagggagggggagaagcttcaggggcatggaacgttttataaaatttcagttatttggttgggagaactttcaggcaacaaccttttaagcaacaaaacttgtctcaaatttcttttttaaaaatgggatcttgctaaataaaatattgatacattttcctattttggttaacagagtttactaagtcttatcaaaccttttactgccctttcattattatcaccgaagtcagttattctattgtgccagtggatatgaaaggtgtgtatctatggcagggttcttaatctttttctgtgtcatagatgtcttaatgggctggggtagcctgtggactcctcagcataatatttttaaatgcatagaataatagaattacaaagaaaatcaattatattga

SEQ ID NO: 20374 - DNA, 118 bp, Homo sapiens
ggaaatgggcagaggttgtgcaggtgccagaagactgagctgggctgaaagaaaaggaatgaaggaggatggtggtcacaagggagtctctgcacagtgaggaccaccccctactcag

SEQ ID NO: 20375 - DNA, 969 bp, Homo sapiens
tctgcctgcctcggcctcacaaagtgctgggattacaggtgtgaaccactgctcccggccttgtgtgattttatctaagggacttaagcgtcctcaggtcctagggggtcgtgaaaccaaaaccccagggatagcaagggacaattgtatcttcaaagtagacaaatggcgccgggcacggtggctcacgcctgtaatcccagcagtttccgaggctgaggcaggcggctcacctgaggtcaggagttggagaccagcctggccaacatgctgaaaccctgtctgtacaaaaatacaaaaatagctgggcatggtggcgcatgcctgtagtcccagctactagagcgactgaggcaggagaattgcttgaacctgggaggcggaggttgcagggagccaagatggcgccaccgcactccagcctaggtgatagagtgagactccctctcaaaaacaaaacaaaacaaaaaaattagacaaatgctacattaatgtttgggtggtcagattctactttgaatctgaagtttgcagatatgcctatagatttttggagtttaccactttcttattctgtatcattaatgtaatattttaaattactatatatgttaccatttttctggatttagtaagaaatttgcagttttggtttgatgtaacaagggttttaatgtaatttatgttagattttgcatttttttcattactgttatattttaacctgactgactgatctaattgtattagtattgtgaataatcatgtgaaatgttttgagacagagtactatatttgtgaatataattttatggtttttttcacttagaacctttctgtgtggaaaactaagaaaattgctttctgctgtataatctggcattcattgtagattaaagcttatttttctgtgaataaaacgtattcaataaaatactattctttaaaattatatcatactaccttgta

SEQ ID NO: 20376 - DNA, 491 bp, Homo sapiens
gtctatttctttgtctctctcactgagagttaccatagaacagcaactctggaaatccatgttgattggaatagggtggcccaggcagcagtagttcagatagctcttggctaccatggtttttctacatgtgccgcttctggatgtgcattcctaaacatttaaactctcaaagctaagatagtaactaccagagcactgtaataattaaccaactaacctccctgtcttcaaaaagatgctgtgagttagattcagtgattttgctgctgcttgtatttttgttttagcctgttttagtttttgtttcaaatcatgatgcttttattttttcatttttgatgtgtaagtttgcaattacgcctttttgggttgctgctgaaaccaagaattctaaaatgtcatgcacccaataagaaaaagtgaaaagaaatagctcacatgaaggattttctgaaaacagggacttgtattaattaggagttctaaaa

SEQ ID NO: 20377 - DNA, 434 bp, Homo sapiens
ggtcaggttttaggatagaaactgcttaagagtttatgtggagcttaaagtggtattaccttgggatatgctgcagcagcaagtctgtgacctccagtgagatgctgtttacatttaacaagagatgtttgctcacaataaactttaaagtgtgtcaggaatggaccttttagcgggtgttcaggcaattggtttccctctcttcgtctcaagacgtcaatgtacttatgtgagaatctttgatggggtctttcagtctctttaacccagactgcttgcctgcatcctagcccctatcagaaagaatttaaggaaaaggttaggggagaaataggatctgataacaacattagaattttctaataacctggaacccacagaaggatagaattaatagcatggatttaaaaaatctggtttaaattgttcccttt

SEQ ID NO: 20378 - DNA, 325 bp, Homo sapiens
tatttttagtagagacagggttttgccatgttagccagtctggtctcgaactcctgacctcaggtgatccatctgccttggcctcccaaagtgctgggattacaggcgtgagccaccgttcccggcccatccttgattcttatctttctcacactacacccaatccatcagcaaattgtcagtttcaccttcaaaatattgcttgaatccaatcactttcaccacttccgttgctatctacatttccaagccaccattatttcttcagtctattgcagtggtacccaggtggtcttcccaattccatgcttgccccatagtctct

SEQ ID NO: 20379 - DNA, 714 bp, Homo sapiens
ctccagatctccaagggcttctctgcattccagtggccacaaaaatatttttcttaattgatttgaactcatagtggcacaaaaaaatgaaaaacaagtttcgtcaatggtcagaagatgagaaagaaagtaaatcagtgatgtagggagtaatatgagcaactttccaacctactaatgcaacctatcaatttgaccaaactcatgtcttaagacccagatgcaaagaaaagatgtatcttagatgacagaagataacagaatcctcaagacaaaaacaaagtacaatcagatgtcctgtcattgttgcctcacaaagaacggatcgaccattaaaatgtgtattttcaacattgctgccaccaaaggagaaataagtggctgtttacaaatcagaaccagtgtcaaacgcagacttggccaggaagcaaaaaacatatgaagagccagaaaaagaacttgaatcaactagatgaagactttattgcctcaagactggaaaatgtatacctcgaacagcccttgagttgctcttcatggacaatgtggtggactttaccctggttgatgcatacacaaaatcttagaggaatctacacaattgtcaaagaaatatagacaaaggatttaggggggaaagtttactttcaaggaaagtttgcaagcaactcccaagttttaaaagaactggctcatcaaataaaaaaatacaaa

SEQ ID NO: 20380 - DNA, 4473 bp, Homo sapiens
gaacttatgtagcctcattatcccgctccgtgaggtgacaattgtggaaaaggcagacagctccagtgtgctccccagtcccttatccatcagcacccgaaacaggatgaccttcctatttgccaacttgaaagatagagactttctagtgcagaggatctcagatttcctgcaacagactacttccaaaatatattctgacaaggagtttgcaggaagttacaacagttcagatgatgaggtgtactctcgacccagcagcctcgtctcctccagcccccagagaagcacgagctctgatgctgatggagagcgccagtttaacctaaatggcaacagcgtccccacagccacacagaccctgatgaccatgtatcggcggcggtctcccgaggagttcaacccgaaattggccaaagagtttctgaaagagcaagcctggaagattcactttgctgagtatgggcaagggatctgcatgtaccgcacagagaaaacgcgggagctggtgttgaagggcatcccggagagcatgcgtggggagctctggctgctgctgtcaggtgccatcaatgagaaggccacacatcctgggtactatgaagacctagtggagaagtccatggggaagtataatctcgccacggaggagattgagagggatttacaccgctcccttccagaacacccagcttttcagaatgaaatgggcattgctgcactaaggagagtcttaacagcttatgcttttcgaaatcccaacatagggtattgccaggccatgaatattgtcacttcagtgctgctgctttatgccaaagaggaggaagctttctggctgcttgtggctttgtgtgagcgcatgctcccagattactacaacaccagagttgtgggtgcactggtggaccaaggtgtctttgaggagctagcacgagactacgtcccacagctgtacgactgcatgcaagacctgggcgtgatttccaccatctccctgtcttggttcctcacactatttctcagtgtgatgccttttgagagtgcagttgtggttgttgactgtttcttctatgaaggaattaaagtgatattccagttggccctagctgtgctggatgcaaatgtggacaaactgttgaactgcaaggatgatggggaggccatgaccgttttgggaaggtatttagacagtgtgaccaataaagacagcacactgcctcccattcctcacctccactccttgctcagcgatgatgtggaaccttaccctgaggtagacatctttagactcatcagaacttcctacgagaaattcggaactatccgggcagatttgattgaacagatgagattcaaacagagactgaaagtgatccagacgctggaggatactacgaaacgcaacgtggtacgaaccattgtgacagaaacttcctttaccattgatgagctggaagaactttatgctcttttcaaggcagaacatctcaccagctgctactggggcgggagcagcaacgcgctggaccggcatgaccccagcctgccctacctggaacagtatcgcattgacttcgagcagttcaagggaatgtttgctcttctctttccttgggcatgtggaactcactctgacgttctggcctcccgcttgttccagttattagatgaaaatggagactctttgattaacttccgggagtttgtctctgggctaagtgctgcatgccatggggacctcacagagaagctcaaactcctgtacaaaatgcacgtcttgcctgagccatcctctgatcaagatgaaccagattctgcttttgaagcaactcagtacttctttgaagatattaccccagaatgtacacatgttgttggattggatagcagaagcaaacagggtgcagatgatggctttgttacggtgagcctaaagccagacaaagggaagagagcaaattcccaagaaaatcgtaattatttgagactgtggactccagaaaataaatctaagtcaaagaatgcaaaggatttacccaaattaaatcaggggcagttcattgaactgtgtaagacaatgtataacatgttcagcgaagaccccaatgagcaggagctgtaccatgccacggcagcagtgaccagcctcctgctggagattggggaggtcggcaagttgttcgtggcccagcctgcaaaggagggcgggagcggaggcagtgggccgtcctgccaccagggcatcccaggcgtgctcttccccaagaaagggccaggccagccttacgtggtggagtctgttgagcccctgccggccagcctggcccccgacagcgaggaacactcccttggaggacaaatggaggacatcaagctggaggactcctcgccccgggacaacggggcctgctcctccatgctgatctctgacgacgacaccaaggacgacagctccatgtcctcatactcggtgctgagtgccggctcccacgaggaggacaagctgcactgcgaggacatcggagaggacacggtcctggtgcggagcggccagggcacggcggcactgccccggagcaccagcctggaccgggactgggccatcaccttcgagcagttcctggcctccctcttaactgagcctgccctggtcaagtactttgacaagcccgtgtgcatgatggccaggattaccagtgcaaaaaacatccggatgatgggcaagcccctcacctcggccagtgactatgaaatctcggccatgtccggctgacacgggcgccttcccgggggagtgggaggagagggaggggagggattttttatgttcttctgtgttgagttttttctttctttcttttaaattaaatatttattagtacctggcttgaagcctagtgttttcataatgtaattcaatgaaaactgttggagaaatatttaaacacctcaatgtaggtacattacactcttgttgcggggaggggatttaccagaatacagtttatttcgtgaattctaaaaaacaaaaagatgaatctgtcagtgatatgtgtgtattataacttattaatcttgctgttgagctgtatacatggtttaaaaaatagtactgtttaatgctaagtaaggcagcagtcatttgtgtattcaggctttttaaataaaattagagctgtaaggaaaatgaaaagccacaaatgcaagactgttcttaaatggaaggcatagtcagcgagggtaaatcctataccactttaggaagtattaaaaatatttttaagatttgaaatatatttcatagaagtcctctattcaaaatcatattccacagatgttccccttcaaagggaaaacatttggggttctaaacagttatgaaagtaagtgatttttacatgattccagaataacacttgtattgaccaatttagacagataccagaccaattttgcatttaagaaattgttctgattatttacgtcaactcattagaattcagtgaaaagtaacagtcttttgtcacagagaatctgaaagtagcagcaaagacagagggctcatgacaggtttttgcttttgctttgcttttgtttttgaaagagtaaaagtactgatgcttctgatactggatgtttagcttcttactgcaaaaacataagtaaaacagtcaactttaccatttccgtattctccatagattgaagaaatttataccacatatcgcatatgaccatctttccatcaaatcaatgtagagataatgtaaactgaaaaaaaatctgcaagataatgtaactgaatgttttaaaaacagaacttgtcactttatataaaagaatagtatgctctatttcctgaatggatgtggaaatgaaagctagcgcacctgcactttgaattcttgcttcttttttattactgttatgattttgctttttacagatgttggacgattttttcttctgattgttgaattcataatcatggtctcatttcctttgcttctttggaatatttctttcaacacattcctttattttattatacattgtgtcctttttttagctattgctgctgttgttttttattctatttacaggatgatttttaaactgtcaaatgaagtagtgttaacctcaaataggctaaatgtgaacaaataaaatacagcaaatactcagatacagctttttatctttgtgcttgagttcctgcctaaggcaataacattattcttttgacaacttttgcaggggaaattatatcaggcaaccattttgattaagtaaataaattttataggcaaacatagagagagaaatacaatttgtagtatatcaatgactatatttaaaataaggaatataattgttatcagttatctaacttaaaatgcttatccataatgatcagtgatattcagctttttaaaatatgcttgttggttgcatgtctgtcttcaaaac

SEQ ID NO: 20381 - DNA, 3340 bp, Homo sapiens
gaacttatgtagcctcattatcccgctccgtgaggtgacaattgtggaaaaggcagacagctccagtgtgctccccagtcccttatccatcagcacccgaaacaggatgaccttcctatttgccaacttgaaagatagagactttctagtgcagaggatctcagatttcctgcaacagactacttccaaaatatattctgacaaggagtttgcaggaagttacaacagttcagatgatgaggtgtactctcgacccagcagcctcgtctcctccagcccccagagaagcacgagctctgatgctgatggagagcgccagtttaacctaaatggcaacagcgtccccacagccacacagaccctgatgaccatgtatcggcggcggtctcccgaggagttcaacccgaaattggccaaagagtttctgaaagagcaagcctggaagattcactttgctgagtatgggcaagggatctgcatgtaccgcacagagaaaacgcgggagctggtgttgaagggcatcccggagagcatgcgtggggagctctggctgctgctgtcaggtgccatcaatgagaaggccacacatcctgggtactatgaagacctagtggagaagtccatggggaagtataatctcgccacggaggagattgagagggatttacaccgctcccttccagaacacccagcttttcagaatgaaatgggcattgctgcactaaggagagtcttaacagcttatgcttttcgaaatcccaacatagggtattgccaggccatgaatattgtcacttcagtgctgctgctttatgccaaagaggaggaagctttctggctgcttgtggctttgtgtgagcgcatgctcccagattactacaacaccagagttgtgggtgcactggtggaccaaggtgtctttgaggagctagcacgagactacgtcccacagctgtacgactgcatgcaagacctgggcgtgatttccaccatctccctgtcttggttcctcacactatttctcagtgtgatgccttttgagagtgcagttgtggttgttgactgtttcttctatgaaggaattaaagtgatattccagttggccctagctgtgctggatgcaaatgtggacaaactgttgaactgcaaggatgatggggaggccatgaccgttttgggaaggtatttagacagtgtgaccaataaagacagcacactgcctcccattcctcacctccactccttgctcagcgatgatgtggaaccttaccctgaggtagacatctttagactcatcagaacttcctacgagaaattcggaactatccgggcagatttgattgaacagatgagattcaaacagagactgaaagtgatccagacgctggaggatactacgaaacgcaacgtggtacgaaccattgtgacagaaacttcctttaccattgatgagctggaagaactttatgctcttttcaaggcagaacatctcaccagctgctactggggcgggagcagcaacgcgctggaccggcatgaccccagcctgccctacctggaacagtatcgcattgacttcgagcagttcaagggaatgtttgctcttctctttccttgggcatgtggaactcactctgacgttctggcctcccgcttgttccagttattagatgaaaatggagactctttgattaacttccgggagtttgtctctgggctaagtgctgcatgccatggggacctcacagagaagctcaaactcctgtacaaaatgcacgtcttgcctgagccatcctctgatcaagatgaaccagattctgcttttgaagcaactcagtacttctttgaagatattaccccagaatgtacacatgttgttggattggatagcagaagcaaacagggtgcagatgatggctttgttacggtgagcctaaagccagacaaagggaagagagcaaattcccaagaaaatcgtaattatttgagactgtggactccagaaaataaatctaagtcaaagaatgcaaaggatttacccaaattaaatcaggggcagttcattgaactgtgtaagacaatgtataacatgttcagcgaagaccccaatgagcaggagctgtaccatgccacggcagcagtgaccagcctcctgctggagattggggaggtcggcaagttgttcgtggcccagcctgcaaaggagggcgggagcggaggcagtgggccgtcctgccaccagggcatcccaggcgtgctcttccccaagaaagggccaggccagccttacgtggtggagtctgttgagcccctgccggccagcctggcccccgacagcgaggaacactcccttggaggacaaatggaggacatcaagctggaggactcctcgccccgggacaacggggcctgctcctccatgctgatctctgacgacgacaccaaggacgacagctccatgtcctcatactcggtgctgagtgccggctcccacgaggaggacaagctgcactgcgaggacatcggagaggacacggtcctggtgcggagcggccagggcacggcggcactgccccggagcaccagcctggaccgggactgggccatcaccttcgagcagttcctggcctccctcttaactgagcctgccctggtcaagtactttgacaagcccgtgtgcatgatggccaggattaccagtgcaaaaaacatccggatgatgggcaagcccctcacctcggccagtgactatgaaatctcggccatgtccggctgacacgggcgccttcccgggggagtgggaggagagggaggggagggattttttatgttcttctgtgttgagttttttctttctttcttttaaattaaatatttattagtacctggcttgaagcctagtgttttcataatgtaattcaatgaaaactgttggagaaatatttaaacacctcaatgtaggtacattacactcttgttgcggggaggggatttaccagaatacagtttatttcgtgaattctaaaaaacaaaaagatgaatctgtcagtgatatgtgtgtattataacttattaatcttgctgttgagctgtatacatggtttaaaaaatagtactgtttaatgctaagtaaggcagcagtcatttgtgtattcaggctttttaaataaaattagagctgtaaggaaaatgaaaagccacaaatgcaagactgttcttaaatggaaggcatagtcagcgagggtaaatcctataccactttaggaagtattaaaaatattttttaaaccatgtatacagctcaacagcaagattaataagttataatacacacatatca

SEQ ID NO: 20382 - DNA, 583 bp, Homo sapiens
gaacttatgtagcctcattatcccgctccgtgaggtgacaattgtggaaaaggcagacagctccagtgtgctccccagtcccttatccatcagcacccgaaacaggatgaccttcctatttgccaacttgaaagatagagactttctagtgcagaggatctcagatttcctgcaacagactacttccaaaatatattctgacaaggagtttgcaggaagttacaacagttcagatgatgaggtgtactctcgacccagcagcctcgtctcctccagcccccagagaagcacgagctctgatgctgatggagagcgccagtttaacctaaatggcaacagcgtccccacagccacacagaccctgatgaccatgtatcggcggcggtctcccgaggagttcaacccgaaattggccaaagagtttctgaaagagcaagcctggaagattcactttgctgagtatgggcaagggatctgcatgtaccgcacagagaaaacgcgggagctggtgttgaagggcatcccggagagcatgcgtggggagctctggctgctgctgtcaggtacggccgctgggctggga

SEQ ID NO: 20383 - DNA, 264 bp, Homo sapiens
cagatgtaaactgcagaagtggttggtgtggaggcagtgaagggctggtcaagtggaggtgtatgtagaactaagagaccaagggggccctgaggccacagccctgccccaggggatgcacacagattcacctaaagccctttccaaactggaggatgggcgttttctttctggtatttgctgcaaaagagggtccccagtgatcatccattctttttcaggcagaacatctcaccagctgctactggggcgggagcagcaacg

SEQ ID NO: 20384 - DNA, 4183 bp, Homo sapiens
gaacttatgtagcctcattatcccgctccgtgaggtgacaattgtggaaaaggcagacagctccagtgtgctccccagtcccttatccatcagcacccgaaacaggatgaccttcctatttgccaacttgaaagatagagactttctagtgcagaggatctcagatttcctgcaacagactacttccaaaatatattctgacaaggagtttgcaggaagttacaacagttcagatgatgaggtgtactctcgacccagcagcctcgtctcctccagcccccagagaagcacgagctctgatgctgatggagagcgccagtttaacctaaatggcaacagcgtccccacagccacacagaccctgatgaccatgtatcggcggcggtctcccgaggagttcaacccgaaattggccaaagagtttctgaaagagcaagcctggaagattcactttgctgagtatgggcaagggatctgcatgtaccgcacagagaaaacgcgggagctggtgttgaagggcatcccggagagcatgcgtggggagctctggctgctgctgtcaggtgccatcaatgagaaggccacacatcctgggtactatgaagacctagtggagaagtccatggggaagtataatctcgccacggaggagattgagagggatttacaccgctcccttccagaacacccagcttttcagaatgaaatgggcattgctgcactaaggagagtcttaacagcttatgcttttcgaaatcccaacatagggtattgccaggccatgaatattgtcacttcagtgctgctgctttatgccaaagaggaggaagctttctggctgcttgtggctttgtgtgagcgcatgctcccagattactacaacaccagagttgtgggtgcactggtggaccaaggtgtctttgaggagctagcacgagactacgtcccacagctgtacgactgcatgcaagacctgggcgtgatttccaccatctccctgtcttggttcctcacactatttctcagtgtgatgccttttgagagtgcagttgtggttgttgactgtttcttctatgaaggaattaaagtgatattccagttggccctagctgtgctggatgcaaatgtggacaaactgttgaactgcaaggatgatggggaggccatgaccgttttgggaaggtatttagacagtgtgaccaataaagacagcacactgcctcccattcctcacctccactccttgctcagcgatgatgtggaaccttaccctgaggtagacatctttagactcatcagaacttcctacgagaaattcggaactatccgggcagatttgattgaacagatgagattcaaacagagactgaaagtgatccagacgctggaggatactacgaaacgcaacgtggtacgaaccattgtgacagaaacttcctttaccattgatgagctggaagaactttatgctcttttcaaggcagaacatctcaccagctgctactggggcgggagcagcaacgcgctggaccggcatgaccccagcctgccctacctggaacagtatcgcattgacttcgagcagttcaagggaatgtttgctcttctctttccttgggcatgtggaactcactctgacgttctggcctcccgcttgttccagttattagatgaaaatggagactctttgattaacttccgggagtttgtctctgggctaagtgctgcatgccatggggacctcacagagaagctcaaactcctgtacaaaatgcacgtcttgcctgagccatcctctgatcaagatgaaccagattctgcttttgaagcaactcagtacttctttgaagatattaccccagaatgtacacatgttgttggattggatagcagaagcaaacagggtgcagatgatggctttgttacggtgagcctaaagccagacaaagggaagagagcaaattcccaagaaaatcgtaattatttgagactgtggactccagaaaataaatctaagtcaaagaatgcaaaggatttacccaaattaaatcaggggcagttcattgaactgtgtaagacaatgtataacatgttcagcgaagaccccaatgagcaggagctgtaccatgccacggcagcagtgaccagcctcctgctggagattggggaggtcggcaagttgttcgtggcccagcctgcaaaggagggcgggagcggaggcagtgggccgtcctgccaccagggcatcccaggcgtgctcttccccaagaaagggccaggccagccttacgtggtggagtctgttgagcccctgccggccagcctggcccccgacagcgaggaacactcccttggaggacaaatggaggacatcaagctggaggactcctcgccccgggacaacggggcctgctcctccatgctgatctctgacgacgacaccaaggacgacagctccatgtcctcatactcggtgctgagtgccggctcccacgaggaggacaagctgcactgcgaggacatcggagaggacacggtcctggtgcggagcggccagggcacggcggcactgccccggagcaccagcctggaccgggactgggccatcaccttcgagcagttcctggcctccctcttaactgagcctgccctggtcaagtactttgacaagcccgtgtgcatgatggccaggattaccagtgcaaaaaacatccggatgatgggcaagcccctcacctcggccagtgactatgaaatctcggccatgtccggctgacacgggcgccttcccgggggagtgggaggagagggaggggagggattttttatgttcttctgtgttgagttttttctttctttcttttaaattaaatatttattagtacctggcttgaagcctagtgttttcataatgtaattcaatgaaaactgttggagaaatatttaaacacctcaatgtaggtacattacactcttgttgcggggaggggatttaccagaatacagtttatttcgtgaattctaaaaaacaaaaagatgaatctgtcagtgatatgtgtgtattataacttattaatcttgctgttgagctgtatacatggtttaaaaaatagtactgtttaatgctaagtaaggcagcagtcatttgtgtattcaggctttttaaataaaattagagctgtaaggaaaatgaaaagccacaaatgcaagactgttcttaaatggaaggcatagtcagcgagggtaaatcctataccactttaggaagtattaaaaatatttttaagatttgaaatatatttcatagaagtcctctattcaaaatcatattccacagatgttccccttcaaagggaaaacatttggggttctaaacagttatgaaagtaagtgatttttacatgattccagaataacacttgtattgaccaatttagacagataccagaccaattttgcatttaagaaattgttctgattatttacgtcaactcattagaattcagtgaaaagtaacagtcttttgtcacagagaatctgaaagtagcagcaaagacagagggctcatgacaggtttttgcttttgctttgcttttgtttttgaaagagtaaaagtactgatgcttctgatactggatgtttagcttcttactgcaaaaacataagtaaaacagtcaactttaccatttccgtattctccatagattgaagaaatttataccacatatcgcatatgaccatctttccatcaaatcaatgtagagataatgtaaactgaaaaaaaatctgcaagataatgtaactgaatgttttaaaaacagaacttgtcactttatataaaagaatagtatgctctatttcctgaatggatgtggaaatgaaagctagcgcacctgcactttgaattcttgcttcttttttattactgttatgattttgctttttacagatgttggacgattttttcttctgattgttgaattcataatcatggtctcatttcctttgcttctttggaatatttctttcaacacattcctttattttattatacattgtgtcctttttttagctattgctgctgttgttttttattctatttacaggatgatttttaaactgtcaaatgaagtagtgttaacctcaaataggctaaatgtgaacaaataaaatacagcaaata

SEQ ID NO: 20385 - DNA, 4419 bp, Homo sapiens
gaacttatgtagcctcattatcccgctccgtgaggtgacaattgtggaaaaggcagacagctccagtgtgctccccagtcccttatccatcagcacccgaaacaggatgaccttcctatttgccaacttgaaagatagagactttctagtgcagaggatctcagatttcctgcaacagactacttccaaaatatattctgacaaggagtttgcaggaagttacaacagttcagatgatgaggtgtactctcgacccagcagcctcgtctcctccagcccccagagaagcacgagctctgatgctgatggagagcgccagtttaacctaaatggcaacagcgtccccacagccacacagaccctgatgaccatgtatcggcggcggtctcccgaggagttcaacccgaaattggccaaagagtttctgaaagagcaagcctggaagattcactttgctgagtatgggcaagggatctgcatgtaccgcacagagaaaacgcgggagctggtgttgaagggcatcccggagagcatgcgtggggagctctggctgctgctgtcaggtgccatcaatgagaaggccacacatcctgggtactatgaagacctagtggagaagtccatggggaagtataatctcgccacggaggagattgagagggatttacaccgctcccttccagaacacccagcttttcagaatgaaatgggcattgctgcactaaggagagtcttaacagcttatgcttttcgaaatcccaacatagggtattgccaggccatgaatattgtcacttcagtgctgctgctttatgccaaagaggaggaagctttctggctgcttgtggctttgtgtgagcgcatgctcccagattactacaacaccagagttgtgggtgcactggtggaccaaggtgtctttgaggagctagcacgagactacgtcccacagctgtacgactgcatgcaagacctgggcgtgatttccaccatctccctgtcttggttcctcacactatttctcagtgtgatgccttttgagagtgcagttgtggttgttgactgtttcttctatgaaggaattaaagtgatattccagttggccctagctgtgctggatgcaaatgtggacaaactgttgaactgcaaggatgatggggaggccatgaccgttttgggaaggtatttagacagtgtgaccaataaagacagcacactgcctcccattcctcacctccactccttgctcagcgatgatgtggaaccttaccctgaggtagacatctttagactcatcagaacttcctacgagaaattcggaactatccgggcagatttgattgaacagatgagattcaaacagagactgaaagtgatccagacgctggaggatactacgaaacgcaacgtggtacgaaccattgtgacagaaacttcctttaccattgatgagctggaagaactttatgctcttttcaaggcagaacatctcaccagctgctactggggcgggagcagcaacgcgctggaccggcatgaccccagcctgccctacctggaacagtatcgcattgacttcgagcagttcaagggaatgtttgctcttctctttccttgggcatgtggaactcactctgacgttctggcctcccgcttgttccagttattagatgaaaatggagactctttgattaacttccgggagtttgtctctgggctaagtgctgcatgccatggggacctcacagagaagctcaaactcctgtacaaaatgcacgtcttgcctgagccatcctctgatcaagatgaaccagattctgcttttgaagcaactcagtacttctttgaagatattaccccagaatgtacacatgttgttggattggatagcagaagcaaacagggtgcagatgatggctttgttacggtgagcctaaagccagacaaagggaagagagcaaattcccaagaaaatcgtaattatttgagactgtggactccagaaaataaatctaagtcaaagaatgcaaaggatttacccaaattaaatcaggggcagttcattgaactgtgtaagacaatgtataacatgttcagcgaagaccccaatgagcaggagctgtaccatgccacggcagcagtgaccagcctcctgctggagattggggaggtcggcaagttgttcgtggcccagcctgcaaaggagggcgggagcggaggcagtgggccgtcctgccaccagggcatcccaggcgtgctcttccccaagaaagggccaggccagccttacgtggtggagtctgttgagcccctgccggccagcctggcccccgacagcgaggaacactcccttggaggacaaatggaggacatcaagctggaggactcctcgccccgggacaacggggcctgctcctccatgctgatctctgacgacgacaccaaggacgacagctccatgtcctcatactcggtgctgagtgccggctcccacgaggaggacaagctgcactgcgaggacatcggagaggacacggtcctggtgcggagcggccagggcacggcggcactgccccggagcaccagcctggaccgggactgggccatcaccttcgagcagttcctggcctccctcttaactgagcctgccctggtcaagtactttgacaagcccgtgtgcatgatggccaggattaccagtgcaaaaaacatccggatgatgggcaagcccctcacctcggccagtgactatgaaatctcggccatgtccggctgacacgggcgccttcccgggggagtgggaggagagggaggggagggattttttatgttcttctgtgttgagttttttctttctttcttttaaattaaatatttattagtacctggcttgaagcctagtgttttcataatgtaattcaatgaaaactgttggagaaatatttaaacacctcaatgtaggtacattacactcttgttgcggggaggggatttaccagaatacagtttatttcgtgaattctaaaaaacaaaaagatgaatctgtcagtgatatgtgtgtattataacttattaatcttgctgttgagctgtatacatggtttaaaaaatagtactgtttaatgctaagtaaggcagcagtcatttgtgtattcaggctttttaaataaaattagagctgtaaggaaaatgaaaagccacaaatgcaagactgttcttaaatggaaggcatagtcagcgagggtaaatcctataccactttaggaagtattaaaaatatttttaagatttgaaatatatttcatagaagtcctctattcaaaatcatattccacagatgttccccttcaaagggagaataacacttgtattgaccaatttagacagataccagaccaattttgcatttaagaaattgttctgattatttacgtcaactcattagaattcagtgaaaagtaacagtcttttgtcacagagaatctgaaagtagcagcaaagacagagggctcatgacaggtttttgcttttgctttgcttttgtttttgaaagagtaaaagtactgatgcttctgatactggatgtttagcttcttactgcaaaaacataagtaaaacagtcaactttaccatttccgtattctccatagattgaagaaatttataccacatatcgcatatgaccatctttccatcaaatcaatgtagagataatgtaaactgaaaaaaaatctgcaagataatgtaactgaatgttttaaaaacagaacttgtcactttatataaaagaatagtatgctctatttcctgaatggatgtggaaatgaaagctagcgcacctgcactttgaattcttgcttcttttttattactgttatgattttgctttttacagatgttggacgattttttcttctgattgttgaattcataatcatggtctcatttcctttgcttctttggaatatttctttcaacacattcctttattttattatacattgtgtcctttttttagctattgctgctgttgttttttattctatttacaggatgatttttaaactgtcaaatgaagtagtgttaacctcaaataggctaaatgtgaacaaataaaatacagcaaatactcagatacagctttttatctttgtgcttgagttcctgcctaaggcaataacattattcttttgacaacttttgcaggggaaattatatcaggcaaccattttgattaagtaaataaattttataggcaaacatagagagagaaatacaatttgtagtatatcaatgactatatttaaaataaggaatataattgttatcagttatctaacttaaaatgcttatccataatgatcagtgatattcagctttttaaaatatgcttgttggttgcatgtctgtcttcaaaac

SEQ ID NO: 20386 - DNA, 481 bp, Homo sapiens
cacttagcatagtgcctggcttgtaataagaactcagtgaatgctattatacattattcttgctactgttttaataaaatcatgcaatcagatatataatgtatctccagtccactcatagtgggagacccaagatagttgcttaatattctatcacatgtctaaaaagtaactgtttctggaatatgtgtatgaagcattacagtttaggtctcaagtacaaaaacactgcttacaataaccttccatgatctaaaaaggactcgggttgttgacatcaaaggagtcagatgtaggacgcccagcaccagagcatgagtggatgtcagcatacggtatgcaaggtcagctagcttagtcacagacttcactttctggcagtcttctgcctattttttggctgcaaggcaagtgtttacttctccttctatgaacagatgatttccatagctctggggtttgaaaaggtcagcagtgataa

SEQ ID NO: 20387 - DNA, 403 bp, Homo sapiens
gcttttacatttgtattttcaaatgtatatattctagggaaggaggaacctttcaggtccccagtggctgattttcacctttgatctgaatactagtattcatagcatgctactgagttgactttttgtatttctatataataacagtgtatcgatctcttgctaatctgatgtaacctttgtgtgtgtatatgtatgtatgtgtgtgtgtgttactgatcaagttaaattactccagaggccaaaatcagaaactagggagggtgaatatttcatcatttaaaattgagcttatattgttattaatgcaatgttaagaggacagcttttcagatactgggttatttaagcagcttcaatgtacatcatcccggaagggatttggagatctccatctttcttc

SEQ ID NO: 20388 - DNA, 378 bp, Homo sapiens
gaaggcagaggttgcagtgagccgaggatcggccactgcactccagcctgagtgacagagcgagactctgtctcaaaaaaaaaaaaaaaaaaaaaaaaaaactaataaaataaaatggatgcttgtacttttctgctctgttaacctttctaaatttttttttaaatatggcactgcaaagattctatgactgaggtaagatcagatttagctctgtgatttggagactgcatctgtttctttcaccatctctccaactctccacctcttctcttctttcatcttttcattccaaggctcacccagtgcccctccctctctgagatcctgttttcatacggctcccttaatgttcatgtccctccctgaaatctgtat

SEQ ID NO: 20389 - DNA, 492 bp, Homo sapiens
atgaagagggtttctaatctgttaatctgaatccagactttgttatgactttgatgtacgactctagacatataatttaggagttccctgagtctttagctacaaagttgtaatgtcaaataaaggaaatttatgctaagggcttcctgtgtgccagacatttggccagatctttgttaagctatttcatttcatttcatcttcattttatggaaaaggaaaacctggttttgctgaaacccacagctagtaaattgcagagcaaggatccagatctccagctgtctgactccccactcaggctctgaaccactcttactacacagctcgtgcactagcgcattctgccctacaaggcagtgtgaagctacttacatagtattttcaacaggttaatccacacagtgactccatgaaggaaataatacaagcattacctccattttacaggcaagaaaatagatatttaggaagaagaaattactatcctaa

SEQ ID NO: 20390 - DNA, 171 bp, Homo sapiens
ggaaagataccgtccacacattaattctagttcctttgtaaatctcttcataaccacatattaagaatagtatgattagctgagtaaatcatgattagtaagatgacacttggttagaaaggagatagaacggtcatttagtaaatgggtcaatgtttttctttataattc

SEQ ID NO: 20391 - DNA, 473 bp, Homo sapiens
ctctggagcccaactgcttagttcaaatccacctcccctacttactagctgtatgacctcggacaagttagttgacttctctgtgccttcatttccccatctgtacaacaaatgacagtacctatctcataggattactatgagaattcaatgagtgctcagaactgtccctgttacctagtcagagctccataaataggcaggttgttgttatcctcctccaaagtccatgcttttgctccatgagatggctttgtcgcccaatctctactgagagattaagaatatgctgcacattaaaatatacaggtttctttttactgcagtaatgctaaatgcttagatgaaggaagagatcaaaggtagtccaaattcacctacattacaattctccctgacgttctcagggcagtgacgctaagccaagagaatgagctccatttagacctctcttccttccaccggcatcttcc

SEQ ID NO: 20392 - DNA, 247 bp, Homo sapiens
taagatacttgtgtactgcaaattggcaagaatttaaaagaatgctatgaatcgatgtgaataaggatatgggaaaacagacatgcatatgccggcagtgggggtgtaaattgcacaaatatatttctaaaaccatgcaaatttgcctttactttatcccagctgttttatgtctaggaatatattctgtgaaattacaggcatgcagaaagactacagacatgcaacatcattcatgatagttttc

SEQ ID NO: 20393 - DNA, 792 bp, Homo sapiens
gaacctcgaggagttagaggctgtagtgagctataatcacaccactgcactctagcctggtggaagagcaagaccctatctctttcaaaaaagaaaaagattcatatcgtatgtgactcagggttgggtgactcaggtctgtgactttgcttgtagaaattccatacaggagctctctctgttgttctgacattgtgttatgggttactttgggcatgcctgtgttttaagacttgttcacatgattatagaaggtctaatcataaaccccagaggaaattggcattgtggtcatggttattaacaagtgaggtcaggcttgccctgtgaatttgctgcaccaggcatgtggagctaacatctgcagagtggccaccgcctttttggcatcggttctgctgaaaagtcacaggcctcttggatttgacaatgttatggctctgctcggattgtctgggatagaaacaaatactcatagatcctcctgcttcccacgggacttaacgaaccttcgtttatgggctggtatgctttcccctagacaaatagcacctcattctatttgagtgtaaactagtcggaaaacgtttagggtggagatattgcgtcttttatgggatccacccatgcactgtttgaattccctgattcccaccactcagcgtaaacagctccttttttcatgaactgaggttcaaaaagcagttggcaagtcgtcttttcctatgctgagaaaagggactgttgtgtttaaaaaatagaagtgaacaaagcaaaaacaaaacaaaacaa

SEQ ID NO: 20394 - DNA, 927 bp, Homo sapiens
tagacagatattgtgtaacaagttaaccttaaggacacatgccttaaaggactattgagcaaaaaaaaataactaagctctttccaggtaacactcagggaacttttgcagtgtcatatccgttctctggtacctatgtgtccgatcttcctgcccatctgtttttttcactcaaagtcccagaatcctatgccacgggcagggattttcacctctcaatatagacccatgtaccttaccccatgttccaactgacttcctgagaaataaatcattgtccttgtatttcataagagacaacaaacattgattttgttgttaacatatgtgaggcttcgttcatccaataactatatattttaatcaccaataagtatcctaaaatttcagacgctaatgccctgagggatcaacttttaatcaattattgactacagtttgaggggtgccatgtccagattaaatgcagtatgatttatcctatgggctacgcagcttgctcctggcacgggcaccttgaatctcctcctcacacagatggagaccatgcttgatttcctgaacttgtagtaagaagaaggaaaacacagcacgctggagccaacaggtaggcgagaaaccaggtaggcgagaaacacgtttctcagttatgcagcccagcgtcgaggaaaaataacagcaactctacaaaatcagaaatcagcgtctaaggactaatgagcagagagaaaagtctaggtttttttctttattaatgtttacctgctatagtatgcaaaatatccttgccataaaagccttatttcttttttaaaatttttaattgtattttaagttccaggatacatgtgtaggacgtgcaggaaaaagcctttattctgaaagatacaggagaaaaaaactcatagcttaaaagagtgtcttttt

SEQ ID NO: 20395 - DNA, 2653 bp, Homo sapiens
tagacagatattgtgtaacaagttaaccttaaggacacatgccttaaaggactattgagcaaaaaaaaataactaagctctttccaggtaacactcagggaacttttgcagtgtcatatccgttctctggtacctatgtgtccgatcttcctgcccatctgtttttttcactcaaagtcccagaatcctatgccacgggcagggattttcacctctcaatatagacccatgtaccttaccccatgttccaactgacttcctgagaaataaatcattgtccttgtatttcataagagacaacaaacattgattttgttgttaacatatgtgaggcttcgttcatccaataactatatattttaatcaccaataagtatcctaaaatttcagacgctaatgccctgagggatcaacttttaatcaattattgactacagtttgaggggtgccatgtccagattaaatgcagtatgatttatcctatgggctacgcagcttgctcctggcacgggcaccttgaatctcctcctcacacagatggagaccatgcttgatttcctgaacttgtagtaagaagaaggaaaacacagcacgctggagccaacagagttaagaggaagatttatgagtcatggaaccctccatcagatttggaagaaagtagaatgagcgcagaggtgacagacagccactgaggcccatggacaatctccacctcacgcttctctatcaaacttgaagatttattagtaatatgctgcctttggaagatgaaaacaaactagtgccaaggaggcgtattcttcaatatttggaatagacgtgttctcaagacaatggcttcaaaggtctcctgtttgtatgttttgacagttgtgtgctgggccagcgctctctggtacttgagtataactcgccctacttcttcttacactggctccaaaccattcagccacctaacagttgccaggaaaaacttcacctttggcaacataagaactcgacctatcaacccacattcttttgaatttcttatcaacgagcccaataaatgtgagaaaaacattccttttcttgttatcctcatcagcaccactcacaaggaatttgatgcccgtcaggcaatcagagagacgtggggggatgagaacaactttaaggggatcaagatagccaccctgttcctcctgggcaagaatgctgatcctgttctcaatcagatggtggagcaagagagccaaatcttccatgatatcatcgtggaggactttattgactcctaccataaccttaccctcaaaacattaatggggatgagatgggtggccactttttgttcaaaagccaagtatgtcatgaaaacagacagcgacatttttgtaaacatggacaatcttatttataaattactgaaaccctccaccaagccacgaagaaggtattttactggctatgtcattaatggaggaccgattcgggatgtccgcagtaaatggtatatgcccagggatttgtacccagacagtaactacccacctttctgttcggggactggctacatcttttcagccgatgtagctgaactcatttacaagacctcactccacacaaggctgcttcaccttgaagacgtatatgtgggactgtgtcttcgaaagctgggcatacatcctttccagaacagtggcttcaatcactggaaaatggcctacagtttgtgtaggtatcgccgagttatcactgtgcatcagatctctccagaagaaatgcacagaatctggaatgacatgtcaagcaagaaacatctcagatgttaggatttttaccaatgtaaatatgtttcttttctttttttaagaaatgggacctaaggtgttggtattttccaggtgtcgggggaaatgaactggtgaaggggttttgtaaagtttttgcttcctgctataagttcttttcttggattaccaatttatgaatgttagactctggtcatagaaacaataaatgagttagaagggccagatttcattctcagtcccagagcattgctatttatctcaaaaagtgacttccaaacaactcttaggattgacgtaccgtgcatctgagataaaaatttggttctgggaaactgaaactcacagtaatgtgtcatatcatccctgcaaaaattaatacacaaatagaaaccattttcaaaagcaattcagaaaggatgcacagtcaggaagacacactggatgtgattattaatatcgtgtgtgttgttacattatatttttacatatattcccatgtaatgtgtacagtctttgcagttccaccaagaaatgaacttggtacctgcagagtggctgcagttaaatagatgggagtttaaatttgagaatcaaacattctatgtgtttggaagacaactctgcttgctcatccaaggattaaatctggtcagcaggtggaatgtgtataaaatgctacttaacaaagtaaacaaaagattttttttttctttttttttctttcttttttgttttgctctttcagaacaaacattaaatggtgcctccaaggaaactttgccaaatataatctcacctgcttccttccagacagtgtcgctaagtgcatttcacagtttttggatctggcaggc

SEQ ID NO: 20396 - DNA, 367 bp, Homo sapiens
ggccccgcagtgctgataggagcttttcctctcgctttgcctggtccaccctgcccctgtctgagggtgacctggccccatggctgcctgcactctcctccctgatgtgtgcaatcctgcccggcctgtgcctcgtcctcagggaggccatccgggaggccacagctggcctggaagtgtgcttgtctgtctctacctcagggctgcttgtgcacctcctgtacctagaggtgatccaggctcactgagaatctgcccacactgttccacacgtttaggccaggtgcaggggctcacaccagaaatcccggtgctttgggagactgcagtgggaggattgcttgaggccaggagttcaagaccagtc

SEQ ID NO: 20397 - DNA, 343 bp, Homo sapiens
tttttcacttctctcctggtatccgtgtgtctgtccctagaaatgtctctaactggtgtttctcagttcacttagctatcccttggatcaatagctattgcaaagaaacgaggtagcatgattggcctaacctggctcacaaacaagtcctagtggcaggaatgagctaaccatgactggcatttccaccagagccatttacagtgagggtagatgtgtttccccaaaggaaagaagactaggcagatcaaaattgacagatgttcattaaagcttcatggatatttaaactgtgccatcatagatgaattgttttttgtcaaatgaagcagcagtgcacatc

SEQ ID NO: 20398 - DNA, 766 bp, Homo sapiens
ggagacagagtcttactctgttgcccaggctggagtgtgatggcatgatcttggctcactgcagcctttgtctccaggttcaagtgattctcatgcctcagccttctgagtagttgggattacaggggtgtgccaccacacctggctaatttttgtgtttttagtagagatagggtttcatcgtgttggccaagctggtctcgaacccctgacctcaggtgatctacccacctcggcctcccaaagtgctgggattacaggcgtgacccactgtgcctggccagttttgaattttttaacttaaaaaaattgcaacttttataatattttatgttttataatgaaaaaatgtaatcctattgaatgttcctctgagcatagctttagctatattacttaaattttgatgagtaatatttttatgtttatatatttaaaaacccctgcagttgcagtttttattttttcaacaagtatttaagcacctgctccatctagacattctgccaagtgctgaggacacaactatgtacaagacaaggtctcttgccttcatccagttacagtctgtcaatatagacaaaccaacgaataaagaattttcagatttcgacaagtgtctaggaagtaaataaataatagaaggtgctaattggatgatctgagactgtctctctgaggatgtcatgtttaagttgattggtggtaccaaggtgtgtatgggagtttctttagctttcccaatctatcgaaacataaaaaaaaa

SEQ ID NO: 20399 - DNA, 411 bp, Homo sapiens
ttgtgtttggtatgaagaaatggaaagcagagaagcttggagatttaccaggactgaatttcttcacagtcaacaattggctcttaaacttgcaaaatatttggagcatgtgtttttctttgcttgttagttttcccacactacagtttttctagattttgctaatccaagtgcctggctcatttttccctcagcatccttatgcatttcctccccagatcaaattccctgcctaaattagtacacatttttgttcttgaagaaagaaccgaatcagaaagagaatcaaaatagaccattattgtcctggcatgaagacaagcaattattgtattcttcattgcagttttttcacttaaaatcatcccagagtcgtataagagatttaataaaaatcatttatcatgaaaa

SEQ ID NO: 20400 - DNA, 365 bp, Homo sapiens
ttttttttttttcgtatttttagtagagacggggtttcaccatgttggccaggctggtcttgaactcctgacctcaagtggtctgcccgccttggcctcctgaagtgctgggattaaaggcatgagccaccacgcctggcccattattcttcttttactagcagtttctagtgtccattaactaatattttcacctttgtcgttgttgagacagggtcttgctctgttgcccaggctggagtacagtgacgtgatcactgctcactgcagcctccatctctcaggctcaagccatcctcccacatcggcctcacaaagtagttcagaccacaggcatgccctaccacacccaggtaatttttgta

SEQ ID NO: 20401 - DNA, 406 bp, Homo sapiens
cacatgttctagggggcttagtggcattcaaagctttgtctatggaaaagggtgcctatgaatcttggtgcttccagcttttttcattggctgggagaaggcctgtgttgtcttctcagacacagggcatctcttgaacttggaacagacaggagtctgtaaagaagggaagtgtgttgaaaggagggcaaaatactgactttgggagtcaaaaggggatgcagtgtagaaagatagtcacaatatattgtgatcatatcaaagcaatatgtgtggaatcccatttttagtgaagagttgactacaaaaaattcatagaaagtatctaggatgtgaagttacaggtgatgtttgcttctgtttgtattttctaatctttctatagttaataggtatttcttgcata

SEQ ID NO: 20402 - DNA, 621 bp, Homo sapiens
gagagacaactcactaaatgcttgtgtgtcaggttcagtgttggggagctgggaaggtgaagaagaatgagccttccaagagattgtgctctgaaggaaatatgtagtataagttatgttcatttatttagtaaatgtttaatgaatgcttcctctgtgttggacattcatcagtgcttcccaacaggacactattggcattttgggtggacagttctttggtgtgtgggaatggcccacgtgttgcagaacctttggcatacttgcccattatattctagtagtagtctcagtcatgcgacatcaaaaaattgtaactcccattccctgtgcatacttccaaatgcttctaattgaaaaccactgctctagatactgttatgggtatttaaaaacatgcgaatgtttgattttagatagtttccacaaagggtttaaagcctcattaaaacttgtcatccttaccacttccatccacctcctccacttcctcatcatcacaatcacagttcatagttacatggcttacatcacatgttccaactaactgttttatttgatcattccagcaatctagtgcggtattattcccattcttactgactagtggagataaaaaaa

SEQ ID NO: 20403 - DNA, 281 bp, Homo sapiens
tctcactccatgcaattgggtccttcctgggcacagatgccagttttatcttcctatgctgctctatgcagcagaaatattatctgatgctttttttttgtttcttatgaaatccattctaaatatttttgtagggttttcaaggcttctcaaatctgtaaagccttgatcaaccccaattttattcctcactatactgtaggaaataaaaccaaataaaactgaatctggactgttgtcttatgcatcactaagtacattatttctacataaaaaaaaaa

SEQ ID NO: 20404 - DNA, 531 bp, Homo sapiens
tggtatctctattttacagaagagatcgaggtctaagcaggttgtcatttgctcaagctcatacagttggtatgtggtagaaccatagtctgacttcagaatctaggatgaacctaattcaatcaaaatatccttctgttttggcattgcattactaaattgtatagctggaaggcagctatactagtgttttactgtatatctctattccagtaatttcatctctacttaattgttatcatctgttaagtgggattgtttatctgcacttgatagtaaaatacggtctacttaggcttggatgaaaaaatctttagtgaactttacctatcatctataggatcatgttgttctgctaaaaaaaaaaaaactcccagttaagcctcaaaacttaagatttttagttcatggccacgtatgatggttcaagcatgtaatcccagcactttgagaggcctaggtgggtagattgcatgagcccaggagtttgagaccagcatggggaacatggagaaaccccatctctaaaat

SEQ ID NO: 20405 - DNA, 749 bp, Homo sapiens
cttctctcgccaggcgtcctcgtggaagtgacatcgtctttaaaccctgcgtggcaatccctgacgcaccgccgtgatgcccagggaagacagggcgacctggaagtccaactacttccttaagatcatccaactattggatgattatccgaaatgtttcattgtgggagcagacaatgtgggctccaagcagatgcagcagatccgcatgtcccttcgcgggaaggctgtggtgctgatgggcaagaacaccatgatgcgcaaggccatccgagggcacctggaaaacaacccagctctggagaaactgctgcctcatatccgggggaatgtgggctttgtgttcaccaaggaggacctcactgagatcagggacatgttgctggccaataaggtgccagctgctgcccgtgctggtgccattgccccatgtgaagtcactgtgccagcccagaacactggtctcgggcccgagaagacctcctttttccaggctttaggtatcaccactaaaatctccaggggcaccattgaaatcctgtgtgcagctgatcaagactggagacttctttggggtggtcaccaacaaggggttcgcaatggaggatttacaaccctgagtggttggtattacaaaggaactctgcttcttcgttcttgagggggggcgcaatgttgccggggttgttttaatttggtacccaaccgtggcttagaccccttctctttaacaggggaaacaaatcttg

SEQ ID NO: 20406 - DNA, 518 bp, Homo sapiens
  misc_feature (493)..(493): n is a, c, g, or t
  misc_feature (516)..(516): n is a, c, g, or t
gcctgagctccctgcgtcctcgtggaagtgacatcgtctttaaaccctgcgtggcaatccctgacgcaccgccgtgatgcccagggaagacagggcgacctggaagtccaactacttccttaagatcatccaactattggatgattatccgaaatgtttcattgtgggagcagacaatgtgggctccaagcagatgcagcagatccgcatgtcccttcgcgggaaggctgtggtgctgatgggcaagaacaccatgatgcgcaaggccatccgagggcacctggaaaacaacccagctctggagaaactgctgcctcatatccgggggaatgtgggctttgtgttcaccaaggaggacctcactgagatcagggacatgttgctggccaataaggtgccagctgctgcccgtgctggtgccattgccccatgtgaagtcactgtgccagcccagaacactggtctcgggcccgagctccttttccagcttagnataccctttccagggactgtctntg

SEQ ID NO: 20407 - DNA, 1571 bp, Homo sapiens
  misc_feature (1169)..(1169): n is a, c, g, or t
  misc_feature (1173)..(1173): n is a, c, g, or t
  misc_feature (1175)..(1175): n is a, c, g, or t
  misc_feature (1179)..(1179): n is a, c, g, or t
  misc_feature (1185)..(1186): n is a, c, g, or t
  misc_feature (1189)..(1189): n is a, c, g, or t
cttctctcgccaggcgtcctcgtggaagtgacatcgtctttaaaccctgcgtggcaatccctgacgcaccgccgtgatgcccagggaagacagggcgacctggaagtccaactacttccttaagatcatccaactattggatgattatccgaaatgtttcattgtgggagcagacaatgtgggctccaagcagatgcagcagatccgcatgtcccttcgcgggaaggctgtggtgctgatgggcaagaacaccatgatgcgcaaggccatccgagggcacctggaaaacaacccagctctggagaaactgctgcctcatatccgggggaatgtgggctttgtgttcaccaaggaggacctcactgagatcagggacatgttgctggccaataaggtgccagctgctgcccgtgctggtgccattgccccatgtgaagtcactgtgccagcccagaacactggtctcgggcccgagaagacctcctttttccaggctttaggtatcaccactaaaatctccaggggcaccattgaaatcctgagtgatgtgcagctgatcaagactggagacaaagtgggagccagcgaagccacgctgctgaacatgctcaacatctcccccttctcctttgggctggtcatccagcaggtgttcgacaatggcagcatctacaaccctgaagtgcttgatatcacagaggaaactctgcattctcgcttcctggagggtgtccgcaatgttgccagtgtctgtctgcagattggctacccaactgttgcatcagtaccccattctatcatcaacgggtacaaacgagtcctggccttgtctgtggagacggattacaccttcccacttgctgaaaaggtcaaggccttcttggctgatccatctgcctttgtggctgctgcccctgtggctgctgccaccacagtgtcctgctgctgctgcagccccagctaaggttgaagccaaggaagagtcggaggagtcggacgaggatatgggattggtctctttgactaatcaccaaaaagcaaccaacttagccagttttatttgcaaaacaaggaaataaaggcttacttctttaaaaaaaaaaaaaaaaaaaaaaaaaaaaaaaaaaaaaaaaaaaaaaaaaaaaaaaaaaaaaaaaaaaaaaaaaaanaaananaaanaaaaannaanaaaaaaaaaaaaaaaagggggggggggggtataaaaaattacccaggggggaggaaaagtattattgaagcacagccatatttttatgaaagaggggcgccactatataagggggagagatataataataacgcgaggggggggggttgatttaaaaaaagagacgttgggtgagggaaaaaaaaaatgagtggtggatggtatctatttagaggagaaccaccacaacctggtggtggcgggaataattattaggagaaccaatactcagacgaagatattataaggtgcgcgaggaagaaacattacaaatgagggatgtatgttggtgattacaacgacgagatttattgctggggaggaaaaagtttgcggatggaaa

SEQ ID NO: 20408 - DNA, 1573 bp, Homo sapiens
  misc_feature (1155)..(1155): n is a, c, g, or t
  misc_feature (1514)..(1514): n is a, c, g, or t
  misc_feature (1548)..(1548): n is a, c, g, or t
  misc_feature (1564)..(1564): n is a, c, g, or t
cttctctcgccaggcgtcctcgtggaagtgacatcgtctttaaaccctgcgtggcaatccctgacgcaccgccgtgatgcccagggaagacagggcgacctggaagtccaactacttccttaagatcatccaactattggatgattatccgaaatgtttcattgtgggagcagacaatgtgggctccaagcagatgcagcagatccgcatgtcccttcgcgggaaggctgtggtgctgatgggcaagaacaccatgatgcgcaaggccatccgagggcacctggaaaacaacccagctctggagaaactgctgcctcatatccgggggaatgtgggctttgtgttcaccaaggaggacctcactgagatcagggacatgttgctggccaataaggtgccagctgctgcccgtgctggtgccattgccccatgtgaagtcactgtgccagcccagaacactggtctcgggcccgagaagacctcctttttccaggctttaggtatcaccactaaaatctccaggggcaccattgaaatcctgagtgatgtgcagctgatcaagactggagacaaagtgggagccagcgaagccacgctgctgaacatgctcaacatctcccccttctcctttgggctggtcatccagcaggtgttcgacaatggcagcatctacaaccctgaagtgcttgatatcacagaggaaactctgcattctcgcttcctggagggtgtccgcaatgttgccagtgtctgtctgcagattggctacccaactgttgcatcagtaccccattctatcatcaacgggtacaaacgagtcctggccttgtctgtggagacggattacaccttcccacttgctgaaaaggtcaaggccttcttggctgatccatctgcctttgtggctgctgcccctgtggctgctgccaccacagtgtcctgctgctgctgcagccccagctaaggttgaagccaaggaagagtcggaggagtcggacgaggatatgggattggtctctttgactaatcaccaaaaagcaaccaacttagccagttttatttgcaaaacaaggaaataaaggcttacttctttaaaaaaaaaaaaaaaaaaaaaaaaaaaaaaaaaaaactttttcgcaacgggtttgccgccanaacacaggtgtcgtgaaaactacccctaaaagccaaaatgggaaaggaaaagactcatatcaacattgtcgtcattggacacgtagattcgggcaagtccaccactactggccatctgatctataaatgcggtggcatcgacaaaagaaccattgaaaaatttgagaaggaggctgctgagatgggaaagggctccttcaagtatgcctgggtcttggataaactgaaagctgagcgtgaacgtggtatcaccattgatatctccttgtggaaatttgagaccagcaagtactatgtgactatcattgatgccccaggacacagagactttatcaaaaacatgattacagggacatctnagctgactgggctgtcctgattggtgctgctggngttggtgaatttgaanctggtatct

SEQ ID NO: 20409 - DNA, 1581 bp, Homo sapiens
  misc_feature (1179)..(1179): n is a, c, g, or t
  misc_feature (1183)..(1183): n is a, c, g, or t
  misc_feature (1185)..(1185): n is a, c, g, or t
  misc_feature (1189)..(1189): n is a, c, g, or t
  misc_feature (1195)..(1196): n is a, c, g, or t
  misc_feature (1199)..(1199): n is a, c, g, or t
tcccccgggctgcaggattcggcacgagctcgtggaagtgacatcgtctttaaaccctgcgtggcaatccctgacgcaccgccgtgatgcccagggaagacagggcgacctggaagtccaactacttccttaagatcatccaactattggatgattatccgaaatgtttcattgtgggagcagacaatgtgggctccaagcagatgcagcagatccgcatgtcccttcgcgggaaggctgtggtgctgatgggcaagaacaccatgatgcgcaaggccatccgagggcacctggaaaacaacccagctctggagaaactgctgcctcatatccgggggaatgtgggctttgtgttcaccaaggaggacctcactgagatcagggacatgttgctggccaataaggtgccagctgctgcccgtgctggtgccattgccccatgtgaagtcactgtgccagcccagaacactggtctcgggcccgagaagacctcctttttccaggctttaggtatcaccactaaaatctccaggggcaccattgaaatcctgagtgatgtgcagctgatcaagactggagacaaagtgggagccagcgaagccacgctgctgaacatgctcaacatctcccccttctcctttgggctggtcatccagcaggtgttcgacaatggcagcatctacaaccctgaagtgcttgatatcacagaggaaactctgcattctcgcttcctggagggtgtccgcaatgttgccagtgtctgtctgcagattggctacccaactgttgcatcagtaccccattctatcatcaacgggtacaaacgagtcctggccttgtctgtggagacggattacaccttcccacttgctgaaaaggtcaaggccttcttggctgatccatctgcctttgtggctgctgcccctgtggctgctgccaccacagtgtcctgctgctgctgcagccccagctaaggttgaagccaaggaagagtcggaggagtcggacgaggatatgggattggtctctttgactaatcaccaaaaagcaaccaacttagccagttttatttgcaaaacaaggaaataaaggcttacttctttaaaaaaaaaaaaaaaaaaaaaaaaaaaaaaaaaaaaaaaaaaaaaaaaaaaaaaaaaaaaaaaaaaaaaaaaaaanaaananaaanaaaaannaanaaaaaaaaaaaaaaaagggggggggggggtataaaaaattacccaggggggaggaaaagtattattgaagcacagccatatttttatgaaagaggggcgccactatataagggggagagatataataataacgcgaggggggggggttgatttaaaaaaagagacgttgggtgagggaaaaaaaaaatgagtggtggatggtatctatttagaggagaaccaccacaacctggtggtggcgggaataattattaggagaaccaatactcagacgaagatattataaggtgcgcgaggaagaaacattacaaatgagggatgtatgttggtgattacaacgacgagatttattgctggggaggaaaaagtttgcggatggaaa

SEQ ID NO: 20410 - DNA, 1094 bp, Homo sapiens
cttctctcgccaggcgtcctcgtggaagtgacatcgtctttaaaccctgcgtggcaatccctgacgcaccgccgtgatgcccagggaagacagggcgacctggaagtccaactacttccttaagatcatccaactattggatgattatccgaaatgtttcattgtgggagcagacaatgtgggctccaagcagatgcagcagatccgcatgtcccttcgcgggaaggctgtggtgctgatgggcaagaacaccatgatgcgcaaggccatccgagggcacctggaaaacaacccagctctggagaaactgctgcctcatatccgggggaatgtgggctttgtgttcaccaaggaggacctcactgagatcagggacatgttgctggccaataaggtgccagctgctgcccgtgctggtgccattgccccatgtgaagtcactgtgccagcccagaacactggtctcgggcccgagaagacctcctttttccaggctttaggtatcaccactaaaatctccaggggcaccattgaaatcctgagtgatgtgcagctgatcaagactggagacaaagtgggagccagcgaagccacgctgctgaacatgctcaacatctcccccttctcctttgggctggtcatccagcaggtgttcgacaatggcagcatctacaaccctgaagtgcttgatatcacagaggaaactctgcattctcgcttcctggagggtgtccgcaatgttgccagtgtctgtctgcagattggctacccaactgttgcatcagtaccccattctatcatcaacgggtacaaacgagtcctggccttgtctgtgatcgcgcaggcaccataacacctctgaaagctacgaccaggtccagcttgatccatggctcttagtgtcggctgcccgtatgtattttgcccccccacctgctcttgtggttcctgcagccccagttaaggttcaaagcaagaaagagtattaccacccctcacaccgcatctggtcccgttcctgcccccgccctacctccgccccaccccatcatctgtggactctggagtctggaataaatgctgtttgtctcatc

SEQ ID NO: 20411 - DNA, 1385 bp, Homo sapiens
  misc_feature (983)..(983): n is a, c, g, or t
  misc_feature (987)..(987): n is a, c, g, or t
  misc_feature (989)..(989): n is a, c, g, or t
  misc_feature (993)..(993): n is a, c, g, or t
  misc_feature (999)..(1000): n is a, c, g, or t
  misc_feature (1003)..(1003): n is a, c, g, or t
cttctctcgccaggcgtcctcgtggaagtgacatcgtctttaaaccctgcgtggcaatccctgacgcaccgccgtgatgcccagggaagacagggcgacctggaagtccaactacttccttaagatcatccaactattggatgattatccgaaatgtttcattgtgggagcagacaatgtgggctccaagcagatgcagcagatccgcatgtcccttcgcgggaaggctgtggtgctgatgggcaagaacaccatgatgcgcaaggccatccgagggcacctggaaaacaacccagctctggagaaactgctgcctcatatccgggggaatgtgggctttgtgttcaccaaggaggacctcactgagatcagggacatgttgctggccaataaggtgccagctgctgcccgtgctggtgccattgccccatgtgaagtcactgtgccagcccagaacactggtctcgggcccgagaagacctcctttttccaggctttaggtatcaccactaaaatctccaggggcaccattgaaatcctgggtgtccgcaatgttgccagtgtctgtctgcagattggctacccaactgttgcatcagtaccccattctatcatcaacgggtacaaacgagtcctggccttgtctgtggagacggattacaccttcccacttgctgaaaaggtcaaggccttcttggctgatccatctgcctttgtggctgctgcccctgtggctgctgccaccacagtgtcctgctgctgctgcagccccagctaaggttgaagccaaggaagagtcggaggagtcggacgaggatatgggattggtctctttgactaatcaccaaaaagcaaccaacttagccagttttatttgcaaaacaaggaaataaaggcttacttctttaaaaaaaaaaaaaaaaaaaaaaaaaaaaaaaaaaaaaaaaaaaaaaaaaaaaaaaaaaaaaaaaaaaaaaaaaaanaaananaaanaaaaannaanaaaaaaaaaaaaaaaagggggggggggggtataaaaaattacccaggggggaggaaaagtattattgaagcacagccatatttttatgaaagaggggcgccactatataagggggagagatataataataacgcgaggggggggggttgatttaaaaaaagagacgttgggtgagggaaaaaaaaaatgagtggtggatggtatctatttagaggagaaccaccacaacctggtggtggcgggaataattattaggagaaccaatactcagacgaagatattataaggtgcgcgaggaagaaacattacaaatgagggatgtatgttggtgattacaacgacgagatttattgctggggaggaaaaagtttgcggatggaaa

SEQ ID NO: 20412 - DNA, 808 bp, Homo sapiens
cttctctcgccaggcgtcctcgtggaagtgacatcgtctttaaaccctgcgtggcaatccctgacgcaccgccgtgatgcccagggaagacagggcgacctggaagtccaactacttccttaagatcatccaactattggatgattatccgaaatgtttcattgtgggagcagacaatgtgggctccaagcagatgcagcagatccgcatgtcccttcgcgggaaggctgtggtgctgatgggcaagaacaccatgatgcgcaaggccatccgagggcacctggaaaacaacccagctctggagaaactgctgcctcatatccgggggaatgtgggctttgtgttcaccaaggaggacctcactgagatcagggacatgttgctggccaataaggtgccagctgctgcccgtgctggtgccattgccccatgtgaagtcactgtgccagcccagaacactggtctcgggcccgagaagacctcctttttccaggctttaggtatcaccactaaaatctccaggggcaccattgaaatcctgagtgatgtgcagctgatcaagactggagacaaagtgggagccagcgaagccacgctgctgaacatgctcaacatctcccccttctcctttgggctggtcatccagcaggtgttcgacaatggcagcatctacaaccctgaagtgcttgatatcacagaggaaactctgcattctcgcttcctggagcaggggctggcctggcagattggcttatcccaactggtctgcataaggtccccccattctatttattcgggtacccggcct

SEQ ID NO: 20413 - DNA, 1515 bp, Homo sapiens
  misc_feature (1113)..(1113): n is a, c, g, or t
  misc_feature (1117)..(1117): n is a, c, g, or t
  misc_feature (1119)..(1119): n is a, c, g, or t
  misc_feature (1123)..(1123): n is a, c, g, or t
  misc_feature (1129)..(1130): n is a, c, g, or t
  misc_feature (1133)..(1133): n is a, c, g, or t
tctctcgccaggcgtttttttggaagtgacatcgtctttaaaccctgcgtggcaatccctgacgcaccgccgtgatgcccagggaagacagggcgacctggaagtccaactacttccttaagatcatccaactattggatgattatccgaaatgtttcattgtgggagcagacaatgtgggctccaagcagatgcagcagatccgcatgtcccttcgcgggaaggctgtggtgctgatgggcaagaacaccatgatgcgcaaggccatccgagggcacctggttgtgttcaccaaggaggacctcactgagatcagggacatgttgctggccaataaggtgccagctgctgcccgtgctggtgccattgccccatgtgaagtcactgtgccagcccagaacactggtctcgggcccgagaagacctcctttttccaggctttaggtatcaccactaaaatctccaggggcaccattgaaatcctgagtgatgtgcagctgatcaagactggagacaaagtgggagccagcgaagccacgctgctgaacatgctcaacatctcccccttctcctttgggctggtcatccagcaggtgttcgacaatggcagcatctacaaccctgaagtgcttgatatcacagaggaaactctgcattctcgcttcctggagggtgtccgcaatgttgccagtgtctgtctgcagattggctacccaactgttgcatcagtaccccattctatcatcaacgggtacaaacgagtcctggccttgtctgtggagacggattacaccttcccacttgctgaaaaggtcaaggccttcttggctgatccatctgcctttgtggctgctgcccctgtggctgctgccaccacagtgtcctgctgctgctgcagccccagctaaggttgaagccaaggaagagtcggaggagtcggacgaggatatgggattggtctctttgactaatcaccaaaaagcaaccaacttagccagttttatttgcaaaacaaggaaataaaggcttacttctttaaaaaaaaaaaaaaaaaaaaaaaaaaaaaaaaaaaaaaaaaaaaaaaaaaaaaaaaaaaaaaaaaaaaaaaaaaanaaananaaanaaaaannaanaaaaaaaaaaaaaaaagggggggggggggtataaaaaattacccaggggggaggaaaagtattattgaagcacagccatatttttatgaaagaggggcgccactatataagggggagagatataataataacgcgaggggggggggttgatttaaaaaaagagacgttgggtgagggaaaaaaaaaatgagtggtggatggtatctatttagaggagaaccaccacaacctggtggtggcgggaataattattaggagaaccaatactcagacgaagatattataaggtgcgcgaggaagaaacattacaaatgagggatgtatgttggtgattacaacgacgagatttattgctggggaggaaaaagtttgcggatggaaa

SEQ ID NO: 20414 - DNA, 789 bp, Homo sapiens
cttctctcgccaggcgtcctcgtggaagtgacatcgtctttaaaccctgcgtggcaatccctgacgcaccgccgtgatgcccagggaagacagggcgacctggaagtccaactacttccttaagatcatccaactattggatgattatccgaaatgtttcattgtgggagcagacaatgtgggctccaagcagatgcagcagatccgcatgtcccttcgcgggaaggctgtggtgctgatgggcaagaacaccatgatgcgcaaggccatccgagggcacctggaaaacaacccagctctggagaaactgctgcctcatatccgggggaatgtgggctttgtgttcaccaaggaggacctcactgagatcagggacatgttgctggccaataaggtgccagctgctgcccgtgctggtgccattgccccatgtgaagtcactgtgccagcccagaacactggtctcgggcccgagaagacctcctttttccaggctttaggtatcaccactaaaatctccaggggcaccattgaaatcctgtgtgaactgatcagacggagacgtgggagcaggaagcacgctgtgcaatgtcacattccccctttcttgggctgtatcacaggtcgaaggcagattaacctgatctgttccgggaattattccgtctgagggcgcgttcggagtggaggtcagggcgccacttagggaagacgcttggagatccttggagttgacgggctgcaacttgcgatgctttcatattagggctcagacaccaccccacatcc

SEQ ID NO: 20415 - DNA, 538 bp, Homo sapiens
cttctctcgccaggcgtcctcgtggaagtgacatcgtctttaaaccctgcgtggcaatccctgacgcaccgccgtgatgcccagggaagacagggcgacctggaagtccaactacttccttaagatcatccaactattggatgattatccgaaatgtttcattgtgggagcagacaatgtgggctccaagcagatgcagcagatccgcatgtcccttcgcgggaaggctgtggtgctgatgggcaagaacaccatgatgcgcaaggccatccgagggcacctggaaaacaacccagctctggagaaactgctgcctcatatccgggggaatgtgggctttgtgttcaccaaggaggacctcactgagatcagggacatgttgctggccaataaggtgccagctgctgcccgtgctggtgccattgccccatgcgtggattgccagctggcaatccacgcatggccggcaatccacgcatggcgaacgtctgccctatcaactttcgatggtagtcgccgtgcctacatgcgtggttaa

SEQ ID NO: 20416 - DNA, 464 bp, Homo sapiens
  misc_feature (325)..(325): n is a, c, g, or t
  misc_feature (327)..(327): n is a, c, g, or t
  misc_feature (335)..(335): n is a, c, g, or t
  misc_feature (337)..(337): n is a, c, g, or t
  misc_feature (344)..(344): n is a, c, g, or t
  misc_feature (366)..(366): n is a, c, g, or t
  misc_feature (371)..(371): n is a, c, g, or t
  misc_feature (381)..(382): n is a, c, g, or t
  misc_feature (392)..(392): n is a, c, g, or t
  misc_feature (397)..(397): n is a, c, g, or t
  misc_feature (410)..(410): n is a, c, g, or t
  misc_feature (425)..(425): n is a, c, g, or t
  misc_feature (428)..(428): n is a, c, g, or t
  misc_feature (430)..(430): n is a, c, g, or t
tctctcgccaggcgtttttttggaagtgacatcgtctttaaaccctgcgtggcaatccctgacgcaccgccgtgatgcccagggaagacagggcgacctggaagtccaactacttccttaagatcatccaactattggatgattatccgaaatgtttcattgtgggagcagacaatgtgggctccaagcagatgcagcagatccgcatgtcccttcgcgggaaggctgtggtgctgatgggcaagaacaccatgatgcgcaaggccatccgagggcacctggaaaacaacccagctctggagaactctgcctatatccggggatntnggcttgtntncacaggnggcctactagacaggacatttncggcnataggccacnnctccgtctgnccatnccatgtagtactntcaccagacattgtnggncngagctctttcaggttggtactaattcgggccatt

SEQ ID NO: 20417 - DNA, 429 bp, Homo sapiens
tctctcgccaggcgtttttttggaagtgacatcgtctttaaaccctgcgtggcaatccctgacgcaccgccgtgatgcccagggaagacagggcgacctggaagtccaactacttccttaagatcatccaactattggatgattatccgaaatgtttcattgtgggagcagacaatgtgggctccaagcagatgcagcagatccgcatgtcccttcgcgggaaggctgtggtgctgatgggcaagaacaccatgatgctggcaataaggtgcaactgctgccgtgctggtgcattgcccatgtaggtactttcagccagacactgtttgggccagaagacctcttttcaggctcaggatacacataattcagggacattgaatctaggtagttcaggtacatagcttgaaggtagcacacacgtcgtat

SEQ ID NO: 20418 - DNA, 980 bp, Homo sapiens
  misc_feature (819)..(820): n is a, c, g, or t
  misc_feature (911)..(911): n is a, c, g, or t
  misc_feature (930)..(931): n is a, c, g, or t
  misc_feature (939)..(939): n is a, c, g, or t
  misc_feature (957)..(958): n is a, c, g, or t
  misc_feature (980)..(980): n is a, c, g, or t
tcccccgggctgcaggattcggcacgagctcgtggaagtgacatcgtctttaaaccctgcgtggcaatccctgacgcaccgccgtgatgcccagggaagacagggcgacctggaagtccaactacttccttaagatcatccaactattggatgattatccgaaatgtttcattgtgggagcagacaatgtgggctccaagcagatgcagcagatccgcatgtcccttcgcgggaaggctgtggtgctgatgggcaagaacaccatgatgcgcaaggccatccgagggcacctggaaaacaacccagctctggagaaactgctgcctcatatccgggggaatgtgggctttgtgttcaccaaggaggacctcactgagatcagggacatgttgctggccaataaggtgccagctgctgcccgtgctggtgccattgccccatgtgaagtcactgtgccagcccagaacactggtctcgggcccgagaagacctcctttttccaggctttaggtatcaccactaaaatctccaggggcaccattgaaatcctgagtgatgtgcagctgatcaagactggagacaaagtgggagccagcgaagccacgctgctgaacatgctcaacatctcccccttctcctttgggctggtcatccagcaggtgttcgacaatggcagcatctacaaccctgaagtgcttgatatcacagaggaaactctgcattctcgcttcctggaggtgtcgaatgttgcagtgctgctgagatgctaccactgtgcatagacccatctatataacggtcaacagctgctgctggagnngtacactcactgtgaaggcagggctctgtgtcattgcttgtgtgtgcctgtgtgtgcacaagtgtctgtgtgtgagccagtaggtgagcangagatcgagatcgacagtnngatggctntgctatacgacactagcnntatgcacagggatagtactttn

SEQ ID NO: 20419 - DNA, 802 bp, Homo sapiens
  misc_feature (787)..(787): n is a, c, g, or t
gcctgagctccctgcgtcctcgtggaagtgacatcgtctttaaaccctgcgtggcaatccctgacgcaccgccgtgatgcccagggaagacagggcgacctggaagtccaactacttccttaagatcatccaactattggatgattatccgaaatgtttcattgtgggagcagacaatgtgggctccaagcagatgcagcagatccgcatgtcccttcgcgggaaggctgtggtgctgatgggcaagaacaccatgatgcgcaaggccatccgagggcacctggaaaacaacccagctctggagaaactgctgcctcatatccgggggaatgtgggctttgtgttcaccaaggaggacctcactgagatcagggacatgttgctggccaataaggtgccagctgctgcccgtgctggtgccattgccccatgtgaagtcactgtgccagcccagaacactggtctcgggcccgagaagacctcctttttccaggctttaggtatcaccactaaaatctccaggggcaccattgaaatcctgtgtgcagctgatcaagactggagaccacagtggggaggccgcgaagccgctggtggactggtcattttcccctttcccttggggcgggcctccgcgggggtgccgaggtggcgcttaaccttaggctgtgtccccgggaacggtttcctccgggggggcccgggccccctgcgcagtgtgcccagggttgccccccttcgggagacagcgcgctgggaacccctcgagtgccctttggcgcgctgngacgggtcacgtata

SEQ ID NO: 20420 - DNA, 1223 bp, Homo sapiens
  misc_feature (1113)..(1113): n is a, c, g, or t
  misc_feature (1115)..(1115): n is a, c, g, or t
  misc_feature (1125)..(1125): n is a, c, g, or t
  misc_feature (1131)..(1132): n is a, c, g, or t
  misc_feature (1141)..(1141): n is a, c, g, or t
cttctctcgccaggcgtcctcgtggaagtgacatcgtctttaaaccctgcgtggcaatccctgacgcaccgccgtgatgcccagggaagacagggcgacctggaagtccaactacttccttaagatcatccaactattggatgattatccgaaatgtttcattgtgggagcagacaatgtgggctccaagcagatgcagcagatccgcatgtcccttcgcgggaaggctgtggtgctgatgggcaagaacaccatgatgcgcaaggccatccgagggcacctggaaaacaacccagctctggagaaactgctgcctcatatccgggggaatgtgggctttgtgttcaccaaggaggacctcactgagatcagggacatgttgctggccaataaggtgccagctgctgcccgtgctggtgccattgccccatgtgaagtcactgtgccagcccagaacactggtctcgggcccgagaagacctcctttttccaggctttaggtatcaccactaaaatctccaggggcaccattgaaatcctgagtgatgtgcagctgatcaagactggagacaaagtgggagccagcgaagccacgctgctgaacatgctcaacatctcccccttctcctttgggctggtcatccagcaggtgttcgacaatggcagcatctacaaccctgaagtgcttgatatcacagaggaaactctgcattctcgcttcctggagggtgtccgcaatgttgccagtgtctgtctgcagattggctacccaactgttgcatcagtaccccattctatcatcaacgggtacaaacgagtcctggccttgtctgtggagacggattacaccttcccacttgctgaaaaggtcaaggccttcttggctgatccatctgcctttgtggctgctgcccctgtggctgctgccaccacagtgtcctgctgctgctgcagccccagctaaggttgaagccaaggaagagtcggaggagtcggacgaggatatgggattggtctctttgactaatcaccaaaaagcaaccaacttagccagttttatttgcaaaacaaggaaataaaggcttacttctttaaaaaaagggggggtaattncnggggcagtangtaccnnttgaagggntaaggaggggtaaaagagggggtaatgtggaggcgttgtagcattcggatggcaagaggagaatgaatcgtagaaagaagcg

SEQ ID NO: 20421 - DNA, 1569 bp, Homo sapiens
  misc_feature (1167)..(1167): n is a, c, g, or t
  misc_feature (1171)..(1171): n is a, c, g, or t
  misc_feature (1173)..(1173): n is a, c, g, or t
  misc_feature (1177)..(1177): n is a, c, g, or t
  misc_feature (1183)..(1184): n is a, c, g, or t
  misc_feature (1187)..(1187): n is a, c, g, or t
tctctcgccaggcgtttttttggaagtgacatcgtctttaaaccctgcgtggcaatccctgacgcaccgccgtgatgcccagggaagacagggcgacctggaagtccaactacttccttaagatcatccaactattggatgattatccgaaatgtttcattgtgggagcagacaatgtgggctccaagcagatgcagcagatccgcatgtcccttcgcgggaaggctgtggtgctgatgggcaagaacaccatgatgcgcaaggccatccgagggcacctggaaaacaacccagctctggagaaactgctgcctcatatccgggggaatgtgggctttgtgttcaccaaggaggacctcactgagatcagggacatgttgctggccaataaggtgccagctgctgcccgtgctggtgccattgccccatgtgaagtcactgtgccagcccagaacactggtctcgggcccgagaagacctcctttttccaggctttaggtatcaccactaaaatctccaggggcaccattgaaatcctgagtgatgtgcagctgatcaagactggagacaaagtgggagccagcgaagccacgctgctgaacatgctcaacatctcccccttctcctttgggctggtcatccagcaggtgttcgacaatggcagcatctacaaccctgaagtgcttgatatcacagaggaaactctgcattctcgcttcctggagggtgtccgcaatgttgccagtgtctgtctgcagattggctacccaactgttgcatcagtaccccattctatcatcaacgggtacaaacgagtcctggccttgtctgtggagacggattacaccttcccacttgctgaaaaggtcaaggccttcttggctgatccatctgcctttgtggctgctgcccctgtggctgctgccaccacagtgtcctgctgctgctgcagccccagctaaggttgaagccaaggaagagtcggaggagtcggacgaggatatgggattggtctctttgactaatcaccaaaaagcaaccaacttagccagttttatttgcaaaacaaggaaataaaggcttacttctttaaaaaaaaaaaaaaaaaaaaaaaaaaaaaaaaaaaaaaaaaaaaaaaaaaaaaaaaaaaaaaaaaaaaaaaaaaanaaananaaanaaaaannaanaaaaaaaaaaaaaaaagggggggggggggtataaaaaattacccaggggggaggaaaagtattattgaagcacagccatatttttatgaaagaggggcgccactatataagggggagagatataataataacgcgaggggggggggttgatttaaaaaaagagacgttgggtgagggaaaaaaaaaatgagtggtggatggtatctatttagaggagaaccaccacaacctggtggtggcgggaataattattaggagaaccaatactcagacgaagatattataaggtgcgcgaggaagaaacattacaaatgagggatgtatgttggtgattacaacgacgagatttattgctggggaggaaaaagtttgcggatggaaa

SEQ ID NO: 20422 - DNA, 1097 bp, Homo sapiens
cttctctcgccaggcgtcctcgtggaagtgacatcgtctttaaaccctgcgtggcaatccctgacgcaccgccgtgatgcccagggaagacagggcgacctggaagtccaactacttccttaagatcatccaactattggatgattatccgaaatgtttcattgtgggagcagacaatgtgggctccaagcagatgcagcagatccgcatgtcccttcgcgggaaggctgtggtgctgatgggcaagaacaccatgatgcgcaaggccatccgagggcacctggaaaacaacccagctctggagaaactgctgcctcatatccgggggaatgtgggctttgtgttcaccaaggaggacctcactgagatcagggacatgttgctggccaataaggtgccagctgctgcccgtgctggtgccattgccccatgtgaagtcactgtgccagcccagaacactggtctcgggcccgagaagacctcctttttccaggctttaggtatcaccactaaaatctccaggggcaccattgaaatcctgagtgatgtgcagctgatcaagactggagacaaagtgggagccagcgaagccacgctgctgaacatgctcaacatctcccccttctcctttgggctggtcatccagcaggtgttcgacaatggcagcatctacaaccctgaagtgcttgatatcacagaggaaactctgcattctcgcttcctggagggtgtccgcaatgttgccagtgtctgtctgcagattggctacccaactgttgcatcagtaccccattctatcatcaacgggtacaaacgagtcctggccttgtctgtggagacggattacaccttcccacttgctgaaaaggtcaaggccttcttggctgatccatctgcctttgtggctgctgcccctgtggctgctgccaccacagtgtcctgctgctgctgcagccccagctaaggttgaagccaagcaaaaccctgacaacccccaccccaaggcttccatcttttgcatcaccaccactcctaaaagcccccttcttataaaaatttatttgcttttcaaggaaataaaaattaaattctttaaa

SEQ ID NO: 20423 - DNA, 867 bp, Homo sapiens
cttctctcgccaggcgtcctcgtggaagtgacatcgtctttaaaccctgcgtggcaatccctgacgcaccgccgtgatgcccagggaagacagggcgacctggaagtccaactacttccttaagatcatccaactattggatgattatccgaaatgtttcattgtgggagcagacaatgtgggctccaagcagatgcagcagatccgcatgtcccttcgcgggaaggctgtggtgctgatgggcaagaacaccatgatgcgcaaggccatccgagggcacctggaaaacaacccagctctggagaaactgctgcctcatatccgggggaatgtgggctttgtgttcaccaaggaggacctcactgagatcagggacatgttgctggccaataaggtgccagctgctgcccgtgctggtgccattgccccatgtgaagtcactgtgccagcccagaacactggtctcgggcccgagaagacctcctttttccaggctttaggtatcaccactaaaatctccaggggcaccattgaaatcctgagtgatgtgcagctgatcaagactggagacaaagtgggagccagcgaagccacgctgctgaacatgctcaacatctcccccttctcctttgggctggtcatccagcaggtgttcgacaatggcagcatctacaaccctgaagtgcttgatatcacagaggaaactctgcattctcgcttcctggagcgggtttcggtactggagggtccccagtgccgggttgttgcattgtcccctgtggtctcccattatacagggacgtgcggtctgagggaaccccttgtagggaggttgtccctaggtgccggtggactcctgtgcgcact

SEQ ID NO: 20424 - DNA, 1518 bp, Homo sapiens
  misc_feature (1116)..(1116): n is a, c, g, or t
  misc_feature (1120)..(1120): n is a, c, g, or t
  misc_feature (1122)..(1122): n is a, c, g, or t
  misc_feature (1126)..(1126): n is a, c, g, or t
  misc_feature (1132)..(1133): n is a, c, g, or t
  misc_feature (1136)..(1136): n is a, c, g, or t
cttctctcgccaggcgtcctcgtggaagtgacatcgtctttaaaccctgcgtggcaatccctgacgcaccgccgtgatgcccagggaagacagggcgacctggaagtccaactacttccttaagatcatccaactattggatgattatccgaaatgtttcattgtgggagcagacaatgtgggctccaagcagatgcagcagatccgcatgtcccttcgcgggaaggctgtggtgctgatgggcaagaacaccatgatgcgcaaggccatccgagggcacctggaaaacaacccagctctggagaaactgctgcctcatatccgggggaatgtgggctttgtgttcaccaaggaggacctcactgagatcagggacatgttgctggccaataaggtgccagctgctgcccgtgctggtgccattgccccatgtgaagtcactgtgccagcccagaacactggtctcgggcccgagaagacctcctttttccaggctttaggtatcaccaactggagacaaagtgggagccagcgaagccacgctgctgaacatgctcaacatctcccccttctcctttgggctggtcatccagcaggtgttcgacaatggcagcatctacaaccctgaagtgcttgatatcacagaggaaactctgcattctcgcttcctggagggtgtccgcaatgttgccagtgtctgtctgcagattggctacccaactgttgcatcagtaccccattctatcatcaacgggtacaaacgagtcctggccttgtctgtggagacggattacaccttcccacttgctgaaaaggtcaaggccttcttggctgatccatctgcctttgtggctgctgcccctgtggctgctgccaccacagtgtcctgctgctgctgcagccccagctaaggttgaagccaaggaagagtcggaggagtcggacgaggatatgggattggtctctttgactaatcaccaaaaagcaaccaacttagccagttttatttgcaaaacaaggaaataaaggcttacttctttaaaaaaaaaaaaaaaaaaaaaaaaaaaaaaaaaaaaaaaaaaaaaaaaaaaaaaaaaaaaaaaaaaaaaaaaaaanaaananaaanaaaaannaanaaaaaaaaaaaaaaaagggggggggggggtataaaaaattacccaggggggaggaaaagtattattgaagcacagccatatttttatgaaagaggggcgccactatataagggggagagatataataataacgcgaggggggggggttgatttaaaaaaagagacgttgggtgagggaaaaaaaaaatgagtggtggatggtatctatttagaggagaaccaccacaacctggtggtggcgggaataattattaggagaaccaatactcagacgaagatattataaggtgcgcgaggaagaaacattacaaatgagggatgtatgttggtgattacaacgacgagatttattgctggggaggaaaaagtttgcggatggaaa

SEQ ID NO: 20425 - DNA, 999 bp, Homo sapiens
  misc_feature (557)..(557): n is a, c, g, or t
  misc_feature (849)..(851): n is a, c, g, or t
  misc_feature (902)..(902): n is a, c, g, or t
  misc_feature (930)..(930): n is a, c, g, or t
  misc_feature (999)..(999): n is a, c, g, or t
cttctctcgccaggcgtcctcgtggaagtgacatcgtctttaaaccctgcgtggcaatccctgacgcaccgccgtgatgcccagggaagacagggcgacctggaagtccaactacttccttaagatcatccaactattggatgattatccgaaatgtttcattgtgggagcagacaatgtgggctccaagcagatgcagcagatccgcatgtcccttcgcgggaaggctgtggtgctgatgggcaagaacaccatgatgcgcaaggccatccgagggcacctggaaaacaacccagctctggagaaactgctgcctcatatccgggggaatgtgggctttgtgttcaccaaggaggacctcactgagatcagggacatgttgctggccaataaggtgccagctgctgcccgtgctggtgccattgccccatgtgaagtcactgtgccagcccagaacactggtctcgggcccgagaagacctcctttttccaggctttaggtatcaccactaaaatctccaggggcaccattgaaatcctgtgtgaagatgataaanaatggagaaaaagtgggagcaagcgaagcaaagatgatgaaaatgttaaaaatttcccccttatactttgggatggtaataaagaaggtgttagaaaatggaagaatataaaaacttgaagtgattgatataaaagaggaaaatatgaattatagattaatggagggtgtcagaaatgttgcaagtgtatgtatgaagattggataaaaaaatgttgaataagtaaaaaattatataataaaagggtaaaaaagagtaatggcattgtatagtggagaaggattagaggttnnnaattgatgaaaaggtaaaggaattattggatgataaaataatgaatttgtngatgatgaaaaatgtggatgatgaaaanaaagatgataatgatagatagatgaagaaaaagataaggtatagaagaaaaagagaagagtaggaggan

SEQ ID NO: 20426 - DNA, 715 bp, Homo sapiens
cttctctcgccaggcgtcctcgtggaagtgacatcgtctttaaaccctgcgtggcaatccctgacgcaccgccgtgatgcccagggaagacagggcgacctggaagtccaactacttccttaagatcatccaactattggatgattatccgaaatgtttcattgtgggagcagacaatgtgggctccaagcagatgcagcagatccgcatgtcccttcgcgggaaggctgtggtgctgatgggcaagaacaccatgatgcgcaaggccatccgagggcacctggaaaacaacccagctctggagaaactgctgcctcatatccgggggaatgtgggctttgtgttcaccaaggaggacctcactgagatcagggacatgttgctggccaataaggtgccagctgctgcccgtgctggtgccattgccccatgtgaagtcactgtgccagcccagaacactggtctcgggcccgagaagacctcctttttccaggctttaggtatcaccaactggagacaaagtgggagccagcgaagccacgctgctgaacatgctcaacatctcccccttctcctttgggctggtcatccagcaggtgttcgacaatggcagcatctacaaccctgaagtgcttgatatcacagaggaaactctgcattctcgcttcctggagtggggcggtccgatgctcccaggcttactccaatgtatact

SEQ ID NO: 20427 - DNA, 699 bp, Homo sapiens
cttctctcgccaggcgtcctcgtggaagtgacatcgtctttaaaccctgcgtggcaatccctgacgcaccgccgtgatgcccagggaagacagggcgacctggaagtccaactacttccttaagatcatccaactattggatgattatccgaaatgtttcattgtgggagcagacaatgtgggctccaagcagatgcagcagatccgcatgtcccttcgcgggaaggctgtggtgctgatgggcaagaacaccatgatgcgcaaggccatccgagggcacctggaaaacaacccagctctggagaaactgctgcctcatatccgggggaatgtgggctttgtgttcaccaaggaggacctcactgagatcagggacatgttgctggccaataaggtgccagctgctgcccgtgctggtgccattgccccatgtgaagtcactgtgccagccgtcggttccagctttaggtatcacactaaaatctcgatgatgtgcagctgatcaagactggagacttctttggggtggtcaccaacaaggggttcgcaatggaggatttacaaccctgagtggttggtattacaaaggaactctgcttcttcgttcttgagggggggcgcaatgttgccggggttgttttaatttggtacccaaccgtggcttagaccccttctctttaacaggggaaacaaatcttg

SEQ ID NO: 20428 - DNA, 435 bp, Homo sapiens
acctgcttgactctcaggatagatctcttgctctatagaatatgtgatctcttgttgaggaaacacctaaaacctgatgtgcagaatggggcaggggcagaaacagttgtggtgaacagaaatagcacctgaatttcaggaggcccatatgtcagaacagtaggccttgaataggcagcatgatttattgtgcaaataaaaatggatggaaatgatttttttataaagcaataagaatggggagatttagtggctaggtgtcttagtctatttgtgctgctataacaaaatacctgagactaaagtttggtcaggttggctcatatctataatcccagcagtttgagagggccactggggaggatcgcttgagaccaggagttcaagaccagcctgggctgcatagcaagatctcatctctacaaaaaagaaaaa

SEQ ID NO: 20429 - DNA, 1569 bp, Homo sapiens
atgcaaacacacacagccacatatatacatgtgtagcacagcgctaaacactgtggaggctaaaaaaagtcaaagacaacattataactaaaagtcgaaagcacacaaaatataaataatagtgtatgcaagttaatgtacattatacatgcgtgtaagggacataaatggaggggtgtgaactttggttaggcaaagtttactggaggaggggtttttgagtcaaatttggaaggatgaacttgttagatagtcagagttggaaacaaaacaatccaagaatagggatataagcattgctagtctagaatagtctattccttgtgaaaatataaatttaattttcaggaatccagtatattccaaacatcacatatttagcatgagaaaaattgatttgtgattgtgtatatgagtcattgttaatgggagacaagctgaactgccacatgccaccaaatgaacctttacttcaatcaaaaaggagggtatgattggttcaattatattaacagaatatcatgggcatttctctatgatggtcattcaaggtagtaggtctctttcaactgagtgcaacattgagaataatgatttggttcagggcaactacaaataatcacttactaagccttaaataaagccattatttttatatcaatagcacaaaggaaaaccaaaagtccttaaccactgaccatttttatcatattttaggcctttttttaaaaaatcagggtatagtaggcactaagttttattaggaaatatttaaacctgctgaaggatttatttataaaaagtgcaatttttcaaaacacattattattttttaatttcccaattttttcagtttttcaaattgtaccacaacatagaactgtgatattttgctattacttcaatgtgaataaataaggtaaagtatatcatttattgagtgcccatgctgtacatttaaaatatgcattatttaatttaatcttactcccagcaccaaaaggtaattgaccagcctcaacacaattttggacaaagctagtaactgaacacaggtctgtctgccccacacttctctttctcttgtaactgcacaatagcagaaaattggcaagatgtatttttactttccaagatgccgtgtgtgccaagaataaatgaaatgatgttaaagcataataataacatatctttaaaaagcttttcaaaatatattttcaccctgacagtgacccttgtaacttaaatgatttttggaaatattagtatgtaagtataattcaaagttgtcaaaatgtaagacatttagaagtaatttttattatttatattgttaatacttaatcactggaaattcattttccttactcgatgttttctttcaactgagaagcctaaaacaaacaaaaaccttgtgtgttatcctgatatagttgactaaatgtatttgttcttatatggatagtaatatgaatgtgacatgcaccaattgtcctattataattttcagataagtgtaactaagcacttgtgtaataaatattagtcattttatttcaaaaaataatt

SEQ ID NO: 20430 - DNA, 1515 bp, Homo sapiens
atgcaaacacacacagccacatatatacatgtgtagcacagcgctaaacactgtggaggctaaaaaaagtcaaagacaacattataactaaaagtcgaaagcacacaaaatataaataatagtgtatgcaagttaatgtacattatacatgcgtgtaagggacataaatggaggggtgtgaactttggttaggcaaagtttactggaggaggggtttttgagtcaaatttggaaggatgaacttgttagatagtcagagttggaaacaaaacaatccaagaatagggatataagcattgctagtctagaatagtctattccttgtgaaaatataaatttaattttcaggaatccagtatattccaaacatcacatatttagcatgagaaaaattgatttgtgattgtgtatatgagtcattgttaatgggagacaagctgaactgccacatgccaccaaatgaacctttacttcaatcaaaaaggagggtatgattggttcaattatattaacagaatatcatgggcatttctctatgatggtcattcaaggtagtaggtctctttcaactgagtgcaacattgagaataatgatttggttcagggcaactacaaataatcacttactaagccttaaataaagccattatttttatatcaatagcacaaaggaaaaccaaaagtccttaaccactgaccatttttatcatattttaggcctttttttaaaaaatcagggtatagtaggcactaagttttattaggaaatatttaaacctgctgaaggatttatttataaaaagtgcaatttttccacaacatagaactgtgatattttgctattacttcaatgtgaataaataaggtaaagtatatcatttattgagtgcccatgctgtacatttaaaatatgcattatttaatttaatcttactcccagcaccaaaaggtaattgaccagcctcaacacaattttggacaaagctagtaactgaacacaggtctgtctgccccacacttctctttctcttgtaactgcacaatagcagaaaattggcaagatgtatttttactttccaagatgccgtgtgtgccaagaataaatgaaatgatgttaaagcataataataacatatctttaaaaagcttttcaaaatatattttcaccctgacagtgacccttgtaacttaaatgatttttggaaatattagtatgtaagtataattcaaagttgtcaaaatgtaagacatttagaagtaatttttattatttatattgttaatacttaatcactggaaattcattttccttactcgatgttttctttcaactgagaagcctaaaacaaacaaaaaccttgtgtgttatcctgatatagttgactaaatgtatttgttcttatatggatagtaatatgaatgtgacatgcaccaattgtcctattataattttcagataagtgtaactaagcacttgtgtaataaatattagtcattttatttcaaaaaataatt

SEQ ID NO: 20431 - DNA, 831 bp, Homo sapiens
tgatacctgactctcatttatgacacaatctgtgtatgaaatagcccaaattagtatcagcctttggatagtttaaaaaatgattttttttttggtatgcttccctatcatctccatctgccccagaactcaaggtctgtccatgctggtgacttagagtagtgggatttaaaccagaggatgcacacttggaggcacttgaagatgtttcaagggacatgcaggcattgaatatttaaaggaaattaattgccgattcttagatcttgagtgttaatcagttctaacactgaccgtcctgagaaaatgcctatggcccaggtgacctgctggttttcctttcacaccttctctttcatgattaccattctttaaagggaagacatacctttcacctaccccttatcagagtgccaagtagggggataattaaaatactgctggggctgctgggaaaagtgagtgactctaatgactgggcaaaggaaccttttgcaaatgtttcccatttttgcattcagtaaaattgggcagggtggctcatgcctgtaatccaagcgctttggaaggctggggcaggcagatcagttgagcccaggagttcaagaccagcctgggcaacatgtcaaatcctcatttttacaaacaaaacaaaacaaaattagctggacgcggtggcacgtgcctgtagttccagctacttggagggcactgaagtgtgggaggattgcctgagcttagggagtttgaggctgcagtgagccatgatcatgccagtgtactccagcctggacaatgtagtgagaccctgtctcaaaaaaaaaaacaaga

SEQ ID NO: 20432 - DNA, 883 bp, Homo sapiens
gaaagatgtttttaaaagcttggcccaaagaataggaacttagctagcatgtatacaaaatatatttgaggttactaaatgaataaaaactcggaattaggccaggagacatggaataccattcatgggatggttatcacaggagtttagaaagactctgcctcccagcatcttgaatatctccagcctgttcactgttttcttcctacatgatctttacctgttgttagactgtggccacagccagtaaatcaggccagagtgtctcaaactggacaagaaatgtgctgcattgccgagttcttattttcaccttttcataatcccaactacaataacaagaattttattgactaataagggaatatgtatggaagaaggaagagaaagcctttgtctagcatttattaggaggatcagagtgagtgggaagtttcacaacggattgatctgatcaatcccttcaaggagctgaaggcaaaatgtgtaaaacccctaaatcagattgaaaagcctatttcattgatatccaacatgtttgatgtttaagctagctttacctaagccacttctcagcctccagaatactctctctggggttgtgagtcagtcagcccacaagcattcacagagtgcttacctgccccgagggaagtccagcagctccaccagatagagatctggagatgcttctctcactgtgcttggcttcatctggggtgcaagggaaggcattatcgggtggctcccttgctccaggaactgaacgaggcccttttcataccttaaatatattctgcacaacaaatgggtattgttagtctccatttcatagatgaaaatagtgaagcccacagaaaataagtagctcctccacaggttg

SEQ ID NO: 20433 - DNA, 571 bp, Homo sapiens
tttttttttgagagggagtctcactctgccacccaggctggagtgcagtggcacgatctcagctcactgcaagctccacctcccgggttcacgccattcgcctgcctcagcctcccaagtagctgggactataggcgcccgccaccacgtctggctaattttttgtatttttagtagagacagggtttcaccatgttagccaggatggtctcgatctcctgacctcgtgatctgcccgcctcggcctcccaaagtgctgggattacaggcgtgagccaccgcacccggcccagtcttctaattatttagtgaattcagtacgttgacatggggctgaaaaatctgcatttctaagttctaagttctaagccaagtcattcactaattatgtcaattctatccctgaaaaataagggcttgtatcaccaaacggatgaaataccatttctgaactcaaaagctgaagcaactccctactccacatttattaattacagcctgaaggaaattgctcacatctatgcaccccacagacaaaagggcacagttgctaaaagaacagttccaaact

SEQ ID NO: 20434 - DNA, 357 bp, Homo sapiens
acacagagaaataccgtatgatccagtgattccacttctgggtatatgcctaaaagaatcgaaagcaaggctggacacagtggctcacacctgtaatcgcagcactttgagaagccgaggtgggaggatcgcttgaggccaggagttcaatgccagcctgggcaacatagtgagatcccacctttacaaaaaattacaaaaattaaccaggcatggtggcgttgcctgcagtttcagctactccggaggctgaggtgggaggattgcttgagaccaggaggttgaagctgcagtgagctgtgatcactgccctgcactccagcctgggtgacatagagagaccccatctcaaaaaat

SEQ ID NO: 20435 - DNA, 300 bp, Homo sapiens
ataaggagaaagaaaatctccaaaccaggaatgtttttgtgccactgactttagataaaaatgcaaaagggcagtcatcctgtcccagcagacccttctcattggcattttccagtattgtgagatcaatttctgaccatatgaaatgtgaaaagtatatgtttctgttacaatactgctttaagatctaaaccatgccaacagatgtttcgtgtgactaggacatcaccatttcaaggaactgtgtgtttccaacatcatggtagcagcacacacttccaaagctcagccagggacact

SEQ ID NO: 20436 - DNA, 362 bp, Homo sapiens
gccaactcagttcatctttctgcttgaaaccttccctgaataggccaggtgcggtggctcacgcctgtaatcccagcactttgggaggccaaggcaggcagatcacaaggtcaggagatggagaccatcctggctaacacagtggaaccccgtctctactaaaaatgcaaaaaattagctgggtgtggtggcgggcgtgtgtcgtcccagcttcctgagtggctgggactacaggcaggcagtgaatttgaaaacttttgttgtagagacaagatcttgctatgttgcccaggctggttttcctgccactttagagcaggtttcctttttttcatacttttaagagttttttattaggaatt

SEQ ID NO: 20437 - DNA, 289 bp, Homo sapiens
agtgtaatagcagattgatatgttgcctatatttcctttcactcctgggctgcgtgcccagcagagaggtaagaagggacagacatcagggccaaccattgccccctgtagccctcccttccaatcttctgttcctaacccagggacattaaggccagcgaaaaattttcctccagagaggtattcctatttagtctaacactgtgggcagtgcccaagtagaggtggagaaggccatctgattcagggccagacatttgtgaagcgcttcaaatagattcatcttcaa

SEQ ID NO: 20438 - DNA, 547 bp, Homo sapiens
ctgcacagctgcaggctgtgaggtatgtggtcaagaaatggagataaagctgtttctgagttcaaacacagtaggaaggctgcgaaatggctgcattgcccggctgtgtttgcatcctctctctgccatttgagggcagtggattcagcatgcatctttgaaatatatcccagcttgtcagaggtaagtgcctgttttgatggaaggagagtggggaatgcattacgggggaaatgtagcaaaaggcaagcagctctgagttctgcatcctactttcaatgatatctcaaagggcttgtgaatcaaggtactgctctcttgtagacatcttgaaaaatgaaagaattctaacgtattatggactttaccgtttatttaacaacagtttagatactttatggttctatttgttagatcccccttttaactttttgaaaatttccaacatatataacatggagagggtattagaatagtgttccaaggactcacatacccatcacccagcttcaacaactgccaactgatgttaagtaaataagccagg

SEQ ID NO: 20439 - DNA, 720 bp, Homo sapiens
gtcagtttctgtaagtcaccagtcactagccccttgattccttgttaaagacttctgtgcagccttatctaaaatgataatcttaggctgtgagtctcctgctgtattgttcctaaaatcgtatggatagaagaggtgcccttagtcatccctttacatatgtggtgctttctaatgggatctctatgcatcacatactatgcaggtgaatttctcactgttcagataggtcatcagtaaaaggcatcacttcaagataattactttgaattgaggtttggcctcttttcctgctttgtaatgggttcggtcatgagggtgggagctgtcattcacatttatgggcagcattcctgttgattagtggacctaagagccaagtaggaaaatatagcatgctatgtgatacaagctggagatgctgtagtgttactatcagcaagttctgtgcagactgcctttcggattccagatgatctgtcaagggtctgccaactgtgggctggtcgcttgtttgtgtaaataaaatgtgtttggaatatagccacacccattttcttaagttctgtctgcggctgctttcgcactgcaagagcagagttgagtagctgcggcagagacccgtgtggcccttacagcctaagatactatctggaccttcagaaaacatctgctgatccctgcttgagaaagtcatccttttcaggaacaaatattctt

SEQ ID NO: 20440 - DNA, 606 bp, Homo sapiens
cggccgctatgacatcatccccgcggtgtgtaactcgagaagcatgttgggaagtgttgggactgattgatcacgcgtgctggtgtcctctccccggaggctgaggggccgggctaaggcggcagctggctgtgtctctcaccagcactcagggtggggggccgcatcttcattccaccgggcggcattgggggaagatcctggcagggcctcattttcagatgagcacaccggggcccgctaccagggcactgcaataactcacagggtcggggtcccttccagggtctccctcagccccacctcaaccctcaaccctcactgcctgcccctgcctggctccctgggtggcctgctgtcacaggcccttctccacaaaggagaagacacaggaggaaagggctgggggatgctgtgcaaggcatctgtgggtgatgggtccacactggtgggtctggaggaggttgggacccaggctgcctggctgatgctgtggacatgggaggaatggcagctttgttttctgtcattttgtcatccgaggctggatcacaggcagatgcatctgagaggccagatcaggcacgcggcagacccaaggagctt

SEQ ID NO: 20441 - DNA, 363 bp, Homo sapiens
ggagaatattagcagccagtgaacatgatagatggaacttattgaaatagatatttaagatataagtgaagaagccagatttgattacactaaatatagtatgaccctatttttgcaaaaagcatagaatttttgctagaggaatacatgctatattattaacgttaggtatctttggtggtggtattataggaagtttgatttttctttttcctaaagcgaatggtttttggctgggcgtggtggctcatgcctgtaatcctgacactttaggagtctgaggcaggcagatcacttgagcccaggagttcaagaccagcctgggcaacatgatgaaaacccatttctacaaaattaatacca

SEQ ID NO: 20442 - DNA, 1068 bp, Homo sapiens
gttaaccgaaaggttggtggttcgagcccacccagggacgcgtggtgacttttgccctcctggaataacaagaaaatgagtgtcgcctctgtttttgtcggtccgccgcagacccgcggcccccacgtgcgcactccgatgacctttccgcctcgggtgatctgggggtgcacggcgcaacacgaccacggaggccgaaagcgcagcggaacctcccggctccaggttccggtttccgcatgcgctccgagccgctttgggcggcggccccgggaacccggagcgctaaggagaacggacctcagaggttgtctgaaggccgaggccaagatggcggtgctgtcagctcctggcctgcgcggcttccggatccttggtctgcgctccagcgtgggcccggctgtgcaggcacgaggtgtccatcagagcgtggccaccgatggcccaagcagcacccagcctgccctgccaaaggccagagccgtggctcccaaacccagcagccggggcgagtatgtggtggccaagctggatgacctcgtcaactgggcccgccggagttctctgtggcccatgaccttcggcctggcctgctgcgccgtggagatgatgcacatggcagcaccccgctacgacatggaccgctttggcgtggtcttccgcgccagcccgcgccagtccgacgtcatgatcgtggccggcacactcaccaacaagatggccccagcgcttcgcaaggtctacgaccagatgccggagccgcgctacgtggtctccatggggagctgcgccaacggaggaggctactaccactattcctactcggtggtgaggggctgcgaccgcatcgtgcccgtggacatctacatcccaggctgcccacctacggccgaggccctgctctacggcatcctgcagctgcagaggaagatcaagcgggagcggaggctgcagatctggtaccgcaggtagcgccgccgccgccgccgccggagcctgtcgccgtcctgtccccagcctgcttgtgtcccgtgaggttgtcaataaacctgccctcgggctgccgcc

SEQ ID NO: 20443 - DNA, 1109 bp, Homo sapiens
gttaaccgaaaggttggtggttcgagcccacccagggacgcgtggtgacttttgccctcctggaataacaagaaaatgagtgtcgcctctgtttttgtcggtccgccgcagacccgcggcccccacgtgcgcactccgatgacctttccgcctcgggtgatctgggggtgcacggcgcaacacgaccacggaggccgaaagcgcagcggaacctcccggctccaggttccggtttccgcatgcgctccgagccgctttgggcggcggccccgggaacccggagcgctaaggagaacggacctcagaggttgtctgaaggccgaggccaagatggcggtgctgtcagctcctggcctgcgcggcttccggatccttggtctgcgctccagcgtgggcccggctgtgcaggcacgaggtgtccatcagagcgtggccaccgatggcccaagcagcacccagcctgccctgccaaaggccagagccgtggctcccaaacccagcagccggggcgagtatgtggtggccaagctggatgacctcgtcaactgggcccgccggagttctctgtggcccatgaccttcggcctggcctgctgcgccgtggagatgatgcacatggcagcaccccgctacgacatggaccgctttggcgtggtcttccgcgccagcccgcgccagtccgacgtcatgatcgtggccggcacactcaccaacaagatggccccagcgcttcgcaaggtctacgaccagatgccggagccgcgctacgtggtctccatggggagctgcgccaacggaggaggctactaccactattcctactcggtggtgaggggctgcgaccgcatcgtgcccgtggacatctacatcccaggctgcccacctacggccgaggccctgctctacggcatcctgcagctgcagaggaagatcaagcgggagcggaggctgcagatctggtaccgcaggtagcgccgccgccgccgccgccggagcctgtcgccgtcctgtccccagcctgcttgtgtcccgtgaggttgtcaataaacctgccctcgggctgccgccaaaaaaaaaaaaacaaaaaaacaagaaaaaaaaaaaaaaaa

SEQ ID NO: 20444 - DNA, 1007 bp, Homo sapiens
cgtgacgcgtgggtcgacccacgcgtcgatggcggtgctgtcagctcctggcctgcgcggcttccggatccttggtctgcgctccagcgtgggcccggctgtgcaggcacgaggtgtccatcagagcgtggccaccgatggcccaagcagcacccagcctgccctgccaaaggccagagccgtggctcccaaacccagcagccggggcgagtatgtggtggccaagctggatgacctcgtcaactgggcccgccggagttctctgtggcccatgaccttcggcctggcctgctgcgccgtggagatgatgcacatggcagcaccccgctacgacatggaccgctttggcgtggtcttccgcgccagcccgcgccagtccgacgtcatgatcgtggccggcacactcaccaacaagatggccccagcgcttcgcaaggtctacgaccagatgccggagccgcgctacgtggtctccatggggagctgcgccaacggaggaggctactaccactattcctactcggtggtgaggggctgcgaccgcatcgtgcccgtggacatctacatcccagtgcagaccaatggggcaagttgcgagtgtggactgtactcctccctccttgcagactgagctcctccctccctggggaccgcgctcctccctccctgcggactgtgctccctgtctggggactgcgctcctccctccttggggaccgtgctcctccctccctccctgcggaccgcgctcctccctccctggggaccgcgctcctccctccctgcggaccgcgctcggccctccctggggaccgcgcccctccctcccagcggaccgcgctcctccctccctggggacctcgctcctccctccctccctgcggactgtgctgctccctccctgcggactgtgcttctccctcccttggagcagcctggacttgccagagctctgccaggtggggcctggccgccctttcccaggccctgcagtggccttgtccttt

SEQ ID NO: 20445 - DNA, 644 bp, Homo sapiens
ccctccctccgcccagcctccctgcctccatctccgtccagggcagccccgggccctgctccccactgctaagtgtgtctgctgagcgctggcccccattgagtcctgagggctggggcggggcggggttagtgaggtcagcgtcttgtccgagaggtccctgtgacagcccgggatgagccacgggtggagggcagtggggccttgcccaggggaggaccccactcttcctgcagggacctcccctgcgccggctcccagtccctggcactgcgcccacccagggctgtcagcctccaccttcagaggccggcccgggaaacccttccaaagccgagccggctgcgctgtgcacgcggtcacgcgggctccggctgcgggaagcgagactgaggcaaggtccctgcaggctgcccacctacggccgaggccctgctctacggcatcctgcagctgcagaggaagatcaagcgggagcggaggctgcagatctggtaccgcaggtagcgccgccgccgccgccgccggagcctgtcgccgtcctgtccccagcctgcttgtgtcccgtgaggttgtcaataaacctgccctcgggctgccgccaaaaaaaaaaaaacaaaaaaacaagaaaaaaaaaaaaaaaa

SEQ ID NO: 20446 - DNA, 312 bp, Homo sapiens
gccactgacccgcgttccatctcccggcagctccagcgtgggcccggctgtgcaggcacgaggtgtccatcagagcgtggccaccgatggcccaagcagcacccagcctgccctgccaaaggccagagccgtggctcccaaacccagcagccggggcgagtatgtggtggccaagctggatgacctcgtcaactgggcccgccgggtgagtactatgagctgtaggccctcctcgagcgccagggcctctctgcacactcacaggcacacacatacacacaccaacgtgcagacacgtacacacacaacaca

SEQ ID NO: 20447 - DNA, 1231 bp, Homo sapiens
gttaaccgaaaggttggtggttcgagcccacccagggacgcgtggtgacttttgccctcctggaataacaagaaaatgagtgtcgcctctgtttttgtcggtccgccgcagacccgcggcccccacgtgcgcactccgatgacctttccgcctcgggtgatctgggggtgcacggcgcaacacgaccacggaggccgaaagcgcagcggaacctcccggctccaggttccggtttccgcatgcgctccgagccgctttgggcggcggccccgggaacccggagcgctaaggagaacggacctcagaggttgtctgaaggccgaggccaagatggcggtgctgtcagatggagtctccctctgtcacccaagctggagtgcagtggcgcagcctctgctcactgcaacctctacctcccgggttcaagtgattctcctgcctcagcctctcgagtagctgggattacagctcctggcctgcgcggcttccggatccttggtctgcgctccagcgtgggcccggctgtgcaggcacgaggtgtccatcagagcgtggccaccgatggcccaagcagcacccagcctgccctgccaaaggccagagccgtggctcccaaacccagcagccggggcgagtatgtggtggccaagctggatgacctcgtcaactgggcccgccggagttctctgtggcccatgaccttcggcctggcctgctgcgccgtggagatgatgcacatggcagcaccccgctacgacatggaccgctttggcgtggtcttccgcgccagcccgcgccagtccgacgtcatgatcgtggccggcacactcaccaacaagatggccccagcgcttcgcaaggtctacgaccagatgccggagccgcgctacgtggtctccatggggagctgcgccaacggaggaggctactaccactattcctactcggtggtgaggggctgcgaccgcatcgtgcccgtggacatctacatcccaggctgcccacctacggccgaggccctgctctacggcatcctgcagctgcagaggaagatcaagcgggagcggaggctgcagatctggtaccgcaggtagcgccgccgccgccgccgccggagcctgtcgccgtcctgtccccagcctgcttgtgtcccgtgaggttgtcaataaacctgccctcgggctgccgccaaaaaaaaaaaaacaaaaaaacaagaaaaaaaaaaaaaaaa

SEQ ID NO: 20448 - DNA, 807 bp, Homo sapiens
cgtgacgcgtgggtcgacccacgcgtcgatggcggtgctgtcagctcctggcctgcgcggcttccggatccttggtctgcgctccagcgtgggcccggctgtgcaggcacgaggtgtccatcagagcgtggccaccgatggcccaagcagcacccagcctgccctgccaaaggccagagccgtggctcccaaacccagcagccggggcgagtatgtggtggccaagctggatgacctcgtcaactgggcccgccggagttctctgtggcccatgaccttcggcctggcctgctgcgccgtggagatgatgcacatggcagcaccccgctacgacatggaccgctttggcgtggtcttccgcgccagcccgcgccagtccgacgtcatgatcgtggccggcacactcaccaacaagatggccccagcgcttcgcaaggtctacgaccagatgccggagccgcgctacgtggtctccatggggagctgcgccaacggaggaggctactaccactattcctactcggtggtgaggggctgcgaccgcatcgtgcccgtggacatctacatcccaggctgcccacctacggccgaggccctgctctacggcatcctgcagctgcagaggaagatcaagcgggagcggaggctgcagatctggtaccgcaggtagcgccgccgccgccgccgccggagcctgtcgccgtcctgtccccagcctgcttgtgtcccgtgaggttgtcaataaacctgccctcgggctgccgccaaaaaaaaaaaaacaaaaaaacaagaaaaaaaaaaaaaaaa

SEQ ID NO: 20449 - DNA, 784 bp, Homo sapiens
cacccagtggccgcgctgcagctcctggcctgcgcggcttccggatccttggtctgcgctccagcgtgggcccggctgtgcaggcacgaggtgtccatcagagcgtggccaccgatggcccaagcagcacccagcctgccctgccaaaggccagagccgtggctcccaaacccagcagccggggcgagtatgtggtggccaagctggatgacctcgtcaactgggcccgccggagttctctgtggcccatgaccttcggcctggcctgctgcgccgtggagatgatgcacatggcagcaccccgctacgacatggaccgctttggcgtggtcttccgcgccagcccgcgccagtccgacgtcatgatcgtggccggcacactcaccaacaagatggccccagcgcttcgcaaggtctacgaccagatgccggagccgcgctacgtggtctccatggggagctgcgccaacggaggaggctactaccactattcctactcggtggtgaggggctgcgaccgcatcgtgcccgtggacatctacatcccaggctgcccacctacggccgaggccctgctctacggcatcctgcagctgcagaggaagatcaagcgggagcggaggctgcagatctggtaccgcaggtagcgccgccgccgccgccgccggagcctgtcgccgtcctgtccccagcctgcttgtgtcccgtgaggttgtcaataaacctgccctcgggctgccgccaaaaaaaaaaaaacaaaaaaacaagaaaaaaaaaaaaaaaa

SEQ ID NO: 20450 - DNA, 2340 bp, Homo sapiens
gttaaccgaaaggttggtggttcgagcccacccagggacgcgtggtgacttttgccctcctggaataacaagaaaatgagtgtcgcctctgtttttgtcggtccgccgcagacccgcggcccccacgtgcgcactccgatgacctttccgcctcgggtgatctgggggtgcacggcgcaacacgaccacggaggccgaaagcgcagcggaacctcccggctccaggttccggtttccgcatgcgctccgagccgctttgggcggcggccccgggaacccggagcgctaaggagaacggacctcagaggttgtctgaaggccgaggccaagatggcggtgctgtcagctcctggcctgcgcggcttccggatccttggtctgcgctccagcgtgggcccggctgtgcaggcacgaggtgtccatcagagcgtggccaccgatggcccaagcagcacccagcctgccctgccaaaggccagagccgtggctcccaaacccagcagccggggcgagtatgtggtggccaagctggatgacctcgtcaactgggcccgccggagttctctgtggcccatgaccttcggcctggcctgctgcgccgtggagatgatgcacatggcagcaccccgctacgacatggaccgctttggcgtggtcttccgcgccagcccgcgccagtccgacgtcatgatcgtggccggcacactcaccaacaagatggccccagcgcttcgcaaggtctacgaccagatgccggagccgcgctacgtggtctccatggggagctgcgccaacggaggaggctactaccactattcctactcggtggtgaggggctgcgaccgcatcgtgcccgtggacatctacatcccaggtagggccgggaccgcaccgccacgagggagctggagacagggccagcgccacacggagcccggcggccctgtgagggagtcccacacccccagcagacggcgggctcccccatcctatggatgggccgactcggagcgctgcctcttagtggagcctgtcccctgtgagaagtcggcgatgtattcaggcatcagagggatcagagggagcaggggaagctgagtggaattcctgacacacgcctggtttacagcagtttcatatggtcctacctggcacaaaccaaagacctgcagttagaaataccaagcgagaaggttcctgggggccaaggacactgtcccgcgccctcagccttacagaagggcacgcaggactccctgggacccggggtggccggatttggcaaatgaaaacgtgggaggcttagtttgactgtgaggttagggtgaatttgaccatcaggaaaactgttagtagtaattgtttagtacgagtatatcccaacaatatttgggctatactgacactaaaaagagcattggctgcatacctgaaattcacatcgcaccgggaacattctttatatctggtgatcccgtgggactcttgcacctcacgtggtcccacgagggccatccccccgggcgttcaccttgacagtggtccacggtaggcaggcttggaggtggcgctcatgtgggacaggggacagagtcctgttcttggccaccctgtgctgcgtgcggcattagctcatgcgcagagagcccagccctgagtcccgagtctgggggtttgggcaagcgagaggcacatcctggtgcctctcaaaagtggaggaacaggctctgactttggattccgcttccctggaaagggcgttgatttgttcagcgttctgcacggttcaggtcaccccgggggcagtggagagggcagcctgggcctccctgtgacttgacagcacagagaggtccatcctggggtcaggagctctgcccatgcccctggcgtcttcccctgcagtgcagaccaatggggcaagttgcgagtgtggactgtactcctccctccttgcagactgagctcctccctccctggggaccgcgctcctccctccctgcggactgtgctccctgtctggggactgcgctcctccctccttggggaccgtgctcctccctccctccctgcggaccgcgctcctccctccctggggaccgcgctcctccctccctgcggaccgcgctcggccctccctggggaccgcgcccctccctcccagcggaccgcgctcctccctccctggggacctcgctcctccctccctccctgcggactgtgctgctccctccctgcggactgtgcttctccctcccttggagcagcctggacttgccagagctctgccaggtggggcctggccgccctttcccaggccctgcagtggccttgtccttt

SEQ ID NO: 20451 - DNA, 2045 bp, Homo sapiens
aacagctgtacgcccggattacgggatcgaggcagatggcggtgctgtcagctcctggcctgcgcggcttccggatccttggtctgcgctccagcgtgggcccggctgtgcaggcacgaggtgtccatcagagcgtggccaccgatggcccaagcagcacccagcctgccctgccaaaggccagagccgtggctcccaaacccagcagccggggcgagtatgtggtggccaagctggatgacctcgtcaactgggcccgccggagttctctgtggcccatgaccttcggcctggcctgctgcgccgtggagatgatgcacatggcagcaccccgctacgacatggaccgctttggcgtggtcttccgcgccagcccgcgccagtccgacgtcatgatcgtggccggcacactcaccaacaagatggccccagcgcttcgcaaggtctacgaccagatgccggagccgcgctacgtggtctccatggggagctgcgccaacggaggaggctactaccactattcctactcggtggtgaggggctgcgaccgcatcgtgcccgtggacatctacatcccaggtagggccgggaccgcaccgccacgagggagctggagacagggccagcgccacacggagcccggcggccctgtgagggagtcccacacccccagcagacggcgggctcccccatcctatggatgggccgactcggagcgctgcctcttagtggagcctgtcccctgtgagaagtcggcgatgtattcaggcatcagagggatcagagggagcaggggaagctgagtggaattcctgacacacgcctggtttacagcagtttcatatggtcctacctggcacaaaccaaagacctgcagttagaaataccaagcgagaaggttcctgggggccaaggacactgtcccgcgccctcagccttacagaagggcacgcaggactccctgggacccggggtggccggatttggcaaatgaaaacgtgggaggcttagtttgactgtgaggttagggtgaatttgaccatcaggaaaactgttagtagtaattgtttagtacgagtatatcccaacaatatttgggctatactgacactaaaaagagcattggctgcatacctgaaattcacatcgcaccgggaacattctttatatctggtgatcccgtgggactcttgcacctcacgtggtcccacgagggccatccccccgggcgttcaccttgacagtggtccacggtaggcaggcttggaggtggcgctcatgtgggacaggggacagagtcctgttcttggccaccctgtgctgcgtgcggcattagctcatgcgcagagagcccagccctgagtcccgagtctgggggtttgggcaagcgagaggcacatcctggtgcctctcaaaagtggaggaacaggctctgactttggattccgcttccctggaaagggcgttgatttgttcagcgttctgcacggttcaggtcaccccgggggcagtggagagggcagcctgggcctccctgtgacttgacagcacagagaggtccatcctggggtcaggagctctgcccatgcccctggcgtcttcccctgcagtgcagaccaatggggcaagttgcgagtgtggactgtactcctccctccttgcagactgagctcctccctccctggggaccgcgctcctccctccctgcggactgtgctccctgtctggggactgcgctcctccctccttggggaccgtgctcctccctccctccctgcggaccgcgctcctccctccctggggaccgcgctcctccctccctgcggaccgcgctcggccctccctggggaccgcgcccctccctcccagcggaccgcgctcctccctccctggggacctcgctcctccctccctccctgcggactgtgctgctccctccctgcggactgtgcttctccctcccttggagcagcctggacttgccagagctctgccaggtggggcctggccgccctttcccaggccctgcagtggccttgtccttt

SEQ ID NO: 20452 - DNA, 1255 bp, Homo sapiens
gttaaccgaaaggttggtggttcgagcccacccagggacgcgtggtgacttttgccctcctggaataacaagaaaatgagtgtcgcctctgtttttgtcggtccgccgcagacccgcggcccccacgtgcgcactccgatgacctttccgcctcgggtgatctgggggtgcacggcgcaacacgaccacggaggccgaaagcgcagcggaacctcccggctccaggttccggtttccgcatgcgctccgagccgctttgggcggcggccccgggaacccggagcgctaaggagaacggacctcagaggttgtctgaaggccgaggccaagatggcggtgctgtcagctcctggcctgcgcggcttccggatccttggtctgcgctccagcgtgggcccggctgtgcaggcacgaggtgtccatcagagcgtggccaccgatggcccaagcagcacccagcctgccctgccaaaggccagagccgtggctcccaaacccagcagccggggcgagtatgtggtggccaagctggatgacctcgtcaactgggcccgccggagttctctgtggcccatgaccttcggcctggcctgctgcgccgtggagatgatgcacatggcagcaccccgctacgacatggaccgctttggcgtggtcttccgcgccagcccgcgccagtccgacgtcatgatcgtggccggcacactcaccaacaagatggccccagcgcttcgcaaggtctacgaccagatgccggagccgcgctacgtggtctccatggggagctgcgccaacggaggaggctactaccactattcctactcggtggtgaggggctgcgaccgcatcgtgcccgtggacatctacatcccagactgagctcctccctccctggggaccgcgctcctccctccctgcggactgtgctccctgtctggggactgcgctcctccctccttggggaccgtgctcctccctccctccctgcggaccgcgctcctccctccctggggaccgcgctcctccctccctgcggaccgcgctcggccctccctggggaccgcgcccctccctcccagcggaccgcgctcctccctccctggggacctcgctcctccctccctccctgcggactgtgctgctccctccctgcggactgtgcttctccctcccttggagcagcctggacttgccagagctctgccaggtggggcctggccgccctttcccaggccctgcagtggccttgtccttt

SEQ ID NO: 20453 - DNA, 856 bp, Homo sapiens
cgtgacgcgtgggtcgacccacgcgtcgatggcggtgctgtcagctcctggcctgcgcggcttccggatccttggtctgcgctccagcgtgggcccggctgtgcaggcacgaggtgtccatcagagcgtggccaccgatggcccaagcaggcctctggcagcggccgtgggggctcgcatccgcctctgggaagcacctgcgtggctgacgcctcctgtgcccgtgtgtctctgtgccagcacccagcctgccctgccaaaggccagagccgtggctcccaaacccagcagccggggcgagtatgtggtggccaagctggatgacctcgtcaactgggcccgccggagttctctgtggcccatgaccttcggcctggcctgctgcgccgtggagatgatgcacatggcagcaccccgctacgacatggaccgctttggcgtggtcttccgcgccagcccgcgccagtccgacgtcatgatcgtggccggcacactcaccaacaagatggccccagcgcttcgcaaggtctacgaccagatgccggagccgcgctacgtggtctccatggggagctgcgccaacggaggaggctactaccactattcctactcggtggtgaggggctgcgaccgcatcgtgcccgtggacatctacatcccaggctgcccacctacggccgaggccctgctctacggcatcctgcagctgcagaggaagatcaagcgggagcggaggctgcagatctggtaccgcaggtagcgccgccgccgccgccgccggagcctgtcgccgtcctgtccccagcctgcttgtgtcccgtgaggttgtcaataaacctgccctcgggctgccgcc

SEQ ID NO: 20454 - DNA, 2105 bp, Homo sapiens
cacccagtggccgcgctgcagctcctggcctgcgcggcttccggatccttggtctgcgctccagcgtgggcccggctgtgcaggcacgaggtgtccatcagagcgtggccaccgatggcccaagcaggcctctggcagcggccgtgggggctcgcatccgcctctgggaagcacctgcgtggctgacgcctcctgtgcccgtgtgtctctgtgccagcacccagcctgccctgccaaaggccagagccgtggctcccaaacccagcagccggggcgagtatgtggtggccaagctggatgacctcgtcaactgggcccgccggagttctctgtggcccatgaccttcggcctggcctgctgcgccgtggagatgatgcacatggcagcaccccgctacgacatggaccgctttggcgtggtcttccgcgccagcccgcgccagtccgacgtcatgatcgtggccggcacactcaccaacaagatggccccagcgcttcgcaaggtctacgaccagatgccggagccgcgctacgtggtctccatggggagctgcgccaacggaggaggctactaccactattcctactcggtggtgaggggctgcgaccgcatcgtgcccgtggacatctacatcccaggtagggccgggaccgcaccgccacgagggagctggagacagggccagcgccacacggagcccggcggccctgtgagggagtcccacacccccagcagacggcgggctcccccatcctatggatgggccgactcggagcgctgcctcttagtggagcctgtcccctgtgagaagtcggcgatgtattcaggcatcagagggatcagagggagcaggggaagctgagtggaattcctgacacacgcctggtttacagcagtttcatatggtcctacctggcacaaaccaaagacctgcagttagaaataccaagcgagaaggttcctgggggccaaggacactgtcccgcgccctcagccttacagaagggcacgcaggactccctgggacccggggtggccggatttggcaaatgaaaacgtgggaggcttagtttgactgtgaggttagggtgaatttgaccatcaggaaaactgttagtagtaattgtttagtacgagtatatcccaacaatatttgggctatactgacactaaaaagagcattggctgcatacctgaaattcacatcgcaccgggaacattctttatatctggtgatcccgtgggactcttgcacctcacgtggtcccacgagggccatccccccgggcgttcaccttgacagtggtccacggtaggcaggcttggaggtggcgctcatgtgggacaggggacagagtcctgttcttggccaccctgtgctgcgtgcggcattagctcatgcgcagagagcccagccctgagtcccgagtctgggggtttgggcaagcgagaggcacatcctggtgcctctcaaaagtggaggaacaggctctgactttggattccgcttccctggaaagggcgttgatttgttcagcgttctgcacggttcaggtcaccccgggggcagtggagagggcagcctgggcctccctgtgacttgacagcacagagaggtccatcctggggtcaggagctctgcccatgcccctggcgtcttcccctgcagtgcagaccaatggggcaagttgcgagtgtggactgtactcctccctccttgcagactgagctcctccctccctggggaccgcgctcctccctccctgcggactgtgctccctgtctggggactgcgctcctccctccttggggaccgtgctcctccctccctccctgcggaccgcgctcctccctccctggggaccgcgctcctccctccctgcggaccgcgctcggccctccctggggaccgcgcccctccctcccagcggaccgcgctcctccctccctggggacctcgctcctccctccctccctgcggactgtgctgctccctccctgcggactgtgcttctccctcccttggagcagcctggacttgccagagctctgccaggtggggcctggccgccctttcccaggccctgcagtggccttgtccttt

SEQ ID NO: 20455 - DNA, 439 bp, Homo sapiens
cattcaggggcatcaaaccctggccctggcccctggaggctgcccacagcctctccatcgggcctcacctcacccacagcgacaaagtaccatcacctgggcagcttcaacagaagctgattgttctcacagttctgggggctggaaggccaagattgggggtcagcagggttggttcctgctgaggcctctgtccttggcttgcccgtggccatcttctccctgcgtctttcctctgtacatgtttgtgtcctgatcgccttttcttacaaggacataagtcatatcggatgagggcccaccctcgtgacctcactgtcctttataatgaccctttattttattttttgagatggagtctccctctgtcacccaagctggagtgcagtggcgcagcctctgctcactgcaacctctacctcccgggttcaagtgattc

SEQ ID NO: 20456 - DNA, 505 bp, Homo sapiens
cagtctcgcagcagggaggggagaggcaggacaacagtgagtgcggctgggggagctggaggggcctgggacagccactgacccgcgttccatctcccggcagctccagcgtgggcccggctgtgcaggcacgaggtgtccatcagagcgtggccaccgatggcccaagcaggtgaagctggccttctgggggaggtcgtaccccctcgccccacccccatcccttccttattttctgcatcagtgccgcagccactgaggtgcatggatggggcagggagggggtcacacatcccagtccctgacctcatgtgggtccaggcctctggcagcggccgtgggggctcgcatccgcctctgggaagcacctgcgtggctgacgcctcctgtgcccgtgtgtctctgtgccagcacccagcctgccctgccaaaggccagagccgtggctcccaaacccagcagccggggcgagtatgtggtggccaagctggatgacctcgtcaac

SEQ ID NO: 20457 - DNA, 1048 bp, Homo sapiens
atctagaggatcgggagaggaacgtcactcatccattgtccactgactctccatctatccatccatctattgtccactgacgtctccatctgtccatctatctgttgtccactgacctgtccacccatctgtctgtagtccactgacctctccatctttccgtctgttgtccactgacctctccgtctatccatctatctattgtccactgacctctccatctatccatctattgtccactgacctctccatctatccatccatctattgtccactgacctctccatctatccatccactgtccactgacctctccatctatccatccatctattgtctactgacctctccatctatccatccatctattgtccactgacgtctccatctatccatctgtctgttgtccactgacctgtccacccatctgtctgttgtccactgacctctccatctttccgtctgttgtccactgacctctccgtctatccatctgtctgttgtccactgacctctccatctatccatctattgtccactgacctctccatctatccatccatctatggtccactgacctctccatctgtccatccactgtccactgacctctccatctatccacctattgtccactgacctctccgtctatccatccatctattgtccactaacctctccatctatccatccatctattgtccactgacctctccatctatccatccattgtgcactgacctctccatctatccgtcttctatccaggcctccattcatcccccatctagtcatcctccatccatccaccagacatccactcctgcccctacccacccattcactagacaccaaaatccggtgacgaattatttgcagatggacccctggggacgtatgtcacgaatgtacatccccaggtcccatggtcagagtcggcaggtgtgagtggggcccaggaaactgcattttcagaagactctaaattagaatcagacatggctgctgtgtggattcacccttcaccgtcaccctgcagaggagcaag

SEQ ID NO: 20458 - DNA, 880 bp, Homo sapiens
cgagcctgtgaggacccagcaagaaggtgccattgtggaaatggccctcaccagacaatgaatctgccagcaccttgatctgggtttcctagcctctagaactatgagaaaaaaatttctgttgtttataaactacctggcttatggtaactttttatagaagccagaacagactaagacatcacatccactcaatcatcaagtctcatggattctacctcaaaagtatcaccaaaacctgaatgtttctgtctcccctgtccccatcctatccaacagtactcacctgggttacctgaaagagcccgctgatgactttcatatcacacttgttctctgtcaacacagctaacacactgccatttaataaaagaagtattaaaaaatgtttgctccctgaaactcagcagaaaattccagcattattgcgggaagacaacactagatgttcatctttccagtctttgctgcacagaactagagggccaggtaccagatgattatgatgatttcatcatccaatttgacaccttccattggcttcccattgtccttagggacatttaaattttcaacatgaccttcctagtcattacttccctgccagtgtcaactccagctgttctttttctcttacccctctccagctacactttctctcaattcatcaaacataccaagctctttgagaattgtgcacatacttttccttttacttggaacatccctttcaattcctacattctttgttttaccctccttatagcaatatgcttgtaattgaatattaattatgtaactaataaaatttcattgtctccatgggaggagagaccaggaacatggtagatgcttaaaattatgcactgattgaaactac

SEQ ID NO: 20459 - DNA, 1519 bp, Homo sapiens
gtttgaggaagatgaaagagttctggagatggaaggtggtaatggttgcacagcaatatgaatgtgcttaatgccactgaactgtgcacctaaaatggttaaaacggtattttatatttgtatattttatcgtaataaaaaaatagtgctgagctcactgtcactggaaggatacaagcagaggagagacactcatcagccggcactgctgaggcaggatttctggaccacaaggaaggtggccactaagggttgccctctggccccctgtgactcttctcatcagcatggcccaggatgcagcatcctggcatccaaggaggtgccactaagtagctacaagatgtggggcctggcgagaggaaccacaaaagaacgcagaaaaaaaaagcaacaaaaagccagtgacaaagctgcgtggatggcggaaggcgagcaggagtttggtgatgcagtttgaagaccgggactgagacccccccactggaggggtacgtggggtgcaaaagcagaagtggcaccagtgggcttgactgctccagagaggggcattgctcctcagtgcagcaacaaggcgcctttagcccccttgtcgtttttggccccaaaagtgccacagttacacagggtggccctggagcaaagtgagtgctaatgcgctggggcatacggaaatctggtatttcacacatttgtcatgttaaggagaattaggcgtatcagagtatctaacagattggccttccaatccccatttaaaacgggtaattgagtagctgattttaagcttatgattttaagcagaacaccggaagtggattcagccaagtttgtaagttttgaaatgtttcagagaactaatagtcatcatatttatcagcttattaaatttcaagaactatttaggaacccaggaaagtcctgctttttaggatgagtatttataaacttaagaacactggttatgttaaatttataaagttacatcaagatatttaaagaaatttaattacttaagttataaaccccctacccttgaacatcgacatttaaatggactagattcgtgaggggaataatgaaattggtatgttaaatgcttcaggaaacactaggtttaaaaatttccacttcaatatatattgaatattgagaaaattcaagtcgttgtaagtagtctgtgtgtgtgtgtgtgtgtgtgcgcgcgcgccccaagaataactaatgacagataatgcagatgaggtgggcaccctgcagagtccagggcagggagcatcagcacagctagacagggaggactatgcagttaagagcccgaggcacactgctcaggcttggaagacaccaaagcaaagcagactagcaaaagtaataaaagcaactgctacatcccctccccctaacaaaaccactggacggcatgggaaccctgtttgaaggtgaggcctcctcacagtcctgctgatgtctaaggtgggcattgcccggctcctggtcccagtcttgggggttgcct

SEQ ID NO: 20460 - DNA, 728 bp, Homo sapiens
gtttgaggaagatgaaagagttctggagatggaaggtggtaatggttgcacagcaatatgaatgtgcttaatgccactgaactgtgcacctaaaatggttaaaacggtattttatatttgtatattttatcgtaataaaaaaatagtgctgagctcactgtcactggaaggatacaagcagaggagagacactcatcagccggcactgctgaggcaggatttctggaccacaaggaaggtggccactaagggttgccctctggccccctgtgactcttctcatcagcatggcccaggatgcagcatcctggcatccaaggaggtgccactaagtagctacaagatgtggggcctggcgagaggaaccacaaaagaacgcagaaaaaaaaagcaacaaaaagccagtgacaaagctgcgtggatggcggaaggcgagcaggagtttggtgatgcagtttgaagaccgggactgagacccccccactggaggggtacgtggggtgcaaaagcagaagtggcaccagtgggcttgactgctccagagaggggcattgctcctcagtgcagcaacaaggcgcctttagcccccttgtcgtttttggccccaaaagtgccacagttacacagggtggccctggagcaaagtgagtgctaatactctgatacgcctaattctccttaacatgacaaatgtgtgaaataccagatgtccgtatgccccagctgca

SEQ ID NO: 20461 - DNA, 1135 bp, Homo sapiens
gtttgaggaagatgaaagagttctggagatggaaggtggtaatggttgcacagcaatatgaatgtgcttaatgccactgaactgtgcacctaaaatggttaaaacggtattttatatttgtatattttatcgtaataaaaaaatagtgctgagctcactgtcactggaaggatacaagcagaggagagacactcatcagccggcactgctgaggcaggatttctggaccacaaggaaggtggccactaagggttgccctctggccccctgtgactcttctcatcagcatggcccaggatgcagcatcctggcatccaaggaggtgccactaagtagctacaagatgtggggcctggcgagaggaaccacaaaagaacgcagaaaaaaaaagcaacaaaaagccagtgacaaagctgcgtggatggcggaaggcgagcaggagtttggtgatgcagtttgaagaccgggactgagacccccccactggaggggtacgtggggtgcaaaagcagaagtggcaccagtgggcttgactgctccagagaggggcattgctcctcagtgcagcaacaaggcgcctttagcccccttgtcgtttttggccccaaaagtgccacagttacacagggtggccctggagcaaagtgagtgctaatgcgctggggcatacggaaatctggtatttcacacatttgtcatgttaaggagaattaggcgtatcagagtatctaacagattggccttccaatccccatttaaaacgggtaattgagtagctgattttaagcttatgattttaagcagaacaccggaagtggattcagccaagtttgtaagttttgaaatgtttcagagaactaatagtcatcatatttatcagcttattaaatttcaagaactatttaggaacccaggaaagtcctgctttttaggatgagtatttataaacttaagaacactggttatgttaaatttataaagttacatcaagatatttaaagaaatttaattacttaagttataaaccccacaccctctgtgtgaaacaggcctctggaaacagatgcccagccgttgccaagtgtaacttaattaaaatccgagaaacggctttagcaacaaataaatatcaaaa

SEQ ID NO: 20462 - DNA, 1232 bp, Homo sapiens
ttcagacccttaatttctcagaagtacaaattttaggcaaacttcttaaatttatactggattatcttgatgtctctacatatatgtttaaaccatagtaacttagattttgtactagaaaatctctaactcttaaaagcagatatatttatagcttagttactatcaagagaagtcagaaagagtatagattttggaactaaacacattcgagtttagatccctacccagttacttacagaaataagtagtattagacatatcgttttatctctttatgtctttatgtaaacacagactgttcttgacagtttacatcagaatcacctatggtacttgggaaaaaatttggatttcttggccccacccatgaccaattacaaaataatttttatagataggcttagaaattttatgtttaacagattctgaggcagtttttgtactattgatagtctagaactttagtttgctttatttgtaacttagagacaatatctacttcagatggatgctgacaagattcttagatcatgcatataaaatatatagcactggaccaaggacttagcagctcttagttgtagctattatactaacataggggttggctaaacattttctgtaaggggctatgtagtacaacttttaggcattgtgggctggatagtctccattgcaacatttcagctgtgtgttgaggcatgaacacagccatagacaatacatgagtgagctgtgttcaaataaaactttatttccaaaaataggtggtggattggatttgagctgaaggtacatggtttgccaaccctgtattatgtttatagcatttgttttacaaaatatacctgattctgaaaaaatgaaaaatggttactataggctagatagtaggtagttaagtcctataactactagtaggtagttataggacttaattaacagatagatatgatgtgacaattcagtttaagtgcaactttcagtttctatcttaactataacttgagagattaatttagaattacaaatgtgtgtatatatatatatgagcatatgtatacataacatatttacacacaaggcacacatactatgagcaccctgcagtttgtaggcatttttacatgcgaatgttattggaacagataggcatcacgggaagaaattttgcctctacctgctctcaccatgtcagttgacaggactcaggacatgggagaagagtg

SEQ ID NO: 20463 - DNA, 586 bp, Homo sapiens
tgcaaaactactgtagtcatttccgcttgtggaagataatgtaatggttcatacagcatgtttgctcagtaatatatgtggccaagaaagggtttttttccctcattctctccctcttggttttttcctagtgtgtctgcacattcttctcatttctatccatgcacattttctttctttttttggtgggggaggcagagtctcattgtgtcaccgaggctggagtccagtggcacgatctcggctcatggcaacccccacctcccaggctcaagcggttctcgtgcctcagcctcccgagtagctgggataacaggcgtgtgccaccatacccagctaatttttgtatctttagtagaaccagggtttggtcatgttggccaggctggtcatgactgagcccggcccatgcactttttcttatgtgaattataagagttaaatgtaaacgaatacagaaaaagtattaagctatcaaagggagggaagctacatttaagtgtaaacatgcttaaagaaatagaaaagaccagtcagttacaatacataaaattaataaaaactttaatggaaaatcaatagtgat

SEQ ID NO: 20464 - DNA, 361 bp, Homo sapiens
ggggctgaattaagagaatggctctgggggtggagtatgagagtatttcctaaagatagaagagagaatggccaggacttgagagtggctgaagtcgggtacagggagacaggagacaccttttatggccatagcttgagtcactgtgtggacaggcgtgctcatcattgagaccaggaagcttggaggggaaaacgctcatatgcaattctgaagttcctaagagacaactggataacacacaaggatgaatgtgaaacaaacaaggggctaggtcccgtaagctcatcagaacttctttctgaaagaagtaaagcacatctctaatgacaacagaaataaccacaaacctgcgagtcag

SEQ ID NO: 20465 - DNA, 489 bp, Homo sapiens
tgtgaggtacatgtgaagtgaccacgtctgttcttgttgggggcatctgaggtaggagaggaagtgcctggtcatcgcagacaggctgctgctcagctggcacccactgtcctgtggagagcattggccccggcttagaagaggacgggccctcccaccacactggccaggccacccccagcctgacagaaagtcatctttccggccggatgcggtggctcacacctgtaatcagcactttgggaggccaaggcgggtaaatcacttgagctcaggagttcgagaccagcctggccaacatggtgaaaccctgtctctactaaaaacacaaaaaattagctgagcatggtagcaggcgcctgtaatcccagctactcgggaagctgaggcaggagaatcacttgaattcaggaggcggaggttgcagtgagccgagatctcgccattgcactccagcctgagccacaaagtgagactcgtctaaaaaaa

SEQ ID NO: 20466 - DNA, 696 bp, Homo sapiens
acatagactaaaagagggtcatgtggtggtgggtggtaggactgcttctgcatttttgtttcctcttgtaagggctgtgggaggtgggtggcctcagtgttggctgctttgtgcacataaaaacatggagtgtttagtgactctgtcttcagccctgcccattagcggaaattctgtaccatgagatgaatccaagttgacatcttgtttcatatcctcagtcactagaatgtgctgtcatgctggttgttctctatttgtccctctgctcaggttctgttctccatcctttctgtcctgtaaatgtgccctggagagctgacttctgtggattatattatcttggcttccttctcctcttgcttctggtttgttttgactcatgggaggcactggtgtaaggttggagagtaataaggaaattggggtatttataaccctgaccctgtcccaactcatgttcctctgtggcttcagctgctgcctggtggcccctcttccttagctccagctgtaactattctctcagtttaaggctggtaaaacttcctgctggtgctgatccctgttgtattaccatcctgtgtgggtttcctcaatctcttgctgcttctttgactctgtccacacctgtgaagagtctcttcattagaacagtttcagttaaatcctttgagtgggccatctgtttcctgc

SEQ ID NO: 20467 - DNA, 506 bp, Homo sapiens
gtctctcagaaatcaactacacatggtctcagcttttaagggctcatagtgattagattggactcatatacggtcctcattttaatattcataattctaactgcaaagtctcttttgtcaggtaatacagcatattcaggtctcaaggattaaagtgtgagcatctttgggggtttttattctgcttacaacatttacctagagtataaattcaagacataaggcagaatcttatgagaaaaagaaagtactattttgaacatacctgtggcaatcctaaatgggaattagattcagatttggcagttctggataaaagtgaaggctgaagaaataatttggtagtcatcatgttatacattttgtaaatgaagccattattacatatgagagggttagcattcacccagggagacttcaagtcagtttacaaagttaatattctatggcatgttcaatagtagcaccaccttttattcaattggatagtagcctggggtgaagat

SEQ ID NO: 20468 - DNA, 308 bp, Homo sapiens
agccattatcctcagcaaactaacacaggaacagaaaataaacattcttattcttataagtgtgttcttataagtgggagggttatgatgagaacacatagacacatgggtggaacaacacacactggggcctactgggggggatgaggggggtgggagagcatcaggaagaatagctagtggattctggactcaatacctgggttatgggatgatctgtgcagcaaaccaccatggcacatgtttatctatgtaacaaacctgcacatcctgcacatgtgcccctaaacttaaaataaaagctgaag

SEQ ID NO: 20469 - DNA, 422 bp, Homo sapiens
gacctgattggctgctgatctgatgagacagcgacagatttaatggtgtttcacctacctggggtttagtttttttagttactgatttaccttagcagttttcacttacagtcacctaatttatctgtgttttattgacaggtgcaattttttaatgagggctgtggaagcagagagaggttttgaatttcttgatgttttctgtggggtctttatatgatgatagcttgatatttttcctcctaatgaatctgtgagacttgtcacgatggacaaaaaccagtgacataaaaaagaaccaaatatgtttatttggaagagtgcaagtaaaaccttaaggcatgttactggtttctagtctattttagactttttattttacttaaaagtaagcacctataaggtactttttgcttctcaaa

SEQ ID NO: 20470 - DNA, 1749 bp, Homo sapiens
ttttggagttgcattgggatttttcccaggaaaaaatatggcttttagtaatgctttgcaattggctacgcagatataaattaagatatgtttattctgagttcttattggaataagtttcaaaatcaacgagcttaagaatgaaaacaaaacttttgagagtctcacaaaatagctttctggtcaatacaccttacttgatttttaagctcgcagaataaagtatagaaacaaatggagctgaagttccatttgctaattcagagacttttgtgcttccgcaaattggagggcagcaagccatcctattctcatagtaatcgttttggctttgaaatttacatacaatttaatagcacatttttagccattatggattggcgcaataaagagatatcaatgtaatgcaatgtgatgctttatgggcctcattctaattcagaaagcttgtttaaaagaactaagactcttctgtttaataaaatagcaacaatctaatatctagattggtagtcctgcggtgccactagtgggagatgagagtattaagacaagagtaaggacaaggaaagacttaaaggttgcatattgaaaagtttggaattcctaatttgggagcactgatttcttggtgaagaagtaagtatgactacgttgccagtaattttttaaaaacatagacccagaaatagcaaatcgatttcaccctcataccttagtctacaaggccttgctcttgagaaggttttccatgatattgcttaatttcatctgcacaagatgagacacaaacataaaaattccctgctcattttaataccataaaaggctgaggttatttctctgtcataaaattgtaaatagcattttttaagtcaaaattacatttaaaacagtggattgttctacaaatatatatgtgtatatatacatatgcttctgaaataaggatatattatatgagtttttatttgatttgtggtctttagtcataggtaatcaaaaataaagagatttgaatgcaaaactttatacattaatgtacatttctaatgatggtacaaattgccactttataataaaaaagaaacaggtgggaataataatcaaagcacgtgttccttcagtactttggtgatttttaatccccccttgtgatgcacaggaaattattttttagttacaaaaagttatcttagaaatctatacttcccaatacagatttcatgttaagtcatatcaaattgagaatttgtggtgaaagaataggaaaaggatgctagatgctgatctttctttttcaggatttttccctggagcccaagttaaaaattcaatacttaaatctaagttaagtgaaaattaataatgttcagaatgatgtattgagctttagtaacagacggaagcaaaaaaaaataagaatatttaacattatgataatagccttaaaataatgtaataaaaattgcatcattaaatgttctattagttggaaagaatgagctgatgtttctttgtctttgctccaagtacaatttaaagacagtgacattcattttactcaaaattgttcaaaaagtccaaaacatactcccatggctagaattggtattagctccaatacaaggttaaatgttacaatcttaagaaattattgacactgaaatgtttagtaaacatgttgtatgagaaactaaacaaattaatgtttcatttttccattaaagcacagattattcaaatcat

SEQ ID NO: 20471 - DNA, 1698 bp, Homo sapiens
ttttggagttgcattgggatttttcccaggaaaaaatatggcttttagtaatgctttgcaattggctacgcagatataaattaagatatgtttattctgagttcttattggaataagtttcaaaatcaacgagcttaagaatgaaaacaaaacttttgagagtctcacaaaatagctttctggtcaatacaccttacttgatttttaagctcgcagaataaagtatagaaacaaatggagctgaagttccatttgctaattcagagacttttgtgcttccgcaaattggagggcagcaagccatcctattctcatagtaatcgttttggctttgaaatttacatacaatttaatagcacatttttagccattatggattggcgcaataaagagatatcaatgtaatgcaatgtgatgctttatgggcctcattctaattcagaaagcttgtttaaaagaactaagactcttctgtttaataaaatagcaacaatctaatatctagattggtagtcctgcggtgccactagtgggagatgagagtattaagacaagagtaaggacaaggaaagacttaaaggttgcatattgaaaagtttggaattcctaatttgggagcactgatttcttggtgaagaagtaagtatgactacgttgccagtaattttttaaaaacatagacccagaaatagcaaatcgatttcaccctcataccttagtctacaaggccttgctcttgagaaggttttccatgatattgcttaatttcatctgcacaagatgagacacaaacataaaaattccctgctcattttaataccataaaaggctgaggttatttctctgtcataaaattgtaaatagcattttttaagtcaaaattacatttaaaacagtggattgttctacaaatatatatgtgtatatatacatatgcttctgaaataaggatatattatatgagtttttatttgatttgtggtctttagtcataggtaatcaaaaataaagagatttgaatgcaaaactttatacattaatgtacatttctaatgatggtacaaattgccactttataataaaaaagaaacaggtgggaataataatcaaagcacgtgttccttcagtactttggtgatttttaatccccccttgtgatgcacaggaaattattttttagttatcatatcaaattgagaatttgtggtgaaagaataggaaaaggatgctagatgctgatctttctttttcaggatttttccctggagcccaagttaaaaattcaatacttaaatctaagttaagtgaaaattaataatgttcagaatgatgtattgagctttagtaacagacggaagcaaaaaaaaataagaatatttaacattatgataatagccttaaaataatgtaataaaaattgcatcattaaatgttctattagttggaaagaatgagctgatgtttctttgtctttgctccaagtacaatttaaagacagtgacattcattttactcaaaattgttcaaaaagtccaaaacatactcccatggctagaattggtattagctccaatacaaggttaaatgttacaatcttaagaaattattgacactgaaatgtttagtaaacatgttgtatgagaaactaaacaaattaatgtttcatttttccattaaagcacagattattcaaatcat

SEQ ID NO: 20472 - DNA, 2519 bp, Homo sapiens
gatctggccgtggagatgcatgagccctacacgttcctcaacggcctcaccgtggccgacatggaggacctgctggaggatatccaggtctacatggagctggagcagggcaagaacgccgacttctggcgggacatgaccaccatcaccgaggacgagatctccaagctccgcaagctggaggcctcgggcaaggggccagggcatcgagggcaaaatccgcgctggtggccccaacctggacatgggctactgggagagcctcctgcagcagcttcgtgcccacatggccgggcccggtgagcactaggctgcgtgagcgccaccaggacgtgctgcggcagaagctgtacaaactgaagcaggagcagggcgtggagagcgagccgctgttccccatcctcaagcaggagccccagtcccccagccgcagcctggagcctgaggacgcggcgcccaccccgcccgggccctcctcggagggcggccccgcggaggccgaggtggacggcgcgaccccgacagagggcgacggcgacggggacggtgagggcgagggcgagggcgaggcggtgctcatggaggaggacctgatccagcagagcctggacgactacgacgccggcaggtacagcccgcggctgctcacggcgcacgagctgccactggacgcgcacgtgctggaaccggatgaggacctgcagcgcctgcagctctcgcgccagcagctccaggtcacgggagacgccagcgagagcgccgaggacatcttcttccggcgggccaaggagggcatgggccaggacgaggcgcagttcagcgtggagatgccactcaccggcaaggcctacctgtgggccgacaagtaccggccacgcaagccgcgcttcttcaaccgcgtgcacacgggcttcgagtggaacaagtacaaccagacgcactacgactttgacaacccaccgcccaagatcgtgcagggatacaagttcaacatcttctaccccgacctcatcgacaagcgctccacgcccgagtacttcctggaggcctgcgccgacaacaaggatttcgccatcctgcgcttccacgcggggccgccctacgaggacatcgctttcaagatcgtcaaccgcgagtgggaatactcgcaccgccacggcttccgctgccagtttgccaacggcatcttccagctgtggtttcacttcaagcgctaccgctatcggcggtgacggccctggggaacggcaggcaggtgtcctcgggggcacagtaaaggggcttcggtgaagctggtggtcactccggggccgctgtctgggctgcagggccgcgggttcacgtcccacctcaggccgcatctttctttcgccaggcctcagtttcctcctatataaaaggggggtcaccattgagcctgccatggtgagctgaggagacactgggacaggctggcctagggtcctgatgcaacggagggggcgctaggggcatctttcgagcacgagggtggccagcagccgccagctgacctcaccgtccaggcggacactctccaccgcccctcagccaggctgggtggggcccacagggcctgccccaagcggcggccacacagggtgttgtggagatgggccagaggggcctgggcttggcggtgccaggctcgtgagaagcaggaaactcaaggccagccctgccacatcacggggcacccactgggcgtgaggcagagcccgcggctgtggggcagctccagccctgcccacaggccaccctcgcccgcacaggcagcactgaggccgggaccctgctggcgcccgatccgccactgcagaagagaccctctgtggacacccacactctgcagggactggcccccaactcaccccgtgctggctggtggggtccatttccccgcagcgggtatggaggatgcgtcgaggtccctgtctctgtcaatgtcatgggaaccaaaagtcactgagccgtcctccccccacctccgagcacagggcctggagggcaggggctccccgaaggctgggggttggagaagggtgaggggcttcccccagggatccccccacctggcctgctcacggggccttggagcatgagaccagtgaccccgagttttgcccatatcaggacagtggctccttctcactcccctttctcaggccaggagggccgagggccacacgggtgccacagcccaggtcggagtggcccagccggcaggcttgttcttcagcatccgacgggaacatctccaacagaagcaaaacggaaagtgcctcccggacccccagagggccacccaacctcaccagtcaccagccccagaccacccacagcccctcccagacaccccgcctcatctggaaatagttccgtttgtttctctaaaaagacttgtaggtgggaaaaaaaatcttttgttctcatggaattggcctattggcaagatcgcatgtttttttaataaacgttgtattttagaataaaaaaaaaat

SEQ ID NO: 20473 - DNA, 1684 bp, Homo sapiens
gatctggccgtggagatgcatgagccctacacgttcctcaacggcctcaccgtggccgacatggaggacctgctggaggatatccaggtctacatggagctggagcagggcaagaacgccgacttctggcgggacatgaccaccatcaccgaggacgagatctccaagctccgcaagctggaggcctcgggcaaggggccaggtgagcgccgcgagggggtcaacgcctccgtcagctctgatgtgcagtcagtgttcaaggggaagacatacaaccagctgcaggtcatcttccagggcatcgagggcaaaatccgcgctggtggccccaacctggacatgggctactgggagagcctcctgcagcagcttcgtgcccacatggccgggcccggtgagcactaggctgcgtgagcgccaccaggacgtgctgcggcagaagctgtacaaactgaagcaggagcagggcgtggagagcgagccgctgttccccatcctcaagcaggagccccagtcccccagccgcagcctggagcctgaggacgcggcgcccaccccgcccgggccctcctcggagggcggccccgcggaggccgaggtggacggcgcgaccccgacagagggcgacggcgacggggacggtgagggcgagggcgagggcgaggcggtgctcatggaggaggacctgatccagcagagcctggacgactacgacgccggcaggtacagcccgcggctgctcacggcgcacgagctgccactggacgcgcacgtgctggaaccggatgaggacctgcagcgcctgcagctctcgcgccagcagctccaggtcacgggagacgccagcgagagcgccgaggacatcttcttccggcgggccaaggagggcatgggccaggacgaggcgcagttcagcgtggagatgccactcaccggcaaggcctacctgtgggccgacaagtaccggccacgcaagccgcgcttcttcaaccgcgtgcacacgggcttcgagtggaacaagtacaaccagacgcactacgactttgacaacccaccgcccaagatcgtgcagggatacaagttcaacatcttctaccccgacctcatcgacaagcgctccacgcccgagtacttcctggaggcctgcgccgacaacaaggatttcgccatcctgcgcttccacgcggggccgccctacgaggacatcgctttcaagatcgtcaaccgcgagtgggaatactcgcaccgccacggcttccgctgccagtttgccaacggcatcttccagctgtggtttcacttcaagcgctaccgctatcggcggtgacggccctggggaacggcaggcgccaggagggccgagggccacacgggtgccacagcccaggtcggagtggcccagccggcaggcttgttcttcagcatccgacgggaacatctccaacagaagcaaaacggaaagtgcctcccggacccccagagggccacccaacctcaccagtcaccagccccagaccacccacagcccctcccagacaccccgcctcatctggaaatagttccgtttgtttctctaaaaagacttgtaggtgggaaaaaaaatcttttgttctcatggaattggcctattggcaagatcgcatgtttttttaataaacgttgtattttagaataaaaaaaaaat

SEQ ID NO: 20474 - DNA, 1816 bp, Homo sapiens
gatctggccgtggagatgcatgagccctacacgttcctcaacggcctcaccgtggccgacatggaggacctgctggaggatatccaggtctacatggagctggagcagggcaagaacgccgacttctggcgggacatgaccaccatcaccgaggacgagatctccaagctccgcaagctggaggcctcgggcaaggggccaggtgagcgccgcgagggggtcaacgcctccgtcagctctgatgtgcagtcagtgttcaaggggaagacatacaaccagctgcaggtcatcttccagggcatcgagggcaaaatccgcgctggtggccccaacctggacatgggctactgggagagcctcctgcagcagcttcgtgcccacatggccgggcccggtgagcactaggctgcgtgagcgccaccaggacgtgctgcggcagaagctgtacaaactgaagcaggagcagggcgtggagagcgagccgctgttccccatcctcaagcaggagccccagtcccccagccgcagcctggagcctgaggacgcggcgcccaccccgcccgggccctcctcggagggcggccccgcggaggccgaggtggacggcgcgaccccgacagagggcgacggcgacggggacggtgagggcgagggcgagggcgaggcggtgctcatggaggaggacctgatccagcagagcctggacgactacgacgccggcaggtacagcccgcggctgctcacggcgcacgagctgccactggacgcgcacgtgctggaaccggatgaggacctgcagcgcctgcagctctcgcgccagcagctccaggtcacgggagacgccagcgagagcgccgaggacatcttcttccggcgggccaaggagggcatgggccaggacgaggcgcagttcagcgtggagatgccactcaccggcaaggcctacctgtgggccgacaagtaccggccacgcaagccgcgcttcttcaaccgcgtgcacacgggcttcgagtggaacaagtacaaccagacgcactacgactttgacaacccaccgcccaagatcgtgcagggatacaagttcaacatcttctaccccgacctcatcgacaagcgctccacgcccgagtacttcctggaggcctgcgccgacaacaaggatttcgccatcctgcgcttccacgcggggccgccctacgaggacatcgctttcaagatcgtcaaccgcgagtgggaatactcgcaccgccacggcttccgctgccagtttgccaacggcatcttccagctgtggtttcacttcaagcgctaccgctatcggcggtgacggccctggggaacggcaggccactgaggccgggaccctgctggcgcccgatccgccactgcagaagagaccctctgtggacacccacactctgcagggactggcccccaactcaccccgtgctggctggtggggtccatttccccgcagcgggccaggagggccgagggccacacgggtgccacagcccaggtcggagtggcccagccggcaggcttgttcttcagcatccgacgggaacatctccaacagaagcaaaacggaaagtgcctcccggacccccagagggccacccaacctcaccagtcaccagccccagaccacccacagcccctcccagacaccccgcctcatctggaaatagttccgtttgtttctctaaaaagacttgtaggtgggaaaaaaaatcttttgttctcatggaattggcctattggcaagatcgcatgtttttttaataaacgttgtattttagaataaaaaaaaaat

SEQ ID NO: 20475 - DNA, 2614 bp, Homo sapiens
gatctggccgtggagatgcatgagccctacacgttcctcaacggcctcaccgtggccgacatggaggacctgctggaggatatccaggtctacatggagctggagcagggcaagaacgccgacttctggcgggacatgaccaccatcaccgaggacgagatctccaagctccgcaagctggaggcctcgggcaaggggccaggtgagcgccgcgagggggtcaacgcctccgtcagctctgatgtgcagtcagtgttcaaggggaagacatacaaccagctgcaggtcatcttccagggcatcgagggcaaaatccgcgctggtggccccaacctggacatgggctactgggagagcctcctgcagcagcttcgtgcccacatggccgggcccggtgagcactaggctgcgtgagcgccaccaggacgtgctgcggcagaagctgtacaaactgaagcaggagcagggcgtggagagcgagccgctgttccccatcctcaagcaggagccccagtcccccagccgcagcctggagcctgaggacgcggcgcccaccccgcccgggccctcctcggagggcggccccgcggaggccgaggtggacggcgcgaccccgacagagggcgacggcgacggggacggtgagggcgagggcgagggcgaggcggtgctcatggaggaggacctgatccagcagagcctggacgactacgacgccggcaggtacagcccgcggctgctcacggcgcacgagctgccactggacgcgcacgtgctggaaccggatgaggacctgcagcgcctgcagctctcgcgccagcagctccaggtcacgggagacgccagcgagagcgccgaggacatcttcttccggcgggccaaggagggcatgggccaggacgaggcgcagttcagcgtggagatgccactcaccggcaaggcctacctgtgggccgacaagtaccggccacgcaagccgcgcttcttcaaccgcgtgcacacgggcttcgagtggaacaagtacaaccagacgcactacgactttgacaacccaccgcccaagatcgtgcagggatacaagttcaacatcttctaccccgacctcatcgacaagcgctccacgcccgagtacttcctggaggcctgcgccgacaacaaggatttcgccatcctgcgcttccacgcggggccgccctacgaggacatcgctttcaagatcgtcaaccgcgagtgggaatactcgcaccgccacggcttccgctgccagtttgccaacggcatcttccagctgtggtttcacttcaagcgctaccgctatcggcggtgacggccctggggaacggcaggcaggtgtcctcgggggcacagtaaaggggcttcggtgaagctggtggtcactccggggccgctgtctgggctgcagggccgcgggttcacgtcccacctcaggccgcatctttctttcgccaggcctcagtttcctcctatataaaaggggggtcaccattgagcctgccatggtgagctgaggagacactgggacaggctggcctagggtcctgatgcaacggagggggcgctaggggcatctttcgagcacgagggtggccagcagccgccagctgacctcaccgtccaggcggacactctccaccgcccctcagccaggctgggtggggcccacagggcctgccccaagcggcggccacacagggtgttgtggagatgggccagaggggcctgggcttggcggtgccaggctcgtgagaagcaggaaactcaaggccagccctgccacatcacggggcacccactgggcgtgaggcagagcccgcggctgtggggcagctccagccctgcccacaggccaccctcgcccgcacaggcagcactgaggccgggaccctgctggcgcccgatccgccactgcagaagagaccctctgtggacacccacactctgcagggactggcccccaactcaccccgtgctggctggtggggtccatttccccgcagcgggtatggaggatgcgtcgaggtccctgtctctgtcaatgtcatgggaaccaaaagtcactgagccgtcctccccccacctccgagcacagggcctggagggcaggggctccccgaaggctgggggttggagaagggtgaggggcttcccccagggatccccccacctggcctgctcacggggccttggagcatgagaccagtgaccccgagttttgcccatatcaggacagtggctccttctcactcccctttctcaggccaggagggccgagggccacacgggtgccacagcccaggtcggagtggcccagccggcaggcttgttcttcagcatccgacgggaacatctccaacagaagcaaaacggaaagtgcctcccggacccccagagggccacccaacctcaccagtcaccagccccagaccacccacagcccctcccagacaccccgcctcatctggaaatagttccgtttgtttctctaaaaagacttgtaggtgggaaaaaaaatcttttgttctcatggaattggcctattggcaagatcgcatgtttttttaataaacgttgtattttagaataaaaaaaaaat

SEQ ID NO: 20476 - DNA, 2357 bp, Homo sapiens
gatctggccgtggagatgcatgagccctacacgttcctcaacggcctcaccgtggccgacatggaggacctgctggaggatatccaggtctacatggagctggagcagggcaagaacgccgacttctggcgggacatgaccaccatcaccgaggacgagatctccaagctccgcaagctggaggcctcgggcaaggggccaggtgagcgccgcgagggggtcaacgcctccgtcagctctgatgtgcagtcagtgttcaaggggaagacatacaaccagctgcaggtcatcttccagggcatcgagggcaaaatccgcgctggtggccccaacctggacatgggctactgggagagcctcctgcagcagcttcgtgcccacatggccgggcccggtgagcactaggctgcgtgagcgccaccaggacgtgctgcggcagaagctgtacaaactgaagcaggagcagggcgtggagagcgagccgctgttccccatcctcaagcaggagccccagtcccccagccgcagcctggagcctgaggacgcggcgcccaccccgcccgggccctcctcggagggcggccccgcggaggccgaggtggacggcgcgaccccgacagagggcgacggcgacggggacggtgagggcgagggcgagggcgaggcggtgctcatggaggaggacctgatccagcagagcctggacgactacgacgccggcaggtacagcccgcggctgctcacggcgcacgagctgccactggacgcgcacgtgctggaaccggatgaggacctgcagcgcctgcagctctcgcgccagcagctccaggtcacgggagacgccagcgagagcgccgaggacatcttcttccggcgggccaaggagggcatgggccaggacgaggcgcagttcagcgtggagatgccactcaccggcaaggcctacctgtgggccgacaagtaccggccacgcaagccgcgcttcttcaaccgcgtgcacacgggcttcgagtggaacaagtacaaccagacgcactacgactttgacaacccaccgcccaagatcgtgcagggatacaagttcaacatcttctaccccgacctcatcgacaagcgctccacgcccgagtacttcctggaggcctgcgccgacaacaaggatttcgccatcctgcgcttccacgcggggccgccctacgaggacatcgctttcaagatcgtcaaccgcgagtgggaatactcgcaccgccacggcttccgctgccagtttgccaacggcatcttccagctgtggtttcacttcaagcgctaccgctatcggcggtgacggccctggggaacggcaggcaggtgtcctcgggggcacagtaaaggggcttcggtgaagctggtggtcactccggggccgctgtctgggctgcagggccgcgggttcacgtcccacctcaggccgcatctttctttcgccaggcctcagtttcctcctatataaaaggggggtcaccattgagcctgccatggtgagctgaggagacactgggacaggctggcctagggtcctgatgcaacggagggggcgctaggggcatctttcgagcacgagggtggccagcagccgccagctgacctcaccgtccaggcggacactctccaccgcccctcagccaggctgggtggggcccacagggcctgccccaagcggcggccacacagggtgttgtggagatgggccagaggggcctgggcttggcggtgccaggctcgtgagaagcaggaaactcaaggccagccctgccacatcacggggcacccactgggcgtgaggcagagcccgcggctgtggggcagctccagccctgcccacaggccaccctcgcccgcacaggcagcactgaggccgggaccctgctggcgcccgatccgccactgcagaagagaccctctgtggacacccacactctgcagggactggcccccaactcaccccgtgctggctggtggggtccatttccccgcagcgggccaggagggccgagggccacacgggtgccacagcccaggtcggagtggcccagccggcaggcttgttcttcagcatccgacgggaacatctccaacagaagcaaaacggaaagtgcctcccggacccccagagggccacccaacctcaccagtcaccagccccagaccacccacagcccctcccagacaccccgcctcatctggaaatagttccgtttgtttctctaaaaagacttgtaggtgggaaaaaaaatcttttgttctcatggaattggcctattggcaagatcgcatgtttttttaataaacgttgtattttagaataaaaaaaaaat

SEQ ID NO: 20477 - DNA, 1626 bp, Homo sapiens
gatctggccgtggagatgcatgagccctacacgttcctcaacggcctcaccgtggccgacatggaggacctgctggaggatatccaggtctacatggagctggagcagggcaagaacgccgacttctggcgggacatgaccaccatcaccgaggacgagatctccaagctccgcaagctggaggcctcgggcaaggggccaggtgagcgccgcgagggggtcaacgcctccgtcagctctgatgtgcagtcagtgttcaaggggaagacatacaaccagctgcaggtcatcttccagggcatcgagggcaaaatccgcgctggtggccccaacctggacatgggctactgggagagcctcctgcagcagcttcgtgcccacatggccgggcccggtgagcactaggctgcgtgagcgccaccaggacgtgctgcggcagaagctgtacaaactgaagcaggagcagggcgtggagagcgagccgctgttccccatcctcaagcaggagccccagtcccccagccgcagcctggagcctgaggacgcggcgcccaccccgcccgggccctcctcggagggcggccccgcggaggccgaggtggacggcgcgaccccgacagagggcgacggcgacggggacggtgagggcgagggcgagggcgaggcggtgctcatggaggaggacctgatccagcagagcctggacgactacgacgccggcaggtacagcccgcggctgctcacggcgcacgagctgccactggacgcgcacgtgctggaaccggatgaggacctgcagcgcctgcagctctcgcgccagcagctccaggtcacgggagacgccagcgagagcgccgaggacatcttcttccggcgggccaaggagggcatgggccaggacgaggcgcagttcagcgtggagatgccactcaccggcaaggcctacctgtgggccgacaagtaccggccacgcaagccgcgcttcttcaaccgcgtgcacacgggcttcgagtggaacaagtacaaccagacgcactacgactttgacaacccaccgcccaagatcgtgcagggatacaagttcaacatcttctaccccgacctcatcgacaagcgctccacgcccgagtacttcctggaggcctgcgccgacaacaaggatttcgccatcctgcgcttccacgcggggccgccctacgaggacatcgctttcaagatcgtcaaccgcgagtgggaatactcgcaccgccacggcttccgctgccagtttgccaacggcatcttccagctgtggtttcacttcaagcgctaccgctatcggcggtgacggccctggggaacggcaggcaggtgtcctcgggggcacagtaaaggggcttcggtgaagctggtggtcactccggggccgctgtctgggctgcaggggccacccaacctcaccagtcaccagccccagaccacccacagcccctcccagacaccccgcctcatctggaaatagttccgtttgtttctctaaaaagacttgtaggtgggaaaaaaaatcttttgttctcatggaattggcctattggcaagatcgcatgtttttttaataaacgttgtattttagaataaaaaaaaaat

SEQ ID NO: 20478 - DNA, 496 bp, Homo sapiens
gttctttgagctgtggctggagccagagtggctgggatgtgggagcagcatctctaggcagcacagggcacagagccctgagcctgtcctccaaaaaccattctgtcctcctggacctcttagcttgtgatgggagagactacctatcttctgaagtgcctttggggacttttccccattgccttaactatcagcatgattaacttttagtcatgctctcttgcaagtcatctctcttgcaaatggttgctccacagcacccttggattcctctcctgaaaatgctttttccttttctattacatggccagactacaaatttttcaaatttttatatctgcatccctttaaattataaattccacctttagatctgtgaaaggtaaataaatgtcagacctcaaaatcactaatccaaggggaaagtcaagctaggaactgtgtcaggaaaacctgcctctcattttgtttgtaaagaagatagctacaaagatta

SEQ ID NO: 20479 - DNA, 701 bp, Homo sapiens
gattgtgccactgcactccagcctgggcgacagagcaagactccgtctcaaaaaaaaaaaaaaaaaaaaaaaagtaaggtctgtatctgctgaccccacccttctccgaagccctctccgagcaaagccttaagaaactcttctctcgttcacttttcttttgtggctttcacgttttggtaagacttggccaaatagctgctcgagataatcaatcactggtggacaagtttctgctgagtgaggtttctgctgagtggggcgactcaaggcacggtcacgtaggcagcacctgtacaccgcatcctcatacagctgcgggaccgtgcctctgactgtgtgcgtgtgtgtttatctaagtgtgagatgcatccgggcatgtcagggtgtgtacatgttgggaagactgtgtagatttcttgtgtgccgctctctgaatggaggagaggggaagcgtcttacctcgctgaatccctttccattgctggaaagaacacctgggcaggagcggccccaagaccccgcccaggccctcggaagggagcctgaagggttaatccgtaccctgtattaaccagggtcaacccagcggctgacccgcctcttccctgctcctttgccgtttctagcacctggcttacttcctggcacacagtgagcactcaataaatgtatgctgagaatgactgcgagcggcttcc

SEQ ID NO: 20480 - DNA, 307 bp, Homo sapiens
tacaaaaattgattcaaaatttgtcatagaccttaatagaaatgtaagtctataaaacttctagaagaaaaatataagaaaaaatctacatgacttgggtaagtgaaagaatttttagaaatgacaacaaaaatatgatccataatgaaaaaataaattagactttgtcaaaactgaaaacttttgcttggtgaaaagcactgttaaaggactgaaaagacaatccacagaaagaaaggaaaggtgtgtaagttacattttcataaaacgtttaatccagaatatgtataggacaatataaataaac

SEQ ID NO: 20481 - DNA, 329 bp, Homo sapiens
caaattgggataagtacctgaaagcaataatactggatctctttaaaatactctatagcatttattgtattgttttgactaaagatttttatgtcacagagcatacagcaagcacagtataaactttagagtgagctacttttctgtaacactatgcatgaaaattcacagaatatgtcaatctgttacttaaaataacttcagctcttatttttttaaatatgcagaaatcctttgcaaaataacttaccttttctgaagtcaatcttgagttaaaactaaacataattagatataaccaaaaaagaaacacaaaagtatggtatctt

SEQ ID NO: 20482 - DNA, 218 bp, Homo sapiens
ttctcaactccacactgtgtgagctcaagcaatcttactggtgcctagttagcgtgtccaattaatatttctcgaagtgcagatttacatttcttctgttttacaatactgggtaggggaagtgttctccacccagtcataattatccagttccataaaacatttaggtaaaggagacataacttatttatgtatatcctgtttaaacattccaaatc

SEQ ID NO: 20483 - DNA, 418 bp, Homo sapiens
  misc_feature (69)..(69): n is a, c, g, or t
tttgactcacctgaaatctcaggccaggaaattagtggcaggctggaactagaaaccatagtacccaancttctctaggccttactcctttctcctctgaacagcttgctttgagtcaaatggaaaaggtctcagcttagaactggaccctaatttgataaactagtttttcaggatttgtttagagtaaggaaaggaaatcacccattttccctcttgctataagaaaaaaaagggttgctctagatgtgaagggaggccaacagcagttaacaatataaaaagcaaattaattagagaaatagttctagtgcttaaaagataccccttcacagtaattgccttggggtacaagtacacagttaacaactttcctaagaaacctgaaagcataaaaagagccaggaaccccctcaac

SEQ ID NO: 20484 - DNA, 4968 bp, Homo sapiens
ctgctatcaaaaaggccataaggattttgtccccaaatttcacatgagctaccttgcttcaaactactgagatgaagggggcaagattatttgtccttctttctagtttatggagtgggggcattgggcttaacaacagtaagcattcttggactatacctgaggatgggaactctcagaagactatgccttctgcttcagttcctccaaataaaatacaaagtttgcaaatactgccaaccactcgggtcatgtcggcggagatagctacaactccagaggcaagaacttctgaagacagtcttcttaaatcaacactgcctccctcagaaacaagtgcacctgctgagggtgtgagaaatcaaactctcacatccacagagaaagcagaaggagtggtcaagttacagaatcttaccctcccaaccaacgctagcatcaagttcaatcctggagcagaatcagtggtcctttccaattctacactgaaatttcttcagagctttgccagaaagtcaaatgaacaagcaacttctctaaacacagttggaggcactggaggcattggaggcgttggaggcactggaggcgtgggaaatcgagccccacgggaaacatacctcagccggggtgacagcagttccagccaaagaactgactaccaaaaatcaaatttcgaaacaactagaggaaagaattggtgtgcttatgtacataccaggttatctcccacagtgatattggacaaccaggtcacttatgtcccaggtgggaaaggaccttgtggctggaccggtggatcctgtcctcagagatctcagaagatatccaatcctgtctataggatgcaacataaaattgtcacctcattggattggaggtgctgtcctggatacagtgggccgaaatgtcaactaagagcccaggaacagcaaagtttgatacacaccaaccaggctgaaagtcatacagctgttggcagaggagtagctgagcagcagcagcagcaaggctgtggtgacccagaagtgatgcaaaaaatgactgatcaggtgaactaccaggcaatgaaactgactcttctgcagaagaagattgacaatatttctttgactgtgaatgatgtaaggaacacttactcctccctagaaggaaaagtcagcgaagataaaagcagagaatttcaatctcttctaaaaggtctaaaatccaaaagcattaatgtactgataagagacatagtaagagaacaatttaaaatttttcaaaatgacatgcaagagactgtagcacagctcttcaagactgtatcaagtctatcagaggacctcgaaagcaccaggcaaataattcaaaaagttaatgaatctgtggtttcaatagcagcccagcaaaagtttgttttggtgcaagagaatcggcccactttgactgatatagtggaactaaggaatcacattgtgaatgtaaggcaagaaatgactcttacatgtgagaagcctattaaagaactagaagtaaagcagactcatttagaaggtgctctagaacaggaacactcaagaagcattctgtattatgaatccctcaataaaactctttctaaattgaaggaagtacatgagcagcttttatcaactgaacaggtatcagaccagaagaatgctccagctgctgagtcagttagcaataatgtcactgagtacatgtctactttacatgaaaatataaagaagcagagtttgatgatgctgcaaatgtttgaagatttgcacattcaagaaagcaagattaacaatctcaccgtctctttggagatggagaaagagtctctcagaggtgaatgtgaagacatgttatccaaatgcagaaatgattttaaatttcaacttaaggacacagaagagaatttacatgtgttaaatcaaacattggctgaagttctctttccaatggacaataagatggacaaaatgagtgagcaactaaatgatttgacttatgatatggagatccttcaacccttgcttgagcagggagcatcactcagacagacaatgacatatgaacaaccaaaggaagcaatagtgataaggaaaaagatagaaaatctgactagtgctgtcaatagtctaaattttattatcaaagaacttacaaaaagacacaacttacttagaaatgaagtacagggtcgtgatgatgccttagaaagacgtatcaatgaatatgccttagaaatggaagatggcctcaataagacaatgactattataaataatgctattgatttcattcaagataactatgccctaaaagagactttaagtactattaaggataatagtgagatccatcataaatgtacctccgatatggaaactattttgacatttattcctcagttccaccgtctgaatgattctattcagactttggtcaatgacaatcagagatataactttgttttgcaagtcgccaagacccttgcaggtattcccagagatgagaaactaaatcagtccaacttccaaaagatgtatcaaatgttcaatgaaaccacttcccaagtgagaaaataccagcaaaatatgagtcatttggaagaaaaactactcttaactaccaagatttccaaaaattttgagactcggttgcaagacattgagtctaaagttacccagacgctcataccttattatatttcagttaaaaaaggcagtgtagttacaaatgagagagatcaggctcttcaactgcaagtattaaattccagatttaaggcgttggaagcaaaatctatccatctttcaattaacttcttttcgcttaacaaaactctccacgaagttttaacaatgtgtcacaatgcttctacaagtgtgtcagaactgaatgctaccatccctaagtggataaaacattccctgccagatattcaacttcttcagaaaggtctaacagaatttgtggaaccaataattcaaataaaaactcaagctgccctatctaattcaacttgttgtatagatcgatcgttgcctggtagtctggcaaatgttgtcaagtctcagaagcaagtaaaatcattgccaaagaaaattaacgcacttaagaaaccaacggtaaatcttaccacagtcctgataggccggactcaaagaaacacggacaacataatatatcctgaggagtattcaagctgtagtcggcatccgtgccaaaatgggggcacgtgcataaatggaagaactagctttacctgtgcctgcagacatccttttactggtgacaactgcactatcaagcttgtggaagaaaatgctttagctccagatttttccaaaggatcttacagatatgcacccatggtggcattttttgcatctcatacgtatggaatgactatacctggtcctatcctgtttaataacttggatgtcaattatggagcttcatataccccaagaactggaaaatttagaattccgtatcttggagtatatgttttcaagtacaccatcgagtcatttagtgctcatatttctggatttttagtggttgatggaatagacaagcttgcatttgagtctgaaaatattaacagtgaaatacactgtgatagggttttaactggggatgccttattagaattaaattatgggcaggaagtctggttacgacttgcaaaaggaacaattccagccaagtttccccctgttactacatttagtggctatttattatatcgtacataagttagtatgaaaaacagactatcacctttattgagaaacagccagtgttttcatttatctttgcttgcacatctgctctgttttggtttttctacaggaaatgaaaatcaacttgtttttttaatatgagtaaacttgtatgtctattttataaaattatttgaatattgtttaatgtctgaatatgaaagagttcttgatcctaaagaaatttagtggcacagaaaacaaagtgaatttgttagcataattattcctattcttatttcttcattttaagtcattgcaatggaaagtaatattataaaatggtaattacaacatattatcagtcacagttttctttccaattaaacacttaacttttgttattccctgtatataaatatataacacacattttctagattcacaaatttaaataaattactcaaaaaatgaaaattgattttgtaaacttttatttttactctttacgttgagttgatcaattttccatactaagattttcattcagaatcaaaattaagaaagttggactgaaaatatgaaaaatgcttaactattgttctcttcctataattctctaattataacatagtaatttacatgtagttggacatgtacactcaagtctaagaatatatgagtggatcatttaccgccccccgccccacaacatctataaggggcaaaaagtctttttctaataagtattcttctatggtagtacctacagatctgcccttcttcttctaaagggtaagtcataatctgtgtaatactacaatttatgggatgctcactatgccctgtttctcttctaaacaatttacatgtaatgtctcattcctcacaataacccttgtaaagtgggcatgattaccatgatttttatagttgaagaacctaagacacagagaccaaggcccatgagctcatagggctgaggcaggatttggaatcaggccatgtcttctccagagcccacatccatcctttctctatattgcctcccacagatgtgctaaaatttatttaactaatcctttatcctctatttgtgttgtctcccattttttattattacaatattactgtggtgaacatgcttaaaaatacattccttggatatctgacaacgtgtttctgaaaaacagattttcataagtaataataaaaataataataaaaaagttttggtatggta

SEQ ID NO: 20485 - DNA, 4400 bp, Homo sapiens
agcctgcctttgtggtctgcacgctgggaaagcctgacacctactggaatagaaacagtttacaacgcccggaatatgctcaagtcacagttttgcaaggaagggggaaacaaaaaataaaattaggaattggtgtgcttatgtacataccaggttatctcccacagtgatattggacaaccaggtcacttatgtcccaggtgggaaaggaccttgtggctggaccggtggatcctgtcctcagagatctcagaagatatccaatcctgtctataggatgcaacataaaattgtcacctcattggattggaggtgctgtcctggatacagtgggccgaaatgtcaactaagagcccaggaacagcaaagtttgatacacaccaaccaggctgaaagtcatacagctgttggcagaggagtagctgagcagcagcagcagcaaggctgtggtgacccagaagtgatgcaaaaaatgactgatcaggtgaactaccaggcaatgaaactgactcttctgcagaagaagattgacaatatttctttgactgtgaatgatgtaaggaacacttactcctccctagaaggaaaagtcagcgaagataaaagcagagaatttcaatctcttctaaaaggtctaaaatccaaaagcattaatgtactgataagagacatagtaagagaacaatttaaaatttttcaaaatgacatgcaagagactgtagcacagctcttcaagactgtatcaagtctatcagaggacctcgaaagcaccaggcaaataattcaaaaagttaatgaatctgtggtttcaatagcagcccagcaaaagtttgttttggtgcaagagaatcggcccactttgactgatatagtggaactaaggaatcacattgtgaatgtaaggcaagaaatgactcttacatgtgagaagcctattaaagaactagaagtaaagcagactcatttagaaggtgctctagaacaggaacactcaagaagcattctgtattatgaatccctcaataaaactctttctaaattgaaggaagtacatgagcagcttttatcaactgaacaggtatcagaccagaagaatgctccagctgctgagtcagttagcaataatgtcactgagtacatgtctactttacatgaaaatataaagaagcagagtttgatgatgctgcaaatgtttgaagatttgcacattcaagaaagcaagattaacaatctcaccgtctctttggagatggagaaagagtctctcagaggtgaatgtgaagacatgttatccaaatgcagaaatgattttaaatttcaacttaaggacacagaagagaatttacatgtgttaaatcaaacattggctgaagttctctttccaatggacaataagatggacaaaatgagtgagcaactaaatgatttgacttatgatatggagatccttcaacccttgcttgagcagggagcatcactcagacagacaatgacatatgaacaaccaaaggaagcaatagtgataaggaaaaagatagaaaatctgactagtgctgtcaatagtctaaattttattatcaaagaacttacaaaaagacacaacttacttagaaatgaagtacagggtcgtgatgatgccttagaaagacgtatcaatgaatatgccttagaaatggaagatggcctcaataagacaatgactattataaataatgctattgatttcattcaagataactatgccctaaaagagactttaagtactattaaggataatagtgagatccatcataaatgtacctccgatatggaaactattttgacatttattcctcagttccaccgtctgaatgattctattcagactttggtcaatgacaatcagagatataactttgttttgcaagtcgccaagacccttgcaggtattcccagagatgagaaactaaatcagtccaacttccaaaagatgtatcaaatgttcaatgaaaccacttcccaagtgagaaaataccagcaaaatatgagtcatttggaagaaaaactactcttaactaccaagatttccaaaaattttgagactcggttgcaagacattgagtctaaagttacccagacgctcataccttattatatttcagttaaaaaaggcagtgtagttacaaatgagagagatcaggctcttcaactgcaagtattaaattccagatttaaggcgttggaagcaaaatctatccatctttcaattaacttcttttcgcttaacaaaactctccacgaagttttaacaatgtgtcacaatgcttctacaagtgtgtcagaactgaatgctaccatccctaagtggataaaacattccctgccagatattcaacttcttcagaaaggtctaacagaatttgtggaaccaataattcaaataaaaactcaagctgccctatctaattcaacttgttgtatagatcgatcgttgcctggtagtctggcaaatgttgtcaagtctcagaagcaagtaaaatcattgccaaagaaaattaacgcacttaagaaaccaacggtaaatcttaccacagtcctgataggccggactcaaagaaacacggacaacataatatatcctgaggagtattcaagctgtagtcggcatccgtgccaaaatgggggcacgtgcataaatggaagaactagctttacctgtgcctgcagacatccttttactggtgacaactgcactatcaagcttgtggaagaaaatgctttagctccagatttttccaaaggatcttacagatatgcacccatggtggcattttttgcatctcatacgtatggaatgactatacctggtcctatcctgtttaataacttggatgtcaattatggagcttcatataccccaagaactggaaaatttagaattccgtatcttggagtatatgttttcaagtacaccatcgagtcatttagtgctcatatttctggatttttagtggttgatggaatagacaagcttgcatttgagtctgaaaatattaacagtgaaatacactgtgatagggttttaactggggatgccttattagaattaaattatgggcaggaagtctggttacgacttgcaaaaggaacaattccagccaagtttccccctgttactacatttagtggctatttattatatcgtacataagttagtatgaaaaacagactatcacctttattgagaaacagccagtgttttcatttatctttgcttgcacatctgctctgttttggtttttctacaggaaatgaaaatcaacttgtttttttaatatgagtaaacttgtatgtctattttataaaattatttgaatattgtttaatgtctgaatatgaaagagttcttgatcctaaagaaatttagtggcacagaaaacaaagtgaatttgttagcataattattcctattcttatttcttcattttaagtcattgcaatggaaagtaatattataaaatggtaattacaacatattatcagtcacagttttctttccaattaaacacttaacttttgttattccctgtatataaatatataacacacattttctagattcacaaatttaaataaattactcaaaaaatgaaaattgattttgtaaacttttatttttactctttacgttgagttgatcaattttccatactaagattttcattcagaatcaaaattaagaaagttggactgaaaatatgaaaaatgcttaactattgttctcttcctataattctctaattataacatagtaatttacatgtagttggacatgtacactcaagtctaagaatatatgagtggatcatttaccgccccccgccccacaacatctataaggggcaaaaagtctttttctaataagtattcttctatggtagtacctacagatctgcccttcttcttctaaagggtaagtcataatctgtgtaatactacaatttatgggatgctcactatgccctgtttctcttctaaacaatttacatgtaatgtctcattcctcacaataacccttgtaaagtgggcatgattaccatgatttttatagttgaagaacctaagacacagagaccaaggcccatgagctcatagggctgaggcaggatttggaatcaggccatgtcttctccagagcccacatccatcctttctctatattgcctcccacagatgtgctaaaatttatttaactaatcctttatcctctatttgtgttgtctcccattttttattattacaatattactgtggtgaacatgcttaaaaatacattccttggatatctgacaacgtgtttctgaaaaacagattttcataagtaataataaaaataataataaaaaagttttggtatggta

SEQ ID NO: 20486 - DNA, 1234 bp, Homo sapiens
ctgctatcaaaaaggccataaggattttgtccccaaatttcacatgagctaccttgcttcaaactactgagatgaagggggcaagattatttgtccttctttctagtttatggagtgggggcattgggcttaacaacagtaagcattcttggactatacctgaggatgggaactctcagaagactatgccttctgcttcagttcctccaaataaaatacaaagtttgcaaatactgccaaccactcgggtcatgtcggcggagatagctacaactccagaggcaagaacttctgaagacagtcttcttaaatcaacactgcctccctcagaaacaagtgcacctgctgagggtgtgagaaatcaaactctcacatccacagagaaagcagaaggagtggtcaagttacagaatcttaccctcccaaccaacgctagcatcaagttcaatcctggagcagaatcagtggtcctttccaattctacactgaaatttcttcagagctttgccagaaagtcaaatgaacaagcaacttctctaaacacagttggaggcactggaggcattggaggcgttggaggcactggaggcgtgggaaatcgagccccacgggaaacatacctcagccggggtgacagcagttccagccaaagaactgactaccaaaaatcaaatttcgaaacaactagaggaaagaattggtgtgcttatgtacataccaggttatctcccacagtgatattggacaaccaggtcacttatgtcccaggtgggaaaggaccttgtggctggaccggtggatcctgtcctcagagatctcagaagatatccaatcctgtctataggatgcaacataaaattgtcacctcattggattggaggtgctgtcctggatacagtgggccgaaatgtcaactaagagcccaggaacagcaaagtttgatacacaccaaccaggctgaaagtcatacagctgttggcagaggagtagctgagcagcagcagcagcaaggctgtggtgacccagaagtgatgcaaaaaatgactgatcaggtgaactaccaggcaatgaaactgactcttctgcagaagaagattgacaatatttctttgactgtgaatgatgtaaggaacacttactcctccctagaaggaaaagtcagcgaagataaaagcagagaatttcaatctcttctaaaaggtaaaaatgaaataaaataaaatattcattcagt

SEQ ID NO: 20487 - DNA, 1098 bp, Homo sapiens
ctgctatcaaaaaggccataaggattttgtccccaaatttcacatgagctaccttgcttcaaactactgagatgaagggggcaagattatttgtccttctttctagtttatggagtgggggcattgggcttaacaacagtaagcattcttggactatacctgaggatgggaactctcagaagactatgccttctgcttcagttcctccaaataaaatacaaagtttgcaaatactgccaaccactcgggtcatgtcggcggagatagctacaactccagaggcaagaacttctgaagacagtcttcttaaatcaacactgcctccctcagaaacaagtgcacctgctgagggtgtgagaaatcaaactctcacatccacagagaaagcagaaggagtggtcaagttacagaatcttaccctcccaaccaacgctagcatcaagttcaatcctggagcagaatcagtggtcctttccaattctacactgaaatttcttcagagctttgccagaaagtcaaatgaacaagcaacttctctaaacacagttggaggcactggaggcattggaggcgttggaggcactggaggcgtgggaaatcgagccccacgggaaacatacctcagccggggtgacagcagttccagccaaagaactgactaccaaaaatcaaatttcgaaacaactagaggaaagaattggtgtgcttatgtacataccaggttatctcccacagtgatattggacaaccaggtcacttatgtcccaggtgggaaaggaccttgtggctggaccggtggatcctgtcctcagagatctcagaagatatccaatcctgtctataggatgcaacataaaattgtcacctcattggattggaggtgctgtcctggatacagtgggccgaaatgtcaactaagagcccaggaacagcaaagtttgatacacaccaaccaggctgaaagtcatacagctgttggcagaggagtagctgagcagcagcagcagcaaggctgtggtgacccaggtcatagattgtaattactatcatctctgacccaattattgtcaatgctatttattacaacttccaagcaag

SEQ ID NO: 20488 - DNA, 518 bp, Homo sapiens
aagacagctgtccaatgatctccaagatctcaccaataaaatgataaaagtttattgaggagcataaaaggaagtctgagtaaatgctatgttattgctatgttaatgggtaggaagacttgtatcaggtaaagtacttctacccaaacttacagattcagttcaattccagtcacttacataataatgagaaaacttattcttaaaatggacatctcaataaagctgttaaaaattaatatgaactagtcaaggctcaagaatggtaaagactaattgaagatatatgaaggactcatacaactaccacaattttttagaaaggtaaagtaattaaaacactacattagtatcataaggtgatatagtaattcaaaagattgataaatttacctttattaaaattagagtatcttattaggaaaagacctcatcaagaataaagctccaaactggaaaaagaaatttgcatatttgcaatgcatactccaagatcagattaatatccagaagatatt

SEQ ID NO: 20489 - DNA, 351 bp, Homo sapiens
ctgggtctgtcacctgctttgtaaaatgcactgcacttctcttcatgtcactctgaaaccagccatgacttgagcccatattttgggcttcacgtcagtggcatgtttgacacttgacgtacaaaccctggcgcaaagcccattccacgccaccaaagcggcagcctgttgtagacttcgccggtgtgttcgtgtttatatttggttctttgcttgctcactcaagagctggatgttcgaaaaagtcttccttctctatattttagagtgggagtaaaatgtggatgggtgggcttccctccaaatacatacttttaatgtcttttaaaataaaattaagtgtctgatttt

SEQ ID NO: 20490 - DNA, 465 bp, Homo sapiens
gtcgaccgattctactgcctcagcctcccgagtagctgggattacaggtgcccaccaccacgcctggctaatttttgtatttttaatagagacgagtttcaccatgttggccaggctgttcttgatctgctgacctcgtgatctgcctgccttggcctcccaaagtgctgggattacaggcgtgaccactgcagccagccagaaattgcttcttctgaatgttaccatgtaagaaattctcttgagtaattcagaccttaaagatatgtacctatgacttgggcaaagttgttttctagcttgttcttctccctctgatttggatatagtgcaaggggatgagctttattttaataagctgatattttccaattgtatgtctagagtccaggccattaaatatattttcacaagtaaattttccatgtggtgagattcttattagaagacatattgctgatggtt

SEQ ID NO: 20491 - DNA, 147 bp, Homo sapiens
aaagcgtaggtacgttcttcaaatacactgtttttacaagtgccaggtaaggttctcaatgtacaagaccgaagttgtgtcttctttcagtttatataactttgatctgctatgtcagttttacccagggagctttgtttaaaaaaa

SEQ ID NO: 20492 - DNA, 3689 bp, Homo sapiens
agacgctctgtactagaaaagaatcttataaaagtaactgttgcaccatttaatccaacagtttgtgatgctctgcttgataaggacgagactgattcgtccaaagatactgaaaaactctcttcccttggagaagagatgagagaagatggtcttagcccaaatgaaagcaaactttgtactgaatctgaagggatcagccccaataactctgcctggaatgggccccagctctcttcttcaaacaataactttcaacagactgtctctgataaaaatatgcctgacagtgagaaccctacgtctgtattctctcggatctcagaccattcagagactcctaatatggagttatcctgcagaaatggtggttcacacaagtcaagttgtgaaatgagatctctggttgtttccacctcatcaaacaaacaggatgttcttaacaaggattctgggaagatgaaaggccatgagagaagactaggcaaagtcattcctgttctacaaactaagaccaggactaatgttccgacgttttcacagtcaaatctagaacagcagaagcagctttatctcaggagtctcattgctcatatagaagacccagaggacactaaccaaggatgaatccctagaagtggaattgctgggtatctcgggggagctttgtgccttgatggatcaagttcatcatatgcagcactcaaaatggcagcatccttcggacctcaccacgcgaaactacgcccgccgacagaaacatctgcaaagatacagtctgactcagtgggttgacaggaacatgcgaagccaccatcggttccagcgtctcccagacttctcgtacagttaatttgtgtcatcccatcagcaatgaaggtccctatccagggtcttgcttggagcagcatttcatgttcttttgctgttttgtgctttgccgattttggattttatttttcacaaaatttttatttaaaaaactcgtcaccttttggaaatgcccattgccgacttgaatttttttgtatgaagtccctcctgattttgtgtgtgtgtgtctgtgtttaagcaagcgttcggttggtatagtttttttttgtttttttaatttaaattgaaggtagctgcctcctgaaagccagcattaagccagaacacccaggttcaagcaaaagacccacctctctgcagaggcaaagtctactttctggtacctcaaagaaatcattgttcaatcttccataaggaagagattctttaccaggctgtgagccagtgttagataacttgtgaatggatataagttacttttaacaacccctcttacttttttatttgaatcctctgaatacctgtcagtattttaaagttggcaatccaggacattataagtaggatggagcaggagaagaatcctattgaaaggacaaattaaaatagtaaatcctctcctctcccttctgtaggtactagctgccttgatttttttttgtgggtgggggggattttttcattccttattgaacttattttgcacaatagtgtttacaaatcttatacatcttactttgacagaagacttataataccttgtggtcttgagactggttgtctcctttgcctttcttcaaggattttcctttttctttttaccccccagtgaccactctgctctttaggattctagtggcagtattcttgtaacctgttagacgtggatatacctcttcaggatggcctccttgctgtctttattgaagagctgcccacccagagtcttgactctagggcaggctagtgctattgtggtgtcagttgatatttagtttcatttgctgaaccccaaatttgagtgttagttagggagcctccattctgtgggagagtgtggaaaggcactcttttttctccatattagttaacaagaggtgtctttaggccctggatgttaccatctcatttggtcaagcccctgatacctagtttcacatggatgctaacgtggatgtaatatagttgtgacagcctatgcacaaaagcattacctgatcttaaggtttggtattctaaccaaagttgacagactgtgcgtctgtcttaatggatgtcttaggagttggttattctctctttttttttgagacggagtttcgctgttgttgcccaggctggagtgcaatggcgtatctccactcaccacaacctccgcctcctgggttcaagggattctcctgtcttagcctcctgagtagctgtgattacaggcatgcgccaccatgcctggctaatttcatattttttagtagagacaggatttctccatgttggtcaggctggtcttgaactcctgacctcaggtgatctgcccacctcggcctcctaaagtgctgggattacaggcatgagccactgcacctggccggttattctctctttacagatagctatagacatcattttaggaagtgttgcagtctggcatttgtgctattgttcattctctgtgaaggctgttcatagttgctatagcctgtgtttagttttgtgatttcatcaatcccatctttctgtgtgagtaatgcattctaaacatcctaccccactttagaaacggacgtggggaacgcttggtcatttaagccaacaataaatttaggtgaatgtccctaagtgtttactgtttttatccagtcaaggatttgcttttccttgaacatttgttttaaattctggggccaaaatgcaaaggagaagttctattcaaaggcagtagttgaaatctattattttagttagcctacttggcatttactacatcggtcacttctccaggctgccctaaattaggttgatggagtgagacatgccaaacatccacctttgggaccatagcatagttaaaattaaatgtagttggaatagctagcattgcagctacagtagggaactgtagtctagttccctacagaaaacccaaggagtgaagggacaggattttgcctaggcaaaaatctaagactcgtgccctcctggtacatggggttttaagactgaatgtgtaataggagcactgcctttgccaaatcaaatgagtgacaggttaactagaaaatgtgacaatcacatttcctcttagctcaaataattctgtttttccaaagctttagcagcttaattaaatctgttggactgggggaggagagagctgttctctagtggttaacatggtattctttaagaagaaaaaacaaagccaaagaaaactcattatctggcatgttcgccttaaagatggtactgggtagaatctggagttttcatctcttttcaaagctgcatatctctcatatttggtattggcctctaagtctaatattgcagttggaattcttgctgtattattttttaagcaagtgttaggtgcatttaactgctttcttcatccatgacgacattcccaccatgggggtcttgacaaagcagagtaaaaatatgctgtttacattgtttacttacaagtaaggagcctgaaataacctgtagtttcgaatgcaggccctgatttactggcgttgtcagtttcaattatgaaactgaagtttggtgcctcctctttatcatgttttttcccttgtagcagttgtgtttaatgtcattaaaaagaaataaaagttctttgtcagtga

SEQ ID NO: 20493 - DNA, 4008 bp, Homo sapiens
agacgctctgtactagaaaagaatcttataaaagtaactgttgcaccatttaatccaacagtttgtgatgctctgcttgataaggacgagactgattcgtccaaagatactgaaaaactctcttcccttggagaagagatgagagaagatggtcttagcccaaatgaaagcaaactttgtactgaatctgaagggatcagccccaataactctgcctggaatgggccccagctctcttcttcaaacaataactttcaacagactgtctctgataaaaatatgcctgacagtgagaaccctacgtctgtattctctcggatctcagaccattcagagactcctaatatggagttatcctgcagaaatggtggttcacacaagtcaagttgtgaaatgagatctctggttgtttccacctcatcaaacaaacaggatgttcttaacaaggattctgggaagatgaaaggccatgagagaagactaggcaaagtcattcctgttctacaaactaagaccaggactaatgttccgacgttttcacagtcaaatctagaacagcagaagcagctttatctcaggagtctcattgctcatatagaagacccagaggacactaaccaaggatgaatccctagaagtggaattgctgggtatctcgggggagctttgtgccttgatggatcaagttcatcatatgcagcactcaaaatggcagcatccttcggacctcaccacgcgaaactacgcccgccgacagaaacatctgcaaagatacagtctgactcagtgggttgacaggaacatgcgaagccaccatcggttccagcgtctcccagacttctcgtacagttaatttgtgtcatcccatcagcaatgaaggtccctatccagggtcttgcttggagcagcatttcatgttcttttgctgttttgtgctttgccgattttggattttatttttcacaaaatttttatttaaaaaactcgtcaccttttggaaatgcccattgccgacttgaatttttttgtatgaagtccctcctgattttgtgtgtgtgtgtctgtgtttaagcaagcgttcggttggtatagtttttttttgtttttttaatttaaattgaaggtagctgcctcctgaaagccagcattaagccagaacacccaggttcaagcaaaagacccacctctctgcagaggcaaagtctactttctggtacctcaaagaaatcattgttcaatcttccataaggaagagattctttaccaggctgtgagccagtgttagataacttgtgaatggatataagttacttttaacaacccctcttacttttttatttgaatcctctgaatacctgtcagtattttaaagttggcaatccaggacattataagtaggatggagcaggagaagaatcctattgaaaggacaaattaaaatagtaaatcctctcctctcccttctgtaggtactagctgccttgatttttttttgtgggtgggggggattttttcattccttattgaacttattttgcacaatagtgtttacaaatcttatacatcttactttgacagaagacttataataccttgtggtcttgagactggttgtctcctttgcctttcttcaaggattttcctttttctttttaccccccagtgaccactctgctctttaggattctagtggcagtattcttgtaacctgttagacgtggatatacctcttcaggatggcctccttgctgtctttattgaagagctgcccacccagagtcttgactctagggcaggctagtgctattgtggtgtcagttgatatttagtttcatttgctgaaccccaaatttgagtgttagttagggagcctccattctgtgggagagtgtggaaaggcactcttttttctccatattagttaacaagaggtgtctttaggccctggatgttaccatctcatttggtcaagcccctgatacctagtttcacatggatgctaacgtggatgtaatatagttgtgacagcctatgcacaaaagcattacctgatcttaaggtttggtattctaaccaaagttgacagactgtgcgtctgtcttaatggatgtcttaggagttggttattctctctttttttttgagacggagtttcgctgttgttgcccaggctggagtgcaatggcgtatctccactcaccacaacctccgcctcctgggttcaagggattctcctgtcttagcctcctgagtagctgtgattacaggcatgcgccaccatgcctggctaatttcatattttttagtagagacaggatttctccatgttggtcaggctggtcttgaactcctgacctcaggtgatctgcccacctcggcctcctaaagtgctgggattacaggcatgagccactgcacctggccggttattctctctttacagatagctatagacatcattttaggaagtgttgcagtctggcatttgtgctattgttcattctctgtgaaggctgttcatagttgctatagcctgtgtttagttttgtgatttcatcaatcccatctttctgtgtgagtaatgcattctaaacatcctaccccactttagaaacggacgtggggaacgcttggtcatttaagccaacaataaatttaggtgaatgtccctaagtgtttactgtttttatccagtcaaggatttgcttttccttgaacatttgttttaaattctggggccaaaatgcaaaggagaagttctattcaaaggcagtagttgaaatctattattttagttagcctacttggcatttactacatcggtcacttctccaggctgccctaaattaggttgatggagtgagacatgccaaacatccacctttgggaccatagcatagttaaaattaaatgtagttggaatagctagcattgcagctacagtagggaactgtagtctagttccctacagaaaacccaaggagtgaagggacaggattttgcctaggcaaaaatctaagactcgtgccctcctggtacatggggttttaagactgaatgtgtaataggagcactgcctttgccaaatcaaatgagtgacaggttaactagaaaatgtgacaatcacatttcctcttagctcaaataattctgtttttccaaagctttagcagcttaattaaatctgttggactgggggaggagagagctgttctctagtggttaacatggtattctttaagaagaaaaaacaaagccaaagaaaactcattatctggcatgttcgccttaaagatggtactgggtagaatctggagttttcatctcttttcaaagctgcatatctctcatatttggtattggcctctaagtctaatattgcagttggaattcttgctgtattattttttaagcaagtgttaggtgcatttaactgctttcttcatccatgacgacattcccaccatgggggtcttgacaaagcagagtaaaaatatgctgtttacattgtttacttacaagtaaggagcctgaaataacctgtagtttcgaatgcaggccctgatttactggcgttgtcagtttcaattatgaaactgaagtttggtgcctcctctttatcatgttttttcccttgtagcagttgtgtttaatgtcattaaaaagaaataaaagttctttgtcagtgaaaaaaaaaaaaaacaaaagaaaaagacagaaagaagaaaaagacagacaacaaaaacaagaaagacacaaacaacaaaggagaggacgaagaaaaaaaacataaacgggagaacaacaagggagaaacaagagaaaagaaaaaggcgagaacgagaagcaaagaaacaaagaagcaacaacagcgaagcacagggaagagaaaagaccagacgagatcagaggaagacagaagacaaaacaaagaaacaaagaagaacaggacagaaaagagagaaggaagacgaaagacgaagaaaaaacagaagacaaaaagacgca

SEQ ID NO: 20494 - DNA, 450 bp, Homo sapiens
actcactcactatcatgagaacagcatggggtaggggtaaaccacccccacgatccaatcacctcccaccaggttcctccccaacccctggggcttccaattcaagataagatttgggtggggacacagagcctaatcatataataggggcatgtcttatatttacatgtgcatgtgtgtgaatacagaggaagatgccagtgtggacacagacccagtggatagctgagatgatctttggagacaggagtagggttgtgacaactaagaaaaactttcactttttactgcaaatacttctaattgtttatttcatatatatactgtttatttataaatagataaaatatttattttatataaacagactgtaataatttacttgattgccaaagaaaatccatgtaacatttatgtaacaaaataaactgaaaaatttaatgatttatc

SEQ ID NO: 20495 - DNA, 452 bp, Homo sapiens
ctcctatctgtgagactctgattctgtggtgctgggatggagcccagaaatttatattttcagaaagtatcccaggtaattcttaacttacagaagtttaggaaacagccatatggaacataataaacttttgatgatttttctgaaaatgactatttttttttttttttttgcctttctctggtacaagtctaatagtgcagtttactcacctactggctgtgagaggcccctgttttccccgccttggctcactgggcctgtccatccagggaaaatggaccacaaataaggacagtctcccgcagaagtcccccttaaatttagcctgattcctgatggccccagggcagcatggctctccatgagaccccaccaggctgctggtcccaccggaagcccaggctgcaggcctggcccatttcatgcaggtctgccagccgctgtgtgcc

SEQ ID NO: 20496 - DNA, 372 bp, Homo sapiens
gtttggtgccaggtttctgatggagaatttgaagatacgtgtttacatttctataaagtaaatttgactgtctgagtcacatatatcttggtcataattcacaattattaggaaatttgaaaataatttttttaacaaaagcaaatttgagaaagtctatttttaaagttgctaaaataaggggctcagtatatttttagtaattggaagactggttgattgagaaatacaaatttttcagtaaaaatgtattttctttccaaataaaataaaaatttatgaaatataatttctaaaaatttgacaattaagtataaatattctaactgggtattggcttataattaataaatgtaatttaaatatgtttta

SEQ ID NO: 20497 - DNA, 554 bp, Homo sapiens
gtgcctacctcacagtaatctaacctaattaactcgaaattaatacaagaaaaactgcttagaaccagaagcactcggacgttagctgctattgttgttttggaaagacaataattgtggagagcaattatttttgctgaatgccagacatggcagttggcatttttatgtgctttattcctcacaaagtttttccaaataagtactgttattcccattttcagttacagctaatagattgtgatatatgttataggttacccatgagattacacaggtagtagattacattcagtagcctcaatatgagaaatctaaagaaatattttagaaagagttttgttttagtacttttttttttttttgagatgaaacgctgtctctactaaaaatataaaaaattagccgggtgcagtggcgtgcacctgtaatcccagctactctggaggctgaggcaggagaatcacctgaacctgggaggtggaggtttcagtgagctgagatcctgccactgcactccagtctgggcgcaagaccaagacttaaacgcaaaa

SEQ ID NO: 20498 - DNA, 357 bp, Homo sapiens
  misc_feature (6)..(6): n is a, c, g, or t
  misc_feature (29)..(29): n is a, c, g, or t
  misc_feature (34)..(34): n is a, c, g, or t
  misc_feature (38)..(38): n is a, c, g, or t
  misc_feature (41)..(41): n is a, c, g, or t
  misc_feature (43)..(43): n is a, c, g, or t
gaggcngcctactactactaaattagcgnccgtncganttnantctaacccaatattgtagtagttttgtttccttttattgatattgagaattttagagagaaaaagggcattagaatcatggtgtctggctggacacagtggctcacgcctgtaatcccaacactttgggaggccgaggcaggtggatcacttgagcccaggagttcaagaccagcctgggcaacatggcaaagccctgtctctacgaaaaatgcggaatttagctggacatggcggcacacacctatagcccccactacttgggaggctgtggtgggaggatcacttgagcctgggaggttgaggctgcattga

SEQ ID NO: 20499 - DNA, 159 bp, Homo sapiens
gcggagctcgcagtgagctgatatcgcgccactgcactccagcctgggcgacaaagcgagactccgtctcaaaaacaaaaacaaaaaatctagcaatattattggtataatgcaaactctctttatgtgcaaataatgtgattatgctcttagaaaagc

SEQ ID NO: 20500 - DNA, 343 bp, Homo sapiens
atgtttgttcagatgcttttgttaaggcttctgttctatacacttctttctgtgttcttttttcaaaaatgggaaaagggtccagtgtccttatatgtatatcctaagtaaagccctcacacacctctgattcaaataggagttatttaattagagggagcatattttgttttctggcaactaagttaatgttgatattctaatacaattttctttgttataaatatggaactctctatttaacttgtcaatagattctttgataaatttgatgtcagtcttctctggtttctaggtgatgcatctttgtctacaacaagagacattctgattagtaagaatt

SEQ ID NO: 20501 - DNA, 358 bp, Homo sapiens
tgcatctttcatgatcctgtgggaagctttctcctttctttagcttccttaactcactggctcctctttctctttcctgccctgaaacacagtccttaccccccattcttcttctttattcatttgcacagttttaatcattgtttctaaattagcaatttctaaaacaggctcatatttataattttctataggactataataatttaactcatcagaaactgaaaatagtttcaatcaagttttcttcctactccttccctgtcagttacatctttcttccctcagttctccagatttatactttgcagtctttcttcagccaactctaatcagccatcaaatcctgtcaattact

SEQ ID NO: 20502 - DNA, 269 bp, Homo sapiens
attactgggcaccttgctatgtgctacctcaaacgagtcgattcgccaaatactccaggaccccgtcatgtgaactggccgatagcaaaacacatccctgaatgtagtggagctgtttgatgtgagaccactttcagacatggaaatgccacaaggaggagagaagggtcctgtcctcataaagcttgattctaggcctttcactattcaaacaaggaagagttacttcctacccctccaagggtcaaatgagacctgcacctggggtg

SEQ ID NO: 20503 - DNA, 666 bp, Homo sapiens
ctacagcctgcagaacgcgcagggcctgggcatggggaagcacggatgaggagcctgctgctgatgctgagcaggagccgtggaggggtctacaccactctgctgactctgcgtgatgaggattcaaaatgccattcacgcaaaacaaatttagcaactaagaagtagagcggcgcgctgctttagaagcactatgtgttagcaggtgtggtacacacctgactttgcttctgtggctgaggaaggggaatgagtcttctgtgcgtaaatctttccacaagcaccatcctgggtgtcctgcctgaccagacttgtgagccagggccaggttgaagcatgtgcccaggtgaaaattatgcattatttattcatgtgagcaactctgcgcctattttgaaacattcactgctttgttttgtttgttttgtctaattgcatgaaagatgtggtaggcagaataatgccccccaacaaaaggtgtccacttcttaatccctgggaacctgtgaatatgttaccttactagcaaaagggactttacagatatgactaaggctaaggaccttgagttgcaggaaattatcctggggaccatccagggcaggcctggagacatgagtcctctaaaaacagagactctttcccagctgtgctcagaaccagagg

SEQ ID NO: 20504 - DNA, 1100 bp, Homo sapiens
ctggaaaacctgaatttagaaaatatgatagtgactctgacagatgtttattttccaaaatggattatttctttaggatgtgatatcctgtgattttattccctaggatattttcatgatattgatagtcattttgaaaatagaggataatgcttgaacttgaacaaggtaggaagcaggaaggtatgtctgtctccttctttcaaaacaatcttccatttaaatatttgttctgtaaatgaaaattcaataaaaccttaacagtttggaattcttccaggaaaaaacaggctaaatataatggaaagtctgaataaattaatattgagaaagaactatagtttgcttttaaataattcagatgtttgtgtgcaaagtgtttctaagttgacatactcagttcccgttaaaataaaattctgaattcgtcatagctgagatatttgcttagtggtaatgttttaattttaagaatttgtttaatttttttaaaatacatttcaactaagcatgcccctgaaaactttttcatatagtattctgaagatttccatttaaaatatgggggaaatgaatttcaacccattttataggagtgtcaattagttcctaaaaaattaatgaaggagtatgaaggagtactataaaaaaatagacactagacaaaattggagattaagagaggctgaagcataactgatttgcaggatattggttttgataatagaaggataaggatgatctatagttgataaatgaggctcattaagtaagagatgataaatgcagatattcctggctaatagaaaagtcagcatacaaattttgccataacaagtgagggatgggcaggctttgaccagcttgcagctcttccagtgacctctgtgaggccacggagctcttctgtggtctggatgcctgggccacagaggcagcgtggaccccatgggcctcaggccagcagaagggggagccagagtgggtctcagggagtctagagccacctagagcagagcttacaaggagctccacaatggtgcagaggccagggcaggactgcagctcctgcaagtgtaactttttattttttatgctaa

SEQ ID NO: 20505 - DNA, 587 bp, Homo sapiens
cagtagagctggggtccgagccaggtctctgactctgcagcctacccttgtcctgcttgaacacactgaggaagacaggaataacaggacatgggtcagaaggcttggcttctgctccagctttgaagttgaaggattaggtgacagctaacacttgatagtattttatggtttcaaagtgataaccatgtaatattttaattgattctcagcccattttgtagatgaggaaactgaggctcacagatctgatgacttcctaattgtggcaaactaccagctacacagtagctgggctggcttcgaaccaggtcttttgaccccagagtctgtgcagctcacaaataaagctgattctttgacaagttaagcctcttctcttggattcatttttccagtctgtgaaaatgagggattggattagattagtaggcaatcactagttcccaggcccttttatttaaagaaaaaaaggagaacccatagagtctggcaacttaaacttttgctaagtatgaacacttaaaaaaaaaaagaacattttgtcttcaaaaagctagggggatattatctcagtgtagtgggga

SEQ ID NO: 20506 - DNA, 302 bp, Homo sapiens
acaagatgcgcacggcctcagaggcctccaggaggaattgggctttgaccctgaggaaggtgggagccatggagggctgtgggtagaggaaggccctgactcaggtactcacagacatgctcagctgctgtggggagggcagactgtgggggatgactaggctggggctggactgggtagaggatgagggagaaaggcacattctaggcagacccaatagaattttctaaacggctcatttggggatgtacagaaaagaggggactcaaggatgacttctgggtttttggcctgagcaccct

SEQ ID NO: 20507 - DNA, 453 bp, Homo sapiens
gcaaaaacatattactttgaccacaattcacattccgtaggaggagacaggattagaacatttctattcttgcccaatgctgctaaatttaaagtcaatttaactgttcactgcagtcttccttcaaaagaccaaaagcaagcctcattttctggtggcaaaatgctctggaacatcatcatgagctgtgttgttgcgcaaaggaagatggcaggtcacaaaaaacagtcttaagctcacagccaaggctgctgctaaataccaccacttatgcctttattcttactctcatccatttatgtctgagtgtatgtatttagacaataatttcctaagcttgcattatactagaatatgaaggtgaatgaggcacagtcccagcccttgaaaggcaaacagacagtctaataaagacgggcacacacataaacaaatagagaaaattctccatca

SEQ ID NO: 20508 - DNA, 410 bp, Homo sapiens
attcaatggctttatgtcactgacaaattttcattttggacaacatgctagtgtgagtagtttctggtccagtgaaatccagttttcagatattcctatttttggattctcagctgtgtatttgaaatcatcacatttgaaatttgtttgttccagaacatatatgttctcattcttgtttgtacttgagtcatgtttaatcacatatatctgtagtatgcttagatgtagtagtttccattttcataactacttttctgttgatccattatggtgaattgcagctacaaagtcatactgtgtagtagcgaaaatgctaacataaggaggtaaatagtaggcaggcaaagggattttttaaaatatcccaaccctagtcatatatacccgtttagctcagtagttctcag

SEQ ID NO: 20509 - DNA, 447 bp, Homo sapiens
gtgaaggggccctgtcccacccatgttggcccccagcccacactgcccgtctgccagcgtgagcagcagcgcgaggcctaccagcaggtgagaaagggtatgcagacgagagggatcatcccaggaggctgcagagatgaaaataaagaatcaggcatcacagcgtaagaagtaatattgttacagtgcatgacacaagatctagaaacaagagagtcacagaaacctaacaaagatgagaactttagaatgtaaatgtaataaaagataggaaaatgagatgcaggataaggagataaaaggtgagaagccaacgagctgccaagcagaaggctggaaacacaaaagagcgaagattaagaacaagggtgaagctcatcgccacgaggtaattttttaagtagatgaaaccataggtcaaaaatgagaattaagggctagggagtt

SEQ ID NO: 20510 - DNA, 460 bp, Homo sapiens
taaaatcccaacacacaatgaacttcctattggtgtgctctggcctctgaaaagtaattgactcaatggtaattggcctttagtgacaatgtactttaatgatagtggcttatgtgacctgcaaatgttaaagtcccatgtcttgctgagttcctttgtgatagtgagtgatatagtttggttgtatccccacccaaaatatcatcttgaattgtaatccacataatccccataatcaccatttgtcaaggggaccagggtggaggtaattgggatcatggggggtggttcccccatggctgttctcgtgataatgatttttcatgaggatctgatgggttatataaatcatctgggtacttcacttccatcctgtcaccctgtggaaaaagggtgcctgctttctcctttgccttctgccatggattataagtataaacctctttcctttataaattac

SEQ ID NO: 20511 - DNA, 359 bp, Homo sapiens
aaagctctccttgatggtactgtgccacaaggattgagaatctcagattataaaactacctttccgtctattcaaatagttggtaatttgactattaaaaaccacttactctggccaggtgcagtggctcacacctgtgatccacccgccttggcctcccagattgctgggattacaggcatgagctaccgcacctggcaataaattgcttttgattttttttattttgctttttcctggagtatattaaagcagtctttgacatagtgtttcacacattaaaaagtcagcattttagcatatatctctgaaagataagtgctattccagtgacaatgccaatatcacacctaataaaa

SEQ ID NO: 20512 - DNA, 320 bp, Homo sapiens
gcacaatggctgttaaatagaaaagagaactgtaatttattttaagattcagggattttgtatttgcaaataggcagcaattatgaaatgaatactgtaattataaccactctggaaagatgaatgaggtggtaactagctgagatgtgttttctggttagaaaatatattatctcagttctgagcaaaatctgctgggcttcctgtccctgggtttttgggcgctgaatcagagagtgattaaaagcctgggaaagctccctctccccctgatttgctgagggagcaatgctgccctttctcagatgagcggggtgttc

SEQ ID NO: 20513 - DNA, 488 bp, Homo sapiens
cagcccagaggcacaggaccactaagcacacagttatgtgtaaaattatagaatgcctgactttccccatatcttagcatcacaccaacaggggttcagtataacgacagtgtattacaatggaaagaactgtaaaatgcagagtctctgaagaagagtcttaaggaagcccaaagtcaacaatgaagataaaaacaaggacactagagaaatttgagtcctgtggcacctacagttacagcaaacattcatacaacatgtctggggtttaaaaaattataaagcatgccagaagtcaagaaaaacacaatctgaagggggaaagtaagaatcagactcagaccttgatataacacagatgttggaattatcagacaggaaacttaagatgactatgattaacatgttaaaggtcctaatggaaagaataggcaacatacaaaaacagatgggtaatgtaatctgagagataaaaacaacaaaaataa

SEQ ID NO: 20514 - DNA, 268 bp, Homo sapiens
aggcggtggttgtggtgagctgagatcacactactgcactccagcctgggcgacagagcgagattctgcctaaaaaaaactaatactaaaatatttacttttatgtataactaaaataattcatccaaataacagccaaaatcagtctcaatttttcctaggtagcactgcattttggttcttaactgagtctttaagcatcaacctaagtggttggaattggctacatctatagagggtttatcaactgcctgccaaggagcttcca

SEQ ID NO: 20515 - DNA, 522 bp, Homo sapiens
aatgaaaactaagataagcttagaacaagtttaattagtttaaaatgaaaagctagatgggcctagaagaggaaatcatgctaatttgctaggtgtttgcataaagtcactaaatgtatttgcatatcagatgaacgaaaaattgctaaaagatacacattgtctgagtctgttcttcttaagcagatcatacaattaaaaattacatagaagaagatagaaaaagtagcttgtcttggctgggcgtggtgattcacgcctgtaatcccagcactttgggaggctgaggcagttggatcacgaggtcaggagatcgagaccatcctggctaacacacggtgaaaccccgtctctactaaaaatacaaaaaaattagccaggcgtggtggcgggcgcctgtagtcccagctacttgggaggctgaggcaggagaatggcatgaacctgggaggcagagcttgcagtgagccgagatttgccactgcactccagcctgggcaacagagcaagactccgtctgga

SEQ ID NO: 20516 - DNA, 431 bp, Homo sapiens
agaactcacagttctgaaataccaaattgaaaccttttagttgtttgcagatcattttgccatgttttctcagttcagcatgcacacaagctaatctttggaatttttacttggaaattttccggcctgttgggttctggtatgctttcctgaaaatgtgtttttgtgcttatgcttattgcagtaaactagaactattcatttcaagcatttgtaccattctttggtgggacttctatagacaaccccgtgttgactgaaattatttttagttctaagtataaaaaccttaaaagtagataatccatcacttttcatcttataaaactgaacagtacacccattaaaccctattctcccctccccccagcccctagcaaccacaattctactttctgcctctctgattttgactactctagatacttcat

SEQ ID NO: 20517 - DNA, 1004 bp, Homo sapiens
cccgccgggtcaggttctctgctctggacttgggaggctccgttgcctgctcccggagggagacgcgctgccgaggagaacccagcgggagaacatttcaggataggaataggccaagtgctgagaagatgagtcttaggattgatgtggatacaaactttcctgagtgtgttgtagatgcaggaaaagtcacccttgggactcagcagaggcaggagatggaccctcgcctgcgggagaaacagaatgaaatcatcctgcgagcagtatgtgctctgctgaattctggtgggggcataatcaaggctgagattgagaacaaaggctacaattatgaacgtcatggagtaggattggatgtgcctccaattttcagaagccatttagataagatgcagaaggaaaaccactttttgatttttgtgaaatcatggaacacagaggctggtgtgccacttgctaccttatgctccaatttgtaccacagagagagaacatccaccgatgtcatggattctcaggaagctctggcattcctcaaatgcaggactcagactccaacgaatattaatgtttccaattcattaggtccacaggcagctcagggtagtgtacaatatgaaggtaacataaatgtgtcagctgctgctttatttgatagaaagcggcttcagtatctggaaaaaactcaaccttcctgagtccacacatgttgaatttgtaatgttctcgacgacgtgtcacactgtgttaaagacagacttccgaagtgtgtttctgcatttgcaaatactgaaggaggatatgtattttttggtgtgcatgatgagacttgtcaagtgattggatgtgaaaaaaaaaaagcttattacggcggtatcatgacttttgcatgggcgacagataacgacgccttacgccatctctcaaccgaaattattcaggcgcgttttctcgcctctggcctgaaatgccgttattacaatccggcaatccatacggca

SEQ ID NO: 20518 - DNA, 1003 bp, Homo sapiens
aagagtaggcatagtacgaggcccgcgtgttataggctccgttgcctgctcccggagggagacgcgctgccgaggagaacccagcgggagaacatttcaggataggaataggccaagtgctgagaagatgagtcttaggattgatgtggatacaaactttcctgagtgtgttgtagatgcaggaaaagtcacccttgggactcagcagaggcaggagatggaccctcgcctgcgggagaaacagaatgaaatcatcctgcgagcagtatgtgctctgctgaattctggtgggggcataatcaaggctgagattgagaacaaaggctacaattatgaacgtcatggagtaggattggatgtgcctccaattttcagaagccatttagataagatgcagaaggaaaaccactttttgatttttgtgaaatcatggaacacagaggctggtgtgccacttgctaccttatgctccaatttgtaccacagagagagaacatccaccgatgtcatggattctcaggaagctctggcattcctcaaatgcaggactcagactccaacgaatattaatgtttccaattcattaggtccacaggcagctcagggtagtgtacaatatgaaggtaacataaatgtgtcagctgctgctttatttgatagaaagcggcttcagtatctggaaaaaactcaaccttcctgagtccacacatgttgaatttgtaatgttctcgacgacgtgtcacactgtgttaaagacagacttccgaagtgtgtttctgcatttgcaaatactgaaggaggatatgtattttttggtgtgcatgatgagacttgtcaagtgattggatgtgaaaaaaaaaaagcttattacggcggtatcatgacttttgcatgggcgacagataacgacgccttacgccatctctcaaccgaaattattcaggcgcgttttctcgcctctggcctgaaatgccgttattacaatccggcaatccatacggca

SEQ ID NO: 20519 - DNA, 923 bp, Homo sapiens
aagagtaggcatagtacgaggcccgcgtgttataggctccgttgcctgctcccggagggagacgcgctgccgaggagaacccagcgggtaatgaatcccccgcgcttctttgcccaggccttccccaaacctccccccggtctgcgcgggttctcctattgggctgtggtgaagacaaggtgcggcgactgcagctccccaggtctgggcgctgccgggagagagtctttcccgctggggagatttagtttgttgactcaggagcacctccaacgacagctagtggcagaggacccgggagctgggaggttcggaacgcggggcgagctggggaggagggagaggcgccgacccagcgcagcctacatcttagcaaaccaaacctggcaacatttccccacggttcaggagcacgaaggacttaagggaaaacgacgaaatcggggctcccgaggatgaagttaaatgggttgtggcctggggacaaatagggccaatgtccagtctattacaagaggctttgttccagaggcttgcctataagcccctggcttggaacgtcagtcttcaaactgtaacaacaggggcaggctactagggtagcccacaaagccctgtatcccccatacagtgactaactagagccctagttggtcatatccgcagtggctgagactgcggtgtgattccgtttccctcttgcatgtgtcccgggagcccgagttgtcgaagcccaaattcaggctcaggaacctgatgtgctgttgatgccaaaacactgacacacagatgcttggagacagaggaagatttattccatttgggcaaagcgagaaggcaagaggtcaagatctctcaaatccaccctaacaaaaagaagtagtggggagtttttatgagaccaggaagtaagggagggggaa

SEQ ID NO: 20520 - DNA, 497 bp, Homo sapiens
tgcagtgcagggactctgtctgctgcctggcacagaatggttgcccaaacatacttcttgaggtaaacggaatggcagtcaatacaaaaactcaccctcactctgcacaccaccatagccactgctggctagcaggcaccctagccaggctaggagataacatggtggctggcagcagcttgggctttgaccggaccagtggttagtagcgtgggagagcatcctgagtctaggatggggcagggactggagcaaggcacctggattccagaaatttgggggtaaaccaaggcagacccaccgccccagtgcacttctgctttctatctccagtctcatggctccctggacccccaaaagttatgaaaactaaaccagagctgagaactgggctaggatggaattgcctgtcaacccgagggatgcaaagaggaaccaccgttgggtccattaagaaatccacaaataaaataaaaataaatcagtgtgacacagac

SEQ ID NO: 20521 - DNA, 1139 bp, Homo sapiens
ggtgtgttggatgccacctgtgcccctccctggagatgcttttggccccacagcttcctccagccaatgtagcagtgactgggtctgtgcaggttttggtcaccttcactcaggtgtgatggggtggtgcctttctttggcctgccccaggtatcttttactttttgggatgtatttgatgctatagtatggaatgctgcagagacttccggcaccaaccccctggagttggactttatttcacaggttgagggcaccatcctccacaagaatccccaacttcagccaccagctggcaacaggtttgggggtcctcagcccaccctcacttctggccagatggctacaaatttggcgatttccactaccccctcaggtttgatcacttgtcagaatgattcacagaattcagggacatgctatgcttacaactacagttttattaattgatcaataaagcaaaaggatataaatgaaccagtcaaagggaaagacacatagatctgggaggacaccaaacgcaaagctttcattgttctctccccgtggagtcaggggctgttacctttccagcacatcgatgcgtgacaatgtatagagtattgccaaccagggacgtgctcctgagcttcagtatttgtcatttttattggggcttccttgcataggtacgattgattgaatcattggccatgtgactcaaactttagcaccctcatttccccagaggtgatcttgttagcatccactatctaggggcccactctgagtcaccttgttagcatcaacttagaggtgtgggcccgctatgataacaaagatactgctgatcgggcgcggtggctcacgcctgtaatcccagcactttgggaggccgaggcgggcggatcacaaggtcaggagatcgaaaccatcctggctaacatggtgaaaccttgtctctactgaaaatacaaaaaattagccgggtacggtagcgggcgcctgtagtcccagctgctcgggaggctgaggcaggagaatggtgcaaacccgagaggcggagcttgcagtgagccaagatcgcgccactgcactccagcctggcggacagagccagactccgtctcaaaaaaaaaaaaaaaaaaaaaaaaaaaaga

SEQ ID NO: 20522 - DNA, 4028 bp, Homo sapiens
cctactaaaaaaaatgcagagaagtattccggcattttggaaggtcctgtggaccgacccgtactcagcaactattcggacacaccatcaggactagtgaacggtcggaaaaatgaaagtgaaccctggcagccttccttgaattcagaagctgtttatcccatgaactgtgttccggatgttatcactgccagcaaagctggagtcagttcagccctccctccagcagatgtctctgcgagtataggaagctctcctggggtagccagcaacctgacagaacctagttattcaagtagtacctgtggaagccacactgtacccagtcttcatgcagggctcccatctcaggaatatgccccaggatacaacggatcatatttgcattctacttatagtagccagccagcacctgcacttccttcacctcatccgtctcctttgcatagctctgggctactacagcccccaccaccacctcctccgccaccagccttggtcccaggctacaatgggacttctaacctctccagttacagctatccgtctgctagctatcctcctcagactgctgtggggtctgggtacagccctgggggggcaccgcctccgccttcagcgtacctgccttcaggaattcctgctcccacccccctaccccccaccactgttcctggctacacctaccagggccatggtttgacacctattgcaccgtcggctctgacaaacagttcagcaagttctctcaaaaggaaagctttctacatggcagggcaaggagatatggactccagttatggaaattacagctatggccaacagagatctacacagagtcctatgtacagaatgcccgacaacagcatttcaaacacaaatcgggggaatggctttgacagaagtgctgaaacatcatccttagcatttaagccaacgaagcagctaatgtcctctgaacagcaaaggaaattcagcagccagtccagtagggctctgacccctccttcctacagtactgctaaaaattcattgggatcaagatccagtgaatcctttgggaagtacacatcgccagtaatgagtgagcatggggacgagcacaggcagctcctctctcacccaatgcaaggccctggactccgtgcagctacctcatccaaccactctgtggacgagcaactgaagaatactgacacgcacctcatcgacctggtaaccaatgagattatcacccaaggacctccagtggactggaatgacattgctggtctcgacctggtgaaggctgtcattaaagaggaggttttatggccagtgttgaggtcagacgcgttcagtggactgacggccttacctcggagcatccttttatttggacctcgggggacaggcaaaacattattgggcagatgcatcgctagtcagctgggggccacatttttcaaaattgccggttctggactagtcgccaagtggttaggagaagcagagaaaattatccatgcctcttttcttgtggccaggtgtcgccagccctcggtgatttttgttagtgacattgacatgcttctctcctctcaagtgaatgaggaacatagtccagtcagtcggatgagaaccgaatttctgatgcaactggacactgtactaacttcggctgaggaccaaatcgtagtaatttgtgccaccagtaaaccagaagaaatagatgaatcccttcggaggtacttcatgaaacgacttttaatcccacttcctgacagcacagcgaggcaccagataatagtacaactgctctcacagcacaattactgtctcaatgacaaggagtttgcactgctcgtccagcgcacagaaggcttttctggactagatgtggctcatttgtgtcaggaagcagtggtgggccccctccatgccatgccagccacagacctttcagccattatgcccagccagttgaggcccgttacatatcaagactttgaaaatgctttctgcaagattcagcctagcatatctcaaaaggagcttgatatgtatgttgaatggaacaaaatgtttggttgcagtcagtgataacttctttagaaaaaaaaaatgtaatgaatgttggcacacacacataaaacctgctacatagggaatagagcccctttccagtagagtttaaattgcaaagggtactggggaagatgacgattaagttgcatctttagagtcagggtagatttggaggaaaagtgcatcaaatgagagcttctgatttgaaagccccagatgacagaaagcatatgtggatgctcagttctgttcaagctagacaacactcaccaaggagcaaggtgcaagtgtgttgatttcagaaggacatgaacctcgtgtgttgattccattctgctgttctcgagatttagttgctgtcaagtgcctggagtggtgctttattttttgtttgcctcacaattacattggtggcatgtgctaatataaagagctttaacttcaaacattattggactaaagagatgaacagttgtgttatgacagaaaaccagatttttgccattttaagagcaacagtattcctcaatcctgtctgttctgcagtattaagctaagaacaggtaaaacagggtaacggtaatctggaccttaatttctgcagttcatttcttttaatgttcttgtctgcaaaaactcaggaaagtgattgtgatttgtacagtacctcaaaggaatgtgttgaaagcactatgtactgctgagagtaataggataggcttcaatgttactttatattaaaatgtatgtttacctcaacaattggaaaatagcaaggaaaattactttgaatgtatccagaaaaatactgaagtgtgatacaactgaatatttacagtttaaagtagaaatggaaggatttttttaagttcttttactaattatggggaattaaccagagcagaataattctttatgtcaataactgcaagagttcttagtacattgctccttgataattaagtgaaaatgttcttaaaaggtacactggttaattgaaagctacttattcagtttgtgttagtgtctagacctgtcagccacaagacctgtttaggaccctgaaagtcacagtacctaaaaactatgactgcctttttattgcataggtggtagtggtggtgatggtggtggtagtttgcaagttatctcttaaaactgctgggaatggtgtcattctattcactaatctagcttatagacttgccgtgctgtttgatagaatgcagaggatagcaaccaaaacaaatacacaaataaataaaaacaaaaaccaaccaacaaaccaacttacatacacatatatatatccacaaagaacctctccatctcctccccttctttttgactccactcttgtcagtgcaattttgcttctcattttgaaatctgggctgtagtgctcctgctttatttctacctcagttttgttacatttctcttggaaagtaaagtagaaaattggaagtggacacacacactgcaatgtagcttgccaaacatgttactttgttttcttccatctttcaccgtaaatctagtttccaaagacatcagcatttgtgcttacttccacctcagtctaccagccccacccctacccatggcataagtggcatttttcttaatttcctatttttctcctgctctctgtcaagttgttctttgtatcctttaatgctttatgtgcaacctttcattgatagtgggctgatgtttggcaatgcttctgaactgtcacagagcaggctgtagctttccacagccactgcccatgcataagcagaacagcctggccttttgaatgtattttcctgggtttttttccccttttctttttttagtttagagatgcagtaacaaaactgttgcaaagcactggcattttatgtattcaataaataagtgatgtacatttttaaaaaaatttaaataaatgcaatgagaagccccaagaaagg

SEQ ID NO: 20523 - DNA, 434 bp, Homo sapiens
gggggacagagtgagtctccatctaaaaaaaaaaatagcatgttatggaatacttggttcaacaaagttaaacaagtttctttccccctggccttctcagggcctctgctgtgctgatgtacaccgtgatgctccaaaaaagatctaaagcgaatcatatttctcaaaccctctcaccagcagtggttctttgggagctaggggtatagtccacagcagtggaagaatggggccccaggtttcccatggtagtcttccatcagctacaactacagacccctcagttcgtctctcacacacaagtgggtcctttgcttaatagtaggaccattatgctcccatccccctccacagctgcgagatacttagtatagcagaatcaggagcctgcagatctccataggggtgaatatgctgagggtcttgctcatcta

SEQ ID NO: 20524 - DNA, 210 bp, Homo sapiens
cacgtcagacaggacttttattagtatctattgacctgatagggttgtcatggggacaaaaatgcatgtaaagtgtgtcccatagagtttggcacacaagaagcacttacaaatctctatgattgggaagacatagaaaataaagtttttaaaaatgtttcaagagaatgactttcactgaaaatatagaattcttataaatagtaacat

SEQ ID NO: 20525 - DNA, 789 bp, Homo sapiens
gatagatagactgtctcagatagatagatcgatcgatcgatagactgtctcagatagatagatagatataaatagatagatagataaattcatacattgtacctgagaaaagtgtcacagaatgaccaatactgagacatactttagtaaaattgctggattttaaagacaggaaagtcctttgagcatccaagcaaaaaaggtaaagtcatttataaggaaaagaaaataagaatatcatcagacttttcaacagaattttttgtgccaaaggaaaaaatagcttaagatactcaatgatctaaggaaatgtcaaccaaggatttttatatccagccaaactgacttccagatacaaagactggcacaggaaactttaacaactttaacaagaattcagtgactttttcagtccttcctgagagatctcctggaaaatgaatttcaaatgaccaaaaaccactccccgccccaaaaaaaacaaaacagagaaacactgatataaggactggcagtgagcactaaacatgtatttatttttagatttaaattcaaatgagggctctaggggagaaaatatttcatgtgtaacgtctgtaagacatgtcagtataaatacaatgcatctgttttaaaaaatgaatggacagtgggggagaacatatgcaaaatatttagctgttttcagtaatcataaaagtgatgagtaatcccagcactttgggaggctgaggtaggcggatcacaaggtcaggagactgagaccatcctggccaacatggtgaaacc

SEQ ID NO: 20526 - DNA, 429 bp, Homo sapiens
gattaattttttttttttagaaatggagtctcgctctgtcgcccaggttggagtgcaatggtgcagtcttggctcactgcaacctctgcctcctgggttcaagcgattctcctgcctcagcctcttgagtagctgggactacagtagcctaccaccacacccggctaatttttgtatttttagtagagacggggtttcgccatgttggccaggctggtctcaaactcctgacctcatgatctgcccacctcgacctcccaaagtgctgggattacaggcgtgaccactgcgcccagccgtttagtgatgaatttaaggtagatcctttctctcctgatatgtggcgtcctccagaagaactcagctaattaggggcagtcaaagaagaatgatagttgggtccttctaaggtggattttgtcagaccag

SEQ ID NO: 20527 - DNA, 393 bp, Homo sapiens
gctactactactaaattaacaacccgtcgaccaacagcagacagctcttggtgctccacagtgctgtaggggcgctgtgacacatgccgaagagcctctctcttctggaccaaggtactcaggccaggcatgatggttcacacctacaatcaaaaggcaggcggattgcttgagcccagcagttcaagaccagcctgggcaacatagtgagatcccatctctacaataagtcaattaaaaaaaaaaaagccaagcatggtgatatgtgcctgtaagtccacctactcaggaggctgaggtgggaggattcccgaagcccaggaggtcgaggctgcagtgagctgtaatggtgccattgcacttcaacctgggcaacagggtaagaccctgtcc

SEQ ID NO: 20528 - DNA, 256 bp, Homo sapiens
aggcgggagaactgcttgaacctgggaggcagaggttgcagtgagccgagatggcgccattgcactccagcctgggtgacagagcgagactctgtctcaaaacaaaacaaaacaaaaacctaaactaaactcagtgttgagggtgacaagagttctgaaaggcagacttgtcatttaattcccacctccacctctctctcgctgtcctccccaaagctaggaacacccagacccggctgaggccctctcgtaccca

SEQ ID NO: 20529 - DNA, 328 bp, Homo sapiens
tcatttctgttcactacctaataaatgagtaacaagaattcctctgccccatctcacaataccaaataatgatgtttactaaaataataacaatttggcctaataaaagagcctccaccaaagccacttggtgatcactctgccacccaagtttctgccctggcattctgacaatagtggggatggtaatacacttagtcaaaacatatatggagccgggcgcggtggctcacgcctgtaatcccagcactttgggaggctgaggtgggtggatcacttgaggtcaggagttcgagaccagcctggcaaacatagtgaaaccccgtct

SEQ ID NO: 20530 - DNA, 343 bp, Homo sapiens
gtgaacactaagttttttttgtctcttctataattgcctttgccactattttagagtttttattgtacaaatcttttaccgtcttagttataagtattatttttgatgttatggcatatggaattttcttaatttttcccatatattttgttgtaagtgtatagaaatgcaatttattgttttgtacattgatatagtatcctgcaacattgctgaattagtttattagttttaaaagtttttttcctgtaatgatgagcacacgggactgtgtttacacactcattaatattctgttaacatatcacagtgcctaaaaatgtgctctgttgtatttctgcgg

SEQ ID NO: 20531 - DNA, 705 bp, Homo sapiens
atttcatctattctggttgatgtgtaatagtgtcatattagcattttttctttgcttttataaaataaatgtttttatgttggaatgttagatttacagaaaagttacaaagacagtacagagttccttatatacccttcatccagtttcccccttatgttaatatcttaatgttaacatggtaactttgtcaaaactaagaaaccaacactgactggcacattactattaactaaactccaggtcttattcagatttcaccagttcgtgtgtgtgtgtgtgtatgtgtgtagttgtgcactttaaccaccaccataatatacagaattgttccgttgccacaaaggaacccttgtactacccacttattgtcacaccttatcacccatcctttcaccaccttccctaacccctggaaatcactaatcttcactgtaattttgtcatttcaagaagttatgaatggcataatatatgtgatacaaacatagcatatgttaactttttgagaatgggtttcccctccacagtatgatgctcttgaattccatccaagttttattatatgtaccgatagtttttcgttttttaacagattgctgtggatgtaccagtttgtctgactgctcactcatctattgtaggacattgggttgtttctagttttgggctattaaaaataaagctgctatgaacatttgtgta

SEQ ID NO: 20532 - DNA, 233 bp, Homo sapiens
gagtctggcatagcttacctctactcagggtctctcacaagttagtcaatgctgaggtctcatccaaagactcacatggggcaggatctgcttccaaaatcacttatgtggttgttggtaggattcagctccttgtgaactgtagggttgagggcttcagctcctcactggctgctggatggaagcttccctcagtttgtgggcctctccaatatggcagctcacaacatgga

SEQ ID NO: 20533 - DNA, 397 bp, Homo sapiens
cttattgaaagtaataatacagttttattttttccactttataactgcccaagggtcccccaaccagctatatataagaaaaccataacatgaactagggtctttctattcaaaaaagaaatattaaactaacataagcaattctgaaggaagacagtggtaggttttcagatggtttgttaagaattatatgtaaaaggatactagatattatgttttggatgttttctaagtatctatgaaaattattttttcctaaacgatttcataattgattacttttgacctcagttattttggggcataatccttttactactctataaagaagttctacttctacctatatgaatttgtattttcccatatgccaaacacacacacataaattttcttt

SEQ ID NO: 20534 - DNA, 713 bp, Homo sapiens
atatatgctatatttattttgttgttaaacataccttaagtttactcagaattttcaatttgctatacaattatcaattagcatatgggaatatattactttaagatgacttgttttcttttgaaaatacatatgtgctgagggatatgatttatatccctcagaaattgacattgtaagttcttggataagttcttgcaccacagttgaatgaattttcaatggaaaatgtaatttaaagacttattttttcatctgttactcaggtttagaaatgtatgttttaagatctacttgccagtttctctttttgatccaaacatatgatctgcctcgataaataacaacatctggtaccaagaaaaagaaagaaagaaaaaagatgaagagtaaacctatggcactatgtaaagtgaacatactttgttgttacgaaatagaaataatagatcaggcatgtctggggagtattccctttgcataacaaacacaattagtaaacaggtatagcaacaaaaagaatttacataatggttaacagggatcaagaaagtgactttcctgaaagagttatttattcctgatgacattgatacctggtagtgttcgctgccaacctatcttaagggtaaagaattctgctggtgagtgtcatctgagcaaccatttaaaaatccgaatcattttagatttcttagtggggcaacaaggat

SEQ ID NO: 20535 - DNA, 396 bp, Homo sapiens
gcttttcttttgagtcaaggtatggctctgtggcccaggctggagtgcagtggcatgatctcggctcactgcaacctccacctcccgggctaaagccatcctcccacctcagcctccccaagtattaatagctgagactagaggcatgcaccaccgcacccggctaatttttgtattttttgtaaagacacagtttcaccatgttgcccagggtggtctcgaacttgtgagctcaagtgatttgcctgcctcagcctcccaaagtgttgggattacaggtgtgagccactgcgcccagcctgagaatttgtatttctgtcaggttcccaggcagtgctgatgtcgctggtcccaggaccaacactttgagaaccacgcctgagccctgccatgttc

SEQ ID NO: 20536 - DNA, 1031 bp, Homo sapiens
ctcgagctcctgatctcgtgatccacccaccttggtctcccaaagtgctgggattacaggtgtgagccaccgtgcccggcaatttttgtatttttagtagagacagggtttcaccatattggtcaggctggtttcaaactcacgacctcaggtgatccgcctgccttggcctcccaaagtggtaggattacaggcgtgagcacgggcacccagcccttaaatggcttttatgaggtaatgtgaaaggaaaatttgcctttgacctggaagtcaactttatagtaagctgaaattataaataactgatcatggaactattgcagatcacctttgagccaaaaatttggcctggattttggttatgcctactactatgtgcctctcatttgtatttatacctggaattggcattattaactccttttcactcctgcctagaaaacttaaagtgtcaccagacccaagggcggagtggtcctataaaacaaactcgtagcctgtctgaagactagctactagctccttggctgttttggcatattcatcttgattatagctcttggtctttcatcatattagggatgtttatgatgttattaaagaaaatcttgtcaaatgcagtctgttcctagttatctactatcagtcacctgttgtataattataacaatgtttggatttgtggattattattttagtatataacattggattttatgtatgttacctgaagaagagcaatatctgtaccacatatttctttgtttttcttttttgagatgaagtctcactctgttgcccaggctggagtgcagtggtgtgatcttgacacactgcaacctttgcctcccggattcaagtgattctcctgtctcagcctccctagtaactggaattacaggcgcctgccaccatgcctggctaatttttgtatttttagtagagatggggtttcaccatgttggccaacctggtcttgaactcctgacctcaggcgatccacccacctcagcctcccaaagtgctaggct

SEQ ID NO: 20537 - DNA, 414 bp, Homo sapiens
ggaagtccgagcaaggttgtggctgattccatttctcatgggggctgatttccttctccctgtgccctcatgtggcaaagaaagagtgagctggctctctggtgcctcttcttataaggacacgaatcctatcgtggggccccaccctcatgacctcacctaaacctaaacacccctaaaaggtcccaatccaaatgccatccccttggggattagagctctgacatatgaatttgggagagttgggaggggacacacaatttagtccatagcgaccccaacagcaagtttaggagatatgtttcaggtcaggagtattaagtagttttctcagtttaccgtaatgcttctgttatctgtagttctgcaatattttgctttcaacacacggcctgctgtcatccttcagatgta

SEQ ID NO: 20538 - DNA, 325 bp, Homo sapiens
gattcctaaagaaacagaatgctccagatcagtttcctgtatttttgtctatctaatctaagagtcacaggtactgtttcctgcatttaacagtgtcagacatgtagtgccaaacccaggaatcttgctggcgttaggtttttgatttcaaaattaaggaacagattctatggcttacatttgtataagaagtttagaatatctttatttttcttacattttctaatatgtaatcattgtgctggttcttgtctccttgaatgaatgcagggcaataaatctgtttcagatgttacaaacttgaaaacctgtagataatcctcta

SEQ ID NO: 20539 - DNA, 514 bp, Homo sapiens
tttgttatttttgttttgttttattgtcttttgtattttcttttagtttgtgtttatatagttttcttgaggtatcactgacatacagtaaattgtacaaatttaaattataccatctgaaagttttgacatatttatacaaaactgtgaaccactggcacaattaagaaaataaacgtatcaataatccaaaagtacattgtattaattcattatcctaaatatttgactgtttttttttctggtctaattttttaaatagtcatctccatctggattcttttccttcttcttgacttcattttatgctcagtgttttcacatacatttttagctgagcaaagttcctccatgaggcattccactcaaactcatttttccttgacagtgggtgggtcagtctcataaattacttcttttacgccagagcatctgaacatctgaacattgatctgagataactggtagattttagcattttgatttattttctaaagagagagtgcacagttaa

SEQ ID NO: 20540 - DNA, 364 bp, Homo sapiens
acctgtgatctggtaccatactccagcccgggcaacagaatgcaaccctgtctcaaaaaataaatagaaaataaaataaaataaaaataaaataaaataaaataaaaacaaagtttgttatgccacctaccagagaaacagaaaggctaaaagtaaaagaatgggaaataatactcaatgtaaacatataccaaaaggtagtataactatattaaaatcagcaagagcaaagaaaaagcattaccaagccaggcatggtggctcacacctctaatcccagcactctgggagaccgagacaggtagatcacttaggtcaggagttcaagaccagactggccaacatgatgaaaccctgtctccac

SEQ ID NO: 20541 - DNA, 162 bp, Homo sapiens
caggttgcatggagcgtggcatacaattggtgctacataaatgatagctgaacaattgtgctgccataaggcctcatacctccttctaatatagtatgtgaaggattgcactctagtaagttctgtactatctgtctttgcccctagaatgtgagcctggaa

SEQ ID NO: 20542 - DNA, 422 bp, Homo sapiens
aagatttattgtccccaacccagagacattgccccctttagaagaggtgtgcaccatgtgctctctcacttgcccaccctactctttgtccacttcattaatgtacgttacttgcctgtttcttacaagctatttgaggtttggttttgtttacgtgttccttaaaggacagtgggaacagactttgttagaaggagtcagcaatggcctggattggtggtgatctttctgaggaaatctttgtccaagtgaggcaagggattgactgtttcccaggaccctttcggtgtgatagaaatagcagctagttgataccccataggttgttttttttttttttttttttttttttttttttttttttttttttttttttttttttttttttttttttttttttttttttttttctattatatttt

SEQ ID NO: 20543 - DNA, 540 bp, Homo sapiens
aagatttattgtccccaacccagagacattgccccctttagaagaggtgtgcaccatgtgctctctcacttgcccaccctactctttgtccacttcattaatgtacgttacttgcctgtttcttacaagctatttgaggtttggttttgtttacgtgttccttaaaggacagtgggaacagactttgttagaaggagtcagcaatggcctggattggtggtgatctttctgaggaaatctttgtccaagtgaggcaagggattgactgtttcccaggaccctttcggtgtgatagaaatagcagctagttgataccccataggttgttttttttttttttttaaaaaagaaaagaaatagcagctagccttggtagatggcagaggaatggggctgggagagattaagtgtttatctggcctttctggaaggaatgaactttggtctggattcttggtatagtagtaaaaaattaagttagcagtgtctagtttagatccaatatttctatttgttttatcattaaaatatagaagttta

SEQ ID NO: 20544 - DNA, 550 bp, Homo sapiens
caaaaggaaacatccttagcagtgtgagtgtgcacagttcctcagctttaaagttttcttttgagaatgaatgctgcttaggtgactgtggagggcagttcatgaacgactctggatgctgtggctccagtttgtacgtacttctaaacccttgaaaatggttttttccttagaaataaaatttatgtaaaaagttatttctgaaattctattttttctctatgtatatatttacaggcaaaataaagtcaagtcacttctcacggagtcctgagctgcaccgtgctctccgcagggctctttgtctgagggccaccccccactccacaccaggggtgcctagactagggggaggcctgctctttggtcctgtgacttgttgcccatactggtgcttcctccatggagggtctgcaaagtcacgtgcaatggaaagttgccctgcagatgctatagccaccagtctccacctcttcatgggaaagagacttggggctatgcattgtcacttgatcttttgtgattaggtcacattcctgtgttatcactg

SEQ ID NO: 20545 - DNA, 378 bp, Homo sapiens
ttgcttgattgccaaggatggagtgcagtggcacgatcatagctcactgtaacctcaaactcctgggctcaagtgatcctcctgcctcagcctccctaatgaggctttacccttttaatcctgtcaccacaatcatttcttaatgcttcaaacatccatattaagaataatacacaggcagggatgcaggcaagtagaggagatagaagtcacagtgtttgagatccacagggtgatgatatgttgttctagaacttaattaggcagcgtgttcagcgatcctatggatctctctgctgcaatagtatttggtcagaacagacctggggattccctgcctccaaaaaataaaaagctaaaaagctaaatttaaaaata

SEQ ID NO: 20546 - DNA, 935 bp, Homo sapiens
gagatattctcattttcttagattgacataatcagcaattttgaacagtgtgtaaaatcaatgaacaaggtcctgccgcgatagatgccgtataggattccagttaatttctgaaagaaattgctaaatttaaccctacgtggcacagtgaatcgtacgaaggacactacaccatctgttccctgtaagtttagataaataaatgttttttatagtgtcacgaaagctaattttacaactgaatgagccttataaaacttgtaaacattgtataaacttatttcgaggaggtagaccagctacaaatgactgacaatacatgaacagattctggaggcttaaacaggtagataaagttgttctcaccaattattccccacacacttctggttgaattaggtaggcaccttgtttttgctagtgcactgcgagatccattctttgcctatatagaaacttacaggtatcttgggaattctgcttactcagttttcaaattcctgtgtttcttttggtcttgttgaaatcatactgttaggaatatattttataatagattaaattggcatgaataggttggcttaatttctgtgggacaaatgggttttggatttcaaatcatatatttaaaataatagccttttggatcataaccccagtttgaggattgcctttgttatagtgcctgcctcttctcacataattaatgttatgctatcagttattgtttcaattgtaaaaatctcctgtactaaattattttattccttgggtccagtgaggagatttttcctatttgtactgaagtcagctgacatttttaaaatcaaatttgtatttgtagaaatatcaggaacctaccttgggacagaaattccccaggaaatactctggtgcctgtaccagtttctcaagtggaaggagaagaaccgaag

SEQ ID NO: 20547 - DNA, 1709 bp, Homo sapiens
  misc_feature (1642)..(1642): n is a, c, g, or t
ggtgacactgccttacatgaactgagggaatcttaaattgtttttacgacagtgcaagttagtagaggccaataatccacaggcaatttctcagcaagacctggtacacatggctattcagattgcctgtggaatgagctacctggccagaagggaagtcatccacaaagacctggctgccaggaactgtgtgggcctttggagtgacgctgtgggaactcatgactctgggccagactccctacgtggacattgaccccttcgagatggccgcatacctgaaagatggttaccgaatagcccagccaatcaactgtcctgatgaattatttgctgtgatggcctgttgctgggccttagatccagaggagaggcccaagtttcagcagctggtacagtgcctaacagagtttcatgcagccctgggggcctacgtctgactcctctccaatcccacaccatcaggaagaaggtgcctgtcggggctcacttgaagcctgtcagggatgctttgtatctaacacaacgccaacagaagcacatttgtcttccagaacaccgtgccttagaaatgctttagaatctgaactttttaagacagacttaataatgtggcatattttctagatatcacttttattaggttgaactgaaagggtttttgtaaattttttggccaaaattttttaaaacatacttactttggactaggggtacattcttacaaaataaataaacagtttttaaaattgtttagacacagatatttggaattagctatcttagtgccaactgctttttatttttttacttcatcaaggtgatgtaagtgactcacctttaaagtttttttagtgttattttttatcactactctgggaaatggtttgtcttcaagatgcaatacttttcttagtaaaggaaaaacagcataaaaagatacctggtctgccttgtacaagaaaaggcaatattagaggaagaaaatttaaagaaaagctagaggaaaaaaaaattttttaaaaaatacttattagaagcaaactgcccttgcatggaaaactgtttatttttttcagtgaaaaggaattctgctttcgtgtttttgggaaagcaggaactgagttcattacatctttaatttggcagaaattagcctttctgtgaaccagatgtggtttggggcagatctgtagtaaacaatggtgattttatttatttttactctctggaaaaggagataatacaattccagaaagtgaactcatatttctaaggttaagattcccttttattgcacctagaatagtgctatgcacagagcgggtgcttgagttgttgtcgttttttgtttgttttttaaatgtaaactggtaaattttgtgcttatcttcaaggctggcttaagtataaaattgttttttaaacacttgaaaaattaaaggatttgttttatattatgacagtattgaaattatttttcataatgaatgattggttattgtgtctggtaagtctttgaacattcaacagccagacatttgtgttttatttcatgatgttccagtcaagttccaaagccctaacacagttaagctggctcagactccaggttctagtaaaaagttggaattaatgtttnaggaagtttaaaacccttgaacatttcttcaaaaccaccaagtaagggatatgtttgttttattctc

SEQ ID NO: 20548 - DNA, 1825 bp, Homo sapiens
  misc_feature (1758)..(1758): n is a, c, g, or t
ggtgacactgccttacatgaactgagggaatcttaaattgtttttacgacagtgcaagttagtagaggccaataatccacaggcaatttctcagcaagacctggtacacatggctattcagattgcctgtggaatgagctacctggccagaagggaagtcatccacaaagacctggctgccaggaactgtgtcattgatgacacacttcaagttaagatcacagacaatgccaatgaaaacaggccagttcgttggatggctcttgaaagtctggttaataacgagttctctagcgctagtgatgtgtgggcctttggagtgacgctgtgggaactcatgactctgggccagactccctacgtggacattgaccccttcgagatggccgcatacctgaaagatggttaccgaatagcccagccaatcaactgtcctgatgaattatttgctgtgatggcctgttgctgggccttagatccagaggagaggcccaagtttcagcagctggtacagtgcctaacagagtttcatgcagccctgggggcctacgtctgactcctctccaatcccacaccatcaggaagaaggtgcctgtcggggctcacttgaagcctgtcagggatgctttgtatctaacacaacgccaacagaagcacatttgtcttccagaacaccgtgccttagaaatgctttagaatctgaactttttaagacagacttaataatgtggcatattttctagatatcacttttattaggttgaactgaaagggtttttgtaaattttttggccaaaattttttaaaacatacttactttggactaggggtacattcttacaaaataaataaacagtttttaaaattgtttagacacagatatttggaattagctatcttagtgccaactgctttttatttttttacttcatcaaggtgatgtaagtgactcacctttaaagtttttttagtgttattttttatcactactctgggaaatggtttgtcttcaagatgcaatacttttcttagtaaaggaaaaacagcataaaaagatacctggtctgccttgtacaagaaaaggcaatattagaggaagaaaatttaaagaaaagctagaggaaaaaaaaattttttaaaaaatacttattagaagcaaactgcccttgcatggaaaactgtttatttttttcagtgaaaaggaattctgctttcgtgtttttgggaaagcaggaactgagttcattacatctttaatttggcagaaattagcctttctgtgaaccagatgtggtttggggcagatctgtagtaaacaatggtgattttatttatttttactctctggaaaaggagataatacaattccagaaagtgaactcatatttctaaggttaagattcccttttattgcacctagaatagtgctatgcacagagcgggtgcttgagttgttgtcgttttttgtttgttttttaaatgtaaactggtaaattttgtgcttatcttcaaggctggcttaagtataaaattgttttttaaacacttgaaaaattaaaggatttgttttatattatgacagtattgaaattatttttcataatgaatgattggttattgtgtctggtaagtctttgaacattcaacagccagacatttgtgttttatttcatgatgttccagtcaagttccaaagccctaacacagttaagctggctcagactccaggttctagtaaaaagttggaattaatgtttnaggaagtttaaaacccttgaacatttcttcaaaaccaccaagtaagggatatgtttgttttattctc

SEQ ID NO: 20549 - DNA, 1850 bp, Homo sapiens
  misc_feature (1783)..(1783): n is a, c, g, or t
ggtgacactgccttacatgaactgagggaatcttaaattgtttttacgacagtgcaagttagtagaggccaataatccacaggcaatttctcagcaagacctggtacacatggctattcagattgcctgtggaatgagctacctggccagaagggaagtcatccacaaagacctggctgccaggaactgtgtcattgatgacacacttcaagttaagatcacagacaatgcccatggactatcactgtctgggggacaatgaaaacaggccagttcgttggatggctcttgaaagtctggttaataacgagttctctagcgctagtgatgtgtgggcctttggagtgacgctgtgggaactcatgactctgggccagactccctacgtggacattgaccccttcgagatggccgcatacctgaaagatggttaccgaatagcccagccaatcaactgtcctgatgaattatttgctgtgatggcctgttgctgggccttagatccagaggagaggcccaagtttcagcagctggtacagtgcctaacagagtttcatgcagccctgggggcctacgtctgactcctctccaatcccacaccatcaggaagaaggtgcctgtcggggctcacttgaagcctgtcagggatgctttgtatctaacacaacgccaacagaagcacatttgtcttccagaacaccgtgccttagaaatgctttagaatctgaactttttaagacagacttaataatgtggcatattttctagatatcacttttattaggttgaactgaaagggtttttgtaaattttttggccaaaattttttaaaacatacttactttggactaggggtacattcttacaaaataaataaacagtttttaaaattgtttagacacagatatttggaattagctatcttagtgccaactgctttttatttttttacttcatcaaggtgatgtaagtgactcacctttaaagtttttttagtgttattttttatcactactctgggaaatggtttgtcttcaagatgcaatacttttcttagtaaaggaaaaacagcataaaaagatacctggtctgccttgtacaagaaaaggcaatattagaggaagaaaatttaaagaaaagctagaggaaaaaaaaattttttaaaaaatacttattagaagcaaactgcccttgcatggaaaactgtttatttttttcagtgaaaaggaattctgctttcgtgtttttgggaaagcaggaactgagttcattacatctttaatttggcagaaattagcctttctgtgaaccagatgtggtttggggcagatctgtagtaaacaatggtgattttatttatttttactctctggaaaaggagataatacaattccagaaagtgaactcatatttctaaggttaagattcccttttattgcacctagaatagtgctatgcacagagcgggtgcttgagttgttgtcgttttttgtttgttttttaaatgtaaactggtaaattttgtgcttatcttcaaggctggcttaagtataaaattgttttttaaacacttgaaaaattaaaggatttgttttatattatgacagtattgaaattatttttcataatgaatgattggttattgtgtctggtaagtctttgaacattcaacagccagacatttgtgttttatttcatgatgttccagtcaagttccaaagccctaacacagttaagctggctcagactccaggttctagtaaaaagttggaattaatgtttnaggaagtttaaaacccttgaacatttcttcaaaaccaccaagtaagggatatgtttgttttattctc

SEQ ID NO: 20550 - DNA, 1459 bp, Homo sapiens
ggtgacactgccttacatgaactgagggaatcttaaattgtttttacgacagtgcaagttagtagaggccaataatccacaggcaatttctcagcaagacctggtacacatggctattcagattgcctgtggaatgagctacctggccagaagggaagtcatccacaaagacctggctgccaggaactgtgtgggcctttggagtgacgctgtgggaactcatgactctgggccagactccctacgtggacattgaccccttcgagatggccgcatacctgaaagatggttaccgaatagcccagccaatcaactgtcctgatgaattatttgctgtgatggcctgttgctgggccttagatccagaggagaggcccaagtttcagcagctggtacagtgcctaacagagtttcatgcagccctgggggcctacgtctgactcctctccaatcccacaccatcaggaagaaggtgcctgtcggggctcacttgaagcctgtcagggatgctttgtatctaacacaacgccaacagaagcacatttgtcttccagaacaccgtgccttagaaatgctttagaatctgaactttttaagacagacttaataatgtggcatattttctagatatcacttttattaggttgaactgaaagggtttttgtaaattttttggccaaaattttttaaaacatacttactttggactaggggtacattcttacaaaataaataaacagtttttaaaattgtttagacacagatatttggaattagctatcttagtgccaactgctttttatttttttacttcatcaaggtgatgtaagtgactcacctttaaagtttttttagtgttattttttatcactactctgggaaatggtttgtcttcaagatgcaatacttttcttagtaaaggaaaaacagcataaaaagatacctggtctgccttgtacaagaaaaggcaatattagaggaagaaaatttaaagaaaagctagaggaaaaaaaaattttttaaaaaatacttattagaagcaaactgcccttgcatggaaaactgtttatttttttcagtgaaaaggaattctgctttcgtgtttttgggaaagcaggaactgagttcattacatctttaatttggcagaaattagcctttctgtgaaccagatgtggtttggggcagatctgtagtaaacaatggtgattttatttatttttactctctggaaaaggagataatacaattccagaaagtgaactcatatttctaaggttaagattcccttttattgcacctagaatagtgctatgcacagagcgggtgcttgagttgttgtcgttttttgtttgttttttaaatgtaaactggtaaattttgtgcttatcttcaaggctggcttaagtataaaattgttttttaaacacttgaaaaattaaaggatttgttttatatt

SEQ ID NO: 20551 - DNA, 2380 bp, Homo sapiens
gatattgatggcaggtctaggcttcattgttaggtagaagattgaatacttctcactttatacaaatttacattggctattgctcccatgtgttagctagtcttaacatgtttgttatttcgttatcttattagctgacatacggagtggtattattagtgtcgtactccttagcgtgagcatgacaattaagttaccttactaacagtgatgagtaaaccatactctgatctaaacccattgttaccaatgatgtgattatgaagttagctgaatctatggtctacatttgaagaaatagttcagaattctctactacattgtaagttacttgctaatagagattgggcattattatgtactactccccttctcacatcctacccaaagtacacaaggccgtagtaaaatactgttgctactaaaaactaaacatactgtggttgctaatgtcctttacatcttcagcctatagggaatggtacaggcagaaacaagcaccattaagtatattatcatcagtagtgagatctgtatgattaggatatctttgcttaagcccccaaaggaaaaattctctagcattaaaaacatggctggaacatagctaagcagttaacctaattagtagacttattgttaacgttcagtcctaaaaatgaaaagcttcagttgggagtagaaaatatactatgctggtatatagagcaacaaataccctgatgagataaaatgaagtagaaacttaccatttgacattatttgactttcatacatgctactgaaaagtctaggtttagctaagaagcataaataatggcagtacttgtagaggaaagaacataccagctaaaacaagaactgtaatgaatataatggaaagtgtttggagcttgaatacttggcttcaaaaatctggctttgccttttactgttaaaaaaatatctgagaatttatctcaggctgtaaaacagagaagtcataccaatttcaagaataaaatatgatataaagaattgttgaagccaaaatatccagaaataaacagaatggaaggtatcattgctataattatcttttcagaataaaaaatagagtattctttatcctttctgttgtctcacatgacaagcatgggatggtgaggaaatggcatattgcctatgttcgccgccccacccccttagttccaccaccccttcaccgtcacccccagttcactagtgtatcagaatgcatcttcagaattacacactgaagatacaaaaggtccagttggtaagctcatcagtaaataacaaggctttgaaatctgacaaattagctatttttgtaggaagataatagaacagcaagatggaagacaagtgatgagtatcatctgttttgaggttgacaaggtgtgacataaccctgttaatagacacaagtaaaagaaaatcatactaggattggatattagtgagcgagcaccgaccagtagaaacaacaacagcataaatctgttatttaagtatcccaataatgaggttaaaaaaaaaaaaaaacagaacaaagcatgaaaagaccacaattagtgctggctatgcttagagaggagcagtctcttggtaaactcaggcagtgatgatgaacagaaaatggccgactgatactgtaatagaggcatagaactaaggacactccgtgagctggcataaatacaggggagtctttaagactgaaaaaagttcatgggtatgacacttaatatgactcaacattactgcagaattttaaagcaaacatgaaagcttgagaataaacactagtccctctacttcaagaaaaagcagaacctgtactagaacatgaagaacttagagatcaaaagacagccagaactatgatgaaatattttgaaagcagtgggcacatttttaaagattttttttggagaactttatgaggctgtatgtataattcctatatgtaattttataggaattcttaactgaaagtagttatcaactgctacttatcaggagcagtgttattagggattttaagttaggcatgtagaaaactttctgacaaaagggctattgaactccagccagttcccagtgaatctccaggaggcaccttagaagtcttcacaagctgaataccatgtctttagggtgtccaaatgcttctgtcttgggggagagatgagagatgactgggtgcctttccactcagaacacagtagaccactcactatttatgaccaagcctcacttcttttctattacagttacagattcttttttagtctggaagttagggtaaataaaatttgtatgtttgatttttctcttaggaatgttttctcatcttaactcttatgttatcttt

SEQ ID NO: 20552 - DNA, 1507 bp, Homo sapiens
gatattgatggcaggtctaggcttcattgttaggtagaagattgaatacttctcactttatacaaatttacattggctattgctcccatgtgttagctagtcttaacatgtttgttatttcgttatcttattagctgacatacggagtggtattattagtgtcgtactccttagcgtgagcatgacaattaagttaccttactaacagtgatgagtaaaccatactctgatctaaacccattgttaccaatgatgtgattatgaagttagctgaatctatggtctacatttgaagaaatagttcagaattctctactacattgtaagttacttgctaatagagattgggcattattatgtactactccccttctcacatcctacccaaagtacacaaggccgtagtaaaatactgttgctactaaaaactaaacatactgtggttgctaatgtcctttacatcttcagcctatagggaatggtacaggcagaaacaagcaccattaagtatattatcatcagtagtgagatctgtatgattaggatatctttgcttaagcccccaaaggaaaaattctctagcattaaaaacatggctggaacatagctaagcagttaacctaattagtagacttattgttaacgttcagtcctaaaaataaaaaaaaaaaaaaacagaacaaagcatgaaaagaccacaattagtgctggctatgcttagagaggagcagtctcttggtaaactcaggcagtgatgatgaacagaaaatggccgactgatactgtaatagaggcatagaactaaggacactccgtgagctggcataaatacaggggagtctttaagactgaaaaaagttcatgggtatgacacttaatatgactcaacattactgcagaattttaaagcaaacatgaaagcttgagaataaacactagtccctctacttcaagaaaaagcagaacctgtactagaacatgaagaacttagagatcaaaagacagccagaactatgatgaaatattttgaaagcagtgggcacatttttaaagattttttttggagaactttatgaggctgtatgtataattcctatatgtaattttataggaattcttaactgaaagtagttatcaactgctacttatcaggagcagtgttattagggattttaagttaggcatgtagaaaactttctgacaaaagggctattgaactccagccagttcccagtgaatctccaggaggcaccttagaagtcttcacaagctgaataccatgtctttagggtgtccaaatgcttctgtcttgggggagagatgagagatgactgggtgcctttccactcagaacacagtagaccactcactatttatgaccaagcctcacttcttttctattacagttacagattcttttttagtctggaagttagggtaaataaaatttgtatgtttgatttttctcttaggaatgttttctcatcttaactcttatgttatcttt

SEQ ID NO: 20553 - DNA, 1230 bp, Homo sapiens
ctgacaaaatgatgcgtgccagaaaacggggagtatttgatgaccaccccttcaccgtcacccccagttcactagtgtatcagaatgcatcttcagaattacacactgaagatacaaaaggtccagttggtaagctcatcagtaaataacaaggctttgaaatctgacaaattagctatttttgtaggaagataatagaacagcaagatggaagacaagtgatgagtatcatctgttttgaggttgacaaggtgtgacataaccctgttaatagacacaagtaaaagaaaatcatactaggattggatattagtgagcgagcaccgaccagtagaaacaacaacagcataaatctgttatttaagtatcccaataatgaggttaaaaaaaaaaaaaaacagaacaaagcatgaaaagaccacaattagtgctggctatgcttagagaggagcagtctcttggtaaactcaggcagtgatgatgaacagaaaatggccgactgatactgtaatagaggcatagaactaaggacactccgtgagctggcataaatacaggggagtctttaagactgaaaaaagttcatgggtatgacacttaatatgactcaacattactgcagaattttaaagcaaacatgaaagcttgagaataaacactagtccctctacttcaagaaaaagcagaacctgtactagaacatgaagaacttagagatcaaaagacagccagaactatgatgaaatattttgaaagcagtgggcacatttttaaagattttttttggagaactttatgaggctgtatgtataattcctatatgtaattttataggaattcttaactgaaagtagttatcaactgctacttatcaggagcagtgttattagggattttaagttaggcatgtagaaaactttctgacaaaagggctattgaactccagccagttcccagtgaatctccaggaggcaccttagaagtcttcacaagctgaataccatgtctttagggtgtccaaatgcttctgtcttgggggagagatgagagatgactgggtgcctttccactcagaacacagtagaccactcactatttatgaccaagcctcacttcttttctattacagttacagattcttttttagtctggaagttagggtaaataaaatttgtatgtttgatttttctcttaggaatgttttctcatcttaactcttatgttatcttt

SEQ ID NO: 20554 - DNA, 383 bp, Homo sapiens
agtagagacagggtttcaccatgttggccaggctggtctcgaactcctgacctcaggtgatccacccgccttgacctcccaaactgctgggattacaggcgtaagccaccatgcccggcctctacaaagctttagagttagatcatagaggtcaccttgtccatgatctcgatttggcagtgaggatactgagccctagagaagacttgctcaaggccacatagcatgtcagaagcagagacaggatggaacctgggtatcttgactccctacccagttctctttccgagtactctgtctttagtttgaataattgacagcattttgcaggactttctgcagcaaattttccaaccctgcatctattaggaactgagccaaac

SEQ ID NO: 20555 - DNA, 347 bp, Homo sapiens
tggctacatgcaacagaatttcaaggaaagaagtctgagatagaaataaatttgaaacttgtacgcctttagatgctatttaaagccataaaactggatgagatcaccaagagggtgggtgcagacagagaaaaggtctaaagactgaatcctgaaacacaacatttagccatcagggacataaggaggaactatcaaagttgctggtgaggtaggagaaaaatcaagagagaatagtatcttaaaagccaaatgaagaaagtacttgaaggatgaaaaaaaaggattaaattggctcatgctacagataggtcaaaacaagaacttggaaataaatcaaacaacaa

SEQ ID NO: 20556 - DNA, 805 bp, Homo sapiens
tttgttccggagcgagtaggacgcgctacctcctggaggaaagaagcgactgcgtttcgcagtgctgacttttttttacagtgtgagctaacgtgtatgctctgaaaaacaccccgttttccagtatgtgaatgagtatatttgtacggggccagtacggcagacatagcgggtcgttggaccgagcccaccgagagtggatctgtgggaagccactgtggcaccttgctgagtctgttcacccgtgcagctagctggtggcagccctggcagatcccggcacacagtcaggctccacgccttacccgagccagttgtgcctctagattacgcctcgcttaaagtccagcgaccaagatagaaaaacagccccacgatgcaaccattttggaaaaccgctgcagtttctgccaaagctaaatgtacgcttaccttgtgaccccagaaatttcacttcaagaggaatgagtgcatacgtccaccaaaggcatgtgcaagaatgtccatagcacgtttattcgtagtagtaaaaaactggtaacctaaatgtccatcagcagttgagtggctaaattgtggtgtatcatacagtggatttctacagagaaataggaagttacggataaacgcaacagcctgaacgaatagcagctactgttaacttaggcacaaagaagaggacgctgtatgattccattttgatgaggttcaaaatataactgcacagcaagttgttctccagtatgaatcaggaatcgtaccagcctggggaacatggcgagatcccatctttgcgcgtcggggt

SEQ ID NO: 20557 - DNA, 277 bp, Homo sapiens
gtatcagtcaattttggttcagaaataacattcttgtcaattatgtcatcaataccatggactcagaccaggttttggccatggtcacttgaagtcttcatgtccacacttaattgctttagtctaatgtctttctgaaagcttcttgcaggcaattataatcccagagagttatgtcttcaaggagcttcatggaaagaatgaagtctgacaagtacgggtttctaataactttgagttcacactattgaactaaatttccaaaactcggccaggc

SEQ ID NO: 20558 - DNA, 574 bp, Homo sapiens
tctgggaggattttgtttctggctccaaaaatgaaataccaaggaaagtaggcaagctcatgcatgtcagaatcctcaatctcagctcaggaagtaggaattttccacctttgttagcagcagagatgacaaaccccagggccccacatatagcctgtgccttagtcactgcctcgggccaggttgcaagacccctcctaccaactgagctacaaatcacagttcctggagggtgggcctttatataacagggaacagaactcttctgtacctcccacctccccgcaagaagtaggccaggcatggtagctcatgcctgtaaatgaagcattttggtagaccaaggtaggagggtcacttgaggccaggagttcgagacaagcctgggcaagatcccatctttaaaaaaaaatttaaaaattagtgagctgtggtggcaggagctgtggtcccagctgcttggaaggatgaggtgggaggatcgcttgaacccggtgggtagaggctatggtgagttataattgtaccactgcactccagcctgggcaacagagcaagatcctgtttcaacaaa

SEQ ID NO: 20559 - DNA, 436 bp, Homo sapiens
agatgtgggaattatcagactaggaatcaatgtggtaaggggtctaatggataagatagaagcatgcaagaaaagatgaataatgtaagcagagagatgaaaattataagtaaacctctaaaagaaatgctagatattaaaaacgctgttacagaaataaagaatgcttttaataggctcatcagtggactggacatggttgaacaaacaatcactgagcttgaggatttttcaataaaacctcaaaactgaaaagcaaagagaaataaagactggggaaaagtaatacaatgcatgaagcagaatacacatttttatttcaagtacattcagaactttgactaagatagactgtattctgaactaaataaaagtcttaatattaagaagattcaaattatgaaacatattatctgagactggagtaaaactaaat

SEQ ID NO: 20560 - DNA, 160 bp, Homo sapiens
taattgctgttgttgtttttacttactttctgtcttctgtaacttcagtatatgcacagtaaaggcagggtctttaactgccatgtccactgctatatctctaggacccagaacagtatccagtacatcctaggaatttaataaatattagttgaataaa

SEQ ID NO: 20561 - DNA, 563 bp, Homo sapiens
aaatttcttttggtaggcgggacccacagatgcatgcaatacttctagatcagttttttcatctgggcacttgacattttggaccagataatttattattttgagggttgttctgtgcatcacaggatgttcagcatccgcagtagcactccccgtccagttgtgacaatcaccaatgcttccagatattgctagatgtccctgggagtggcgcagaatcgaccctggctgagaaccactgctctagatcttcattaggaattgtaacgtgaaagcctccaaacttttagatgttgagttaatttaaacatcttttggtcgagtgctgtggctcacacctataatcccagcactttgggaggccaaggcaggtggattgcttgaggtcaggagttcgagaccagcctggccaacatagtgaaacctcatttttactaaaaatacaaaaattagttgggcgtggtggcatgcgcctgtattcccagctacccgggaggctgagtcaggagaattacttgaaccctgggagcggagagccgagattgtgccactgcactccagcc

SEQ ID NO: 20562 - DNA, 207 bp, Homo sapiens
gataattcgtctcattcttatattagtcacttccccacggtagcagaattatctttttaagatgaaaatctaaaggtttgctgggcgtggtggctcacgcctgtaatcccagcactttgggaggctgaggcaggtggatcacgaggtcaggagttcaagaccagcctggccaagatggtgaaaccccgtctctactaaaaatacaaa

SEQ ID NO: 20563 - DNA, 447 bp, Homo sapiens
tttaattcacattagttgcacgccttggtgctatgaccatccctccagattcacaagtgcaggtccagccccatcttgttcagcactgtaacatgctttcagggctgtacatgcattcagttctctcccgtgttctgccatgtggagctgggccaagactctcccttttggcatagaccccaaagacagtcctgtggactggggatgtgtacggtccgagaggcgccagtaggtgcggaacatggctctgaacccagcgccacctgctgtgctcctcaggctgggtagggacagagaagacctgtgctcccagcctcactggaagccacacttccctgaggctgcctgcccccacgtggggtagaaatcagctccttggtccgttctgatgttcattgtctcaaagatgcatttgagaagcccttgggatcaagacaagtccctctg

SEQ ID NO: 20564 - DNA, 990 bp, Homo sapiens
tcctgtggttgggagggtgaggggcgtgttgtttctgctgctgaccccagtttcagggcaaatttaacctgtggtcagtgcagggtggggctttggtcccaggccctggggctgaggccctggagaacctgccaggcctgggcagtcactgctgacgtctgtggccagagtctccaagcgctgagggccccctggggcctgatttatgggggtctttgggggacttgttccagcctggaaatgtgagagggaaatctccccaccccagtgggggtgccccctggtgcacagctgggcagtgggcacccccgtgacttgtccgagagcaccgtttccctctggtgttaccctttaaaactcacttgagggaagagtgattggctacatagttgaatttgctgagcagcgtttgcagaggatgtaaactgccaggtaggctggccctgcttactggtctcttctttgggctcactgagtgactgagtggctttcgctttgatcagaaatgtgaacaggccgggcgcggtggctcacgcctgtaatcctagaactttgggaggctgaggcaggagaattgcctgaacccaggaggcggaggttgcagtgaaccaaaatcacaacactgcactccagcctgggagacaaaactccttctcaaaaaaaaaaaaaaaaaagaaaaaaaaagaaatgtgagcagttgaagattttagaactgatgtggctctcagagagttgggagacattttaaggcaaatgcaaaatgaaaacgtgtcttttgcttaaggctgtgtcttaagcaggggccttgggaaatgaaacgggatcttgccgcttcgcctcctgatttctggagctgttgacttctcagcctttttctgtgacatgtgcagcatctggacctgatttacgggagtctttgggggatttgttccagcctggaaatatgagagggaaatctcactgccccaggagaggagtcagtgcttaggg

SEQ ID NO: 20565 - DNA, 1075 bp, Homo sapiens
agaaagtggaccatctcttggtgtttgttttgatgagacttgacctatataacactggctcaagtatgtttgttaaagtgaatcacctgttgctttctgggccatacgtgaaatgacgtgccatgttacagtgaaccccttttgcaccaccccaagttcaggttgcccttacacaatttgggcgagatagatgaacacgcaccttcctccttcttagaaacaaaacagtgacttgggtagggtagacattaggaaagtgacttagctggtaaatatgtgattaataatggagatttggcctaagcatgagtgcgagcctctgaatacggatgggtaaatgataaatagcaagtctgccaagttgagcacattggggaacctcttgggctctgttcatgcttgaagtatgactgtgccaatactgtactcgctatttaacaaaatgaggtcataccaatcacactattttgcacgtatttgtttacacatctcttgtctgctaagctatgagctctttgagagcagggactgtttctgtttatcgttgttttctagcatctagcagagtgcttagcatataataaatgtgtattggatgaatgaatgaacgaatgaaattctttgcatttttactcggttagagagattttttgaaaggcatatatgtgggattatttgtgccgtcatctgctaatttcacagatgtcttctcaactgtagaccttcatataagggaaagacctatttacgcatagttgagttgcagctgctgctgccctggcctgatggcacagtggtgagggctgtctcaatatctgtcccatgtctctttcatagaataataccctccctcagccccttttccctgtatcttcctttcaagggttgctgtgtagttaactctgcttcaggcaatttatcttatctgtacttttctcttcctcattcctcttctcttttccagtgcttgtccagtaacctcaaggaaatctgttccaacccttctttgctgttggtgtattcctattcatgagttaaatcccaaacaaaacatactctaatcagggcagtcgaa

SEQ ID NO: 20566 - DNA, 606 bp, Homo sapiens
agaaagtggaccatctcttggtgtttgttttgatgagacttgacctatataacactggctcaagtatgtttgttaaagtgaatcacctgttgctttctgggccatacgtgaaatgacgtgccatgttacagtgaaccccttttgcaccaccccaagttcaggttgcccttacacaatttgggcgagatagatgaacacgcaccttcctccttcttagaaacaaaacagtgacttgggtagggtagacattaggaaagtgacttagctggtaaatatgtgattaataatggagatttggcctaagcatgagtgcgagcctctgaatacggatgggtaaatgataaatagcaagtctgccaagttgagcacattggggaacctcttgggctctgttcatgcttgaagtatgactgtgccaatactgtactcgctatttaacaaaatgaggtcataccaatcacactattttgcacgtatttgtttacacatctcttgtctgctaagctatgagctctttcaagaagcacggagctggccagttcatatcgctgatataggctatccagggcaggaagaaaggctcagatagtttctagcatgaaatat

SEQ ID NO: 20567 - DNA, 577 bp, Homo sapiens
taataaatttgaacataagagaataataactctacctgctaaacaagcacattcatgcataagcaactcgagtggctcaatcatctgtcaaatatcgaaattctcaaaactgtacattttcattgaaggttacttgtttgagatcttcccaggctgcctgtctgcaagtcttagactataactagccaagaaggattctggaaactacacttatccggtccttcagccttcacctggccactcttttcaaagagaccaaatgagttgacacatttaaagtgcttaggacaggcggggggcagacagccaggcgtggtggttcacgcctataatcccagcactttggaagaccgaagtgggcggatcatcttaggtcaggagtttgagaccagcccggccaatgtggtgaaaccctgtctctactaaaatacaaaacttagccaggagtggtggcgtgtgcctatagtcccagctactcgggaggctgaggaaggagaattgcttgaacccaggaggtggaagttgcagtgagccgagatcatgccactgcactcctccctgggtgacagagcgagac

SEQ ID NO: 20568 - DNA, 313 bp, Homo sapiens
gaaagtgctttttcaaaagctgttacctacaaataattaaaaaaaaaattagccgggtgtggtggcacctgtagtcccatctacttgggaggctgaggcaggagggtcacttgagctcagaaggtgaaagttgcagtgagccgagatcacaccattgcactccagcctgggcaacagagcaagaccctgtctcaaacacagaaacaaagctcttgtccagaggcttcgtttgggctcattggcttttgtaacagcagtgtttttaaggaacaatcttctaataagagcatccacttataagaccatggagtct

SEQ ID NO: 20569 - DNA, 164 bp, Homo sapiens
ccgagattcaggctgctcattcgtcaactagagagagaataacagtgtctccctcacgcccttattgtgaggcctggtaaggtgactcatgaatggggcttagctcaggagatgctgtccacccctcccaggcccaggcaaccttgtccagggttcccatctct

SEQ ID NO: 20570 - DNA, 1389 bp, Homo sapiens
tgcctgttgagctgtaccatggagcatcctcctgtgtcctgccaacccctgccattatagtcaccggagactcctttacctatccctatctgttagggttttcagatgtcctctcgctgggtttatatttgaaggtatagaatctgggaaagggtggggtgcaagctaaccaaatagggatgctagggttgggtggggaattgaggactcttctgtgcttttattgtagggctggggatcgaggatctgggcaaaaaaaatatgacatttccaaccagggacaaaatggaggcttgggcttagtgatgggtaaatggaagactggttgagtgggatgataatgggagaacttactgatgctcttttgggaaaaggtgctttaaagactcgatttgggagcctactggggcaaggcgactggggaggtgtacgtgttagtcaagtggaggtcaggtgggttatcttctgcctccttcactggcttcatgtgaacttgcctgtgacagaatatcttgccctagatgtcctcttccctcttgccatcgtgcaaaagcattcgatcttatgaccgtgagttcttatttgtggatgctaactggggtaatctcagggagtactggggccatggctctttcccttgcttctctttctgctcactgctttgctttcaggtgcttagctgctcctttttatttctttgcaggactgggaaagcatgggaggaggattttgataagtttcttgttctctgcgtggtgatggggtggtctgagggccaagttaataagcctacctttggttattaccctggaaaattgagggttgatggtagggttatgattgtggcctgtgtatttgcaatttttctttgtcagtgtggctttctgtcatcttcctttttctccagtgagggttctgccactgtctcaatcccttggttcctgcaaaaaacagctaaatgtgctctcagggccagtggtgatgttctgtgttgcagccccagctcttgaaagtgacctggcccagatgagctctgcctgcttgtcatctttaggtcctgctgcccctgctgcctcagccctcaggctcctaactgctcaagccagaaggagctacaaagccaaatcatttgtcatttttctctggcagattgttttaaaatctccctcccctcttttattttaattatgccacctgtgttaatcctatagcctgcttctttgctttgtggattactgatttcaagttctataacttggggaaagttaggttgagtgaatgggaggacagacactgaatgtgtgttttggaaaaatggactctctatcttcagattattcagcttctccacctatcacctctacaacttggccttcattggagaagttt

SEQ ID NO: 20571 - DNA, 587 bp, Homo sapiens
agatcgagctcggaccgtggttgacgtggcttgtgggttgacgtgctgtgtatttgcaatttttctttgtcagtgtggctttctgtcatcttcctttttctccagtgagggttctgccactgtctcaatcccttggttcctgcaaaaaacagctaaatgtgctctcagggccagtggtgatgttctgtgttgcagccccagctcttgaaagtgacctggcccagatgagctctgcctgcttgtcatctttaggtcctgctgcccctgctgcctcagccctcaggctcctaactgctcaagccagaaggagctacaaagccaaatcatttgtcatttttctctggcagattgttttaaaatctccctcccctcttttattttaattatgccacctgtgttaatcctatagcctgcttctttgctttgtggattactgatttcaagttctataacttggggaaagttaggttgagtgaatgggaggacagacactgaatgtgtgttttggaaaaatggactctctatcttcagattattcagcttctccacctatcacctctacaacttggccttcattggagaagttt

SEQ ID NO: 20572 - DNA, 315 bp, Homo sapiens
gatatatgggacacatatgtgaccaaaaactgaaattctgggagttctggatggagatgagatgggtaaaggcataaaaaacctatttaatgaaataataactgaaaacttcctgaatgcttccaaatgcaggaagctcaaagattaccaaataaatacaactcaaaaaggtcttctccaaggcacattatggtaaaattgtcaaaagacaaagagaaaatgctaaaaacagcaagagaaagacatcaagtcacttataagagaatctccatcaggctaacgggatttctcagcagaaaccttacaggctaggag

SEQ ID NO: 20573 - DNA, 339 bp, Homo sapiens
atggaaaattctgtcactaaatagatgaacggtcctcttgagtccttcccaggatgccagacaagtgttctcagcaggggctttctcatctttggggattttactttggaaaaaaaagttggacagataaaggcacactgacaagtgagcttttggacggagaaatgaggctaggaagcttcttctccagaagagagtgttggccaattagggggtttcactagaggtactgaccttgacatcctcttgtaattttgtttttaggtcttgtttattgtgcacttttatttcaaatgcacttaagtataacaataaagaatataatcaccactacctcca

SEQ ID NO: 20574 - DNA, 299 bp, Homo sapiens
aactcacccacctgacaggtgacatccttggtgagacaattgtgggcagcctgacacccagtgagattcagcagctgctgcgggtccccacgggctgccctgagcagacgctgagctccctgacgcccgtcatcatcctgtcccgctatttggataccaccggccagtggggcaaggtcggggtggagcacagggaccaggtgatgaagaatattgtcagcggctacactcagatgctgacccaccggagttcagacggcacctaccacacctccaaggggaacccaggaagcacttgg

SEQ ID NO: 20575 - DNA, 412 bp, Homo sapiens
catttcaccaatctattaactcaacaaattcgtttcctactctaagccaggcattcatttcagggaaataagaaaaggaattgccagatatcaaagcattaaaagaaaggcgggctgggcgcggaggctcacgcctgcaatcccagcactttgggaggcgggcggatcacaaggtcaggagtttgagaccaacctggccaatatggtgaaaccctatctttactaaaaatacaaaaattagctgggtgtggaattagctgggcgtggtgtctggtgcctgtaatctcagcaactcagggggctgaggtaggagaatcgcttgaaaccagacgacagaggttgcggtgagccgagatcgcatcactgcactccaacctgggtaaaagagtgaaattctgtctcaaaaaaaaaa

SEQ ID NO: 20576 - DNA, 316 bp, Homo sapiens
aaagctgtttggatatactacatagaagtaatagctaccatgaacatagtttgagtttaaagtcttttaaaaagtttgagttttaggttttaaggggtgcggactggggagtaaaagatgaagggaaagagaagagagcaagttaatgtgttgatttaactgcaaaataataacaggatgtaacagagttctgagtatccaaagtgaccaatcagagcctaaacatagctgaattccatcccagccccagcacgtccctaacacaagaataaaacccttatcttgttcagccatgtgtcgcctgccacaaactgca

SEQ ID NO: 20577 - DNA, 1132 bp, Homo sapiens
  misc_feature (1098)..(1098): n is a, c, g, or t
  misc_feature (1103)..(1103): n is a, c, g, or t
ttagtagagacagggtttctccatgctagccaggctggtctcaaactcctgacctcaagtgatccgcccgacttcgcctcccatagtgctgggattacagacatgagccaccgcactcggtcctgtgaattccatttttaagagaataccatggggcagtcttggtcacttgtcaaactgggtcccttagaggtacacgaagacactctaagtggtgtataagtgggaggataacttgcaaggactacgcttccagacccccagggtgtaggtatctcctaaagctgatctgagttgtaagttaccattttccacctctgctttcacaatctcttttctccacgttacaaaagaaagctgtatcttccacccagccccaatcctgctgttggcttcatcttgggcaaagaggcaatttgaaatattggtgtttgttaggaaaaagtgatccactctgattggatgacaaattctttagtaactttggtggttttcagatcgttccttttagtaaaattgaaggaggacccaatgaatttgacaactgatagatcattcaagttacttttaatgatggctcactgtgtgatttttagatgaaacactgaggtagtttagagaatatacggatagtgctgtaataaagctgtttcagtacttacaagctttttcagtacttacatttaaaaaagttaaaaaggaaaggattaagttgataaaaaacctgtctcattctagtagtgggtaatgttcacatcaaccagttggggggaaaatagctctgttcatctcattaaaggatgcattttcaataagattttactttctgtgtttaattacctatcaaaatttgtaaaacttgttggtttgatcaattgtatgcagtcggccctctgtatctgtgacttctgcattcgtggattcaacaaactgtggatcgaaaatacagaaaaaaaaagtatctgtactgaatatgtacagactttttcttgtcattattccttaatacagtataaaaactatttacatagcattcacattgtattaggtattattaagttaaccctaaaagaatggaattttaaaaggttttaccanggganggaatggtggccattaaggggtttattat

SEQ ID NO: 20578 - DNA, 1285 bp, Homo sapiens
ttagtagagacagggtttctccatgctagccaggctggtctcaaactcctgacctcaagtgatccgcccgacttcgcctcccatagtgctgggattacagacatgagccaccgcactcggtcctgtgaattccatttttaagagaataccatggggcagtcttggtcacttgtcaaactgggtcccttagaggtacacgaagacactctaagtggtgtataagtgggaggataacttgcaaggactacgcttccagacccccagggtgtaggtatctcctaaagctgatctgagttgtaagttaccattttccacctctgctttcacaatctcttttctccacgttacaaaagaaagctgtatcttccacccagccccaatcctgctgttggcttcatcttgggcaaagaggcaatttgaaatattggtgtttgttaggaaaaagtgatccactctgattggatgacaaattctttagtaactttggtggttttcagatcgttccttttagtaaaattgaaggaggacccaatgaatttgacaactgatagatcattcaagttacttttaatgatggctcactgtgtgatttttagatgaaacactgaggtagtttagagaatatacggatagtgctgtaataaagctgtttcagtacttacaagctttttcagtacttacatttaaaaaagttaaaaaggaaaggattaagttgataaaaaacctgtctcattctagtagtgggtaatgttcacatcaaccagttggggggaaaatagctctgttcatctcattaaaggatgcattttcaataagattttactttctgtgtttaattacctatcaaaatttgtaaaacttgttggtttgatcaattgtatgcagtcggccctctgtatctgtgacttctgcattcgtggattcaacaaactgtggatcgaaaatacagaaaaaaaaagtatctgtactgaatatgtacagactttttcttgtcattattccttaatacagtataaaaactatttacatagcattcacattgtattaggtattattagtaacctagagatgatttaaagtatacaggaggatgtgcataggttatatgcaaatactatataccattttatatcagggacttgagcatcttcagaatttgatattcttgagacgtcctggaaccaatctctcagggattcgactgtactaatacaaattgtattgataactttttttgtttttggaaacagtgtctcactccagccttggagacagattccatctc

SEQ ID NO: 20579 - DNA, 766 bp, Homo sapiens
cttctttaagagatggtggcttcctatgttgcccaggatggactcaaactcctgggctcaaggaatcctctcatctcaggctcccgagtagctaggaatacagacacgagccaccatgtctagctggaagttagactttatctgcattcctggaatagtaaaagcaaagcacgggtcagctgctttcggtaaattctagcccataggtccaagtcaagttccaggaagccccctatgaaaaagattctgatattagtaccagtgtttagttcatgtcatggcctgacttaagtataggtcattaagtgtaatgccaaggcaggggcttgagtggtttggagctcatgactgttccacttggaatttatcctggtgtatgaatacgaatctatcaatattttttttcaggtggcttcccagttctcccaacacttttactgaaaagatactgtctaactatttatgtcaatatagaaacataaagtcaaatatatttgtttagtagacttgaagagagcctagaaacacactcagagacatgtaaacagcatcagacgaagatggcatttcaaatcagagttgaatggatttttcagctttgctgaggtataactgaagtgtactaaactgcacatatttaaaacatataatttgatacattttgactcacaaaacaatcaccacaatcaagatgatgaatatatagatcactcccaaaagtttccctgtagtcttttgcagtcctttcttcatggccttcttcatc

SEQ ID NO: 20580 - DNA, 220 bp, Homo sapiens
ctcttagcagagtctggtactcttagcagagtctgctaccccagggctgcagagtctacctgggttaggtgctagttgtttaccagggttcagcatcagtctgaactgagcttctatacagcaagtggccactaagtgccttagtggtttctggttacacctggggaacagggtccttaatatcctaaaagaatatttttatactgatagttattttatc

SEQ ID NO: 20581 - DNA, 1539 bp, Homo sapiens
ctcaagcaggcgtttgcgagaggagatacgagctggacgcctggcccttccctcccaccgggtcctagtccaccgctcccggcgccggctccccgcctctcccgctatgtaccgaccgcgagcccgggcggctcccgagggcagggtccggggctgcgcggtgcccagcaccgtgctcctgctgctcgcctacctggcttacctggcgctgggcaccggcgtgttctggacgctggagggccgcgcggcgcaggactccagccgcagcttccagcgcgacaagtgggagctgttgcagaacttcacgtgtctggaccgcccggcgctggactcgctgatccgggatgtcgtccaagcatacaaaaacggagccagcctcctcagcaacaccaccagcatggggcgctgggagctcgtgggctccttcttcttttctgtgtccaccatcaccaccattggctatggcaacctgagccccaacacgatggctgcccgcctcttctgcatcttctttgcccttgtggggatcccactcaacctcgtggtgctcaaccgactggggcatctcatgcagcagggagtaaaccactgggccagcaggctggggggcacctggcaggatcctgacaaggcgcggtggctggcgggctctggcgccctcctctcgggcctcctgctcttcctgctgctgccaccgctgctcttctcccacatggagggctggagctacacagagggcttctacttcgccttcatcaccctcagcaccgtgggcttcggcgactacgtgattggaatgaacccctcccagaggtacccactgtggtacaagaacatggtgtccctgtggatcctctttgggatggcatggctggccttgatcatcaaactcatcctctcccagctggagacgccagggagggtatgttcctgctgccaccacagctctaaggaagacttcaagtcccaaagctggagacagggacctgaccgggagccagagtcccactccccacagcaaggatgctatccagagggacccatgggaatcatacagcatctggaaccttctgctcacgctgcaggctgtggcaaggacagctagttatactccattctttggtcgtcgtcctcggtagcaagacccctgattttaagctttgcacatgtccacccaaactaaagactacattttccatccaccctagaggctgggtgcagctatatgattaattctgcccaatagggtatacagagacatgtcctgggtgacatgggatgtgactttcgggtgtcggggcagcatgcccttctcccccacttccttactttagcgggctgcaatgccgccgatatgatggctgggagctctggcagccatacggcaccatgaagtagcggcaatgtttgagcggcacaataagataggaagagtctggatctctgatgatcacagagccatcctaacaaacggaatatcacccgacctcctttatgtgagagagaaataaacatctatgaaatcccaaaaaaaaaaaa

SEQ ID NO: 20582 - DNA, 1069 bp, Homo sapiens
cagaggcccaggcagggaacctggagaacacggaccaggtgaagagcccccttcttactggggacagctctggcctgcctccagctccctcggctcccacgcatggggtgaaggcctcaggaggcctggggacaatgttgcacccacaggatcctgacaaggcgcggtggctggcgggctctggcgccctcctctcgggcctcctgctcttcctgctgctgccaccgctgctcttctcccacatggagggctggagctacacagagggcttctacttcgccttcatcaccctcagcaccgtgggcttcggcgactacgtgattggaatgaacccctcccagaggtacccactgtggtacaagaacatggtgtccctgtggatcctctttgggatggcatggctggccttgatcatcaaactcatcctctcccagctggagacgccagggagggtatgttcctgctgccaccacagctctaaggaagacttcaagtcccaaagctggagacagggacctgaccgggagccagagtcccactccccacagcaaggatgctatccagagggacccatgggaatcatacagcatctggaaccttctgctcacgctgcaggctgtggcaaggacagctagttatactccattctttggtcgtcgtcctcggtagcaagacccctgattttaagctttgcacatgtccacccaaactaaagactacattttccatccaccctagaggctgggtgcagctatatgattaattctgcccaatagggtatacagagacatgtcctgggtgacatgggatgtgactttcgggtgtcggggcagcatgcccttctcccccacttccttactttagcgggctgcaatgccgccgatatgatggctgggagctctggcagccatacggcaccatgaagtagcggcaatgtttgagcggcacaataagataggaagagtctggatctctgatgatcacagagccatcctaacaaacggaatatcacccgacctcctttatgtgagagagaaataaacatctatgaaatcccaaaaaaaaaaaa

SEQ ID NO: 20583 - DNA, 632 bp, Homo sapiens
ggttagggaggatttgtagaattctagcaggtaaaaatcaagcctttttcccctcccatagtaaacttaaccattttcaccctgtacgttatcttctagctcctactaacatctccaattagacaaccgcttcaaagggtgcttagcaccagggattggggttcatggacttaggaggtggtaaggaaactggctggcaccaccaaactgccttagtgaacttggcccttcccaggcaggtaggttgggcattgagggaaggtggcccagtctttgctggcagggtctggccagtctcatgggggcaccaccagtttggtgacagaagtggtgtcatttattgaattccacctccgtttagaaggagatcatggtacaaagcccaggaggggccttaagatgtgaagatctctctgagtaaaaggcaaggggcttctcttcttcacctctgggatagttggtagatcggagagttttattttcagggtcaaggctgtggactgatggggatattggagggtgggtgggttttcctgagagactttgtataatgctgaatgtgtccagagggacaagtttgcagaacctcatattggtatattaaagaaataataaaataaaaaagcacttta

SEQ ID NO: 20584 - DNA, 1128 bp, Homo sapiens
ggttagggaggatttgtagaattctagcaggtaaaaatcaagcctttttcccctcccatagtaaacttaaccattttcaccctgtacgttatcttctagctcctactaacatctccaattagacaaccgcttcaaagggtgcttagcaccagggattggggttcatggacttaggaggtggtaaggaaactggctggcaccaccaaactgccttagtgaacttggcccttcccaggcaggtaggttgggcattgagggaaggtggcccagtctttgctggcagggtctggccagtctcatgggggcaccaccagtttggtgacagaagtggtgtcatttattgaattccacctccgtttagaaggagatcatggtacaaagcccaggaggggccttaagatgtgaagatctctctgagtaaaaggcaaggggcttctcttcttcacctctgggatagttggtagatcggagagttttattttcagggtcaaggctgtggactgatggggatattggagggtgggtgggttttcctgagagactttgtataatgctgaatgtgtccagagggacaagtttgcagaacctcatattggtatattaaagaaataataaaataaaaaagcactttaggttattttatctttaacccgattgctgcaatttcttttgtgtgtatatatacatatatatactttccacaaagttttattttttgctcagaataaaaagttaaattgaggtgtgaaaagaaaagcacttaccttggtgcaatatgtgtagcttgatggtcgttgtcccatgtggccctggcctggcagcgtttttccgctcaatcagccctgtgctgtgagactgtccatagggaaacactattatgcattctcagcaaccgctcaatctatgcaagccttccctgtgtgccccagggcgccccctcaggctctctgaagaactgctgtgggtcctgttttctgctgactgttgaggccctttttcatcacttcttggtctctcgccatcttttccctcttcaccattacaaaatgatgcctgaaaggaaggaacagattgttcctaggtagaaacctggcaccttctagacttttatatttgtaatcacatcca

SEQ ID NO: 20585 - DNA, 573 bp, Homo sapiens
  misc_feature (100)..(100): n is a, c, g, or t
  misc_feature (107)..(107): n is a, c, g, or t
  misc_feature (138)..(138): n is a, c, g, or t
  misc_feature (144)..(144): n is a, c, g, or t
  misc_feature (146)..(146): n is a, c, g, or t
aatgttggggtcaccttttaatatgggggtggtatatatacttatatatctaatacgtaacccaaaggctgtttgagaacctcttgcatgtttaatacantgtgatnattccactgaatggatattctgtggttcatnttaccnanccctgtatgggtatgggttggggaaaaaaacctgttaaaacttgcaagttttcagtggaacattaaagacccacttgagctgtggttttttatttaaatgtaatgctacaaatcagcctgtgccttagacattattacattgtctattctagatctactaatttaaaatatcttatagcaatgatgggacagaatttggaggatcaatttatcagaaagtttgtgaagatcttgacacttcagtaaaccttgcttggacatcaggtaccaactgcactcgttttggcattgcagctaaatatcagttggatcccactgcttccatttctgtgagtacttttgtggacttagaatgggggttttggttgtgggaatgagtctttgggtatactgtattatgttgaaaatttgtaccgcggtgccgcgt

SEQ ID NO: 20586 - DNA, 454 bp, Homo sapiens
agtcttacaagagggagtgtataaaccttggttgtgatgttgactttgattttgctggacctgcaatccatggttcagctgtctttggttatgagggctggcttgctggctaccagatgacctttgacagtgccaaatcaaagctgacaaggaataactttgcagtgggctacaggactggggacttccagctacacactaatgtcaatgatgggacagaatttggaggatcaatttatcagaaagtttgtgaagatcttgacacttcagtaaaccttgcttggacatcaggtaccaactgcactcgttttggcattgcagctaaatatcagttggatcccactgcttccatttctgtgagtacttttgtggacttagaatgggggttttggttgtgggaatgagtctttgggtatactgtattatgttgaaaatttgtaccgcggtgccgcgt

SEQ ID NO: 20587 - DNA, 461 bp, Homo sapiens
cgtgaagccctgcaagaacctagtaccttgagggcagagactgaaccatctgtggatgagaccttatgcccaggaccttacaggcacaaagatcgactcagaaggggtttggtgtatgtccagaaggatggcgggagaggagcttctcagcatccaagaaagtttcacatagctagcaatggttttactgagttttaagaattgttttattgtggctggacacagcctcaagcctgtaatcccagcactttgggaggccaaggcaggaggatcgcttgagcccaggagttcaagaccaacctgagcaacatagtgataccctggctctacaaaaattaaaaaattagtcaggtgtggtggcatgcgtttgaggtcccagctatccaggagactgaggtgggaggattgcttgagcctgggaggccgaagctgcagtgagccaagatcacaccactgctctg

SEQ ID NO: 20588 - DNA, 381 bp, Homo sapiens
tggtatataatacccccataacatgcaatttacctatataacaaacctgcatatgtaccccaaacctaaaagttaaaaaataaataaaaaataaatgaaatggtgtacaagcaccgaattctcagcacctctttgagttactcatcactgagttttcccacatgaatacatgttgccaagtgtaaaactctattatgcatctccatgtcctcatcaccacaggtagctttactgaagaaaactaaaaaactttcaaacaagtggtctttgtcttataaagtgctggaaaatagaataaaagaaaaagctgcttaagttaatttacaacattactgtaattttgattcaaagccagatagcaacagtctaagaaaattacag

SEQ ID NO: 20589 - DNA, 431 bp, Homo sapiens
aatattaaaacatcctgataccctcacatttaattcaaaaacttgtcctcatgatgtcattcaatataatatacttgaacattaaaatgtatataataaaatatatttattcaaagatttattcaaaataaaatgaatatataaaataagagacagggaaagagaggtgtctggggagtgactagtgattagtatcacagaaatccttgcttcatctttaccgaccccctggtgaaagacaatttaatctcccgacaaactctttctcattattgtataaacaaaaaacagtctctcttactttaaagaaaaataaaaggctgccatttacttcatgacccctatctcccttttatcagtcactcttctgttaagagtattctttgcttccatgtttttatttggataaaactgactatgatgcattgttg

SEQ ID NO: 20590 - DNA, 438 bp, Homo sapiens
atgaatctcttggggtttcttgaatttaattgtaatagtcattttttctgccattagtaccaaggaaaaaagccaatattttagggcacagaatggtagaaaggggtctactttgtgtgtgtgtgtgtatgcgtgggctgtgtgtgtgtgtgtatgtgtatgtgtgtgtgtgtgcgcctatagagaaaagaaagcttactgaactaggagtcagaacacctgtgttgaagtttgggcacattccccaattccccaagcctcagtttgctcatctataaaatagccggagtgatccttgcctcacctgattcgtggttggtgatgatcaaatgaggcaatgaatgagaaagcctttgcgttagcctctgttttgctggttattaaacagatgccttcctcccttgactgttctttgagaataaagccagaaaagatttg

SEQ ID NO: 20591 - DNA, 506 bp, Homo sapiens
gcttctagtagctctggagattcctggcttgcagctgcaactcttcaagctcggcctccatgattgcgtggcattctgtcatttgtatgtgacttcatattgtatgaagaaatgaagatacctccatgtgtccatgtcttgttatatggacataagtcatattggattaagagctcaccttcctccagtaaaacttcatcttaactaattcaatttgttacaaccctatttccaaataaggtcacattctgagatcctgcgagttaggacttcaacataactttatgggggatacaattcaatccataacaggtggtcagggcctgaattaagtagagattatggcattaaggatgttgaaagctaatagctggcatgagaatctgaatgaagaatgaatggcatccctacaatgggggtttgggacataatcccaaaagacaccatcctgaataccgtaaaccctattgtgaagatcctgaaagattgaaatcctgaaagtgtaa

SEQ ID NO: 20592 - DNA, 242 bp, Homo sapiens
agggtgaataggtcacggcggccttttttttttagtttaacttttcctttttttgctgtctagtcatcctcgtcggtcttctgcttcttggtatcgacatcgtcatcctcatcatcttcagctgcccgcttgcccgtagctgacacagcttcctcatcttcatctccatcctcttcctcaccatcaccttcttcttcctcctcctcttcctccccaccttcttccccttctgtcgtcttctc

SEQ ID NO: 20593 - DNA, 377 bp, Homo sapiens
gtatgtatttcggggtattttataaaactatccatgccatgtatgatgcctcacctgcaaggataaagctttaacatatatgaaaaataagtgtctttggttcttaatatcttcctacatttgtcttcataacttcaacacaaaaacactcatatactcgacttttggctgggctgactaccagttattaggatttaagtaaatagaataaagatttcaaaattcgatgaccaaatatgagaaatcacactctccccgtaacatacaattattctcaagtgccactgctaatgcaaaattgaaagaagaaattaagtctaatatattgcaatattctaaaatctaaaattttttctttgaggtctggtggttcatgc

SEQ ID NO: 20594 - DNA, 468 bp, Homo sapiens
tgtactagatggttttgcctaactataggctagtgtaagtgttctgagcacgtttagaatgtgctagaagcaggctaggctaagctataatgttcggtaggttaggtgtatttgatgcatttttgactttccatttatgaggacataaccctatcataaattgagtagcatctgtattcccaatggcatacagagctgtaaaaaatacagaaaacaatcccgatctcactggccttaaagtctagcaatggagtgtgacaaagaacaataaacaaggtaaagaagtagaataaggtggtaaagaaataaaaaaagcaaaaggaaaaaagaacaggaagtgaattaattcattcattacacggtgagtgaatctgagaaagaacggtcagaaaccggttcactaaggaaacagcatttaaatacggacctacaggaggcaagaggtaacaatcttgtactatacttctc

SEQ ID NO: 20595 - DNA, 461 bp, Homo sapiens
attgaaaagtgaggagggcagaatttattaagtgaaaaggaaaactctcaacaaaaagaggggtcctgcatgcaggttttccatctcactaaactgaataccaggccaccacacatgagctgaagagcctagtcttctccccctgcatgaattcctggtggctacaccccgttctcccagtgtgcaggcaggcccttagtctgagccactccacattatttcccttactgtgtatgtgttaaggaacggaatttttcatcatgggcatgtttaggcaatccccctgtgcacaatgacctgggcagcatttggctgtctcctgattctatcattcccccctctaaagaagtacatctaacttagaataaggataaggataagggtagtgatcgatcttaactggttcctgctgatgggggcactgttttgggaaaatagcagtgagatctccctcagaggcc

SEQ ID NO: 20596 - DNA, 388 bp, Homo sapiens
atgcgagctaacataaatagattgcttaaatatagtgttaaaaaagagatggtgaggaggactctcaaacccatgtcatgagactcaagtgaaaaaagcaggaatgggccagctgcagtggctcacaccagtattcccagctctttgttaggccaaggtgggaagattgcctgagcccaggagttcaagaccagcctgggcaatatagggagaccctatctctacaaaaaacttaaaaattagctgggtgtggtggcacatgcctgtagtcctagctgtttcagcaggctaagaaaggagaattatttgagcccaggttccaggctatagtaagctgtgatcgtgcccctgcattccagcctgagtgacagagcataatccatctcta

SEQ ID NO: 20597 - DNA, 999 bp, Homo sapiens
gataatattgacgcgtccggaaatgtcttacgatgatcatttagaggtttattttgaacaactggcaattccaggaatgatggaataaagcatacgaagtagaaggactggaacctccagaaaaagtactttaagttacctacaggtgatcctagtcaggtatgaattgataagaaatgcctgcaccttccctccttcctatctttcccttgcctacagaaaattaaaaggcaaaacaatagacatctgcatattcttcattcagatcaaccagtggctagcatttgccaccttttgcagtttctttctctttccataagtactttcttctctgaatcatttgaaagcaaatgaaaacagtagcctaaagtgtcagtttcaaccagaaaataacagctctgatttctcatggctcatactcgtctgaaacgactcaggtagaggctgaggaaggccgtgttgtttgtctacctgggactacacctactgaaagaagttctcaagttctgattgagttctaaaattttttgaagattggaattcttcatatgtaaaaagagaagagaaagacattcttgattttggtgactagagttgtagatgctggaagctttgccactaacattgatgaaccagatgcatgtcaccagcccatcacggtgattcttaagccggcaccatgggcccggcactgccacgttttccaaggaacctgccggagctcctgcggaagctgctcctcaggcgatggagtcccttcgctggtaggcccttcttcagtcaccacaggatgcctgccattcatgaacaagaaggagaggacgggctttgaataaaaaacaggatccaggaaatatttgtgaggccatttggacttcagtgtgaaatggtgttaaaagatgaagtcatttattcaagaagtaaacctctgccacctggactgtgcgcagacatttcattgattttgtttaataaacattttctggctttgggaggtgt

SEQ ID NO: 20598 - DNA, 821 bp, Homo sapiens
gataatattgacgcgtccggaaatgtcttacgatgatcatttagaggtttattttgaacaactggcaattccaggaatgatggaataaagcatacgaagtagaaggactggaacctccagaaaaagtactttaagttacctacaggtgatcctagtcaggcaaatgaaaacagtagcctaaagtgtcagtttcaaccagaaaataacagctctgatttctcatggctcatactcgtctgaaacgactcaggtagaggctgaggaaggccgtgttgtttgtctacctgggactagtaagtatagaaatagaattcctttgttcttaaattctacctttgactttacttttaaaatataatttctttggtacgatttagctcatgcctataatcctagcattttgggaggccaaagagggagaattgcttgagcccaggagtttgagaccagactctacacacacacacacacacacacacacacacacacacacacacacacgcgcacacgaagcgggaatggtggcatgcgactgagaccccagctacctgggaggctgaggttggaggatcatttggacccaggaggtggaggctgcagtgaaccatgattgtgccactgtactccagcctgggtgacagagcaagaccctgtctcacaaaagaaaaagaagaagagatcatctattagtcttcttgatttttgttaaaatgtgttatgtgatagttgataagctttatgcatatgtcaatctgtggccatttaattttgggctaaggacttgttctattatagcacagtaatcattttactaaatagtg

SEQ ID NO: 20599 - DNA, 1452 bp, Homo sapiens
gataatattgacgcgtccggaaatgtcttacgatgatcatttagaggtttattttgaacaactggcaattccaggaatgatggaataaagcatacgaagtagaaggactggaacctccagaaaaagtactttaagttacctacaggtgatcctagtcaggtatgaattgataagaaatgcctgcaccttccctccttcctatctttcccttgcctacagaaaattaaaaggcaaaacaatagacatctgcatattcttcattcagatcaaccagtggctagcatttgccaccttttgcagtttctttctctttccataagtactttcttctctgaatcatttgaaagcaaatgaaaacagtagcctaaagtgtcagtttcaaccagaaaataacagctctgatttctcatggctcatactcgtctgaaacgactcaggtagaggctgaggaaggccgtgttgtttgtctacctgggactacacctactgaaagaagttctcaagttctgattgagttctaaaattttttgaagattggaattcttcatatgtaaaaagagaagagaaagacattcttgattttggtgactagagttgtagatgctggaagctttgccactaacattgatgaaccagatgcatgtcaccagcccatcacggtgattcttaagccggcaccatgggcccggcactgccacgttttccaaggaacctgccggagctcctgcggaagctgctcctcaggcgatggagtcccttcgctggtaggcccttcttcagtcaccacaggatgcctgccattcatgaacaagaaggagaggacgggctttgaataaaaaacaggtggagtctcactctgttgcctgggctggagtgcaatggtgtgatcactgctcactgcaacctccgcctcctgggttcaagcagttctcctgcctcagcctcccaagtagctgcaattacaggtgcatgccaccactcccagcaaatttttatatttttagtggagacagggtttcaccatgttgaccaggctggtctcaaactcctgacctcaggtgatctgcccaccttggcctcccaaagttctgggattaaaggtacgagccaccgcaactggctgagaatctttttatttgctgatttgtctcttgtgtattttctttgttcagatgtctcttcagatctttttctcacttttaaattgttttttaattgttaagaattttctgtctagtttagatataagccctttatcagacatgtgttttgcaaatattttctcctagtctgtggcttgtattctgtctcttaacactcattttatttttacttttggaactaaagaagaagaatggtcagctttccattattcttgtaacagtaatggcagaaccaagtctgctaatgctacactgagcaaagaaagtcacctggtgaagtccaacatta

SEQ ID NO: 20600 - DNA, 1141 bp, Homo sapiens
gataatattgacgcgtccggaaatgtcttacgatgatcatttagaggtttattttgaacaactggcaattccaggaatgatggaataaagcatacgaagtagaaggactggaacctccagaaaaagtactttaagttacctacaggtgatcctagtcaggtatgaattgataagaaatgcctgcaccttccctccttcctatctttcccttgcctacagaaaattaaaaggcaaaacaatagacatctgcatattcttcattcagatcaaccagtggctagcatttgccaccttttgcagtttctttctctttccataagtactttcttctctgaatcatttgaaagcaaatgaaaacagtagcctaaagtgtcagtttcaaccagaaaataacagctctgatttctcatggctcatactcgtctgaaacgactcaggtagaggctgaggaaggccgtgttgtttgtctacctgggactacacctactgaaagaagttctcaagttctgattgagttctaaaattttttgaagattggaattcttcatatgtaaaaagagaagagaaagacattcttgattttggtgactagagttgtagatgctggaagctttgccactaacattgatgaaccagatgcatgtcaccagcccatcacggtgattcttaagccgttaagtatgaacatacagtaaaagactgttgatagaatacatcggtcttatgaaatgaaatgtgttggttaaggattttttaaacgaatttcacattacacaactggctttactaaatctgagtcttgtatttctgaacagggcaccatgggcccggcactgccacgttttccaaggaacctgccggagctcctgcggaagctgctcctcaggcgatggagtcccttcgctggtaggcccttcttcagtcaccacaggatgcctgccattcatgaacaagaaggagaggacgggctttgaataaaaaacaggatccaggaaatatttgtgaggccatttggacttcagtgtgaaatggtgttaaaagatgaagtcatttattcaagaagtaaacctctgccacctggactgtgcgcagacatttcattgattttgtttaataaacattttctggctttgggaggtgt

SEQ ID NO: 20601 - DNA, 954 bp, Homo sapiens
gataatattgacgcgtccggaaatgtcttacgatgatcatttagaggtttattttgaacaactggcaattccaggaatgatggaataaagcatacgaagtagaaggactggaacctccagaaaaagtactttaagttacctacaggtgatcctagtcaggcaaatgaaaacagtagcctaaagtgtcagtttcaaccagaaaataacagctctgatttctcatggctcatactcgtctgaaacgactcaggtagaggctgaggaaggccgtgttgtttgtctacctgggactacacctactgaaagaagttctcaagttctgattgagttctaaaattttttgaagattggaattcttcatatgtaaaaagagaagagaaagacattcttgattttggtgactagagttgtagatgctggaagctttgccactaacattgatgaaccagatgcatgtcaccagcccatcacggtgattcttaagccgttaagtatgaacatacagtaaaagactgttgatagaatacatcggtcttatgaaatgaaatgtgttggttaaggattttttaaacgaatttcacattacacaactggctttactaaatctgagtcttgtatttctgaacagggcaccatgggcccggcactgccacgttttccaaggaacctgccggagctcctgcggaagctgctcctcaggcgatggagtcccttcgctggtaggcccttcttcagtcaccacaggatgcctgccattcatgaacaagaaggagaggacgggctttgaataaaaaacaggatccaggaaatatttgtgaggccatttggacttcagtgtgaaatggtgttaaaagatgaagtcatttattcaagaagtaaacctctgccacctggactgtgcgcagacatttcattgattttgtttaataaacattttctggctttgggaggtgt

SEQ ID NO: 20602 - DNA, 463 bp, Homo sapiens
cattctaaaatctcatcagagaactactcagccaaagccacagagctagtaaatagtgggatcaggatctgggtctttgtggttctaaatcacacacccttagtcacaacaatactgtttcatgtgttgatgggttgattagagagcactttgacgggagaatactgacctctgaggttagggagggctcttgtaacattacctatctatatgctgtaatagattgcacatgctccctggtactacaattgttagtgtgtgtatccatttttttccttatggctgtaagctcattgaggagcaagaattgtggcttgtgcattttgtgtgtgtcccctctatttgtagcttggtgcctagacaatgaacattgaattggactaaaaagctgtagtagcactatccaacaggaatatcaagcaagccatacatctaattttaaaatttctagtagccacaagac

SEQ ID NO: 20603 - DNA, 147 bp, Homo sapiens
gttttacattaggaagtaatgagtaatctaatgacctggaagcttttcaaataaaaatttgcaggcatcatcctcagaaagtgtctgacctaactgggtatgggaatagcatctatgtattgagttttcaggtgattagagcataac

SEQ ID NO: 20604 - DNA, 252 bp, Homo sapiens
ttttcttgtttttagaattattcctggactattcagtagccactcagatgccactgtgtgaaagggccataaatgttgcctgctgcttgaacatctatttttttctcttccagtgcttgataactctgggagataatacactgcagtcgtactagtggttaagatatttgggaataaaattaatacttttgactagaagcgtctaaggataaaccaacagaaattgaatctggatacatctttaagatgtaa

SEQ ID NO: 20605 - DNA, 502 bp, Homo sapiens
ggaccttatgcaaatccagaacccagcagagcagacattaaatcttaaagttccaaaacaatctcctttgacttcatgatctgcatcctaggcacactggtgtgagggatggacctcaaaggcctcaggcagcctcactcccatggctttgctcagtccatgtggctgttctcatgggttaggttgaatgcctacagcttttccaggctgaggttgcacactgccagtggctctataattctggggtctggaggacaatggccctgcttccacagctccactgggcattgctctaatacaggtctctatgggggctgcaatctcacattcctgattgtcattaccttagcagaggctctctgtggtagctctgccccttcagcaggcttctgcctggacacctaggctttctgatgcatcctctgaaatctaggtggaagccaccaagagttctccaccactcttgcattctgggtgcctgcagacttaacaacatgtgata

SEQ ID NO: 20606 - DNA, 418 bp, Homo sapiens
tgagtcgagtatgactatagagtatataaaagggaaacacaaggcatcctagtggtgaaggaactgttctgtaccttgactatggtgatgtttatatgaatctatatatgtgattaaacggcatggaactaaatgcatacatatacaaatgagtgcatgtaagacaattaaaatctgaataaggttagtgtgtcaacaggtgactgtatcaatgtcctgattgtaatattttactacaattctacagaacgttaccacagggggaaactgagtgaggggcacatgggatctctacatgatttattcctactgatttaatgacatgtgaatctacaattagctcaaaagtataaaaaaaaagtgtatatatatatatatatatacacacacacacacacacacacaccttattttaacc

SEQ ID NO: 20607 - DNA, 384 bp, Homo sapiens
tgaggattgatcaggcaggggtatggtctaccacaccatggaaatcagagcgccacgcatcggcatggtacatgagctcatagctcttggaaaagtgactgctttgattgggggcaagtgggaggaaatacaggaattttaatctggcagtcatgagcaagacagagttaaatactgggattaggacacacagctaggacactgatcagaaggcaagaagccctaagcatgtgtgaagcagtaaatgagtaatagaaaaatggacctgctttagtgtcatcagtggtgctgagagcagataatcactcatgagccaagagagcaggctgatgatggattccacccaaagaaagctctcacaccacactgcatgggccagaggga

SEQ ID NO: 20608 - DNA, 189 bp, Homo sapiens
tatttgtcatttctttatgttgggaacaatttaagtcctgtcttccagctactttgaaatatataatacaatgttgttaacaatagttactatgctctcctttgacaacagagtatacctgttttctaatcttatgtttgtacctgttaagctaccgctcttcatcgtccacccctaccaacccatcct

SEQ ID NO: 20609 - DNA, 932 bp, Homo sapiens
aagaccctagcatagtggggcaagacagcagccctctgagaagagaggcacttgctgctgttttgtacatcggtcctgcaccgggcctcacgggcagggagccccgctttaatcaggcttccacacctcacggagggcttcttccagcttctgcctgtaggctgtgtagcgcctcttcaggttctgcagctgttcatcttcttccttgtccaagatgcgcaagaaattctgtagttctgggaaggctgaaggcttcccactgtcaggaaacacagaaagaaaaatgccagatgtttaatactcagttagacttaggaatgctgaccaggagctcccagaggtgcggctgccctcccctcccagccccatgccgcagaaggtgtggtctgcaagagctggggtgttgccagcctaagggctccctccactcccactcccacctcagctcacaccaatcaccttcctaccctctcctcccactgttcaagacgatctccctaaaagccagagacctccatatccctaagtctattggacactttcattccttacctgatttgacccccaacagcattaaaaacaattcgacagtcctttcatcttaacctcgagtcctcattgtaactgactttcttacctcgcataatcagtcttatcacccccaaacagttctccattcagccttttctccctcggtacggccccttggtgctagctactatcatctattcctgcatcgctggaacagcttcctacctggcctcctcactcggctcttatgctcccccatctgttccccaaacagaacatcctttgtaaaatgctcatctggccaagactctcccctgcttagaaccatccaatggcttcccttagttgctgatgctgtctgaaagactctaaactctccggccccatctctctctcaccga

SEQ ID NO: 20610 - DNA, 131 bp, Homo sapiens
gcttggtcttgaaggatctgttgacttttttgaagaaggtggggcaggggatgtgagtgacttgacacaaagactgtggtaaacccagtgggtgttagggacaggagttccctggtgtggtgtggtgctgt

SEQ ID NO: 20611 - DNA, 198 bp, Homo sapiens
ccttggttcctacaatcgcacttctatgcacgtaacaaaatttcacatgcaccctataaatatggacagctacgatgtattaataatattaggctgggcatgtttgctcacacctgtaatcccagcactttgggaagctgaggcaggaggatggatcacttgagcccaggagttcaagacgagcctgggcaacataat

SEQ ID NO: 20612 - DNA, 210 bp, Homo sapiens
ctgctggccacctgctgggggtctgcgcttgagtgaatgagagagagagagggagggagcaagagagagggaagctcatggttgtttgaattagtggtttcccatgtactaaacactttgagaaaaagtgcagggattctgaaaagacagatgtacacgctcccatacaccctggcctgatttcttcaaggttgcagctctagccacttc

SEQ ID NO: 20613 - DNA, 404 bp, Homo sapiens
tctcgaactcctgatcccaggtgatccacctgcctcagcctcccaaagttcttggattacaggcgtgaaccactgctcctggccgaacattatattttttaaaagcaaatatttagaataaagctcgttagtagacctttattcgttgatttatttcatctttcctggagggaaaaatatgtaacatatacatatgcttttccagaataaatcagtctttttggggatactcttaggctgcagatcagaaagactgctttagaaaacaaaacaaaaattccagctacttaaaatgtataagaatctggcaaagtttggatacagtggatagttgttcaaaagaagaaagctttttggagatgaggttagaagaagagttcacaaagtgaaaatttaatgggctt

SEQ ID NO: 20614 - DNA, 1571 bp, Homo sapiens
tcaaccatgacatttcttgtttctaaagccacagcctctaaaattgaatgttaagtcaactagaaataatgacaatatttaagaaataaaattctttttattttttatagtttataaaaaattatttttgaattataagttaaacaacttgaacatgcagatacctaaaagtgtcatctaggtgatagtattaatattttaatagcttataattgtgagtcacagttgccccattgggtttactgaaaagcagttatttatcttatatgtgtgaatggagaataggctttttataatcctaagcatacagatcttttaagattagcgctatatttagatctgaataaaattgataggcttgtaataacaaattttaatacttttttctaatagaagtgaaaaacagaagtcatttgttaaaatgagtttaagagaaacttcacatgtatttattaaataacacttaaaccacatggtaagttactaatcagtaatttcaatctattttattttagtcactgaaaaagcataacattctttaattattcaatcagaaacagtattcttattagtgtttctgaaagcaactgtagaccactcagtggatgacaaggttcatgctgacaacaaattttctatataataataggctcattttaactttaaatataaacactcattatttcaaaagtaaaattaatggttcttttaagtcataagaggaataatgttataattcacttactgaagtgtttgtctcagactttgtaatgaatactttaaaccagaaattaagttctacatactatctatggataaaaagaagtggtttgtaaatttatctttatttttactaaattaaaaaatttaaagccaaaatgttaggtcaggatttaaaacaagcattgggtgacagggtgttgggcgtaatggttagattgaaactcggtgtcagctggttactgattgcatccccaactttaggattttggtaaaattaaagcaattaatgcaaataaaggtgcccgaagagcacccagcatatagctctcatttgttgattctgttagatcatgatcaatgttaagcctaaaaacaaggtggccacatcagtggtttgtaacccatgtttattctaatcagtcaatctggggctatatataatagtagttgaatgtttatagtactacccttggaaaattcccatatattcacacccagcatggatataaatacgggaaagatttcccattgagtacttctctttagcactccagtaacactagacaaataagcacctaaatgccgagtgtttgtcagttttaaaattagaaaagaaggcaagttgttttcttgtctacctgtttaataaattttttattgccaagtacgtatgttcatttgatttaatacgttgaaatgtagtttaaaatatatattcaaataactaacaagtgaaggaataatttatttagaaacgtagaaataatggtactgtaagcagttgctttagagtcttttatagtattgtattttgaacattaaaaataaacattttattcctgaaaaat

SEQ ID NO: 20615 - DNA, 510 bp, Homo sapiens
gaaaacagaacagaagggaatgtcttatctgatgtcgacagcagacaattcaatggagacagacttccctccccaatctcagtaaagaggtggttattttacggaaagaaaaaggacaccagaaacagaagaaagacacatctccatttacttgaaaagaaaaaagctgaaaagaacctttgcaataaaaaagtgttataattttaggcatgcaaacctgtgcgttcacacctttccctacggcagccctttctcccaggttccaggagtagagcccagggcgcatgtctgagtttgtctctggatactagtgtcaaacacctggccacccgtgagcacagctcacggaggaggcagagcaacaggacaaacgggtatctgaagatatcattcaacagcctagaatcacactggtccttaaaggagaaagccttccagtttcctcggctcagcttttcccaaacttcatgcaccacctttgtggcttctgccacattcaaagaccaccta

SEQ ID NO: 20616 - DNA, 421 bp, Homo sapiens
ttcctcgctaagcggtttgagatcctcaagtgtaaacaggactctccctggaggctgctcctccgggcccctccccgcggcccgaccgtcgctcgcttctctccccggacggcggccgcctctgttttctcgttccctcccctcagctggctttcagctttcttttctcttcatcgtccccttcccgcatacacactgaaagaatctcgaattcctaaaaattagaagcggggcaggactagccttcgaaaaagccgaggctgggcattgcatggcattgcgtcgagctgtcctcgccctcatcagctcccttccccggccccatccgttcgcccttgcctctcttccagccttcctctaatttccccagggaacctgcggagtgtcgctttgggaaattaacgcggccggggtttggggg

SEQ ID NO: 20617 - DNA, 4051 bp, Homo sapiens
agagccggtgccggcccgcgagccccagcgtctctgcagaccagtcccctccagggtccggcggggcccgcgcggtgggaggagtcgggcactggccggcgactaacgggtccgactgctgaccaagctaggagagacccggaccacggagacagagaccccggcatcgcgacccccgaggacctcctctcctcgccctgtggcacccactagtcctgggcactcagtcgcggagagcccccgaccccgcgcgcccagccccgggggagcccacctcctccccgcggcccgcccgggccatgctcccccggggcagcggctgagccccagccgggaccgggatcggagcccgcgcggagcatggatccgggctgggggcagcgggacgtgggctgggcggccttgctgatcctcttcgccgcctcgctgctcacggtgttcgcctggctgctgcaatatgcccggggcttgtggctggcgcgggcccgcggggaccggggcccgggacccgccttagccggggaacccgcgggttccctgcgggagctgggcgtgtggcgctcgctgctgcggctgcgggcgactcgggctggcgccgccgaggagccaggagtccggggcctcctggcgtcactcttcgccttcaagtctttccgggagaactggcagcgggcttgggtgcgagcgctgaacgagcaggcctgcagaaacgggagctccatccaaatcgcctttgaggaggtgccccaactcccacccagagccagcatcagtcatgtgacctgcgtagaccaatctgagcataccatggtgctgcgttgccagctctctgctgaggaggtgcggttcccagtctctgtgacccagcagtcccccgctgtcgtctccatggagacctaccacgtcactctgacactgccaccaacacagttggaagtcaacctggaggaaatccctggtgaggggctgctcatatcctgggccttcactgatcgcccagatctcagcctaacggtgcttcccaagcttcaggccagggagagaggtgaagaacaagtggagctctccacaattgaggaactgatcaaggatgccatagtcagcacccagccagccatgatggtcaacctcagggcttgctctgccccaggaggcctggtacccagtgagaagccacccatgatgccccaggctcagccagccatccccagacctaaccggttattcctacggcagcttcgggcatctcacttgggaaatgagctggaaggcaccgaggaactgtgctgtgtagctgaactcgacaaccccatgcagcagaagtggaccaagcccgcgagggctggatccgaggtggagtggacagaagacctggcactggatctgggcccccagagccgggagctgaccctcaaagtgctgaggagcagcagctgtggagacaccgaactcctaggccaggccacactgcctgtgggctccccctccagaccactgtctcgaagacagttgtgcccactcaccccagggccagggaaagccctgggaccagcagccaccatggcagtggagcttcactatgaggagggctctccccggaacctgggtactcccacctcctccactccacgccccagcatcacacctaccaagaagattgagcttgaccggaccatcatgcccgatggcaccattgtcaccacagtcaccactgtccagtcccggccccgtatagacggcaaattagactccccctcccgctccccgtccaaggtggaggtgaccgagaagacgacaactgtgctgagtgagagcagtggccccagcaatacctcccatagcagcagccgggacagccacctttccaacggcttggaccctgtagcagagacagcgattcgccagctgacagagcccagtgggcgggtggccaagaagacacccaccaagcgcagcactctcatcatctctggtgtttccaaggtgcccattgctcaggacgagttggcgctatccctgggctatgcggcatccctggaagcctcagtgcaggatgatgcagggaccagcggaggcccctcttcacctccctcagacccaccagccatgtctccaggaccgctagatgccctctctagtcccacaagtgtccaggaagcagacgagacaacccgttcggatatttctgagaggccatctgtggatgatattgagtcggaaacggggtccactggtgccctggagacccgcagcctcaaggatcacaaagtgagtttcctgcgcagcggcactaagctcatcttccgccggaggcctaggcagaaggaagctggcctgagccaatcacacgatgacctctccaacgcaacggccacgcccagtgtccgaaagaaggccggcagcttttctcgccgccttatcaagcgcttttccttcaaatccaaacccaaggccaatggtaaccccagcccccagctctgaggacccagctctgaaagggcacgagttctctcagcccattccccacctccccttccataccccttcctggatctccagtgcctgggccaggaaagccctctgggttccgggaagccccgtccaccctgggccatggggccggttggaaggatacttggaacgggaagcacatgagaggtgggcacccggtgccgaggacatggacgagggactggtggctgggagggagaggagggccctgtccggcatgtgtgggtattccccagaagcatttgcctcctgctgagcctggtccctgagcggagtcccagggtgctcagctcttcagctgacccttcttcccttatttattctcttttctatttatatgtgtggcttaggaccctccgtgaacagatgatagagggcatctctcccaggtgacccttcttttctgtcccaggagggtgggtaattccctttgggatggggctcccacacctccctcaggtccccactcagaccagcaccagtgtctgcctctgagaatgttggcagctcacagagagcagggccggcccgggatggggggcaggtactccccaccttcctgcctcccctcctgctcctcatccctccctccccctttattaccgttttttgtacttgatgccttctctgtgagcagtggctctgtgggaaggagggagccgggagcctggtgggaagccttccccagagagatggctttaggggctttatttaaagactgtgatgatggagccacgcaaggctgcacctctgtgtgttgggagacgatgatgatgtccattgctgtgtgatggcttggaatttaatttattaaagtcaaattggagtttaaaaactggacaactggttatcctttgaaaggcagtaggcagccaggctgtgacatggatggtgtgggaggatgagacaggggcccggataatgaggttgggtagatgacacacattgtggatctgctaagaagttcctgcaggaaagaaggggtgtgcagagaaaggatggaagagacaggaggctctggagtatgaaattgtagcaaaaaactcaatcaactagtacaggttagtcttcattcccctttctggaacaggctgctccttctaggatgtaatggagatcaaagcttggaccctgtaactagactgcctgcctgggtttgagtcccagctcttctaattacttgtgtgaccttgggcaagttatgtaacctctaagtgcctcagttttctcatctgtaaaatgggaacttcaatcatcatggctatcatttggttgtggatgagaagtaaatgaagtgctgagtgttaactgttgcctcagaagaaactgggagggggaagtcttagaagtgtttcaacataataaaagctctctcattctgaaatgtgggcaaatttcagggattgatagatcctagcaaactgtgtccctggttcccgtgcttgagatcttatacaggacttgaaccaggtaagctgctacaggatattgggcagaatgcaggaccaggaagcaagaaaactgagtctgccacagacaa

SEQ ID NO: 20618 - DNA, 3341 bp, Homo sapiens
agagccggtgccggcccgcgagccccagcgtctctgcagaccagtcccctccagggtccggcggggcccgcgcggtgggaggagtcgggcactggccggcgactaacgggtccgactgctgaccaagctaggagagacccggaccacggagacagagaccccggcatcgcgacccccgaggacctcctctcctcgccctgtggcacccactagtcctgggcactcagtcgcggagagcccccgaccccgcgcgcccagccccgggggagcccacctcctccccgcggcccgcccgggccatgctcccccggggcagcggctgagccccagccgggaccgggatcggagcccgcgcggagcatggatccgggctgggggcagcgggacgtgggctgggcggccttgctgatcctcttcgccgcctcgctgctcacggtgttcgcctggctgctgcaatatgcccggggcttgtggctggcgcgggcccgcggggaccggggcccgggacccgccttagccggggaacccgcgggttccctgcgggagctgggcgtgtggcgctcgctgctgcggctgcgggcgactcgggctggcgccgccgaggagccaggagtccggggcctcctggcgtcactcttcgccttcaagtctttccgggagaactggcagcgggcttgggtgcgagcgctgaacgagcaggcctgcagaaacgggagctccatccaaatcgcctttgaggaggtgccccaactcccacccagagccagcatcagtcatgtgacctgcgtagaccaatctgagcataccatggtgctgcgttgccagctctctgctgaggaggtgcggttcccagtctctgtgacccagcagtcccccgctgtcgtctccatggagacctaccacgtcactctgacactgccaccaacacagttggaagtcaacctggaggaaatccctggtgaggggctgctcatatcctgggccttcactgatcgcccagatctcagcctaacggtgcttcccaagcttcaggccagggagagaggtgaagaacaagtggagctctccacaattgaggaactgatcaaggatgccatagtcagcacccagccagccatgatggtcaacctcagggcttgctctgccccaggaggcctggtacccagtgagaagccacccatgatgccccaggctcagccagccatccccagacctaaccggttattcctacggcagcttcgggcatctcacttgggaaatgagctggaaggcaccgaggaactgtgctgtgtagctgaactcgacaaccccatgcagcagaagtggaccaagcccgcgagggctggatccgaggtggagtggacagaagacctggcactggatctgggcccccagagccgggagctgaccctcaaagtgctgaggagcagcagctgtggagacaccgaactcctaggccaggccacactgcctgtgggctccccctccagaccactgtctcgaagacagttgtgcccactcaccccagggccagggaaagccctgggaccagcagccaccatggcagtggagcttcactatgaggagggctctccccggaacctgggtactcccacctcctccactccacgccccagcatcacacctaccaagaagattgagcttgaccggaccatcatgcccgatggcaccattgtcaccacagtcaccactgtccagtcccggccccgtatagacggcaaattagactccccctcccgctccccgtccaaggtggaggtgaccgagaagacgacaactgtgctgagtgagagcagtggccccagcaatacctcccatagcagcagccgggacagccacctttccaacggcttggaccctgtagcagagacagcgattcgccagctgacagagcccagtgggcgggtggccaagaagacacccaccaagcgcagcactctcatcatctctggtgtttccaaggtgcccattgctcaggacgagttggcgctatccctgggctatgcggcatccctggaagcctcagtgcaggatgatgcagggaccagcggaggcccctcttcacctccctcagacccaccagccatgtctccaggaccgctagatgccctctctagtcccacaagtgtccaggaagcagacgagacaacccgttcggatatttctgagaggccatctgtggatgatattgagtcggaaacggggtccactggtgccctggagacccgcagcctcaaggatcacaaagtgagtttcctgcgcagcggcactaagctcatcttccgccggaggcctaggcagaaggaagctggcctgagccaatcacacgatgacctctccaacgcaacggccacgcccagtgtccgaaagaaggccggcagcttttctcgccgccttatcaagcgcttttccttcaaatccaaacccaaggccaatggtaaccccagcccccagctctgaggacccagctctgaaagggcacgagttctctcagcccattccccacctccccttccataccccttcctggatctccagtgcctgggccaggaaagccctctgggttccgggaagccccgtccaccctgggccatggggccggttggaaggatacttggaacgggaagcacatgagaggtgggcacccggtgccgaggacatggacgagggactggtggctgggagggagaggagggccctgtccggcatgtgtgggtattccccagaagcatttgcctcctgctgagcctggtccctgagcggagtcccagggtgctcagctcttcagctgacccttcttcccttatttattctcttttctatttatatgtgtggcttaggaccctccgtgaacagatgatagagggcatctctcccaggtgacccttcttttctgtcccaggagggtgggtaattccctttgggatggggctcccacacctccctcaggtccccactcagaccagcaccagtgtctgcctctgagaatgttggcagctcacagagagcagggccggcccgggatggggggcaggtactccccaccttcctgcctcccctcctgctcctcatccctccctccccctttattaccgttttttgtacttgatgccttctctgtgagcagtggctctgtgggaaggagggagccgggagcctggtgggaagccttccccagagagatggctttaggggctttatttaaagactgtgatgatggagccacgcaaggctgcacctctgtgtgttgggagacgatgatgatgtccattgctgtgtgatggcttggaatttaatttattaaagtcaaattggagttt

SEQ ID NO: 20619 - DNA, 414 bp, Homo sapiens
aatactatattacgtcagtcaacttacaaacaaatgttcatccttgctagtgatcaaagaaatacaaattaaaacataggctttcgtggttacctcatagcctggccaaaatggaaaagatgaactttcataattttccatcatagcattgtttataataacaacacatgggaaacaacacatatgtctcattatggtatatccatttattggaatcctaccacctattaaaaatgatatgagtctagggccgggtgcggtggctcacgcctgtaatcctaacactttgagaggctgaggtgggtggatcacgatgtcaggagatcgagaccatcctggctaacacggtgaaaccccatccctattaaaaatacaaaaaattagccgggcatggtggcatgcgcctgtagtccc

SEQ ID NO: 20620 - DNA, 872 bp, Homo sapiens
aatcccccacagttccatttattaaataagtaaaccccaataataagcatttgtgtcctggcaacttatagtggatgtctagaaaagtaatacataaagagaaatgttcatgttatttgtttagtcatgggatgtgtgtgcctgtcgagcacctcttcaacttggaatctggtagaacaccgccaccctcattgcctcatttttccacgtcgaccttcacagtaattgcttgttcagtgactgccacaacccagcctggcagagagagggaagataccctataaagcaaggtaacgttaatgttgagaccatgaatggccttgagcagagcagagtatcattgcttccttcaaaattcagaaggatctgatggtgctctgtgagttcatgggggtgcctccgtgcaggttggaaaccacagctgtgcgtccttcccgctttccctcttgatcagtagaagggtaccctccctggcctgcacgtcgctgggtcacacaacactggctgtcgttgcacaaagccacggccaccagcgttcctttgaggccatttgtttccagccatggtgcctataggatttttcctttatcctgtaatttcagccaaatcagagcatgtgacctggcttagatgtcaatataattgttgttatgtgctcttttcccttcctgtgtctgtgacaggtttaatttaacctgagaaggctgcagatcctcggggttggtgtaaaaacacctcatcctgatctgagaaggcggtcagcttttctcctcgttgccgttggctgccagcacccattctctgtggatgtgaaaatcccagaagggctgggcttccttcttgggcattccccaggcctatctccagagtgg

SEQ ID NO: 20621 - DNA, 734 bp, Homo sapiens
gcttggaaattgtatgaaattcagacttcattgtctatgaatttttattgggactcagctatactcatgtatttatgtattgcctgttggtactttcacactacaaaggcagagttgactggttgcagcagagactgtaatggcctacaagcctaaaatatttactgtgtgactctttacagaaaatgtttgctgatttctgatagagagttgatgaagagtaagacaaaaatgtcatataggtgaatgcagatcttgtgatcttacagttgtgaaactggaacataaaacagtttgtcggtgggctttattaggtgacattgtgaaacttctgatgacagtcttgcaggtacttaaaaaagtagtacaacaaagtgagtaattcatgtgcagtccaggggaaaacttaacagatagcaaaagaaagtatatgattaaaaaattcaaataggccgggcacattggctcacgcctgtaatcccagcactttggaaggctaaggcgggtggatcatgaggtcaggagttcgagaccagcctgaccaacatggtgaaaccctgtctctactaaaattacaaaaattagctgggcatggtggtgcgtgcctgtaatcccagctagtcaggaggctgaggcaggagtatcacttgaacccaggaggtggaggttgcagtgagccgagattgtgccactgcgctccagcctgggcaacagagtgagactccgtctcagga

SEQ ID NO: 20622 - DNA, 966 bp, Homo sapiens
gctgtagatacgtatgtgtgtatttgttcaacaattggagatggttgaatacccttgaacaaagtgtgtatcttctcaaatcagtggttgcactagtcaataattagaaggtgttgttatttttaaaactataagcaaaattatgaaggcctttaaaaaatctatcataataatgaaaaagaggttgtctcccaacagtgctgtccctcaaagaaaagactggttatgtggaaacagcacgtttggagagattattctagtgaataacagtgtatatttgtggtaggcaaatttctaagaatgacccctactgacacccccaccaatgaccttgtataatatcctcccactttgagcatgggtggaacctgtttgatccatgattatatcatgttatgtagcaaaaggaagactgtctgggggtggctaatcaaatcttgtgactcctttaaaagcagagagttttctcgggctggtggcagaagtcaagagacaaagcagaaggacctcaggcaccattgctgttttaaggtagagggggctgcatgagaaggaatgcacatggctttgaggagctgagagaggccttggctaacagcaaaggagctgggaactgcagtcctacagccacgggaactgaattcagcccataagctcattcataggcttggaaaggcattcatctccagtctccagataagacccagcctggccaacactttgaatccagccttgtgagaccctaagccgagaactcacttaagcctgcttggacttctgacctacagaactatgagataataaatcagtggtgttttaagctgctaaatttgtggcaatttgttatgtaggaataggaaatgaatacagtattttaaaagaggtaaagaggaaatcttcatacttgattccctgtagtatgctggatatttcttggtaaatgcatgaataaagtctttagtagca

SEQ ID NO: 20623 - DNA, 2811 bp, Homo sapiens
gctgtagatacgtatgtgtgtatttgttcaacaattggagatggttgaatacccttgaacaaagtgtgtatcttctcaaatcagtggttgcactagtcaataattagaaggtgttgttatttttaaaactataagcaaaattatgaaggcctttaaaaaatctatcataataatgaaaaagaggttgtctcccaacagtgctgtccctcaaagaaaagactggttatgtggaaacagcacgtttggagagattattctagtgaataacagtgtatatttgtggtaggcaaatttctaagaatgacccctactgacacccccaccaatgaccttgtataatatcctcccactttgagcatgggtggaacctgtttgatccatgattatatcatgttatgtagcaaaaggaagactgtctgggggtggctaatcaaatcttgtgactcctttaaaagcagagagttttctcgggctggtggcagaagtcaagagacaaagcagaaggacctcaggcaccattgctgttttaaggtagagggggctgcatgagaaggaatgcacatggctttgaggagctgagagaggccttggctaacagcaaaggagctgggaactgcagtcctacagccacgggaactgaattcagcccataagctcattcataggcttggaaaggcattcatctccagtctccagataagacccagcctggccaacactttgaatccagccttgtgagaccctaagccgagaactcacttaagcctgcttggacttctgacctacagaactatgagataataaatcagtggtgttttaagctgctaaatttgtggcaatttgttatgtaggaataggaaatgaatacagtattttaaaagaggtaaagaggaaatcttcatacttgattccctgtagtatgctggatatttcttggtaaatgcatgaataaagtctttagtagcaagtcatgtacctggaccttgttggggatgttctcgccagagatctcaattagtcttcattggacgtttgttggcaaagttgcagcatcttactgagtagcgtttggtaaaggaactgctagaatgagactataggaataggactgaaacagtgtgtaagggatcttttttatttctagaagaggtgttactttatactgatttagactgctctgagcctgtcagaagtaaattcaagaatgattaacagtggtattttagatacattaagagcaaaaataacctttgccttgtagagatcagataatctgtgtatcgagggatttaattttttttaaccaaaacttagtttctctttttatcatctagcacagatcaaatcctgtatgggccagccaaatgtttgtagtttgagaatgttttgcaaatacctctctgcttccaagccattaatagctaatgaagttttattttggtttgtccattaatttttctgcttatttttactgtattgccatgtccttgatacgagacaagtagaactaaaagagagaaaatgagaggttaagactgtcagaagatgagaaatgtgagtcataaccataccttagtgttttaagggaactttatccagtccaatccctttatagaaaaggaacttttccaagttatgttgcagtatttatagtgtgtaaaattttgtttgactttggtagttgtgcattttaaattatgaatcttatatgctacgataactagtatgcttactttctttaatgcatgtgatcatacaatgctaaaaaggtattttttaaagacccaaccaaactgaggattttgttatacatatctgtatcaacacctatatataaactcttcttcttacctgaaacactccttcacccggtttgggcactaactagatcattttcaaaggaacaaacaggaaggagcaagctggcactccagggtgcatctgagctgagaatttagaagacctcattcaagaaagtaaactgagcattgatgggaaagcactttgcgcgaagtaacattcccactgttaatgttgcagtcaaaattgtggaaaaaaaaaagtggtgctaaaattgttctgaaatgaagattgtttgttgtggggaatattttaatactcttggactttagggaggctattttatgtgtcacttgctcctagttgtttcattgtattagtaattagcaaactgtcctggaaccaagggtttggtacttttgcctgattagcattccattatttatttgaaatgctcagtgtttgctcaaatttggtgaaaatatcttttgaagacatattctctgagccttaaaaatggctgctatcgacagtactgtaagatgcactgccagtagatttgatacttttcatttcagtgtaggcagtaatgttttctaagaaagatttagaaatcagcaaagtgtaacaattgtgtttcatttatggaatggaaaaactgaagtgtcccattcagaacactttggaaaggttgtctgcattaggggatgtttctggaagcatcccttagagaagctgcctgaggaatctccttgccaggttgtaccagatttttttttttcttaaatgtattgtatatattttccttaaaatgtcttcattggctgaatgattcctatccgtagtaatattttaggtacttgttggatttttaaaggaagattatttattttcagatttgctgctataattgaaaacctagtaactggtcctgttgattgtgccttcatcactgtttctctgtgccacgaccgttcatgtgtatttgaaataaagaagtttaaaaagcca

SEQ ID NO: 20624 - DNA, 2863 bp, Homo sapiens
gctgtagatacgtatgtgtgtatttgttcaacaattggagatggttgaatacccttgaacaaagtgtgtatcttctcaaatcagtggttgcactagtcaataattagaaggtgttgttatttttaaaactataagcaaaattatgaaggcctttaaaaaatctatcataataatgaaaaagaggttgtctcccaacagtgctgtccctcaaagaaaagactggttatgtggaaacagcacgtttggagagattattctagtgaataacagtgtatatttgtggtaggcaaatttctaagaatgacccctactgacacccccaccaatgaccttgtataatatcctcccactttgagcatgggtggaacctgtttgatccatgattatatcatgttatgtagcaaaaggaagactgtctgggggtggctaatcaaatcttgtgactcctttaaaagcagagagttttctcgggctggtggcagaagtcaagagacaaagcagaaggacctcaggcaccattgctgttttaaggtagagggggctgcatgagaaggaatgcacatggctttgaggagctgagagaggccttggctaacagcaaaggagctgggaactgcagtcctacagccacgggaactgaattcagcccataagctcattcataggcttggaaaggcattcatctccagtctccagataagacccagcctggccaacactttgaatccagccttgtgagaccctaagccgagaactcacttaagcctgcttggacttctgacctacagaactatgagataataaatcagtggtgttttaagctgctaaatttgtggcaatttgttatgtaggaataggaaatgaatacagtattttaaaagaggtaaagaggaaatcttcatacttgattccctgtagtatgctggatatttcttggtaaatgcatgaataaagtctttagtagcaagtcatgtacctggaccttgttggggatgttctcgccagagatctcaattagtcttcattggacgtttgttggcaaagttgcagcatcttactgagtagcgtttggtaaaggaactgctagaatgagactataggaataggactgaaacagtgtgtaagggatcttttttatttctagaagaggtgttactttatactgatttagactgctctgagcctgtcagaagtaaattcaagaatgattaacagtggtattttagatacattaagagcaaaaataacctttgccttgtagagatcagataatctgtgtatcgagggatttaattttttttaaccaaaacttagtttctctttttatcatctagcacagatcaaatcctgtatgggccagccaaatgtttgtagtttgagaatgttttgcaaatacctctctgcttccaagccattaatagctaatgaagttttattttggtttgtccattaatttttctgcttatttttactgtattgccatgtccttgatacgagacaagtagaactaaaagagagaaaatgagaggttaagactgtcagaagatgagaaatgtgagtcataaccataccttagtgttttaagggaactttatccagtccaatccctttatagaaaaggaacttttccaagttatgttgcagtatttatagtgtgtaaaattttgtttgactttggtagttgtgcattttaaattatgaatcttatatgctacgataactagtatgcttactttctttaatgcatgtgatcatacaatgctaaaaaggtattttttaaagacccaaccaaactgaggattttgttatacatatctgtatcaacacctatatataaactcttcttcttacctgaaacactccttcacccggtttgggcactaactagatcattttcaaaggaacaaacaggaaggagcaagctggcactccagggtgcatctgagctgagaatttagaagacctcattcaagaaagtaaactgagcattgatgggaaagcactttgcgcgaagtaacattcccactgttaatgttgcagtcaaaattgtggaaaaaaaaaagtggtgctaaaattgttctgaaatgaagattgtttgttgtggggaatattttaatactcttggactttagggaggctattttatgtgtcacttgctcctagttgtttcattgtattagtaattagcaaactgtcctggaaccaagggtttggtacttttgcctgattagcattccattatttatttgaaatgctcagtgtttgctcaaatttggtgaaaatatcttttgaagacatattctctgagccttaaaaatggctgctatcgacagtactgtaagatgcactgccagtagatttgatacttttcatttcagtgtaggcagtaatgttttctaagaaagatttagaaatcagcaaagtgtaacaattgtgtttcatttatggaatggaaaaactgaagtgtcccattcagaacactttggaaaggttgtctgcattaggggatgtttctggaagcatcccttagagaagctgcctgaggaatctccttgccaggttgtaccagatttttttttttcttaaatgtattgtatatattttccttaaaatgtcttcattggctgaatgattcctatccgtagtaatattttaggtacttgttggatttttaaaggaagattatttattttcagatttgctgctataattgaaaacctagtaactggtcctgttgattgtgccttcatcactgtttctctgtgccacgaccgttcatgtgtatttgaaataaagaagtttaaaaagccatgttgaattcaagattccttctaataaaaataggtgaaacttaaaaaaaaaa

SEQ ID NO: 20625 - DNA, 2753 bp, Homo sapiens
gctgtagatacgtatgtgtgtatttgttcaacaattggagatggttgaatacccttgaacaaagtgtgtatcttctcaaatcagtggttgcactagtcaataattagaaggtgttgttatttttaaaactataagcaaaattatgaaggcctttaaaaaatctatcataataatgaaaaagaggttgtctcccaacagtgctgtccctcaaagaaaagactggttatgtggaaacagcacgtttggagagattattctagtgaataacagtgtatatttgtggtaggcaaatttctaagaatgacccctactgacacccccaccaatgaccttgtataatatcctcccactttgagcatgggtggaacctgtttgatccatgattatatcatgttatgtagcaaaaggaagactgtctgggggtggctaatcaaatcttgtgactcctttaaaagcagagagttttctcgggctggtggcagaagtcaagagacaaagcagaaggacctcaggcaccattgctgttttaaggtagagggggctgcatgagaaggaatgcacatggctttgaggagctgagagaggccttggctaacagcaaaggagctgggaactgcagtcctacagccacgggaactgaattcagcccataagctcattcataggcttggaaaggcattcatctccagtctccagataagacccagcctggccaacactttgaatccagccttgtgagaccctaagccgagaactcacttaagcctgcttggacttctgacctacagaactatgagataataaatcagtggtgttttaagctgctaaatttgtggcaatttgttatgtaggaataggaaatgaatacagtattttaaaagaggtaaagaggaaatcttcatacttgattccctgtagtatgctggatatttcttggtaaatgcatgaataaagtctttagtagcaagtcatgtacctggaccttgttggggatgttctcgccagagatctcaattagtcttcattggacgtttgttggcaaagttgcagcatcttactgagtagcgtttggtaaaggaactgctagaatgagactataggaataggactgaaacagtgtgtaagggatcttttttatttctagaagaggtgttactttatactgatttagactgctctgagcctgtcagaagtaaattcaagaatgattaacagtggtattttagatacattaagagcaaaaataacctttgccttgtagagatcagataatctgtgtatcgagggatttaattttttttaaccaaaacttagtttctctttttatcatctagcacagatcaaatcctgtatgggccagccaaatgtttgtagtttgagaatgttttgcaaatacctctctgcttccaagccattaatagctaatgaagttttattttggtttgtccattaatttttctgcttatttttactgtattgccatgtccttgatacgagacaagtagaactaaaagagagaaaatgagaggttaagactgtcagaagatgagaaatgtgagtcataaccataccttagtgttttaagggaactttatccagtccaatccctttatagaaaaggaacttttccaagttatgttgcagtatttatagtgtgtaaaattttgtttgactttggtagttgtgcattttaaattatgaatcttatatgctacgataactagtatgcttactttctttaatgcatgtgatcatacaatgctaaaaaggtattttttaaagacccaaccaaactgaggattttgttatacatatctgtatcaacacctatatataaactcttcttcttacctgaaacactccttcacccggtttgggcactaactagatcattttcaaaggaacaaacaggaaggagcaagctggcactccagggtgcatctgagctgagaatttagaagacctcattcaagaaagtaaactgagcattgatgggaaagcactttgcgcgaagtaacattcccactgttaatgttgcagtcaaaattgtggaaaaaaaaaagtggtgctaaaattgttctgaaatgaagattgtttgttgtggggaatattttaatactcttggactttagggaggctattttatgtgtcacttgctcctagttgtttcattgtattagtaattagcaaactgtcctggaaccaagggtttggtacttttgcctgattagcattccattatttatttgaaatgctcagtgtttgctcaaatttggtgaaaatatcttttgaagacatattctctgagccttaaaaatggctgctatcgacagtactgtaagatgcactgccagtagatttgatacttttcatttcagtgtaggcagtaatgttttctaagaaagatttagaaatcagcaaagtgtaacaattgtgtttcatttatggaatggaaaaactgaagtgtcccattcagaacactttggaaaggttgtctgcattaggggatgtttctggaagtttcttaaatgtattgtatatattttccttaaaatgtcttcattggctgaatgattcctatccgtagtaatattttaggtacttgttggatttttaaaggaagattatttattttcagatttgctgctataattgaaaacctagtaactggtcctgttgattgtgccttcatcactgtttctctgtgccacgaccgttcatgtgtatttgaaataaagaagtttaaaaagcca

SEQ ID NO: 20626 - DNA, 2081 bp, Homo sapiens
  misc_feature (2081)..(2081): n is a, c, g, or t
gctgtagatacgtatgtgtgtatttgttcaacaattggagatggttgaatacccttgaacaaagtgtgtatcttctcaaatcagtggttgcactagtcaataattagaaggtgttgttatttttaaaactataagcaaaattatgaaggcctttaaaaaatctatcataataatgaaaaagaggttgtctcccaacagtgctgtccctcaaagaaaagactggttatgtggaaacagcacgtttggagagattattctagtgaataacagtgtatatttgtggtaggcaaatttctaagaatgacccctactgacacccccaccaatgaccttgtataatatcctcccactttgagcatgggtggaacctgtttgatccatgattatatcatgttatgtagcaaaaggaagactgtctgggggtggctaatcaaatcttgtgactcctttaaaagcagagagttttctcgggctggtggcagaagtcaagagacaaagcagaaggacctcaggcaccattgctgttttaaggtagagggggctgcatgagaaggaatgcacatggctttgaggagctgagagaggccttggctaacagcaaaggagctgggaactgcagtcctacagccacgggaactgaattcagcccataagctcattcataggcttggaaaggcattcatctccagtctccagataagacccagcctggccaacactttgaatccagccttgtgagaccctaagccgagaactcacttaagcctgcttggacttctgacctacagaactatgagataataaatcagtggtgttttaagctgctaaatttgtggcaatttgttatgtaggaataggaaatgaatacagtattttaaaagaggtaaagaggaaatcttcatacttgattccctgtagtatgctggatatttcttggtaaatgcatgaataaagtctttagtagcaagtcatgtacctggaccttgttggggatgttctcgccagagatctcaattagtcttcattggacgtttgttggcaaagttgcagcatcttactgagtagcgtttggtaaaggaactgctagaatgagactataggaataggactgaaacagtgtgtaagggatcttttttatttctagaagaggtgttactttatactgatttagactgctctgagcctgtcagaagtaaattcaagaatgattaacagtggtattttagatacattaagagcaaaaataacctttgccttgtagagatcagataatctgtgtatcgagggatttaattttttttaaccaaaacttagtttctctttttatcatctagcacagatcaaatcctgtatgggccagccaaatgtttgtagtttgagaatgttttgcaaatacctctctgcttccaagccattaatagctaatgaagttttattttggtttgtccattaatttttctgcttatttttactgtattgccatgtccttgatacgagacaagtagaactaaaagagagaaaatgagaggttaagactgtcagaagatgagaaatgtgagtcataaccataccttagtgttttaagggaactttatccagtccaatccctttatagaaaaggaacttttccaagttatgttgcagtatttatagtgtgtaaaattttgtttgactttggtagttgtgcattttaaattatgaatcttatatgctacgataactagtatgcttactttctttaatgcatgtgatcatacaatgctaaaaaggtattttttaaagacccaaccaaactgaggattttgttatacatatctgtatcaacacctatatataaactcttcttcttacctgaaacactccttcacccggtttgggcactaactagatcattttcaaaggaacaaacaggaaggagcaagctggcactccagggtgcatctgagctgagaatttagaagacctcattcaagaaagtaaactgagcattgatgggaaagcactttgcgcgaagtaacatcctctgatgcagtcaacctttccaaagtgttctgaatggacgcttcatgttttggtcccan

SEQ ID NO: 20627 - DNA, 399 bp, Homo sapiens
cagcatttagtagcctgggttaccttgggcaaattacttaatcatactgtgctttgattttctcaactgtgaaatggggataataagcccaccttaatagtcaccatatggctattatgaggaacatataaattaatccctatagtagccactgtatggctattatgaggaacatataaattaatacctataaacctttaggatagtacctgggacaaggtatagttatttttagatacattatcttagaattgaggttacacagacccaattctgtaactatgggttattcaggtatttacgctaaaatgatagttaaaatgcttggacatgaaaaaaatactcatggaaaaagtaattacaaaatatttagaatgatgtgaataatgccagatcttt

SEQ ID NO: 20628 - DNA, 325 bp, Homo sapiens
cataaaattgctgtgaagattgcatgatttaatatgcacaaagctcttagaaggatgcctggcccacaaatatgcattcagtgcacatttcttgctacagttctgctaatcctataaaacatatgcactatgatggatgtgtctgggtgccaggaggacacaaaggagcactaactcatccagaccagaagcttcccagaggaggtgattcccaaggtgaaatccgaaagataaagggagtgagttatccaggagaagagaaaggaaaagcatattccagacatcaggataggacagtggaggcaaaacagcatatgctatatat

SEQ ID NO: 20629 - DNA, 496 bp, Homo sapiens
cttttattagctaagtgtcatataagtaattcacagtattacactcttgcttgtgtgctttctctctctctgttttagaacagtggggttggatacggtaaaagcaaggaatcggaatcgtgaaattgaatatttgagaactactttattcaatttagaactttcaaataaattggtatttagataaaatagaaataaacacaagctaaaatttattgaatgctttctatgtgccaggcattgagcttcccatgtacctagcactaagtgtttgtactgtaggattagtgtgctttaatcatggttctggtgtatgagttgtggcaccttggatctcacatttctcatctataagatatattatacagggttttgtgaatattagatgagataatatgtataaaatatttagcacagtgtctgaatatggtaaaatgcctgataaattttagcaacttttattaccagtacttgaattatcttatttaatcatcag

SEQ ID NO: 20630 - DNA, 572 bp, Homo sapiens
gcagcctatttgctgcatgaactgtgcccgatgcatgcccaaggacaaggctattaagaaatttgtcattcgaaacatagtggagcccgcagcagtcagggacatttttgaagcgagggtcttcaatgcctatgtgctttccaagcagtatatgaagctacattactgtgtgagttgtgcaattcacagcaaagtagtcagaaatcaatctcatgaaggcttcaaggacccaacactcccacccttagacctgtgggtgctgccccatgacccccaccaaagcccatgtaaggagctgagtccttaaagactgaagacagactattctctggagaaaaataaaatggaaattgtactttaaaaaaaatggctcctactgactagtacaggaccttagaattgttaatgaagctgttattcctattcatcctattgtcccaaacccttacactctttttggacaaattctctccatcacagcttggtttactgtacttgatcttaaggatgcctttttctgcattcctgtacacccagatagccaatttttgtttgcttttgaatagcaagac

SEQ ID NO: 20631 - DNA, 319 bp, Homo sapiens
tgtggcatcaagcttgcatgaatcaaggccgctgctggggctagcccagacccgtagtgggtttggtggtggttgttactgcagagcgtcccagccatcctgactagtacagcgtggagtgtgtctatgtcctggagcttggggagagtcctggccgcagtccaggctttgaagaatgttgacttgacctggaatacccacctgtccctggagtgctgtgttcttaggctagttccgtaacctccctgtctgcttcttcatctacacaccatttgatcttccttaggtttgctgtaaggagtaaatgagataacgcatg

SEQ ID NO: 20632 - DNA, 1655 bp, Homo sapiens
agaggctgtcggactctgactgcgcggagaccgctggactctggtcgcggccttagtccgctgatcctcgcttgggtgcccgcccttagcggcccggcgttgaattccgggaagtgggagcttcaggctcgctccgtgcgggtatgggcgctaatgtcacttgggatggttgcgcaaggacatcgcggcggacactgacaaggaaccggggaggaacgggggtggggagagactgcgatgggactcgggaagccgggaagggccgcgctgaataagcctaaggggccgggtcgcaaggagtgtcgggtagcacaggcctcggctcagtcggagcgccaggcctcagggtccgggcgggggctgctgcgtcacaccaggcagcctgggaacgcaactgttgggcaaccgtggtggcctctcgccacctcttacgcttgggcgatctgcgattgacgcatcctgggagctgatgtcccgcacgggcggggcgccggaggaggagagaaaatagagacccggttgttgacagcctgtgatgccgcttgattcatgtgtgggtggcctggtttagaaatgtaccacccttcctttctaggttcctccccggagggcggggtgacgggtgcggcgccgaatcgcaacaaaaaacgctgctcgagggatgttagtaactgtctcagcttaagttgctgccttttagcttacagtttgtatcgtaactgtaattgtggatcttagttaaatcccttcagtgtgttggaaacatatttttaaggtgtatttttgaaacatacttagagcattttgaaatgcttttttgaaagcgttttttaaatcaaaattctgttacactttatttttttcagtctgcagatgaacttgactcactcaaggttaatgatttttgttttttatttatgtttgtagaggcggggttttgtcatgttgctaggttggtgttgaactcctgagctcgagcgatccacctgccactgccttccaaagtgctggaattacaggcgtgagccacggcgcccggtggccgaggttaataataattaaaagtttctaatcccattgttcagttatttgatttggtgtaaaggcgcactttccaagtcagatgagtttgtggtaacatacattccccaaataattatttttcccttgtgggaaatattccagttttaggctaccagctgtttaaacagtttggttcaaatccttcaaaaaaatctcaaaacataactccacatatgtatttactacatattgaagggtgtattcacttggagaagtaggagaaagcaaacagatgccaatggcctttttgaaaacatgtatctatcagcaataattgaatagcaaaacgaagtggaacactaccatcctttgcaatattagatagttttaatactgggttgtgaggaatgaaaagatcatacaaatcgtcatttctgaagtcatttctgaagtcgtcatttctgaactgagtgctaatttttcatattaagctttatgttaatatccttaatgagaggaacttcctgtgcccgtaatttctccagagaaactattaacatacacagaatgttgtaatcagaagtatagttcagttaataaagtcctcaattacaactctgaaaaaaagtcat

SEQ ID NO: 20633 - DNA, 192 bp, Homo sapiens
gcctgagtgataaagtgagaccctgtctcaaaaacaaacaaaaaggcagatactaacacagaagaatattaataatgcacttggcaagcaattaatgaccttaaaacataaaaataagcaaaccactagtatgaataaccataataggtaaaaatcaatatcagaaacattaagacctccatagataaatgg

SEQ ID NO: 20634 - DNA, 388 bp, Homo sapiens
gctatatgctgtattaggggaacatataagctatagtataatgtattgatcattagaatccagggcatgcctaaattatatctatggaaaagcagagtaggcggcatctgatctgccttttttctgaagggaagctactgagaggagatgataccaaaagtcccatttgaaatccacatgataagcaaaaccatggatcagtttgcttagggagaattatgaagaaagagctccatggccaggctgtatcttggaaaatcaccacaggaagtaaaagccagtcagggaacaatgaagagggcagaaagagaaggagaatattgtcctgtaatggaaacaggaaggatattgaaagagtcaggggtgatcagaaccggagcaagtaagt

SEQ ID NO: 20635 - DNA, 1235 bp, Homo sapiens
agcgggccggagtcggagggcggggagctaggaggagggagctcgagagttgtggagactagtgactgggagaagtcgcagcccgctcaggcccgcgccttcccgctccccgtcttcctctctcacacacctactccgccctccgccccagcccgcgcgctagctccttctctcgcccggggttcctgccggtagctctccgggtcttggcgcggcgggggcgccccgggggtgccctcgccctcccgttgcgggcgggcgggcggtatgtggcgcctggtgcccccgaagctgggccgcctgtcccgctcgctgaagctggcggcgctgggcagcctgttggtgctgatggtgctgcactcgccgtcgctgctcgcctcttggcagcgcaacgaactgaccgaccggcgcttcctgcagctcaataagtgcccggcgtgcttcggcacgagctggtgccgccgcttcctcaacgggcaggtggtattcgaggcgtggggccgcttgcgcctgctggacttcctcaacgtgaagaacgtgtacttcgcgcagtacggcgagccccgcgagggcggccgccgccgagtggtgctcaagcgcctcggctcgcagcgcgagctggcgcagctcgaccagagcatctgcaagcgggccaccggccggccccgctgcgacctgctgcaggccatgccccggaccgagttcgcgcgcctcaacggcgacgtgcgtctgctcacgcccgaggcggtggagggctggtcggacctggtgcactgcccctcgcagcgccttctcgaccgcctggtgcgccgctacgcggagaccaaggactcgggcagcttcctgcttcgcaacctcaaggactcggagcgcatgcagctgctgctgaccctggccttcaaccccgagccgctggtgctacagagttttccgtctgatgaaggttggccatttgcaaagtatcttggagcttgtggaagaatggtggctgtaaattatgttggagaagaactgtggagttactttaatgcgccatgggaaaaacgagttgacctcgcttggcaattaatggaaatagcagaacagcttacaaacaatgactttgaatttgcactctacctcctggacgtcagctttgacaattttgcagttggtcctagagatgggaaggtaatcattgtggatgctgaaaatgttttggttgctgacaaaagattaattagacaaagtaagta

SEQ ID NO: 20636 - DNA, 1170 bp, Homo sapiens
caaagcccaaaatttcggcacaagggcccgcgccttcccgctccccgtcttcctctctcacacacctactccgccctccgccccagcccgcgcgctagctccttctctcgcccggggttcctgccggtagctctccgggtcttggcgcggcgggggcgccccgggggtgccctcgccctcccgttgcgggcgggcgggcggtatgtggcgcctggtgcccccgaagctgggccgcctgtcccgctcgctgaagctggcggcgctgggcagcctgttggtgctgatggtgctgcactcgccgtcgctgctcgcctcttggcagcgcaacgaactgaccgaccggcgcttcctgcagctcaataagtgcccggcgtgcttcggcacgagctggtgccgccgcttcctcaacgggcaggtggtattcgaggcgtggggccgcttgcgcctgctggacttcctcaacgtgaagaacgtgtacttcgcgcagtacggcgagccccgcgagggcggccgccgccgagtggtgctcaagcgcctcggctcgcagcgcgagctggcgcagctcgaccagagcatctgcaagcgggccaccggccggccccgctgcgacctgctgcaggccatgccccggaccgagttcgcgcgcctcaacggcgacgtgcgtctgctcacgcccgaggcggtggagggctggtcggacctggtgcactgcccctcgcagcgccttctcgaccgcctggtgcgccgctacgcggagaccaaggactcgggcagcttcctgcttcgcaacctcaaggactcggagcgcatgcagctgctgctgaccctggccttcaaccccgagccgctggtgctacagagttttccgtctgatgaaggttggccatttgcaaagtatcttggagcttgtggaagaatggtggctgtaaattatgttggagaagaactgtggagttactttaatgcgccatgggaaaaacgagttgacctcgcttggcaattaatggaaatagcagaacagcttacaaacaatgactttgaatttgcactctacctcctggacgtcagctttgacaattttgcagttggtcctagagatgggaaggtaatcattgtggatgctgaaaatgttttggttgctgacaaaagattaattagacaaagtaagta

SEQ ID NO: 20637 - DNA, 1107 bp, Homo sapiens
agcgggccggagtcggagggcggggagctaggaggagggagctcgagagttgtggagactagtgactgggagaagtcgcagcccgctcaggcccgcgccttcccgctccccgtcttcctctctcacacacctactccgccctccgccccagcccgcgcgctagctccttctctcgcccggggttcctgccggtagctctccgggtcttggcgcggcgggggcgccccgggggtgccctcgccctcccgttgcgggcgggcgggcggtatgtggcgcctggtgcccccgaagctgggccgcctgtcccgctcgctgaagctggcggcgctgggcagcctgttggtgctgatggtgctgcactcgccgtcgctgctcgcctcttggcagcgcaacgaactgaccgaccggcgcttcctgcagctcaataagtgcccggcgtgcttcggcacgagctggtgccgccgcttcctcaacgggcaggtggtattcgaggcgtggggccgcttgcgcctgctggacttcctcaacgtgaagaacgtgtacttcgcgcagtacggcgagccccgcgagggcggccgccgccgagtggtgctcaagcgcctcggctcgcagcgcgagctggcgcagctcgaccagagcatctgcaagcgggccaccggccggccccgctgcgacctgctgcaggccatgccccggaccgagttcgcgcgcctcaacggcgacgtgcgtctgctcacgcccgaggcggtggagggctggtcggacctggtgcactgcccctcgcagcgccttctcgaccgcctggtgcgccgctacgcggagaccaaggactcgggcagcttcctgcttcgcaacctcaaggactcggagcgcatgcagctgctgctgaccctggccttcaaccccgagccgctggtgctacagcatattcctccaacacaccctccatacctctgtgtccctgatggcaactataggagtggctggagctacatcaaactgtgtccatcatttgagtgtcttactgaaacctatgctgccctgcccttcaacagaaattatgacaagtggtggagacagataacagagaagaagcaagtcagaaga

SEQ ID NO: 20638 - DNA, 1070 bp, Homo sapiens
agcgggccggagtcggagggcggggagctaggaggagggagctcgagagttgtggagactagtgactgggagaagtcgcagcccgctcaggcccgcgccttcccgctccccgtcttcctctctcacacacctactccgccctccgccccagcccgcgcgctagctccttctctcgcccggggttcctgccggtagctctccgggtcttggcgcggcgggggcgccccgggggtgccctcgccctcccgttgcgggcgggcgggcggtatgtggcgcctggtgcccccgaagctgggccgcctgtcccgctcgctgaagctggcggcgctgggcagcctgttggtgctgatggtgctgcactcgccgtcgctgctcgcctcttggcagcgcaacgaactgaccgaccggcgcttcctgcagctcaataagtgcccggcgtgcttcggcacgagctggtgccgccgcttcctcaacgggcaggtggtattcgaggcgtggggccgcttgcgcctgctggacttcctcaacgtgaagaacgtgtacttcgcgcagtacggcgagccccgcgagggcggccgccgccgagtggtgctcaagcgcctcggctcgcagcgcgagctggcgcagctcgaccagagcatctgcaagcgggccaccggccggccccgctgcgacctgctgcaggccatgccccggaccgagttcgcgcgcctcaacggcgacgtgcgtctgctcacgcccgaggcggtggagggctggtcggacctggtgcactgcccctcgcagcgccttctcgaccgcctggtgcgccgctacgcggagaccaaggactcgggcagcttcctgcttcgcaacctcaaggactcggagcgcatgcagctgctgctgaccctggccttcaaccccgagccgctggtgctacagaaatgtctgctacagagacaaactgaagtttgtgtatatcgtgctgattcagaagagaatgaaggcatttgtcaagagataatgtcagactaatcagacatgttccaatcgattaatgcatttggaggatttccaaatatttgctg

SEQ ID NO: 20639 - DNA, 1296 bp, Homo sapiens
agcgggccggagtcggagggcggggagctaggaggagggagctcgagagttgtggagactagtgactgggagaagtcgcagcccgctcaggcccgcgccttcccgctccccgtcttcctctctcacacacctactccgccctccgccccagcccgcgcgctagctccttctctcgcccggggttcctgccggtagctctccgggtcttggcgcggcgggggcgccccgggggtgccctcgccctcccgttgcgggcgggcgggcggtatgtggcgcctggtgcccccgaagctgggccgcctgtcccgctcgctgaagctggcggcgctgggcagcctgttggtgctgatggtgctgcactcgccgtcgctgctcgcctcttggcagcgcaacgaactgaccgaccggcgcttcctgcagctcaataagtgcccggcgtgcttcggcacgagctggtgccgccgcttcctcaacgggcaggtggtattcgaggcgtggggccgcttgcgcctgctggacttcctcaacgtgaagaacgtgtacttcgcgcagtacggcgagccccgcgagggcggccgccgccgagtggtgctcaagcgcctcggctcgcagcgcgagctggcgcagctcgaccagagcatctgcaagcgggccaccggccggccccgctgcgacctgctgcaggccatgccccggaccgagttcgcgcgcctcaacggcgacgtgcgtctgctcacgcccgaggcggtggagggctggtcggacctggtgcactgcccctcgcagcgccttctcgaccgcctggtgcgccgctacgcggagaccaaggactcgggcagcttcctgcttcgcaacctcaaggactcggagcgcatgcagctgctgctgaccctggccttcaaccccgagccgctggtgctacaggcatttggattgaaaggatggaaagatggccgtaggaaacaagtagcttactatgtaggagagttttccgtctgatgaaggttggccatttgcaaagtatcttggagcttgtggaagaatggtggctgtaaattatgttggagaagaactgtggagttactttaatgcgccatgggaaaaacgagttgacctcgcttggcaattaatggaaatagcagaacagcttacaaacaatgactttgaatttgcactctacctcctggacgtcagctttgacaattttgcagttggtcctagagatgggaaggtaatcattgtggatgctgaaaatgttttggttgctgacaaaagattaattagacaaagtaagta

SEQ ID NO: 20640 - DNA, 1074 bp, Homo sapiens
agcgggccggagtcggagggcggggagctaggaggagggagctcgagagttgtggagactagtgactgggagaagtcgcagcccgctcaggcccgcgccttcccgctccccgtcttcctctctcacacacctactccgccctccgccccagcccgcgcgctagctccttctctcgcccggggttcctgccggtagctctccgggtcttggcgcggcgggggcgccccgggggtgccctcgccctcccgttgcgggcgggcgggcggtatgtggcgcctggtgcccccgaagctgggccgcctgtcccgtcaacgggcaggtggtattcgaggcgtggggccgcttgcgcctgctggacttcctcaacgtgaagaacgtgtacttcgcgcagtacggcgagccccgcgagggcggccgccgccgagtggtgctcaagcgcctcggctcgcagcgcgagctggcgcagctcgaccagagcatctgcaagcgggccaccggccggccccgctgcgacctgctgcaggccatgccccggaccgagttcgcgcgcctcaacggcgacgtgcgtctgctcacgcccgaggcggtggagggctggtcggacctggtgcactgcccctcgcagcgccttctcgaccgcctggtgcgccgctacgcggagaccaaggactcgggcagcttcctgcttcgcaacctcaaggactcggagcgcatgcagctgctgctgaccctggccttcaaccccgagccgctggtgctacagagttttccgtctgatgaaggttggccatttgcaaagtatcttggagcttgtggaagaatggtggctgtaaattatgttggagaagaactgtggagttactttaatgcgccatgggaaaaacgagttgacctcgcttggcaattaatggaaatagcagaacagcttacaaacaatgactttgaatttgcactctacctcctggacgtcagctttgacaattttgcagttggtcctagagatgggaaggtaatcattgtggatgctgaaaatgttttggttgctgacaaaagattaattagacaaagtaagta

SEQ ID NO: 20641 - DNA, 1280 bp, Homo sapiens
agcgggccggagtcggagggcggggagctaggaggagggagctcgagagttgtggagactagtgactgggagaagtcgcagcccgctcaggcccgcgccttcccgctccccgtcttcctctctcacacacctactccgccctccgccccagcccgcgcgctagctccttctctcgcccggggttcctgccggtagctctccgggtcttggcgcggcgggggcgccccgggggtgccctcgccctcccgttgcgggcgggcgggcggtatgtggcgcctggtgcccccgaagctgggccgcctgtcccgctcgctgaagctggcggcgctgggcagcctgttggtgctgatggtgctgcactcgccgtcgctgctcgcctcttggcagcgcaacgaactgaccgaccggcgcttcctgcagctcaataagtgcccggcgttggcttttttcccggggccaaaccggaaggccttggggctggccccggcaccgggccgttttcccgtccaatcggtcaacgggcaggtggtattcgaggcgtggggccgcttgcgcctgctggacttcctcaacgtgaagaacgtgtacttcgcgcagtacggcgagccccgcgagggcggccgccgccgagtggtgctcaagcgcctcggctcgcagcgcgagctggcgcagctcgaccagagcatctgcaagcgggccaccggccggccccgctgcgacctgctgcaggccatgccccggaccgagttcgcgcgcctcaacggcgacgtgcgtctgctcacgcccgaggcggtggagggctggtcggacctggtgcactgcccctcgcagcgccttctcgaccgcctggtgcgccgctacgcggagaccaaggactcgggcagcttcctgcttcgcaacctcaaggactcggagcgcatgcagctgctgctgaccctggccttcaaccccgagccgctggtgctacagagttttccgtctgatgaaggttggccatttgcaaagtatcttggagcttgtggaagaatggtggctgtaaattatgttggagaagaactgtggagttactttaatgcgccatgggaaaaacgagttgacctcgcttggcaattaatggaaatagcagaacagcttacaaacaatgactttgaatttgcactctacctcctggacgtcagctttgacaattttgcagttggtcctagagatgggaaggtaatcattgtggatgctgaaaatgttttggttgctgacaaaagattaattagacaaagtaagta

SEQ ID NO: 20642 - DNA, 350 bp, Homo sapiens
ttgagacagtctcgcattgttgcacgggctggagtgcaatggtgcaatcttggctcacagcaacctccgcctcctgggttcaagcgattcttctgcctcggcttcccgactagctgggattaaaggtacccgccaccacgtccagctaattttttgtgtttttagtagaggcgggtttcactatgttggccaggctggtctcaaactcctgatctcgtgatccaccctcctaggcctcctaaaatgctgagattacagacgtggttaagtaaaactagcatttcttaaactgcaagtgtgtggtggtgaggaatccagctattcgtggagtttgtaccaccgccccaact

SEQ ID NO: 20643 - DNA, 413 bp, Homo sapiens
tgagttgagtacataacaaggcaaggcagagagtgagtgtgtttatgttttcagatttatttgatcccaccacttgaaaaaaatgtgaatttgttaccaaaacaccaagcgtttggtctaggtcctgctgcttgccacacagaaagccagtcactgagacaatgagttttgtcagcagaaaggctttaattgggtgctgcgcctgaggatagagatcagtcttaaatcctcactgaccaactaaaattaggggtttatatagcagagaagaaatgtaaccacgcatgggaaaatagggaggcgcaaggaagaggatttggttaataggaagcaggtggttgcctaggcagttatggtaggtgagtggtctgacatctcattgtccagatacagtgatctggtaagtttcagat

SEQ ID NO: 20644 - DNA, 717 bp, Homo sapiens
ttttttcacattcttatccaatctgatagcaaaaactcttggctttaccttcaaaatatatctagaatcttattgcttcttaccacctccactgtgctactaccttaatctaaaagccactatcttctcttacttgtacttttttactagactctgtttcctctgttaacgtctttgctttattacagtctcctttcaacatagtagcctgagtgacccttttcttttcttttttttttttgccagacagagtcttgctctgtcgtctagggccgagattgtgtcactgcactctagcctgggtgacagagcgagactccatctcaaaaaaaaaaaaaaaaaaaaaaaacattgtttgtccatatacttaggtttgtaagaaattgagttattctgattccttgctaaggccttcttttaaaagcaagatacgccgggtgcagtggctcacacctttaatcccagcactttgggaggccgaagcgggcagatcacgaggtcaggatatcgagactagcctggctaacacggtgaaaccccgtctctacaacaaaatacaaaaaagaattagttgggcatggtggtgggtgcctgtagtcccagctactcaggaggctgaggcagaagaatcccttgaacctgagaggtggaggttgcagtgagccgagattgcgccactgcactccagcctgggcgacacagtgagattcagtctca

SEQ ID NO: 20645 - DNA, 514 bp, Homo sapiens
ggatggtagaacgaagtggggcagtttcaatgaaagggagcattaagctgagctctgcctctttcctttgtctgcatgtctggtaaacacaacttaatggattgtgcctcctccttcccccagtatactcccatgaagcccctaaagaataagtttatcccatagcaatctatggtatggtgtcatattgggagtcttgagctgaaaagtactttctcacggtatattgacgcaagagcttccagctgtccagagcgcaagagccagcgccagtccccagagggttgctatgggaacactgttatggcaactggttttcatcacagactctgcagttccattggctgaactataaccacacgctagtcctttaatggttaacagtaactttaaaatcatttgaaatttaaaaataatttctggtggtgtggaatagctagggagggcagtgtggccagccgcgcagctatggtgtgagctgaccccattcagaatattgaaaaacatgctcatt

SEQ ID NO: 20646 - DNA, 423 bp, Homo sapiens
aatacaaaattagccagttgtggtggcacatgcctgtaattcctgctactggggaggctgagacagaagaatcacttgaaccagggaggcggaggttgcagtgagccaagatcgcatcattgcatttcagcctggacaacaagagcgaaactccatcaaataaataaacactaatagccagacatggtggctccacctgtaatcccagcatttggggaggctaaagcaagaggattgcttgagcccaggagttaatgaccagcctgggcaatatagggagaaccccgtctctttagaaaaaaaacaaaaattagctgggtgtggtggcatgtaccattggtctcagctacgcaggaggctgaggtgggaagatcgcttgggcatgggaggtcgaggctgcagtgagccatgatcactgcactc

SEQ ID NO: 20647 - DNA, 412 bp, Homo sapiens
atcagagaacttacactgcatgattttcttctttttctcaaagtggcactgagtgcagctaagctgttacacacttgatgtaaaatttttccatttaaaaatcacccatctttaaaaagggaaaaaatagtcctggcattttggggaaagagttttctctgaaggaaggaggagaaaaatatggagaataatgaattcatcaagctgaaaatgcacgaagcagcgaagcgctcaggcttcaatacatggcaaatggaaagagagctcccattactgtcgagatgcacagacacagccccgctaatcgcttggtcatgcttgggagacactaagtcatcacaggccatgacatggtgagaacagggtgccaggggtttgttgtaagaaaaaattgtttatttaacatccataa

SEQ ID NO: 20648 - DNA, 421 bp, Homo sapiens
gattattctacatgatgtacttattgacataacaacctgaaattcttgattttagacaatttctcctcaagttgattcagctgcatgactctcagaaatcagtcattttttattgtagattgctggttttcttcctctagtttgtatcgtgtattttcctcctgtggagaaaatgtggttggcaagaaatgccatattttaaagctgtatcgtggctgttaatgcagaaaacaccagtgtactgcaggctgtttggcagtggggctggggctgagtgtcctgccctcagtggcctgtgtctgtgctcttgttcgctgacatgcagatacaggggcagatctgagggtttgatggagtgcagaaggccacacgtgtggctttctgtaaatgcagaaacatggaatccttgagcagacacttg

SEQ ID NO: 20649 - DNA, 513 bp, Homo sapiens
atttaagagagatattacagtggctggtgcctgttagaatatctatagatgctttcctcagataaaattttagacctgacagaaggtgtctatattcattttttattgtgtgtacaaattaccacaatttagtggcttaaaataacatgcatttattatctcacagtttccgtgcatcaggagtttgggcacagtgtagttgagtcctttgcttaggatctcataaggctgcaataaagctattggccaggctgtattatgtagaggctcaattatgaagaaatctgcttccacacttattcaggtcattggcagaattcatttccttggagctgtatgactgagggcctggctttttattgactgtcaggtgaaagcctctctcaggtcctagggattgcctatagtttccctgctacatgactgtctccatggtggtttgcttttcaaggcctgcaggaaagcttcttactccagtctgctcatactgtattctataatgtaacataatca

SEQ ID NO: 20650 - DNA, 339 bp, Homo sapiens
attagacgtagagctgagacttttgaaaaacaagctcagaatctcatcctatgaatggttgaattacaaggcaaattgaattcccaacctcacagcatgtatgctctaaactaaggacattgtttgggaaaaaattggatatcaaatattacaatgggaacatatgggaagattctgatgaagcagaagacactgaacccttaaactctgctgagtctttttgccaatagtgacagcgatctaccccatctaaattgactcaaaatgtcactgtgatctaccaatcagaattggggcttctgaagttcacacgatttatagaattgtagctcaggctca

SEQ ID NO: 20651 - DNA, 869 bp, Homo sapiens
agtgtctagtgacgtgctggcaagtacaactggctctgtggggaggcggtaccctgatttgtaccttttgctgatttccattgagtaaatactcttgccatgtttgatttcaagctaccaacatggtgtcaattggctcacagaagccctgaaaatttaataatcagctcttatgagcctgtacaaactgaacttgcattctgctaccaatatctacttttgaagttgtcagtttagattggaagatacataaattgccatgcagtctgataaagacagaaatagaagtatgtagaaggtagaaaggtatcacaagggacactggttcaattctgcggtgggcatatccacatggtaggctgcaaacaaagacaggcaaggcctgtaggtgggtggagacagagaccttcagagcatcctcagtgccttcaggtcatggggaaatgccttggcctgccttaaggtcccgtgcagtctagcctcaccttacctggctgaacattctcccacatttactgacacaaaccttctgctctagtgagtccagcccagtgttttcagtcttgagagcacatccctgccttggctgacacccacctcctcccaccaccgtttagaaagtgccttccctccacctccacttccctgctctactcatccttctttatgaatgcttcctacaacagctccaagccacagaaagcactgacagaaagggaaagattgatcacgtgaattccattaaagtgaagaatttatgtttatcaaaagtcactgttaagaaaggaaaaggcaaacaatggagtcagaggaactgtttggaacacttatgaccaatcgaggatttgtattcaggacatgtaaggacc

SEQ ID NO: 20652 - DNA, 412 bp, Homo sapiens
acccaaaccaaaacagtcaaccagtggcaaaagaaaccgtcctgtttcccaggtaggaaaaaggaaggcaaagcaccccaagatgtgcttttattttaaatctccttgatctgaccaatcgggtgagctggaacctcacggctgagccccgagtccaacttcttccccgccaggactactcactgtggccaggcccaagcgcatgtggaacacacgccaacacaggacaggctcagcacgccggccgcttccctcggggaaaggcccgccaacgagtccatcgcgtgggagaacagtgggaaagggtcgcggccccggccgtccgtaaagggacccgactgccggcgcaggacgcgaaccaccagcgccgctccgccgccatgtgccgccgctcctccggtccgagattatg

SEQ ID NO: 20653 - DNA, 231 bp, Homo sapiens
gacacttttagtgtcagggtgaccaggaattgtggctgtaaaggaagcctgagacttctctggttctggcatgaaagaattttccaaaactatgtagacgctggggccttacaagtttgatattagtgtaaacaaatgtattctcaacaagaatatagatgagtttgcaatgaatttcagaatacttaactccaggcttataagagattaaataattctttaaaatggatt

SEQ ID NO: 20654 - DNA, 279 bp, Homo sapiens
agaaggcacttctttacttctaattcttctccactgcccaggtaactgatattctcaagtgggacattgtaatttgtttaattcatttaaattgatttcatataattgggagataaagattgttcagttgcaagacaaagtcttaacttgaactctcaggacacgggtgggtccctaaactcaatacgtgagtgttgctgccgggctgttgggccatcttccacccgccatagatcactttcttcatcaaagaagaaggaatatttagaaactggtagt

SEQ ID NO: 20655 - DNA, 452 bp, Homo sapiens
gttttgagttttatctaaagactgacattgacttgaagttgggctttccagattcaaatatctgccccagatgagatttagatgcagagggttagtgtccttttccccagggggatggcgtgatgatttgttcaagattgtgttatagtagctgccccttttaagccagctgtgtgtgtgtggtggggggtgggcagtgtgtattccacatcaacatcctagaaagaacgaataaacatttagtgatctcactgtttctacttacatttggtataatgtactgtttttattggtgctattacctatgttaatggggcactttacaaaattttcaagaacgtttttattaaaattatttcaaagacttctttcttaaaatatgattttaccatgtaaaaaattatactaaggtagaagaatattcgttctttctcattttctgaaaaaaaaaa

SEQ ID NO: 20656 - DNA, 773 bp, Homo sapiens
gcatgctgagtagtgtcatgtcaagggggcaagggtgtgctactgacatctagtgggtggatgccagggatgctgctaaataaacatccttgagttcacaggacagctttccttcagccccctaccccaccttccgcagaaagaattatctggtctaaaatgagtttgagaaacacaggtatatactgtgtatttctttttccttgaaggagggatcgcaaagaagtgagtctagcctgtttattttctttttcatcttgctgttggctgactacttggttttcttacgtatatgtctatattttccaatatctcaaaaataggcacaagagaactgaaggtacttaattttataaaaccaaaagaatactctgaacagttagagggaaaagagggtaaccaaaatgtgtaagggccttacacacagagtggtatctcaaaatatttgtttgtggttttacacttctaagattaactgaatatgttcattaagttctaatttttgttttgtaattcctatcaaatcttttgatgctttatgaactgcattggtgtactgattcattgaaatctaaaaagaaagctgctactgataagattgacaggaaggaatctatctagctagaataaactacgtgcaaagtaaagaacaaggagtccgtgatctaatgatttttgtgaaagattctgacttgagggtttaatttccaaattggtatgcttctcatatgcgtgatcttatgcatattaaactttgttgtaatttcatagtt

SEQ ID NO: 20657 - DNA, 406 bp, Homo sapiens
tttttttttaaatctcttactgtccttgtcatagttctagcttctgtgtcccctactcaattcccacgtcagtagtatgcccttcgttttaaatttaaatttttgtcccaaatatttttttaactaggaagaaattcctatttcaccttagtcccaattgtggtatttgtagctagcactgtaattcatgctctctgcatagtaaacatatcataatgtttcatcactgcacagaaatcacttgatctgaatcaatctattgtccctgaatagaatagcgatgtgtttgtgtgtgatactagaaatgacacatggccctgacgtgcatgctgcgatacaacaagaaagtgaagtattatctcaccatatcaataaagttgtgcttaatggaaaaataaaaaaaaat

SEQ ID NO: 20658 - DNA, 390 bp, Homo sapiens
tcatggaagaactcactgagcagttggaggcaagagcaggggtctagctgctggtgaagacatccttaatcactggatgggggtaagccaagagtgaatcttattctagtgtatggagcagtgttaggaaatgttcagatagagctgtgtcttaaatggctcatttattcatatgttctttcaaacatttattcatttactcacaaatgcttactaagtacctgctaagtgtcactagtatgtgtcttagatatcgaaaagattctgcagctttcctcagtaaacatcgactctcagtcaatgttccttgatatgcagacatgaataaggaaggaatcgtaccccccaaaggtgggtgcaagccaaccccatggcctccatgactttttc

SEQ ID NO: 20659 - DNA, 312 bp, Homo sapiens
gccttccgaaatgctgggattacaggcgtgagccatggcgcccagcctatctcttcctcttcttatagggacatcagttctatcggattagggcccacccttatgacctctgtttaacctttattacatacctcaaggccctatctccagatacagtcatgttggggattagggattcatgaattttggggacacacaattcaacccgtaacagatacctactagtctcctggcacttgcgaaacccagtggatggagtataaaacaaggaacgtaatctaagtagggctataaaatgtagaaaatattggg

SEQ ID NO: 20660 - DNA, 433 bp, Homo sapiens
atgtttgttgaatgaataaattttcaggcctgcctgaaatatctatgtgacatgtgtcgacacatacagcccctctggtactcagtatcatattctgaaaaatgaaggtgttagacaaggatttctagcaactgttttacttctaaaattctgtaatgtggtggtggctcacacctgtaattccagcactttgggaggccaagacgggcagattgcttgagctcaggagtttgagaccagcctggacaacatggtgaaacccagtctctaccaaaaatacaaaaattagccaggtgtggtggtgcacgtctgtggtctcagctactgtggacactgaggcgggaggatcgcttgaggcctgggaagcagaggttgcagtgaactgagatggtaccactgcattccatcttggccaacagaatgagactctgtc

SEQ ID NO: 20661 - DNA, 738 bp, Homo sapiens
ctgcctcctgagtagctgagactacaggcgcctgccacgacgcctggctaattttttgtatttttagtacagacaggatttcaccatgttagccaggatggtctcgatctcctaacctcgtgatccacccgcctcagcctcccaaagtgctcggattatgggcgtgggccacggcgcttggcccacccctgcatttattgagttaaattttaaaaatcctatcctaggaaattggtggtggggctcagaaaatgataccccaaagtatgaagctgtgggaggctgaatgctttgaactaaagtatctgaccatcgctcactccttttccctcccaaaaccctcctgaagcgcagggaggggccttctctgatgttctcttttgtttctaagggaagttcctgcagaaggaatgccattgtcttgagccctttccctagcatctcataaaacatggacaattaactcacaggaaaggatactgaaggtgataccatctcttctgaggactgggctgcttgagaggttttatctgcatgacaagacagcctttgtttgccatgcatttcctcccctcaacctcctagcgtctgctgccacctcctcccagaaacctcaggccccagtttttggagctcaaatgctatttagacttcatcagtctggcccttactagagtctcacattttgtgggactcctgtgcatgtatgtaataaatttgcatgccttttctcctatt

SEQ ID NO: 20662 - DNA, 705 bp, Homo sapiens
catgtaccaatattaggatattgagtgacagtgtgtgagtttagctctgcctaatatattactgcttgtgggatctttgggagactgtatcctctttgagattgaatttcttctataaaatgagcataatactaccttacttaaatttaagggtcatcatgaagataaatgtactacatttataaacagtaaagtactacaaaggaccaagcaaatacgaattattttttgcagtggagaaacaagcgcccggtgagaatatatgacctaaggttctgtagtttatgacctaaccaggcccagaatgaagtttttcatatcctagtagtgtgttttttctgttttgcccaaaaaaccgcatacctcagagaaggaaaaaagtgtgaattgtgggtatattggggttatcagtgtgcttctgagggaagacaggcatcactacttcccagagatgccctggaaatgatatagaagatgctgaagaattcaacgtgataacagaatgaggcatttgtagtaatgctgagaacagaaaaatggactaagtggaaaatttgtttgcatgtctttgaatgtagatttgttatgtgaacaaactacctagtttatttttagttcaatacaataattgttttaagaaaacatgaaataactactcaatataaaatgcattttaaaactcctattaaaaaagatcacaggaaa

SEQ ID NO: 20663 - DNA, 372 bp, Homo sapiens
atggctcacaaagggcttccctggttatttacttctgactcttgaaagcttaaagaaattgtgcctgagaggttcagtaccttgtccagggacacccagtttgtgcagagccgggaggaaaacacagttcagttcactgtcacaggtgagtcaccaaaaacatcctataaaaagaccttttgagaaactgtaaccccgttaaaactagttaaaaattcttgccttaaagcattccatattcattttacttggctttctgtggattttctcccatgagagacaagcagtattaatcggaaaacggttaagtggtgcagcctgagtgttttgctgtgttaattttaataaaagaacagtgccttaaaaaaaaaa

SEQ ID NO: 20664 - DNA, 436 bp, Homo sapiens
gcatactttttttttttaagatggagtcttgctcttgtcgcccaggctggagtgcagtggtgtgatttcagctcactgcaaccttcacttcctgggttcaagcaattctcctgcctcagcagctgggattataggcgcccaccacaacaacaccagactaatttttgtatatttagtagggacagggtttcaccatgttagccaggctgatctcgaactcctgacctcaggtgatccacctgccttggcctcccaaagtgctaggattacaggtgtaagccactgcgcccagcctacccttttccactctattaacacagggtcacccaaaagtcttccctcattggttcccagggtactgatctctgctggctttttgcctcctcctctaagctgcaccctttctgtctcatttactgattcccttttcttcatc

SEQ ID NO: 20665 - DNA, 470 bp, Homo sapiens
cacacttattgatgaactgctatgagtttttgatgatggcttggctagttgaattctgattcgatactttataattagggctcactagtgacgagcaaaagcccgtgaaactgtctttgtttatgatcccaccacgtatctctactattaaagaattagcctctgggccgtgtgtcctcctggtctacctccagcacaaggacgttcctcagagcaaggcatttgctcgctccccttgctccttacacacggccttcccactcccagctaacacctgaaataggatgggatagtgcacactctgaaggtgaagctttaggtgacgtcgaagcatccagccatatctgtcagtttatataaggggtggcggctgctcagcgaggcctcaggagtgtgaaggaggcttggctggcggaggggccgtgctgctggatcagatggcggaacacggcccagagcaactgaagttc

SEQ ID NO: 20666 - DNA, 3893 bp, Homo sapiens
  misc_feature (3)..(4): n is a, c, g, or t
  misc_feature (6)..(6): n is a, c, g, or t
  misc_feature (9)..(9): n is a, c, g, or t
atnncnggngggggaggcccgcggctgccgccgccatttcgggcgctgctgtgaagctgaaaccggagccggtccgctgggcggcgggcgccgggggccggaggggcgcgcgcggcggcggcaccccagcgtttaggcgcggaggcagccatggcgggcaacttcgactcggaggagcggagtagctggtactgggggcggttgagtcggcaggaggcggtggcgctgctgcagggccagcggcacggggtgttcctggtgcgggactcgagcaccagccccggggactatgtgctcagcgtctcagagaactcgcgcgtctcccactacatcatcaacagcagcggcccgcgcccgccggtgccaccgtcgcccgcccagcctccgcccggggtgagcccctccagactccgaataggagatcaagagtttgattcattgcctgctttactggaattctacaaaatacactatttggacactacaacgttgatagaaccagtttccagatccaggcagggtagtggagtgattctcaggcaggaggaggcggagtatgtgcgagccctctttgactttaatgggaatgatgaggaagatcttccctttaagaaaggagacatcttgagaatccgggacaagcctgaagagcagtggtggaatgcggaggacagcgaaggcaagagagggatgattccagtcccttacgtcgagaagtatagacctgcctccgcctcagtatcggctctgattggaggtaaccaggagggttcccacccacagccactgggtgggccggagcctgggccctatgcccaacccagcgtcaacactccgctccctaacctccagaatgggcccatatatgccagggttatccagaagcgagtccccaatgcctacgacaagacagccttggctttggaggtcggtgagctggtaaaggttacgaagattaatgtgagtggtcagtgggaaggggagtgtaatggcaaacgaggtcacttcccattcacacatgtccgtctgctggatcaacagaatcccgatgaggacttcagctgagtatagttcaacagttttgctgacagatgggaacaatcttttttttttttttccaactgccatctatacaattttcttacagatgtcaaaagcagtctagtttatataagcattctgttacctgtgatattttttagactgaactgctccattcctagtcttaattaccatattcagggtacgaactggagggcttgtgtgttagcttctgaattggcaattggaggcggtagtggtcgtgcctgtgtgtatcagaagggataggtatcttgcctcctttctctcaggcagtgcaaatcaccctgtggaaaaccgatggacaggaaggagtgttacacactgcttaccctgatttattcagtggttttgttttcattctggaaccatactatcaaatggcgacagactgttccgttccacccccgtgaagtaatcatgcaccgtgtgaatagtatcaagcaggattgctttcattgtatggagcatgaccagcgtgtgactcattctgacatttcagatcctaagaattctaagaacactactagaagcatttgttccctcctagtcaatgcttcatactttttcttgggattcttttagcccttgacattcttgtcccccaaacctgtaagtaggtgaattcctaagataagtgtgtattttcattccaggtgaaaagcaggatgtaccgagcactttattcagtgcatagctttaagccagtgttggattcactaagtggacagccagtctcccagctctctgccttccccaaaagggtcgtagtaggtcacccttctacagcagctaactagagtcctaactaatgggatccagcagggccatttctccagagggccagtatcctattaggagactcttggaattcttaggttctactcaagagtggaaggaccaatcacctctgatattctgtggaaggttttggggtcaaattctgccctctgcattctgtgcaacttgtataaaagtcaagttagtattacatgaatttggggtagggttagtgctttgaaaaaatgttgaaccggctgggcgcggtggctcacgtctgtaatcccagcactttgggaggccgaggcgggtggatcatgaggtcaggagttcgagaccagcctggccaacatagtgaaaccccatctctgctaaagatataaaaaattagcccggcgtggtggtgcacgcctgtaatcccagctactcgggaggctgaggcaggagaattgcttcaacctgggaggtggaggctgcagtgagccgagatcgcaccactgcgttccagcctgagcgacagggcaagactcagtctcaaaaaaaaaaaaaaggaaaaaaaaaagaaaaaaaaatgttgaaccaattgtgaattacttatgtattattcatttctcatggggagagtaatgctgttgaagaacattacattgtaaactgccttcatttttggctctttgtttatgttcaggtttagtttacaaacccatttaagtatggaatgatttatatggggtcaggtgctccacaaaatagacctatgagaccaaaaatgacctaggctatttagacgacagcatgaaacttccacgttagttctcagtctataaaggcacttaccggtctctggtgtggtatgaccaatagaaacaccttatagtttgctttggacctcattttggaaaaataatctgcctttctaattgttctgcataggttaaaatgataaatttacattctttgaacctataccagattgtggtgtccgagtgaccggcacactgtctgacacacagtcagtgtgcacgtatttgtctgagtgaatgaggagacctgagaaaccggtgacgtggcacagggaagccagctggcccaggattccgtacatggccgcaagcagactaacgcgttgacgctaatttaatgtattttacctcacactaaggtcatgcttgataaagacgttaaactcaacttgtaaaatggtagcccagtgctatgcacagagtgggtgctcattagtgttgaatgaacacatttgtaatactacatgtaattccatctgactgctttgttaaattttcagttagaacgtagatactgtaaagtccacacacacattaaatcttgttttcctgaaagtatggcatcaaaaatacttgtagaaaaaccttgtcacaactgatttgaatgttcctattttcttttcctttgactttgatattggcttgtaatgtctcttttcatcatatgtaatatcagtggaacaggcagcgctactcaagtcctaaggattcctcagtgatcagtgatccagggccgttcatgaaccactgggctggatttgactgttgagtgtggcagttaatgcccctcaagaaatcaaaggatgtcttataagtgtcttccaaaaaaaagcaaatgctgaaatcctattggcaaagtaaactgaaattggctgctatattttatataatcatttctgcaaatcccattttttgaatactaatatttgacatggttaattcttattaatttgttggaattgtttattgttaataatgcaaatagataatttttaattatccacaagtaacatttcactgttaatggtttgaaataggtgataagcaaaccaatttgaaataaaatataaacatgtgccattgtattataacactatacactttcttgacagttaaatttaaaaaaaaattttttttggtagcatgtattgtatatgtttatagtatatgtagtaaataaaaatatggccaaatgtttggcttggtgatcttttgcaaaaaagtaaaaaa

SEQ ID NO: 20667 - DNA, 3854 bp, Homo sapiens
  misc_feature (3)..(4): n is a, c, g, or t
  misc_feature (6)..(6): n is a, c, g, or t
  misc_feature (9)..(9): n is a, c, g, or t
atnncnggngggggaggcccgcggctgccgccgccatttcgggcgctgctgtgaagctgaaaccggagccggtccgctgggcggcgggcgccgggggccggaggggcgcgcgcggcggcggcaccccagcgtttaggcgcggaggcagccatggcgggcaacttcgactcggaggagcggagtagctggtactgggggcggttgagtcggcaggaggcggtggcgctgctgcagggccagcggcacggggtgttcctggtgcgggactcgagcaccagccccggggactatgtgctcagcgtctcagagaactcgcgcgtctcccactacatcatcaacagcagcggcccgcgcccgccggtgccaccgtcgcccgcccagcctccgcccggggtgagcccctccagactccgaataggagatcaagagtttgattcattgcctgctttactggaattctacaaaatacactatttggacactacaacgttgatagaaccagtttccagatccaggcagggtagtggagtgattctcaggcaggaggaggcggagtatgtgcgagccctctttgactttaatgggaatgatgaggaagatcttccctttaagaaaggagacatcttgagaatccgggacaagcctgaagagcagtggtggaatgcggaggacagcgaaggcaagagagggatgattccagtcccttacgtcgagaagtatagacctgcctccgcctcagtatcggctctgattggaggtaaccaggagggttcccacccacagccactgggtgggccggagcctgggccctatgcccaacccagcgtcaacactccgctccctaacctccagaatgggcccatatatgccagggttatccagaagcgagtccccaatgcctacgacaagacagccttggctttggaggtcggtgagctggtaaaggttacgaagattaatgtgagtggtcagtgggaaggggagtgtaatggcaaacgaggtcacttcccattcacacatgtccgtctgctggatcaacagaatcccgatgaggacttcagctgagtatagttcaacagttttgctgacagatgggaacaatcttttttttttttttccaactgccatctatacaattttcttacagatgtcaaaagcagtctagtttatataagcattctgttacctgtgatattttttagactgaactgctccattcctagtcttaattaccatattcagggtacgaactggagggcttgtgtgttagcttctgaattggcaattggaggcggtagtggtcgtgcctgtgtgtatcagaagggataggtatcttgcctcctttctctcaggcagtgcaaatcaccctgtggaaaaccgatggacaggaaggagtgttacacactgcttaccctgatttattcagtggttttgttttcattctggaaccatactatcaaatggcgacagactgttccgttccacccccgtgaagtaatcatgcaccgtgtgaatagtatcaagcaggattgctttcattgtatggagcatgaccagcgtgtgactcattctgacatttcagatcctaagaattctaagaacactactagaagcatttgttccctcctagtcaatgcttcatactttttcttgggattcttttagcccttgacattcttgtcccccaaacctgtaagtaggtgaattcctaagataagtgtgtattttcattccaggtgaaaagcaggatgtaccgagcactttattcagtgcatagctttaagccagtgttggattcactaagtggacagccagtctcccagctctctgccttccccaaaagggtcgtagtaggtcacccttctacagcagctaactagagtcctaactaatgggatccagcagggccatttctccagagggccagtatcctattaggagactcttggaattcttaggttctactcaagagtggaaggaccaatcacctctgatattctgtggaaggttttggggtcaaattctgccctctgcattctgtgcaacttgtataaaagtcaagttagtattacatgaatttggggtagggttagtgctttgaaaaaatgttgaaccggctgggcgcggtggctcacgtctgtaatcccagcactttgggaggccgaggcgggtggatcatgaggtcaggagttcgagaccagcctggccaacatagtgaaaccccatctctgctaaagatataaaaaattagcccggcgtggtggtgcacgcctgtaatcccagctactcgggaggctgaggcaggagaattgcttcaacctgggaggtggaggctgcagtgagccgagatcgcaccactgcgttccagcctgagcgacagggcaagactcagtctcaaaaaaaaaaaaaaggaaaaaaaaaagaaaaaaaaatgttgaaccaattgtgaattacttatgtattattcatttctcatggggagagtaatgctgttgaagaacattacattgtaaactgccttcatttttggctctttgtttatgttcaggtttagtttacaaacccatttaagtatggaatgatttatatggggtcaggtgctccacaaaatagacctatgagaccaaaaatgacctaggctatttagacgacagcatgaaacttccacgttagttctcagtctataaaggcacttaccggtctctggtgtggtatgaccaatagaaacaccttatagtttgctttggacctcattttggaaaaataatctgcctttctaattgttctgcataggttaaaatgataaatttacattctttgaacctataccagattgtggtgtccgagtgaccggcacactgtctgacacacagtcagtgtgcacgtatttgtctgagtgaatgaggagacctgagaaaccggtgacgtggcacagggaagccagctggcccaggattccgtacatggccgcaagcagactaacgcgttgacgctaatttaatgtattttacctcacactaaggtcatgcttgataaagacgttaaactcaacttgtaaaatggtagcccagtgctatgcacagagtgggtgctcattagtgttgaatgaacacatttgtaatactacatgtaattccatctgactgctttgttaaattttcagttagaacgtagatactgtaaagtccacacacacattaaatcttgttttcctgaaagtatggcatcaaaaatacttgtagaaaaaccttgtcacaactgatttgaatgttcctattttcttttcctttgactttgatattggcttgtaatgtctcttttcatcatatgtaatatcagtggaacaggcagcgctactcaagtcctaaggattcctcagtgatcagtgatccagggccgttcatgaaccactgggctggatttgactgttgagtgtggcagttaatgcccctcaagaaatcaaaggatgtcttataagtgtcttccaaaaaaaagcaaatgctgaaatcctattggcaaagtaaactgaaattggctgctatattttatataatcatttctgcaaatcccattttttgaatactaatatttgacatggttaattcttattaatttgttggaattgtttattgttaataatgcaaatagataatttttaattatccacaagtaacatttcactgttaatggtttgaaataggtgataagcaaaccaatttgaaataaaatataaacatgtgccattgtattataacactatacactttcttgacagttaaatttaaaaaaaaattttttttggtagcatgtattgtatatgtttatagtatatgtagtaaataaaaatatggcca

SEQ ID NO: 20668 - DNA, 3723 bp, Homo sapiens
  misc_feature (3)..(4): n is a, c, g, or t
  misc_feature (6)..(6): n is a, c, g, or t
  misc_feature (9)..(9): n is a, c, g, or t
atnncnggngggggaggcccgcggctgccgccgccatttcgggcgctgctgtgaagctgaaaccggagccggtccgctgggcggcgggcgccgggggccggaggggcgcgcgcggcggcggcaccccagcgtttaggcgcggaggcagccatggcgggcaacttcgactcggaggagcggagtagctggtactgggggcggttgagtcggcaggaggcggtggcgctgctgcagggccagcggcacggggtgttcctggtgcgggactcgagcaccagccccggggactatgtgctcagcgtctcagagaactcgcgcgtctcccactacatcatcaacagcagcggcccgcgcccgccggtgccaccgtcgcccgcccagcctccgcccggggtgagcccctccagactccgaataggagatcaagagtttgattcattgcctgctttactggaattctacaaaatacactatttggacactacaacgttgatagaaccagtttccagatccaggcagggtagtggagtgattctcaggcaggaggaggcggagtatgtgcgagccctctttgactttaatgggaatgatgaggaagatcttccctttaagaaaggagacatcttgagaatccgggacaagcctgaagagcagtggtggaatgcggaggacagcgaaggcaagagagggatgattccagtcccttacgtcgagaagtatagacctgcctccgcctcagtatcggctctgattggaggtcggtgagctggtaaaggttacgaagattaatgtgagtggtcagtgggaaggggagtgtaatggcaaacgaggtcacttcccattcacacatgtccgtctgctggatcaacagaatcccgatgaggacttcagctgagtatagttcaacagttttgctgacagatgggaacaatcttttttttttttttccaactgccatctatacaattttcttacagatgtcaaaagcagtctagtttatataagcattctgttacctgtgatattttttagactgaactgctccattcctagtcttaattaccatattcagggtacgaactggagggcttgtgtgttagcttctgaattggcaattggaggcggtagtggtcgtgcctgtgtgtatcagaagggataggtatcttgcctcctttctctcaggcagtgcaaatcaccctgtggaaaaccgatggacaggaaggagtgttacacactgcttaccctgatttattcagtggttttgttttcattctggaaccatactatcaaatggcgacagactgttccgttccacccccgtgaagtaatcatgcaccgtgtgaatagtatcaagcaggattgctttcattgtatggagcatgaccagcgtgtgactcattctgacatttcagatcctaagaattctaagaacactactagaagcatttgttccctcctagtcaatgcttcatactttttcttgggattcttttagcccttgacattcttgtcccccaaacctgtaagtaggtgaattcctaagataagtgtgtattttcattccaggtgaaaagcaggatgtaccgagcactttattcagtgcatagctttaagccagtgttggattcactaagtggacagccagtctcccagctctctgccttccccaaaagggtcgtagtaggtcacccttctacagcagctaactagagtcctaactaatgggatccagcagggccatttctccagagggccagtatcctattaggagactcttggaattcttaggttctactcaagagtggaaggaccaatcacctctgatattctgtggaaggttttggggtcaaattctgccctctgcattctgtgcaacttgtataaaagtcaagttagtattacatgaatttggggtagggttagtgctttgaaaaaatgttgaaccggctgggcgcggtggctcacgtctgtaatcccagcactttgggaggccgaggcgggtggatcatgaggtcaggagttcgagaccagcctggccaacatagtgaaaccccatctctgctaaagatataaaaaattagcccggcgtggtggtgcacgcctgtaatcccagctactcgggaggctgaggcaggagaattgcttcaacctgggaggtggaggctgcagtgagccgagatcgcaccactgcgttccagcctgagcgacagggcaagactcagtctcaaaaaaaaaaaaaaggaaaaaaaaaagaaaaaaaaatgttgaaccaattgtgaattacttatgtattattcatttctcatggggagagtaatgctgttgaagaacattacattgtaaactgccttcatttttggctctttgtttatgttcaggtttagtttacaaacccatttaagtatggaatgatttatatggggtcaggtgctccacaaaatagacctatgagaccaaaaatgacctaggctatttagacgacagcatgaaacttccacgttagttctcagtctataaaggcacttaccggtctctggtgtggtatgaccaatagaaacaccttatagtttgctttggacctcattttggaaaaataatctgcctttctaattgttctgcataggttaaaatgataaatttacattctttgaacctataccagattgtggtgtccgagtgaccggcacactgtctgacacacagtcagtgtgcacgtatttgtctgagtgaatgaggagacctgagaaaccggtgacgtggcacagggaagccagctggcccaggattccgtacatggccgcaagcagactaacgcgttgacgctaatttaatgtattttacctcacactaaggtcatgcttgataaagacgttaaactcaacttgtaaaatggtagcccagtgctatgcacagagtgggtgctcattagtgttgaatgaacacatttgtaatactacatgtaattccatctgactgctttgttaaattttcagttagaacgtagatactgtaaagtccacacacacattaaatcttgttttcctgaaagtatggcatcaaaaatacttgtagaaaaaccttgtcacaactgatttgaatgttcctattttcttttcctttgactttgatattggcttgtaatgtctcttttcatcatatgtaatatcagtggaacaggcagcgctactcaagtcctaaggattcctcagtgatcagtgatccagggccgttcatgaaccactgggctggatttgactgttgagtgtggcagttaatgcccctcaagaaatcaaaggatgtcttataagtgtcttccaaaaaaaagcaaatgctgaaatcctattggcaaagtaaactgaaattggctgctatattttatataatcatttctgcaaatcccattttttgaatactaatatttgacatggttaattcttattaatttgttggaattgtttattgttaataatgcaaatagataatttttaattatccacaagtaacatttcactgttaatggtttgaaataggtgataagcaaaccaatttgaaataaaatataaacatgtgccattgtattataacactatacactttcttgacagttaaatttaaaaaaaaattttttttggtagcatgtattgtatatgtttatagtatatgtagtaaataaaaatatggccaaatgtttggcttggtgatcttttgcaaaaaagtaaaaaa

SEQ ID NO: 20669 - DNA, 3838 bp, Homo sapiens
  misc_feature (3)..(4): n is a, c, g, or t
  misc_feature (6)..(6): n is a, c, g, or t
  misc_feature (9)..(9): n is a, c, g, or t
atnncnggngggggaggcccgcggctgccgccgccatttcgggcgctgctgtgaagctgaaaccggagccggtccgctgggcggcgggcgccgggggccggaggggcgcgcgcggcggcggcaccccagcgtttaggcgcggaggcagccatggcgggcaacttcgactcggaggagcggagtagctggtactgggggcggttgagtcggcaggaggcggtggcgctgctgcagggccagcggcacggggtgttcctggtgcgggactcgagcaccagccccggggactatgtgctcagcgtctcagagaactcgcgcgtctcccactacatcatcaacagcagcggcccgcgcccgccggtgccaccgtcgcccgcccagcctccgcccggggtgagcccctccagactccgaataggagatcaagagtttgattcattgcctgctttactggaattctacaaaatacactatttggacactacaacgttgatagaaccagtttccagatccaggcagggtagtggagtgattctcaggcaggaggaggcggagtatgtgcgagccctctttgactttaatgggaatgatgaggaagatcttccctttaagaaaggagacatcttgagaatccgggacaagcctgaagagcagtggtggaatgcggaggacagcgaaggcaagagagggatgattccagtcccttacgtcgagaagtatagacctgcctccgcctcagtatcggctctgattggaggtaaccaggagggttcccacccacagccactgggtgggccggagcctgggccctatgcccaacccagcgtcaacactccgctccctaacctccagaatgggcccatatatgccagggttatccagaagcgagtccccaatgcctacgacaagacagccttggctttggaggtcggtgagctggtaaaggttacgaagattaatgtgagtggtcagtgggaaggggagtgtaatggcaaacgaggtcacttcccattcacacatgtccgtctgctggatcaacagaatcccgatgaggacttcagctgagtatagttcaacagttttgctgacagatgggaacaatcttttttttttttttccaactgccatctatacaattttcttacagatgtcaaaagcagtctagtttatataagcattctgttacctgtgatattttttagactgaactgctccattcctagtcttaattaccatattcagggtacgaactggagggcttgtgtgttagcttctgaattggcaattggaggcggtagtggtcgtgcctgtgtgtatcagaagggataggtatcttgcctcctttctctcaggcagtgcaaatcaccctgtggaaaaccgatggacaggaaggagtgttacacactgcttaccctgatttattcagtggttttgttttcattctggaaccatactatcaaatggcgacagactgttccgttccacccccgtgaagtaatcatgcaccgtgtgaatagtatcaagcaggattgctttcattgtatggagcatgaccagcgtgtgactcattctgacatttcagatcctaagaattctaagaacactactagaagcatttgttccctcctagtcaatgcttcatactttttcttgggattcttttagcccttgacattcttgtcccccaaacctgtaagtaggtgaattcctaagataagtgtgtattttcattccaggtgaaaagcaggatgtaccgagcactttattcagtgcatagctttaagccagtgttggattcactaagtggacagccagtctcccagctctctgccttccccaaaagggtcgtagtaggtcacccttctacagcagctaactagagtcctaactaatgggatccagcagggccatttctccagagggccagtatcctattaggagactcttggaattcttaggttctactcaagagtggaaggaccaatcacctctgatattctgtggaaggttttggggtcaaattctgccctctgcattctgtgcaacttgtataaaagtcaagttagtattacatgaatttggggtagggttagtgctttgaaaaaatgttgaaccggctgggcgcggtggctcacgtctgtaatcccagcactttgggaggccgaggcgggtggatcatgaggtcaggagttcgagaccagcctggccaacatagtgaaaccccatctctgctaaagatataaaaaattagcccggcgtggtggtgcacgcctgtaatcccagctactcgggaggctgaggcaggagaattgcttcaacctgggaggtggaggctgcagtgagccgagatcgcaccactgcgttccagcctgagcgacagggcaagactcagtctcaaaaaaaaaaaaaaggaaaaaaaaaagaaaaaaaaatgttgaaccaattgtgaattacttatgtattattcatttctcatggggagagtaatgctgttgaagaacattacattgtaaactgccttcatttttggctctttgtttatgttcaggtttagtttacaaacccatttaagtatggaatgatttatatggggtcaggtgctccacaaaatagacctatgagaccaaaaatgacctaggctatttagacgacagcatgaaacttccacgttagttctcagtctataaaggcacttaccggtctctggtgtggtatgaccaatagaaacaccttatagtttgctttggacctcattttggaaaaataatctgcctttctaattgttctgcataggttaaaatgataaatttacattctttgaacctataccagattgtggtgtccgagtgaccggcacactgtctgacacacagtcagtgtgcacgtatttgtctgagtgaatgaggagacctgagaaaccggtgacgtggcacagggaagccagctggcccaggattccgtacatggccgcaagcagactaacgcgttgacgctaatttaatgtattttacctcacactaaggtcatgcttgataaagacgttaaactcaacttgtaaaatggtagcccagtgctatgcacagagtgggtgctcattagtgttgaatgaacacatttgtaatactacatgtaattccatctgactgctttgttaaattttcagttagaacgtagatactgtaaagtccacacacacattaaatcttgttttcctgaaagtatggcatcaaaaatactttttgatattggcttgtaatgtctcttttcatcatatgtaatatcagtggaacaggcagcgctactcaagtcctaaggattcctcagtgatcagtgatccagggccgttcatgaaccactgggctggatttgactgttgagtgtggcagttaatgcccctcaagaaatcaaaggatgtcttataagtgtcttccaaaaaaaagcaaatgctgaaatcctattggcaaagtaaactgaaattggctgctatattttatataatcatttctgcaaatcccattttttgaatactaatatttgacatggttaattcttattaatttgttggaattgtttattgttaataatgcaaatagataatttttaattatccacaagtaacatttcactgttaatggtttgaaataggtgataagcaaaccaatttgaaataaaatataaacatgtgccattgtattataacactatacactttcttgacagttaaatttaaaaaaaaattttttttggtagcatgtattgtatatgtttatagtatatgtagtaaataaaaatatggccaaatgtttggcttggtgatcttttgcaaaaaagtaaaaaa

SEQ ID NO: 20670 - DNA, 3748 bp, Homo sapiens
  misc_feature (3)..(4): n is a, c, g, or t
  misc_feature (6)..(6): n is a, c, g, or t
  misc_feature (9)..(9): n is a, c, g, or t
atnncnggngggggaggcccgcggctgccgccgccatttcgggcgctgctgtgaagctgaaaccggagccggtccgctgggcggcgggcgccgggggccggaggggcgcgcgcggcggcggcaccccagcgtttaggcgcggaggcagccatggcgggcaacttcgactcggaggagcggagtagctggtactgggggcggttgagtcggcaggaggcggtggcgctgctgcagggccagcggcacggggtgttcctggtgcgggactcgagcaccagccccggggactatgtgctcagcgtctcagagaactcgcgcgtctcccactacatcatcaacagcagcggcccgcgcccgccggtgccaccgtcgcccgcccagcctccgcccggggtgagcccctccagactccgaataggagatcaagagtttgattcattgcctgctttactggaattctacaaaatacactatttggacactacaacgttgatagaaccagtttccagatccaggcagggtagtggagtgattctcaggcaggaggaggcggagtatgtgcgagccctctttgactttaatgggaatgatgaggaagatcttccctttaagaaaggagacatcttgagaatccgggacaagcctgaagagcagtggtggaatgcggaggacagcgaaggcaagagagggatgattccagtcccttacgtcgagaagtatagacctgcctccgcctcagtatcggctctgattggaggtaaccaggagggttcccacccacagccactgggtgggccggagcctgggccctatgcccaacccagcgtcaacactccgctccctaacctccagaatgggcccatatatgccagggttatccagaagcgagtccccaatgcctacgacaagacagccttggctttggaggtcggtgagctggtaaaggttacgaagattaatgtgagtggtcagtgggaaggggagtgtaatggcaaacgaggtcacttcccattcacacatgtccgtctgctggatcaacagaatcccgatgaggacttcagctgagtatagttcaacagttttgctgacagatgggaacaatcttttttttttttttccaactgccatctatacaattttcttacagatgtcaaaagcagtctagtttatataagcattctgttacctgtgatattttttagactgaactgctccattcctagtcttaattaccatattcagggtacgaactggagggcttgtgtgttagcttctgaattggcaattggaggcggtagtggtcgtgcctgtgtgtatcagaagggataggtatcttgcctcctttctctcaggcagtgcaaatcaccctgtggaaaaccgatggacaggaaggagtgttacacactgcttaccctgatttattcagtggttttgttttcattctggaaccatactatcaaatggcgacagactgttccgttccacccccgtgaagtaatcatgcaccgtgtgaatagtatcaagcaggattgctttcattgtatggagcatgaccagcgtgtgactcattctgacatttcagatcctaagaattctaagaacactactagaagcatttgttccctcctagtcaatgcttcatactttttcttgggattcttttagcccttgacattcttgtcccccaaacctgtaagtaggtgaattcctaagataagtgtgtattttcattccaggtgaaaagcaggatgtaccgagcactttattcagtgcatagctttaagccagtgttggattcactaagtggacagccagtctcccagctctctgccttccccaaaagggtcgtagtaggtcacccttctacagcagctaactagagtcctaactaatgggatccagcagggccatttctccagagggccagtatcctattaggagactcttggaattcttaggttctactcaagagtggaaggaccaatcacctctgatattctgtggaaggttttggggtcaaattctgccctctgcattctgtgcaacttgtataaaagtcaagttagtattacatgaatttggggtagggttagtgctttgaaaaaatgttgaaccggctgggcgcggtggctcacgtctgtaatcccagcactttgggaggccgaggcgggtggatcatgaggtcaggagttcgagaccagcctggccaacatagtgaaaccccatctctgctaaagatataaaaaattagcccggcgtggtggtgcacgcctgtaatcccagctactcgggaggctgaggcaggagaattgcttcaacctgggaggtggaggctgcagtgagccgagatcgcaccactgcgttccagcctgagcgacagggcaagactcagtctcaaaaaaaaaaaaaaggaaaaaaaaaagaaaaaaaaatgttgaaccaattgtgaattacttatgtattattcatttctcatggggagagtaatgctgttgaagaacattacattgtaaactgccttcatttttggctctttgtttatgttcaggtttagtttacaaacccatttaagtatggaatgatttatatggggtcaggtgctccacaaaatagacctatgagaccaaaaatgacctaggctatttagacgacagcatgaaacttccacgttagttctcagtctataaaggcacttaccggtctctggtgtggtatgaccaatagaaacaccttatagtttgctttggacctcattttggaaaaataatctgcctttctaattgttctgcataggttaaaatgataaatttacattctttgaacctataccagattgtggtgtccgagtgaccggcacactgtctgacacacagtcagtgtgcacgtatttgtctgagtgaatgaggagacctgagaaaccggtgacgtggcacagggaagccagctggcccaggattccgtacatggccgcaagcagactaacgcgttgacgctaatttaatgtattttacctcacactaaggtcatgcttgataaagacgttaaactcaacttgtaaaatggtagcccagtgctatgcacagagtgggtgctcattagtgttgaatgaacacatttgtaatactacatgtaattccatctgactgctttgttaaattttcagttagaacgtagatactgtaaagtccacacacacattaaatcttgttttcctgaaagtatggcatcaaaaatacttgtagaaaaaccttgtcacaactgatttgaatgttcctattttcttttcctttgactttgatattggcttgtaatgtctcttttcatcatatgtaatatcagtggaacaggcagcgctactcaagtcctaaggattcctcagtgatcagtgatccagggccgttcatgaaccactgggctggatttgactgttgagtgtggcagttaatgcccctcaagaaatcaaaggatgtcttataagtgtcttccaaaaaaaagcaaatgctgaaatcctattggcaaagtaaactgaaattggctgctatattttatataatcatttctgcaaatcccattttttgaatactaatatttgacatggttaattcttattaatttgttggaattgtttattgttaataatgcaaatagataatttttaattatccacaagtaacatttcactgttaatggtttgaaataggtgataagcaaaccaatttgaaataaaatataaacatgtgccattgta

SEQ ID NO: 20671 - DNA, 3939 bp, Homo sapiens
gtgcctaaagtggcatatgtgggtcacccttctagaggagctaactagagtcctaactaatgggatccagcagggccatttctccagagggccagtatcctattaggagactctggaattcttaggttctactcaagagtggaaggaccaatcacctctgatattctgtggaaggtttggggtcaaattctgccctctgcattctgtgcaactgtataaaagtcaagttagtattacatgaattggggtagggttagtgcttgaaaaaatgttgaaccggctgggcgcggtggctcacgcctgtagtcccagcactttgggaggctgaggcaggtggatcacctgaggtcaggagttcaagaccagcctggccaacacggtgaaaccccatctctactaaaaatacaaaaattagccaggcagggtggcgtgtgcctgtaatcccagctactcggaaggctgaggcaggagaatcccttgaaccccggaggcgaaggttacagtgagccgagattatgccactgccctccagcctgagcgacagagcaaaaaaaaaaaagaaagtgcttcaagctgcaaccacggagctcgtcgtcagcagatggctgggtgagcccctccagactccgaataggagatcaagagtttgattcattgcctgctttactggaattctacaaaatacactatttggacactacaacgttgatagaaccagtttccagatccaggcagggtagtggagtgattctcaggcaggaggaggcggagtatgtgcgagccctctttgactttaatgggaatgatgaggaagatcttccctttaagaaaggagacatcttgagaatccgggacaagcctgaagagcagtggtggaatgcggaggacagcgaaggcaagagagggatgattccagtcccttacgtcgagaagtatagacctgcctccgcctcagtatcggctctgattggaggtcggtgagctggtaaaggttacgaagattaatgtgagtggtcagtgggaaggggagtgtaatggcaaacgaggtcacttcccattcacacatgtccgtctgctggatcaacagaatcccgatgaggacttcagctgagtatagttcaacagttttgctgacagatgggaacaatcttttttttttttttccaactgccatctatacaattttcttacagatgtcaaaagcagtctagtttatataagcattctgttacctgtgatattttttagactgaactgctccattcctagtcttaattaccatattcagggtacgaactggagggcttgtgtgttagcttctgaattggcaattggaggcggtagtggtcgtgcctgtgtgtatcagaagggataggtatcttgcctcctttctctcaggcagtgcaaatcaccctgtggaaaaccgatggacaggaaggagtgttacacactgcttaccctgatttattcagtggttttgttttcattctggaaccatactatcaaatggcgacagactgttccgttccacccccgtgaagtaatcatgcaccgtgtgaatagtatcaagcaggattgctttcattgtatggagcatgaccagcgtgtgactcattctgacatttcagatcctaagaattctaagaacactactagaagcatttgttccctcctagtcaatgcttcatactttttcttgggattcttttagcccttgacattcttgtcccccaaacctgtaagtaggtgaattcctaagataagtgtgtattttcattccaggtgaaaagcaggatgtaccgagcactttattcagtgcatagctttaagccagtgttggattcactaagtggacagccagtctcccagctctctgccttccccaaaagggtcgtagtaggtcacccttctacagcagctaactagagtcctaactaatgggatccagcagggccatttctccagagggccagtatcctattaggagactcttggaattcttaggttctactcaagagtggaaggaccaatcacctctgatattctgtggaaggttttggggtcaaattctgccctctgcattctgtgcaacttgtataaaagtcaagttagtattacatgaatttggggtagggttagtgctttgaaaaaatgttgaaccggctgggcgcggtggctcacgtctgtaatcccagcactttgggaggccgaggcgggtggatcatgaggtcaggagttcgagaccagcctggccaacatagtgaaaccccatctctgctaaagatataaaaaattagcccggcgtggtggtgcacgcctgtaatcccagctactcgggaggctgaggcaggagaattgcttcaacctgggaggtggaggctgcagtgagccgagatcgcaccactgcgttccagcctgagcgacagggcaagactcagtctcaaaaaaaaaaaaaaggaaaaaaaaaagaaaaaaaaatgttgaaccaattgtgaattacttatgtattattcatttctcatggggagagtaatgctgttgaagaacattacattgtaaactgccttcatttttggctctttgtttatgttcaggtttagtttacaaacccatttaagtatggaatgatttatatggggtcaggtgctccacaaaatagacctatgagaccaaaaatgacctaggctatttagacgacagcatgaaacttccacgttagttctcagtctataaaggcacttaccggtctctggtgtggtatgaccaatagaaacaccttatagtttgctttggacctcattttggaaaaataatctgcctttctaattgttctgcataggttaaaatgataaatttacattctttgaacctataccagattgtggtgtccgagtgaccggcacactgtctgacacacagtcagtgtgcacgtatttgtctgagtgaatgaggagacctgagaaaccggtgacgtggcacagggaagccagctggcccaggattccgtacatggccgcaagcagactaacgcgttgacgctaatttaatgtattttacctcacactaaggtcatgcttgataaagacgttaaactcaacttgtaaaatggtagcccagtgctatgcacagagtgggtgctcattagtgttgaatgaacacatttgtaatactacatgtaattccatctgactgctttgttaaattttcagttagaacgtagatactgtaaagtccacacacacattaaatcttgttttcctgaaagtatggcatcaaaaatacttgtagaaaaaccttgtcacaactgatttgaatgttcctattttcttttcctttgactttgatattggcttgtaatgtctcttttcatcatatgtaatatcagtggaacaggcagcgctactcaagtcctaaggattcctcagtgatcagtgatccagggccgttcatgaaccactgggctggatttgactgttgagtgtggcagttaatgcccctcaagaaatcaaaggatgtcttataagtgtcttccaaaaaaaagcaaatgctgaaatcctattggcaaagtaaactgaaattggctgctatattttatataatcatttctgcaaatcccattttttgaatactaatatttgacatggttaattcttattaatttgttggaattgtttattgttaataatgcaaatagataatttttaattatccacaagtaacatttcactgttaatggtttgaaataggtgataagcaaaccaatttgaaataaaatataaacatgtgccattgtattataacactatacactttcttgacagttaaatttaaaaaaaaattttttttggtagcatgtattgtatatgtttatagtatatgtagtaaataaaaatatggccaaatgtttggcttggtgatcttttgcaaaaaagtaaaaaa

SEQ ID NO: 20672 - DNA, 3373 bp, Homo sapiens
  misc_feature (3)..(4): n is a, c, g, or t
  misc_feature (6)..(6): n is a, c, g, or t
  misc_feature (9)..(9): n is a, c, g, or t
atnncnggngggggaggcccgcggctgccgccgccatttcgggcgctgctgtgaagctgaaaccggagccggtccgctgggcggcgggcgccgggggccggaggggcgcgcgcggcggcggcaccccagcgtttaggcgcggaggcagccatggcgggcaacttcgactcggaggagcggagtagctggtactgggggcggttgagtcggcaggaggcggtggcgctgctgcagggccagcggcacggggtgttcctggtgcgggactcgagcaccagccccggggactatgtgctcagcgtctcagagaactcgcgcgtctcccactacatcatcaacagcagcggcccgcgcccgccggtgccaccgtcgcccgcccagcctccgcccggggtgagcccctccagactccgaataggagatcaagagtttgattcattgcctgctttactggaattctacaaaatacactatttggacactacaacgttgatagaaccagtttccagatccaggcagggtagtggagtgattctcaggcaggaggaggcggagtatgtgcgagccctctttgactttaatgggaatgatgaggaagatcttccctttaagaaaggagacatcttgagaatccgggacaagcctgaagagcagtggtggaatgcggaggacagcgaaggcaagagagggatgattccagtcccttacgtcgagaagtatagacctgcctccgcctcagtatcggctctgattggaggtaaccaggagggttcccacccacagccactgggtgggccggagcctgggccctatgcccaacccagcgtcaacactccgctccctaacctccagaatgggcccatatatgccagggttatccagaagcgagtccccaatgcctacgacaagacagccttggctttggaggtcggtgagctggtaaaggttacgaagattaatgtgagtggtcagtgggaaggggagtgtaatggcaaacgaggtcacttcccattcacacatgtccgtctgctggatcaacagaatcccgatgaggacttcagctgagtatagttcaacagttttgctgacagatgggaacaatcttttttttttttttccaactgccatctatacaattttcttacagatgtcaaaagcagtctagtttatataagcattctgttacctgtgatattttttagactgaactgctccattcctagtcttaattaccatattcagggtacgaactggagggcttgtgtgttagcttctgaattggcaattggaggcggtagtggtcgtgcctgtgtgtatcagaagggataggtatcttgcctcctttctctcaggcagtgcaaatcaccctgtggaaaaccgatggacaggaaggagtgttacacactgcttaccctgatttattcagtggttttgttttcattctggaaccatactatcaaatggcgacagactgttccgttccacccccgtgaagtaatcatgcaccgtgtgaatagtatcaagcaggattgctttcattgtatggagcatgaccagcgtgtgactcattctgacatttcagatcctaagaattctaagaacactactagaagcatttgttccctcctagtcaatgcttcatactttttcttgggattcttttagcccttgacattcttgtcccccaaacctgtaagtaggtgaattcctaagataagtgtgtattttcattccaggtgaaaagcaggatgtaccgagcactttattcagtgcatagctttaagccagtgttggattcactaagtggacagccagtctcccagctctctgccttccccaaaagggtcgtagtaggtcacccttctacagcagctaactagagtcctaactaatgggatccagcagggccatttctccagagggccagtatcctattaggagactcttggaattcttaggttctactcaagagtggaaggaccaatcacctctgatattctgtggaaggttttggggtcaaattctgccctctgcattctgtgcaacttgtataaaagtcaagttagtattacatgaatttggggtagggttagtgctttgaaaaaatgttgaaccggctgggcgcggtggctcacgtctgtaatcccagcactttgggaggccgaggcgggtggatcatgaggtcaggagttcgagaccagcctggccaacatatagtttgctttggacctcattttggaaaaataatctgcctttctaattgttctgcataggttaaaatgataaatttacattctttgaacctataccagattgtggtgtccgagtgaccggcacactgtctgacacacagtcagtgtgcacgtatttgtctgagtgaatgaggagacctgagaaaccggtgacgtggcacagggaagccagctggcccaggattccgtacatggccgcaagcagactaacgcgttgacgctaatttaatgtattttacctcacactaaggtcatgcttgataaagacgttaaactcaacttgtaaaatggtagcccagtgctatgcacagagtgggtgctcattagtgttgaatgaacacatttgtaatactacatgtaattccatctgactgctttgttaaattttcagttagaacgtagatactgtaaagtccacacacacattaaatcttgttttcctgaaagtatggcatcaaaaatacttgtagaaaaaccttgtcacaactgatttgaatgttcctattttcttttcctttgactttgatattggcttgtaatgtctcttttcatcatatgtaatatcagtggaacaggcagcgctactcaagtcctaaggattcctcagtgatcagtgatccagggccgttcatgaaccactgggctggatttgactgttgagtgtggcagttaatgcccctcaagaaatcaaaggatgtcttataagtgtcttccaaaaaaaagcaaatgctgaaatcctattggcaaagtaaactgaaattggctgctatattttatataatcatttctgcaaatcccattttttgaatactaatatttgacatggttaattcttattaatttgttggaattgtttattgttaataatgcaaatagataatttttaattatccacaagtaacatttcactgttaatggtttgaaataggtgataagcaaaccaatttgaaataaaatataaacatgtgccattgtattataacactatacactttcttgacagttaaatttaaaaaaaaattttttttggtagcatgtattgtatatgtttatagtatatgtagtaaataaaaatatggccaaatgtttggcttggtgatcttttgcaaaaaagtaaaaaa

SEQ ID NO: 20673 - DNA, 3886 bp, Homo sapiens
gtgcctaaagtggcatatgtgggtcacccttctagaggagctaactagagtcctaactaatgggatccagcagggccatttctccagagggccagtatcctattaggagactctggaattcttaggttctactcaagagtggaaggaccaatcacctctgatattctgtggaaggtttggggtcaaattctgccctctgcattctgtgcaactgtataaaagtcaagttagtattacatgaattggggtagggttagtgcttgaaaaaatgttgaaccggctgggcgcggtggctcacgcctgtagtcccagcactttgggaggctgaggcaggtggatcacctgaggtcaggagttcaagaccagcctggccaacacggtgaaaccccatctctactaaaaatacaaaaattagccaggcagggtggcgtgtgcctgtaatcccagctactcggaaggctgaggcaggagaatcccttgaaccccggaggcgaaggttacagtgagccgagattatgccactgccctccagcctgagcgacagagcaaaaaaaaaaaagaaagtgcttcaagctgcaaccacggagctcgtcgtcagcagatggctgggtgagcccctccagactccgaataggagatcaagagtttgattcattgcctgctttactggaattctacgcagggtagtggagtgattctcaggcaggaggaggcggagtatgtgcgagccctctttgactttaatgggaatgatgaggaagatcttccctttaagaaaggagacatcttgagaatccgggacaagcctgaagagcagtggtggaatgcggaggacagcgaaggcaagagagggatgattccagtcccttacgtcgagaagtatagacctgcctccgcctcagtatcggctctgattggaggtcggtgagctggtaaaggttacgaagattaatgtgagtggtcagtgggaaggggagtgtaatggcaaacgaggtcacttcccattcacacatgtccgtctgctggatcaacagaatcccgatgaggacttcagctgagtatagttcaacagttttgctgacagatgggaacaatcttttttttttttttccaactgccatctatacaattttcttacagatgtcaaaagcagtctagtttatataagcattctgttacctgtgatattttttagactgaactgctccattcctagtcttaattaccatattcagggtacgaactggagggcttgtgtgttagcttctgaattggcaattggaggcggtagtggtcgtgcctgtgtgtatcagaagggataggtatcttgcctcctttctctcaggcagtgcaaatcaccctgtggaaaaccgatggacaggaaggagtgttacacactgcttaccctgatttattcagtggttttgttttcattctggaaccatactatcaaatggcgacagactgttccgttccacccccgtgaagtaatcatgcaccgtgtgaatagtatcaagcaggattgctttcattgtatggagcatgaccagcgtgtgactcattctgacatttcagatcctaagaattctaagaacactactagaagcatttgttccctcctagtcaatgcttcatactttttcttgggattcttttagcccttgacattcttgtcccccaaacctgtaagtaggtgaattcctaagataagtgtgtattttcattccaggtgaaaagcaggatgtaccgagcactttattcagtgcatagctttaagccagtgttggattcactaagtggacagccagtctcccagctctctgccttccccaaaagggtcgtagtaggtcacccttctacagcagctaactagagtcctaactaatgggatccagcagggccatttctccagagggccagtatcctattaggagactcttggaattcttaggttctactcaagagtggaaggaccaatcacctctgatattctgtggaaggttttggggtcaaattctgccctctgcattctgtgcaacttgtataaaagtcaagttagtattacatgaatttggggtagggttagtgctttgaaaaaatgttgaaccggctgggcgcggtggctcacgtctgtaatcccagcactttgggaggccgaggcgggtggatcatgaggtcaggagttcgagaccagcctggccaacatagtgaaaccccatctctgctaaagatataaaaaattagcccggcgtggtggtgcacgcctgtaatcccagctactcgggaggctgaggcaggagaattgcttcaacctgggaggtggaggctgcagtgagccgagatcgcaccactgcgttccagcctgagcgacagggcaagactcagtctcaaaaaaaaaaaaaaggaaaaaaaaaagaaaaaaaaatgttgaaccaattgtgaattacttatgtattattcatttctcatggggagagtaatgctgttgaagaacattacattgtaaactgccttcatttttggctctttgtttatgttcaggtttagtttacaaacccatttaagtatggaatgatttatatggggtcaggtgctccacaaaatagacctatgagaccaaaaatgacctaggctatttagacgacagcatgaaacttccacgttagttctcagtctataaaggcacttaccggtctctggtgtggtatgaccaatagaaacaccttatagtttgctttggacctcattttggaaaaataatctgcctttctaattgttctgcataggttaaaatgataaatttacattctttgaacctataccagattgtggtgtccgagtgaccggcacactgtctgacacacagtcagtgtgcacgtatttgtctgagtgaatgaggagacctgagaaaccggtgacgtggcacagggaagccagctggcccaggattccgtacatggccgcaagcagactaacgcgttgacgctaatttaatgtattttacctcacactaaggtcatgcttgataaagacgttaaactcaacttgtaaaatggtagcccagtgctatgcacagagtgggtgctcattagtgttgaatgaacacatttgtaatactacatgtaattccatctgactgctttgttaaattttcagttagaacgtagatactgtaaagtccacacacacattaaatcttgttttcctgaaagtatggcatcaaaaatacttgtagaaaaaccttgtcacaactgatttgaatgttcctattttcttttcctttgactttgatattggcttgtaatgtctcttttcatcatatgtaatatcagtggaacaggcagcgctactcaagtcctaaggattcctcagtgatcagtgatccagggccgttcatgaaccactgggctggatttgactgttgagtgtggcagttaatgcccctcaagaaatcaaaggatgtcttataagtgtcttccaaaaaaaagcaaatgctgaaatcctattggcaaagtaaactgaaattggctgctatattttatataatcatttctgcaaatcccattttttgaatactaatatttgacatggttaattcttattaatttgttggaattgtttattgttaataatgcaaatagataatttttaattatccacaagtaacatttcactgttaatggtttgaaataggtgataagcaaaccaatttgaaataaaatataaacatgtgccattgtattataacactatacactttcttgacagttaaatttaaaaaaaaattttttttggtagcatgtattgtatatgtttatagtatatgtagtaaataaaaatatggccaaatgtttggcttggtgatcttttgcaaaaaagtaaaaaa

SEQ ID NO: 20674 - DNA, 3037 bp, Homo sapiens
  misc_feature (19)..(20): n is a, c, g, or t
tgtggtaggggaaaaaggnnggttttttgtgtgatttgtaggtggagaaagaaaaagcttcaggggaacgagtcggtgagctggtaaaggttacgaagattaatgtgagtggtcagtgggaaggggagtgtaatggcaaacgaggtcacttcccattcacacatgtccgtctgctggatcaacagaatcccgatgaggacttcagctgagtatagttcaacagttttgctgacagatgggaacaatcttttttttttttttccaactgccatctatacaattttcttacagatgtcaaaagcagtctagtttatataagcattctgttacctgtgatattttttagactgaactgctccattcctagtcttaattaccatattcagggtacgaactggagggcttgtgtgttagcttctgaattggcaattggaggcggtagtggtcgtgcctgtgtgtatcagaagggataggtatcttgcctcctttctctcaggcagtgcaaatcaccctgtggaaaaccgatggacaggaaggagtgttacacactgcttaccctgatttattcagtggttttgttttcattctggaaccatactatcaaatggcgacagactgttccgttccacccccgtgaagtaatcatgcaccgtgtgaatagtatcaagcaggattgctttcattgtatggagcatgaccagcgtgtgactcattctgacatttcagatcctaagaattctaagaacactactagaagcatttgttccctcctagtcaatgcttcatactttttcttgggattcttttagcccttgacattcttgtcccccaaacctgtaagtaggtgaattcctaagataagtgtgtattttcattccaggtgaaaagcaggatgtaccgagcactttattcagtgcatagctttaagccagtgttggattcactaagtggacagccagtctcccagctctctgccttccccaaaagggtcgtagtaggtcacccttctacagcagctaactagagtcctaactaatgggatccagcagggccatttctccagagggccagtatcctattaggagactcttggaattcttaggttctactcaagagtggaaggaccaatcacctctgatattctgtggaaggttttggggtcaaattctgccctctgcattctgtgcaacttgtataaaagtcaagttagtattacatgaatttggggtagggttagtgctttgaaaaaatgttgaaccggctgggcgcggtggctcacgtctgtaatcccagcactttgggaggccgaggcgggtggatcatgaggtcaggagttcgagaccagcctggccaacatagtgaaaccccatctctgctaaagatataaaaaattagcccggcgtggtggtgcacgcctgtaatcccagctactcgggaggctgaggcaggagaattgcttcaacctgggaggtggaggctgcagtgagccgagatcgcaccactgcgttccagcctgagcgacagggcaagactcagtctcaaaaaaaaaaaaaaggaaaaaaaaaagaaaaaaaaatgttgaaccaattgtgaattacttatgtattattcatttctcatggggagagtaatgctgttgaagaacattacattgtaaactgccttcatttttggctctttgtttatgttcaggtttagtttacaaacccatttaagtatggaatgatttatatggggtcaggtgctccacaaaatagacctatgagaccaaaaatgacctaggctatttagacgacagcatgaaacttccacgttagttctcagtctataaaggcacttaccggtctctggtgtggtatgaccaatagaaacaccttatagtttgctttggacctcattttggaaaaataatctgcctttctaattgttctgcataggttaaaatgataaatttacattctttgaacctataccagattgtggtgtccgagtgaccggcacactgtctgacacacagtcagtgtgcacgtatttgtctgagtgaatgaggagacctgagaaaccggtgacgtggcacagggaagccagctggcccaggattccgtacatggccgcaagcagactaacgcgttgacgctaatttaatgtattttacctcacactaaggtcatgcttgataaagacgttaaactcaacttgtaaaatggtagcccagtgctatgcacagagtgggtgctcattagtgttgaatgaacacatttgtaatactacatgtaattccatctgactgctttgttaaattttcagttagaacgtagatactgtaaagtccacacacacattaaatcttgttttcctgaaagtatggcatcaaaaatacttgtagaaaaaccttgtcacaactgatttgaatgttcctattttcttttcctttgactttgatattggcttgtaatgtctcttttcatcatatgtaatatcagtggaacaggcagcgctactcaagtcctaaggattcctcagtgatcagtgatccagggccgttcatgaaccactgggctggatttgactgttgagtgtggcagttaatgcccctcaagaaatcaaaggatgtcttataagtgtcttccaaaaaaaagcaaatgctgaaatcctattggcaaagtaaactgaaattggctgctatattttatataatcatttctgcaaatcccattttttgaatactaatatttgacatggttaattcttattaatttgttggaattgtttattgttaataatgcaaatagataatttttaattatccacaagtaacatttcactgttaatggtttgaaataggtgataagcaaaccaatttgaaataaaatataaacatgtgccattgtattataacactatacactttcttgacagttaaatttaaaaaaaaattttttttggtagcatgtattgtatatgtttatagtatatgtagtaaataaaaatatggccaaatgtttggcttggtgatcttttgcaaaaaagtaaaaaa

SEQ ID NO: 20675 - DNA, 2731 bp, Homo sapiens
  misc_feature (3)..(4): n is a, c, g, or t
  misc_feature (6)..(6): n is a, c, g, or t
  misc_feature (9)..(9): n is a, c, g, or t
atnncnggngggggaggcccgcggctgccgccgccatttcgggcgctgctgtgaagctgaaaccggagccggtccgctgggcggcgggcgccgggggccggaggggcgcgcgcggcggcggcaccccagcgtttaggcgcggaggcagccatggcgggcaacttcgactcggaggagcggagtagctggtactgggggcggttgagtcggcaggaggcggtggcgctgctgcagggccagcggcacggggtgttcctggtgcgggactcgagcaccagccccggggactatgtgctcagcgtctcagagaactcgcgcgtctcccactacatcatcaacagcagcggcccgcgcccgccggtgccaccgtcgcccgcccagcctccgcccggggtgagcccctccagactccgaataggagatcaagagtttgattcattgcctgctttactggaattctacaaaatacactatttggacactacaacgttgatagaaccagtttccagatccaggcagggtagtggagtgattctcaggcaggaggaggcggagtatgtgcgagccctctttgactttaatgggaatgatgaggaagatcttccctttaagaaaggagacatcttgagaatccgggacaagcctgaagagcagtggtggaatgcggaggacagcgaaggcaagagagggatgattccagtcccttacgtcgagaagtatagacctgcctccgcctcagtatcggctctgattggaggtaaccaggagggttcccacccacagccactgggtgggccggagcctgggccctatgcccaacccagcgtcaacactccgctccctaacctccagaatgggcccatatatgccagggttatccagaagcgagtccccaatgcctacgacaagacagccttggctttggaggtcggtgagctggtaaaggttacgaagattaatgtgagtggtcagtgggaaggggagtgtaatggcaaacgaggtcacttcccattcacacatgtccgtctgctggatcaacagaatcccgatgaggacttcagctgagtatagttcaacagttttgctgacagatgggaacaatcttttttttttttttccaactgccatctatacaattttcttacagatgtcaaaagcagtctagtttatataagcattctgttacctgtgatattttttagactgaactgctccattcctagtcttaattaccatattcagggtacgaactggagggcttgtgtgttagcttctgaattggcaattggaggcggtagtggtcgtgcctgtgtgtatcagaagggataggtatcttgcctcctttctctcaggcagtgcaaatcaccctgtggaaaaccgatggacaggaaggagtgttacacactgcttaccctgatttattcagtggttttgttttcattctggaaccatactatcaaatggcgacagactgttccgttccacccccgtgaagtaatcatgcaccgtgtgaatagtatcaagcaggattgctttcattgtatggagcatgaccagcgtgtgactcattctgacatttcagatcctaagaattctaagaacactactagaagcatttgttccctcctagtcaatgcttcatactttttcttgggattcttttagcccttgacattcttgtcccccaaacctgtaagtaggtgaattcctaagataagtgtgtattttcattccaggtgaaaagcaggatgtaccgagcactttattcagtgcatagctttaagccagtgttggattcactaagtggacagccagtctcccagctctctgccttccccaaaagggtcgtagtaggtcacccttctacagcagctaactagagtcctaactaatgggatccagcagggccatttctccagagggccagtatcctattaggagactcttggaattcttaggttctactcaagagtggaaggaccaatcacctctgatattctgtggaaggttttggggtcaaattctgccctctgcattctgtgcaacttgtataaaagtcaagttagtattacatgaatttggggtagggttagtgctttgaaaaaatgttgaaccggctgggcgcggtggctcacgtctgtaatcccagcactttgggaggccgaggcgggtggatcatgaggtcaggagttcgagaccagcctggccaacatagtgaaaccccatctctgctaaagatataaaaaattagcccggcgtggtggtgcacgcctgtaatcccagctactcgggaggctgaggcaggagaattgcttcaacctgggaggtggaggctgcagtgagccgagatcgcaccactgcgttccagcctgagcgacagggcaagactcagtctcaaacacacacacaaccgggacccaccacgcggacaccccaccccggctcgcgcaccccacgcgggacactcactaccggacctaacccaactccccctgcgacgacaacacctgccgcgccagaacacctccctgtgacacacgcgacccacacagggctacagaagcaaaggtacacagcgtacgttcaagacccatcaacatgcgaccagtcaaatagaggacgacgcccacaaataaagccagaacctactgcgcgtgcgtgatacacacactgacaccaccggcgccgaccatacgacaccgcccggcggcaaccggaacccattgagctc

SEQ ID NO: 20676 - DNA, 2401 bp, Homo sapiens
  misc_feature (3)..(4): n is a, c, g, or t
  misc_feature (6)..(6): n is a, c, g, or t
  misc_feature (9)..(9): n is a, c, g, or t
atnncnggngggggaggcccgcggctgccgccgccatttcgggcgctgctgtgaagctgaaaccggagccggtccgctgggcggcgggcgccgggggccggaggggcgcgcgcggcggcggcaccccagcgtttaggcgcggaggcagccatggcgggcaacttcgactcggaggagcggagtagctggtactgggggcggttgagtcggcaggaggcggtggcgctgctgcagggccagcggcacggggtgttcctggtgcgggactcgagcaccagccccggggactatgtgctcagcgtctcagagaactcgcgcgtctcccactacatcatcaacagcagcggcccgcgcccgccggtgccaccgtcgcccgcccagcctccgcccggggtgagcccctccagactccgaataggagatcaagagtttgattcattgcctgctttactggaattctacaaaatacactatttggacactacaacgttgatagaaccagtttccagatccaggcagggtagtggagtgattctcaggcaggaggaggcggagtatgtgcgagccctctttgactttaatgggaatgatgaggaagatcttccctttaagaaaggagacatcttgagaatccgggacaagcctgaagagcagtggtggaatgcggaggacagcgaaggcaagagagggatgattccagtcccttacgtcgagaagtatagacctgcctccgcctcagtatcggctctgattggaggtaaccaggagggttcccacccacagccactgggtgggccggagcctgggccctatgcccaacccagcgtcaacactccgctccctaacctccagaatgggcccatatatgccagggttatccagaagcgagtccccaatgcctacgacaagacagccttggctttggaggtcggtgagctggtaaaggttacgaagattaatgtgagtggtcagtgggaaggggagtgtaatggcaaacgaggtcacttcccattcacacatgtccgtctgctggatcaacagaatcccgatgaggacttcagctgagtatagttcaacagttttgctgacagatgggaacaatcttttttttttttttccaactgccatctatacaattttcttacagatgtcaaaagcagtctagtttatataagcattctgttacctgtgatattttttagactgaactgctccattcctagtcttaattaccatattcagggtacgaactggagggcttgtgtgttagcttctgaattggcaattggaggcggtagtggtcgtgcctgtgtgtatcagaagggataggtatcttgcctcctttctctcaggcagtgcaaatcaccctgtggaaaaccgatggacaggaaggagtgttacacactgcttaccctgatttattcagtggttttgttttcattctggaaccatactatcaaatggcgacagactgttccgttccacccccgtgaagtaatcatgcaccgtgtgaatagtatcaagcaggattgctttcattgtatggagcatgaccagcgtgtgactcattctgacatttcagatcctaagaattctaagaacactactagaagcatttgttccctcctagtcaatgcttcatactttttcttgggattcttttagcccttgacattcttgtcccccaaacctgtaagtaggtgaattcctaagataagtgtgtattttcattccaggtgaaaagcaggatgtaccgagcactttattcagtgcatagctttaagccagtgttggattcactaagtggacagccagtctcccagctctctgccttccccaaaagggtcgtagtaggtcacccttctacagcagctaactagagtcctaactaatgggatccagcagggccatttctccagagggccagtatcctattaggagactcttggaattcttaggttctactcaagagtggaaggaccaatcacctctgatattctgtggaaggttttggggtcaaattctgccctctgcattctgtgcaacttgtataaaagtcaagttagtattacatgaatttggggtagggttagtgctttgaaaaaatgttgaaccggctgggcgcggtggctcacgtctgtaatcccagcactttgggaggccgaggcgggtggatcatgaggtcaggagttcgagaccagcctggccaacatagtgaaaccccatctctgctaaagatataaaaaattagcccggccgggtgtggtggctcatgcctgtaatcccagcaccttgggaggcagaggcaggcaagaatcacttgaggtccagggagttccagacccagcctggtcaacactggcaaaactccattctctacctaagagaaacacaccaacag

SEQ ID NO: 20677 - DNA, 1174 bp, Homo sapiens
  misc_feature (3)..(4): n is a, c, g, or t
  misc_feature (6)..(6): n is a, c, g, or t
  misc_feature (9)..(9): n is a, c, g, or t
atnncnggngggggaggcccgcggctgccgccgccatttcgggcgctgctgtgaagctgaaaccggagccggtccgctgggcggcgggcgccgggggccggaggggcgcgcgcggcggcggcaccccagcgtttaggcgcggaggcagccatggcgggcaacttcgactcggaggagcggagtagctggtactgggggcggttgagtcggcaggaggcggtggcgctgctgcagggccagcggcacggggtgttcctggtgcgggactcgagcaccagccccggggactatgtgctcagcgtctcagagaactcgcgcgtctcccactacatcatcaacagcagcggcccgcgcccgccggtgccaccgtcgcccgcccagcctccgcccggggtgagcccctccagactccgaataggagatcaagagtttgattcattgcctgctttactggaattctacaaaatacactatttggacactacaacgttgatagaaccagtttccagatccaggcagggtagtggagtgattctcaggcaggaggaggcggagtatgtgcgagccctctttgactttaatgggaatgatgaggaagatcttccctttaagaaaggagacatcttgagaatccgggacaagcctgaagagcagtggtggaatgcggaggacagcgaaggcaagagagggatgattccagtcccttacgtcgagaagtatagacctgcctccgcctcagtatcggctctgattggaggtaaccaggagggttcccacccacagccactgggtgggccggagcctgggccctatgcccaacccagcgtcaacactccgctccctaacctccagaatgggcccatatatgccagggttatccagaagcgagtccccaatgcctacgacaagacagccttggctttggaggtacataacgtgcacaatgtagaaagaagagatctgctgcagggtctcctctcggtcctcttagagctttgtagcaatgctgactacagcattgggatgttgtagatggcaagccgctaagcactgatgttggcattgaatgttgggttttctcttcttcatagaaaacctgtttgggaatgagtaagcttaaaactgtataactgaatgttctattgatctactaaacacacttggactactttaa

SEQ ID NO: 20678 - DNA, 187 bp, Homo sapiens
gacgtacttaactaatattggtgccagtccagaatgtggtgcaatgagttcttcctgcacttggcctcatctttctgtattaccagttccatatctgcactgtccaggacagtggccactagccacatgtggccattgaacacttgaaatgtggttagtgagaatgggaaactaaacttttatatta

SEQ ID NO: 20679 - DNA, 243 bp, Homo sapiens
tgtgcagggaggcaagtgtgtggacatcctgggagcagagtccacggcactacagagctggggctgggaatggcctggactcaggacccagacagaaggccctttgctttcccagctcaggggaacagtgctgcctggaaccaggggtcagggctgacggcaaatatgagaggaaggctgaagtctcaggcagggtggccagaggcagcttctctgacacccaagcaagactcacaggctcct

SEQ ID NO: 20680 - DNA, 363 bp, Homo sapiens
tccaccagccttcagtagcagtgactcctgcactgacaccaccagtatgagtgggtaagttagtgatgggacagaaacacttctcaagatcttcaggcttggccaaggattatcagcccatgtgaatatggaatgaaagaaggcaaagagcggtatagtttgttctcttccttttctgcaagaagtctggaagtgtgttggctggttgtgtccctctgcaaacaaaggcagcgaggatccagctccttcccactgttctgtgcttctacccttagcatgtggtctttcttatcagtcagccctcattgtctcctggtagcaggtccagggatcacaagtaaatggtgacatctatagaaaaac

SEQ ID NO: 20681 - DNA, 258 bp, Homo sapiens
ccaaagtgctgggattataagcatgagccaccacacctggcctttatttgtgtttttattattgacttgtcagagttccgtatgtattcggtgtacaagtctttttttttcccagatgtatgatttgtaaatattttttcccatcattgggttttattttcacctccttaataccatctttttttccataaaagtttttgtttttagtatgtttttggttgctgctgctttttgtgtcacatgtaagaaaccattgtt

SEQ ID NO: 20682 - DNA, 616 bp, Homo sapiens
tacacgccatttctggttgggtcttttatccccagcctcagttgaacaggcttcagttcacatcgttttagccaaaactcatctatgcacggtcttttcagaacagattagggtagaattttgtggttttttttgtgacgaaaataaccttagtaattttgtttttgttttggtaactcaggacaactcacaccccctggttgtcttgattttttatttaaatgctgagtttaagtgcttgtgcagttggtttcttgaactgaacagcacactttatgtttattctattgcatgtcattgtctttttattctaagcaagaggtcagcaaattatgcccacaggccaaatctggctcaccctctgtttttgtaaataaagttttattggaacacagccacgtcccttactttgtgcattatttatgtctgcttttgcactacaagggcagagttgagtagttgcaacagagattggcccacaaaaccgaaaatatttactatctgaccctttacagaaaaagtttcctaatgtggttctaagttatcacttaagcctcttttggtcgtcaactttacccaatattttatccatgtacattaaacttatttactaacc

SEQ ID NO: 20683 - DNA, 420 bp, Homo sapiens
tgagccaccacgcccggcccggcattaaatattaattggtcttttaatgtatctcagctttgaatttaggatttgattaaccaaatttaactgtagtattttgtcttactatgactgcagaagtagacaactcttgccacatgtacattgtctgattttctctttatttgtatctggctatcatatctctcttggctactttggctctttttttttttttttcttttctatgccatacacacacagtagtagtggctgtttcttaacaggttgatttgaatttccaggtgcccctttagacatgaaatatgttctcagtactatactctaatttctgcttacttctttgtcacttttatctgctgcaacttaagaaatttgttttattttatttatttatttttttgagacggagtctcg

SEQ ID NO: 20684 - DNA, 819 bp, Homo sapiens
gatttgcatatcctagggctaatacttgccgttcattatcatgcatgtactatcattttttcaacatctggttagctcccttatgttacctttctgaatcctataggcaattatttacatttctgagccctagaattgggcagcacagactaaatatgcatctttccctacagaaaagactgttcaaataattgaagtccactgtgtctttggtcctctttttgtaaggtaataagtttcagttccttctagtgccatcactgctctgcacatccctttaattgtctaggcctcttttaaaacatagtactcagaattgaacacagtggtggagagttggaatcacagactcccattattcttttcaactctaaagttaccgttttttcttttttttctttttcttttcagagtccgataaaccttaaatgttgagtagatcgggtggatattttctgttttgtctgcacagtgtccttttcctcggggcatagcactctcctcttctctgggacctgctcctctccaggtcccactctgggaattgctaactgcttgttagcaattctctctccttagccacagagattcatcccagcatagacacctatcacaaacctaaacaatcagattttcttttctgtgatttttctaaccagagcttataattttggtttctaagatggtgaggatagaaatctgaagctggccgggcacggtggctcacatctgtaatcccagcgctttgggtggccaaggtgggtggattgcttgaggtcaggcattcaagacaagcctgaccaacatgatgaaacccag

SEQ ID NO: 20685 - DNA, 490 bp, Homo sapiens
aacaatatactgtataatttgtttgctttcctgatcctttctaagaaattatttacatggattttctctctccaaagaagatggtgacaactcacaaagatacctgcttttccccagaactatagctttgctgtaatgtactaacattgaggatttctggaagagagagagccatggcatgacagccttatcagagggtagcctcaagctaagatcttaaaaaataagtactgatttaaattatatttagaaggcaattcacacatccaccttagattttttaaaaattcattcattcattgaaaaacatttcctgattgattagtttgattgtcctcatacactaatgatgcccaggaatctctccacattctgcttgtaatccacaggaatcattatttcaggatgagggaaaggcaattctgaataattgacctgaactttcttaggggccctcaatcttaacgatgggctcaggcactatatttta

SEQ ID NO: 20686 - DNA, 235 bp, Homo sapiens
ctgttttgttattaaatttttgatcatgtgattgaaattaatttatcattcttgtttgacaccctctataccatcccttgtctttttatatgttcatcatattttattgaattctgttttgagtgaaaatttataaaaatattttaaaattattgatggtgcattttccttcagagaagatttagtttcaatgctattttaattaattttgaaatatgccagttggaactatact

SEQ ID NO: 20687 - DNA, 380 bp, Homo sapiens
acaaaaccaggaaaaaggactgcttcccctccagctcttgattgggctccataagaactgccaaaaggccaggcagcatttgctactcttctggggttcacttctgaaaggtgcgaccctgcaacctagagcacagggaagttaggacagcaaaggagctgggctgagccgacgctggcttagaactctttctgatactccctgttcccgccagctcgttagcccagcctgccaatcagttttgcatcaataaactttatgttctgaggttggccagatgaatgagaggagagcagctaaagactgatctctgaccttggcacgtaaacagcctccagattggacttgacagttaataaaggaaaggccctgcaattctc

SEQ ID NO: 20688 - DNA, 328 bp, Homo sapiens
ggatgtgtaccaccatgcctggctaatttttaaaaaattttttgtagagacgagactccctgtgttgcccaggctggtctcaaactcctgggcttaagagatcctcctgcctcagcctctcaaagtgctggaattacaggcatgagtgtctgtatccagcctgtttttttcttatgcatgtaaacatatacataaatacatgtatgtatatttataaaattttattacactttatcttcttttatgctgaacagagtatccttagcatttcctgcatgccttttgctgattttgaatttgtgatgtagaccagcctggccagtatggt

SEQ ID NO: 20689 - DNA, 180 bp, Homo sapiens
atatcatttttaaggccacagagcagtaagaggggatgatagaattccaaagaggcagatttcatttgccattccaaaatcagcattgtcacaggacaaggacaccaccctctgttctcctcttcctgtcttcattccattccacacttttttcattaaactataatatttccatcacta

SEQ ID NO: 20690 - DNA, 471 bp, Homo sapiens
gcttttttctttcataaggaaagtactatgggaacaggttcaaaatgaatataagggagttatttatatattaggtaaagcacaaaaatgataattactgactgcacactcacagttaaagtcatttgggcagaaaatgttgacccgttggaacagaccataaacctgctgtaaagagccaagggaagtaaccaaagcgtattcagatagctgtgaagctggggagacacctgaaaaatctagcaatagcgtgaaaatcacttaagtaaaaaataaactttcagaggctgaagctatttgaatttaccaagatttagagatgaatgccaaagaggattagtaaaattcttccatgcaaaatacaacagtaatggctccatcacgacattgtaaacccaagcccgagagtcactatgtaagtgagagttgagtgcaatttgtaataagaataaaaacatttccttaaaaagc

SEQ ID NO: 20691 - DNA, 285 bp, Homo sapiens
ggtttgagcttgcccttcacttaaaagaggataggcagggttctggcagagaactttcccaacatcagtcctttttgacagtcccccttcactctcccatccaaaaacaggacttcagtggaaaatataactgaggttctggaagatgctctccatgagctacatatacacagaacagtagcaaattaacctggaaataacccccaaaagaccttagggaaagacatttattcttcagggtttatataaagcactgcttgggatgaaggaaaatgctgatattcc

SEQ ID NO: 20692 - DNA, 457 bp, Homo sapiens
gataaacttgtagagggatttggggagaggaagctttattgggatctctaggggctattttatattttccaatgtctgaactgtttttacaacagattttccacagaaagctcaacaagtcactaaactttctgagtctcagaatctgggacttaaaatcaggggaagagatgtgaatggctaaactttctagttgtgtgaatagtttgcaacatataaagaattggtcaaaatgtttattcttagggtcggtagttattctgacttcacagaagggaatatctggccaactttcctcacagaatatcaattgtggaatcaagtatagggaatatcatgcatttaaggttcacatatagccttaagttgatgtccatattgatttaactatcaaaaaggcaattagattagtggggtagccaagtcacccacaaagactgatgagctgatatagaaa

SEQ ID NO: 20693 - DNA, 466 bp, Homo sapiens
tataaaaactcttaaaactcagccgggcatggtggctcatgcctataatcccagctctttgggaggccgaggcaggcggatcacctgaggtcaggagtttgagaccagcctggccaacacggtgaaactctatctctctaaaaatacaaaaattaggcgggcgtagtggctcactcaagactgaggcagaagaaccacttgaacccaggagttggaggtttcagtgagcccagatggctccacggcactccatcctgtgcaacagagtggcacaggatggcaaaaacaaacaaaagctcttaaaactcaacaataaaagacaacccactttagaaatgagaaaagggccaagtgtggtggtaatcccagcactttgggaagttgaggtgtgtagattgcttgagcccaggagtttgagagcagcctgggcaacatggcaaaaccacatctctacaaaatacagaaa

SEQ ID NO: 20694 - DNA, 406 bp, Homo sapiens
aatggtgtgtcgacaggactagctatcctgcatattaattattattgaaaccattataggcagagcttttgcacaaatggtcgattcggttatctgttttgtggcttctatagttaacaattgcccagttgctccagggcaggtaggagacatgctggatcaatgaaccattgttgttaagtgcacttactattaccatgaaaattagaatggaggtgcttgaaaggcaggaatgaaaatgcccctgccttaccattatgcaaattacaaattctataaatgagataagtggggagagaaacacttttcataaatcttaactaggtaaaagagtttattaagtccattgtcaaaaacaaatgtttgttttcaatttgtcgacgcggccgcgaatttagtagtagta

SEQ ID NO: 20695 - DNA, 657 bp, Homo sapiens
gactgcagtccattgacgtacaacaagtctggttggggagggcagctttcccccatgaggtgtgccaggtaaaacctttgtaattacctatgaccaagcctgacaaatcacatgtaaggtttggccaggagctagattcctcagtctttactgagtcacaagtgcatgaatatgttcacaaaccatttcttaccatgttcgtcattgaaagttgagggcttgtgtatcagacaatgcaagaaacaagcagatggggaaactcattcataaacaatagcaagcatttatttattgcatataggtctgtgtgttggctgaaacagctcttactgctgcaggttttctggtccagctctgtttcaggctgcaagtcaagtccacttctgctccatgtgtctgattcttgaacacaatgcaacaagtgtaaacatgaagagcttcttttgcctatgtttggaactggcacactgtcacctccacccgtgatttctttggctaaagcaagtcttcttattaaatacagccaacaacaattcgtactgtcagtgttagtttctatggaggattggggtagtatttttaggcctttacccagagtctactaggccttgcattattcctttcagaaattattagcaacaggcatgacagccaaat

SEQ ID NO: 20696 - DNA, 242 bp, Homo sapiens
tcatgattctaagtatggagttaatattttctgtgactgtcactattactatgggtacataacaaattatcccaaaatgtggtggcttaaaacaatggcaatgttttttgttttgtttttgttttttttgctagcaaatctgcaatttgggcctggtagttatagttcatctctgttccaagaagtgtcagctcaaaggcctctgaagtcttacttggaggaaggcggcagatgttaataat

SEQ ID NO: 20697 - DNA, 355 bp, Homo sapiens
cctcccaaagtgctaggattacaggcgtgagtcaccatgcccggcccccatgctcttgccaacactaggtattatcaaatcttttaatctttgccaatttgataagtgaaaaaaatagcattttaatttgcatttcttaattacaaaagaggttaagtatttttttgatactttttactttttttcttggccattttctctgaaaaggataggcctattctttggctgcatttgtactgttttgcttttagtgatttgtaatcacattacttaaggaaactgggcttttgtcatgttttatacatatgctaatacagtttataattttttttctgtcaataaacactttaatgag

SEQ ID NO: 20698 - DNA, 461 bp, Homo sapiens
aaacaccagcacaatatatatagatatagagcatcgccatcccccgcccccctcccccgccaggttcccttacgtcctcttgtactgaactcctcgtcttaaccctcagaccctggcaaccatcaatctgttttgtgttcctagagttttgccttttccagaatgtcatataaatggaatcacacggtacgtagcatgtgcatttggcttccttcagagaaagacactcggactgcgattctctaaaggtgcaatgtacagtttcatgacctgggtagtagttacctggcttgatcaccttacaactgtttgtcagatggcgggcttctgagttctctccgtgtgtgtgtgtgtgcgtgtgtgtgtgtgtgtatcatgtttcaaacatataattttacatttaactgcctctaacttttatatgttggtgagggttattaaatgacaattattaatactta

SEQ ID NO: 20699 - DNA, 948 bp, Homo sapiens
aggaagagttattttacaaaacaagcttcattttgccaatttataaattgctttggagtttcatcgaaaggtctttaaaaaacacgttggccttggtgctggtgcatcacataaatcacagatgaaacaaacaagcctgtttcctactcaaggtgtgtctgtagagtcctgactgcgtgccaggggctctgtctggcacatttctgaactttgcaaaattaattgtgccgaagagaacaccatcaaacgcgtccggcatacagcgtaaacatcttcagaccgtgattctgcgccatcaaacgctctccagctaatttcatttggtgattactctgctagaaaaccgaggccaagtgaaactgcggaaatgggaacaatgtacggaggaaaaatctcaccccattaagagatccgtttcttctccgcacaaataagcccaccccgcctccgaggcaagactagatggctccaggatactctcggcgcgcccgctggccatctcgggcaggggagccccacacccggcaggaggaccaggacgcgagcggcggcgcctcggccctgggctgtttaggtaattcgcaaagtcccaacaatcatccccctctcccagaagctggttttcttgtgtgcagtggttacagaggcggcgaaaacacggttccccgctttcctctcctcaaggcactgtttgcagcggcagcagcggccgcattcggggaggcgcggtcctccccgcagagccgtcgcgcactcggcctttctcgaggatttgcctgggctcggccgcctcgctctcccctgcgcttccatgaccttctgagagcggcctcaccaccggaggctcggaggaagcaccaccctcggcgtccggggcccgtcgcgcggccgcgttcctccgactccttggagcacccgcgcgcgcgggcgcgcggccggggatcggcg

SEQ ID NO: 20700 - DNA, 382 bp, Homo sapiens
gataatcttttgttgagctctttcaaatgtaacatttcaaacttgctctcagaaactgttaggtatgcactgctgagaccttgaatttggagggtaataccagaacataagcttgccagcagaggaagacaatggtgtctcattattcatggaaacatactgttgctgtgctttggttcaagttttgatgaacagaaaatgtgctctgaacttattttcctttttgtgaaatcctgacacagcatttctgatttcaaaggaagctgtataaaaagaccaacagaaaccccacaaaatgagaccaccttaaaatcaagtttactgactaaatgggattaagctagagttgtgttcgaaaaacaataaacgagaaaaaaacaag

SEQ ID NO: 20701 - DNA, 767 bp, Homo sapiens
atagattatctgacagggtggtccggaatggtggaagtaaatcgacaggtgaggacactgaattagcattcagacagtggggacctcacaccttgtattcccttttttggtaagatttttattacctccttagaaagaggtaaattcatctatttcgagcccaaatttttctgtctagaagattggtagtcttatttttactaaagtacaagattatttagtaaaaggtagcattctctggctttttttttttttttttttaatgtttcagatctgtcacactaaaaagggctttagaccaggtgttgtggctcacacctgtaatcccagcactttgacaggtcaaggtgggaggattgctggaggccaggagtttgagaccagcctgagcaacatagtgagatctcagtctctactaaaaataaaaaaaattagccatgcctggtggcatgtgcctgtagtcccagctacttagtaggctgaggtgggaggattgcctgagcccagaagatagaaacagcagtgagccatgatcatgccactgcactctagcctgggtgacagagcaaaccttgtctcaaaaaataaagggtggggaagctttagcctaggcttttaattctcaattaccattataaatttattttaattattaactaattactttaattctcaattactatttttccatgaaaaggcttgatgttctaaacagtattataccaccaagttatctctactggaaaacccagatttcaagaaaaaaa

SEQ ID NO: 20702 - DNA, 487 bp, Homo sapiens
cagtcatcttgatttggaaaaatgaaaacaaagagctttacagagaattaaaggagaatttttatgaagaaattaaacctgctaaagaccttctaaatgccacccttgaggcattcaaaaagatttcaatttgtgaacttcaagattttttttgtcaggataggatgcgtatcaaagtgactgacaaaaaagaagttatgtgggcagggtgcggtggctcacacctgtaatcccagcactttgggaggctgaggcaggtggatcatctgaggtcaggagtttgagaccagcttggccaacatgatgaaaccccatctctattaaaaatacaaaaaattagccaggcgtggtggcgggcgcctataatcccagctacttgggaggctgaggcaggagaatcgcttgaatccaggatgcagaggttgcagtgagctgagattgcgccattgcactctagcctgggcaacaagagcgaaactccgttgca

SEQ ID NO: 20703 - DNA, 364 bp, Homo sapiens
ggtgtctctgtctggcacacagtaggtggtcaagaaggatttttaaaaatacatgaataaaaatcaggttatgagttctctaagttctttaaatttggccatgtaacccttacatcatagataaatttacacagttgatggcaacgaaatacatagagagcttcacattgaaacacaaaacggagccaggcatggtggctcactttgggaggctgaggtggacagatcacgaggtcaggagttcgagaccagcctggccaacatggagaaaccccatctctactaaaaatacaaaattagctgggcatagtagcgggtgcctgtaaccccagctactcaggaggctgaggcaggagaatcgttt

SEQ ID NO: 20704 - DNA, 1298 bp, Homo sapiens
ccaggttccaagaggagacacctggagacgcaggcaggaaccatgcagacctctgtgacctagccacggaagtcatatagtatcaccactgccatacctcttggtcaaagcagccctgagctcacccatgaagagggatatagacctccacttctagacgggagaagtacccaggaattttaggggccacctccagatagttgccaaacccctcccacccacacttcactgtcactttggagatggagtgaacgtgccaccttcctgcttgctgtctccataaaggctgtgcacaccctgcttgagaaagcttgggcgatgcgttttattttcaagtagaatgtggcaaagaccacttactttctctccagccacctccagatgcgcttgcaagctgtgcctgcccattcttccagactctcctgtccagtgtgactcactttgccaacaacggaggcccagagtgcttctgtctccctcccagctgcgcagggaaacagaacccagaccagcttctggatcagccctgtgcctgggatttctcactgaaacaaggtctcctggtgtcatttcctcccaatgctgtcctgggtgacactttccatttgagctgcttttttatataggccctagcaactaggggccgtgtcggaataacttcagacgagtcctttcactgttctttaaaaaaaaaaaaaaccactagaaaaccactagcccgtgaagcagagtgtttcatttcttgttactatacattgtctcccccacccacccgagtgatcagggagcgcagatgtgactcagctcacttcccaggagtctcttaaaaggttctgggcagaggctggtgaaactgccccagtcctcactgcctggatgagttcatggacaaacatgcatggcgtgtctgtccatctgcattagcgctgagcagaaaagatacggacgcacagcagctcatggtagcagtccacgcacgtcgtcctgcttgatgacaccgctaagaattaatccatttgggaggagagcaaccaaatccacccagggcggagtccaggacagcaggcaagggaagggaagtagagctgagctaccaggcttgggcaggtagcagcagcctggcagagcacactgtggtggggtggaagcctgcaccagttgtgcaggggctctgcccttgtgccctgcgtaggaagcagtgcagccagggaacagacacctatactttctagaactcttgacttggagctgttcaccccagtgcggaacgcagagaacccaccggaccaagagaccac

SEQ ID NO: 20705 - DNA, 512 bp, Homo sapiens
aaacacataaacatatgaacaagaaatgatgacggcaaaatgctccacagcaacctgaagctgggggtgtgacaggataatgagtggctctgttagatcagaagagtgagaaaagaactctcagagaggtggcatttgacctgtgagctgagtgacttggaggaggcattgtgcaaagatcagtgaaagagcattccaggcagagtgaacagttagtgcaaaggcccacaggcaggagcaatctgaagattgcaaagaactaggaaaaaaaaaaagaatttttaaaaattgccatgaggctggcacagagtggaccatccaggagtgagtggtacaaaattaggtccagggagttgcctatgactttatgatccaggagggagtttggattttattctaaatgtgataggaaaccacaggaggtttcagcaaaggaatgaatgggtctagtttatatttttactacatgcatcatcctggaagaatgtcacaaatataatacatggtgaaaa

SEQ ID NO: 20706 - DNA, 1132 bp, Homo sapiens
tggctttttaatttgtactgtcactggagtcagccctcatttgccatgttatgattatgttcttcttgtgggacttgtatgtatttattagagaccattgagacgtagcactgggcattacttttgtggcaaaggcaccagggcagtaatcattattaatggatttcattatttgggagagcattttactgactatagagaattcattgcattgatctattgtgccacagttttattataccgggtagtttaaaatgatattctctaaactgttaggctgaaaaattgtccagtgttggcagttatcccatcagtaagaccttccttttactaccgaaaatacatagttctgtcgaaagagaccttttgactggtccccagtgccctgactgtgtttaaatccctcactagtgaaatagggaggattactactgccatcattgttctaaaacaaacttccttttggaagataacagcagcggtaaatcagatgttgaagaaagtaccagcttaacttcactttgctttaaaagggtttcctctttaattgacaagtgtcatgtataatagggcatggcaactcacatagtaaaccttgtgtggggctgcctgctggggttggagttcttaatgaacatacaagtgaatacactgaggcaaaaaaattaaagctctccaactgtggggtattcattctgttcactgtggccagtgtggtgatcagtactggccacaccagtggccaaagagaactgcattcatcatgtggctgttctatagctgtgagctatggtgactgttatttttcctagtgatagttttcagtgacagcatagattctggtatcatatccaaggaataaacaaacactgtttttggctttttgtttttttgtttttgacataaaaataataagctatttttggcatatgcagacttttcacaaagtgattgttttcttgagctctggactacttggtaacattcataagttccttcactttgtagctccctctttccttccctccactccctgcaaaagagagcagaactgatttttcagaggtgatgtttacaacagttcaacacactcgaatgagcacttagaataatgtcaatagaggaagaaaaa

SEQ ID NO: 20707 - DNA, 400 bp, Homo sapiens
ttttcatcaacttcatgctgagtcctgtctcattttattatttacacaattgaaatataaaaaattgttcccaaatgatgccccccataccctaagtttagggggcagtagtgtaaagcagtgtccagacattggtcttagggctggagtggaaacagactcctagaggtgcacaagcacatggataattttacctgaatcaatttccaaatcctaaactttaaatgtctcttttttgaagcatttcttcctttgaaccagtgttcaagcggttcttccctttttattttttgatgtggagtttggctcttgtcacccaggttggaagcttgcagtgagccgagatcttgccactgccactgcactccagcctggacgacagagcgagactctgtctcca

SEQ ID NO: 20708 - DNA, 393 bp, Homo sapiens
ttttcatcaacttcatgctgagtcctgtctcattttattatttacacaattgaaatataaaaaattgttcccaaatgatgccccccataccctaagtttagggggcagtagtgtaaagcagtgtccagacattggtcttagggctggagtggaaacagactcctagaggtgcacaagcacatggataattttacctgaatcaatttccaaatcctaaactttaaatgtctcttttttgaagcatttcttcctttgaaccagtgttcaagcggttcttccctttttattttttgatgtggagtttggctcttgtcacccaggttggagttgcagtgagccaaaatcatgccactgcactccatcctgggtgacagagtgaaaactctgtcttag

SEQ ID NO: 20709 - DNA, 341 bp, Homo sapiens
ctacataagctcatgaaaataatgtcgttagtcattagaaatataaatcaaaggctgggcacggtggctcacgcctgtaatcctagcactttgggaggccgaggagggcagatcatgaggtcaggagatcgagaccatcctggctaacacagcgaaaccccgtctccactaaaaatacaaaaaattagccgggcgtggtggcaggttcctgtagtcccagctactcaagaggctgaagcaggagaatggcgtgaacccaggaggcagagcttgcagtgagccgagatcttgccactgccactgcactccagcctggacgacagagcgagactctgtctcca

SEQ ID NO: 20710 - DNA, 253 bp, Homo sapiens
gaaacagacaacttctcatcagtacttaccattaagaactgcttaaggagagacactggggaatatcaaatcacagtttccaatgcagccggtagcaaaacagtagccgtacatcttactgttcttgatgttcctgggccaccaacaggtcctattaatattctggatgttactcctgaacacatgactatctcatggcagccacctaaggatgatggaggaagccctgtgataaattatattgttgagaaac

SEQ ID NO: 20711 - DNA, 187 bp, Homo sapiens
ataatttgacaaacagactgcaaacaagcatgaaaagggaatagagcagtttttgcctttgattttaaggatcagtcctggtagaaggagctgatgcccaaaatattccatgcaatttcctaatacttgattcaaatcctttgacgaagaaatgtatcaaggtttgtataattgctgaaagaaattt

SEQ ID NO: 20712 - DNA, 2738 bp, Homo sapiens
  misc_feature (2084)..(2084): n is a, c, g, or t
  misc_feature (2182)..(2183): n is a, c, g, or t
caccaaaccacctgccggtgacatcgtctccttctgagatctgaggacatgaacacccaaccacctgccggtgacatcgtccccttctgagatctgaggacattgatacccagccacctgccggtgacatcgtctccttctgagatctgaggatatggacaccaaaccacctgccggtgacatcgtctccttctgagatctgaggacatgaacacccaaccacctgccggtgacatcgtccccttctgagatctgaggacatggatacccaaccacctgccggtgacatcgtctccttctgagatctgaggacatggacacccaacctgctgctggtgacatcgttcccttctgagatctgaggacatggacaccaaaccacctgccagtgacatcgtctccttctgagatctgaggacatggacaccaaacctgctgccggtgacatcgtccccttctgagatctgaggacatggacacccaaccacctgccggtgacatcgtctccttctgaggtctgaggacagacactcacatggacacctaaacacctgccgatgatattgtctccttctgaaatctgaggacatggacacccaaccagctgctggtgacatcatctccttctgagatctgaggacagacactcacatagacgcccaatcagctgctggtgacattgtctccttctgaaatctgagggttggaacacattggcctggctcagtgtttctccatgtggttttgagaccacctgagttggaaccgatatgggttcccagcctcacgcctggagagctggattttgcgagtgtgaggttaggtccagcatctgcatgtgtaacgagctcccaggtgtttcgtagatgcattagggcttgagaagctcctttctagcaccatcttcctttttgcgcatgagggagttcaggtccagagaaataaagcagcaaggttagtggcacagctggcgccccctgctttctaggaatttagaatattattgaagagagaggtattagaacctgtgaagtcaatacagagacctccaggcgagtggcatcctcactgaaaccactgacaagtatgctgaatagaaagtgtcatttctcctggaagaccctcagtgacccagctggagggtctctcctactcatcagctgtccctcactctgccatttcagcagctctgctcaccctgagcatgcagagagagcagcttttaaatgagttctaatccagaccagcttggctagcattgtctgtgtagaggtgtgctagtaagtctaacaactggctctctgagagagagtagccctacctaactggtagcatttgccacttcccatggtgtaaatactcccagcatggccaacttcaagcttactaagaggatttcgctgatcatggttttggggagagatgtgcagattgactcctgccagctagtaggagccggctccagcacaccacggcatctgtgtccaggaaccaggctgagatgtgggaaggccagagaaggaggaggctggcagatgcctgagggctgggaaggattgcatccaggaggacggccgtggtgggcatccctgcattggggggcagccgggcccaagatccagggggacagaaagcacaaatggtgctggggttcagtgccacactcaccctggggcagaggagggtgacactggccctgccacctgacctcagcctcaggggctccagatcctagccagaggccttgagtgcttcctgccacaaaggcagggggtggcctgggatttcctctctgatcggagctgatgtttccctccaggaaaccatccctgctcaccttgctaggcctggggcaagttggagtgaagggcaggtccctcagccttgcctttgagaccttaccttccacttcattcccgtctgtggctctcattccttccccacccctgccctatgctctggtgagaaggtgcaaccctgtgagcccccatagcaaggttcactccagccgtgctttctgcttgcttttggtttgtgaaaaccctccactttcttagaggccttctgcaaatgtcatttcttcntaaggatcttcctaccccgcccgagccagggagatccctcccttctctgagcctagagcaccatgtcccttccctgtagccctggtgacgtgcacccnnatggtggcccttccagtgacatggaggatgttttccctctacagacactgtctggttttaggatcccggagccaggcatctcgctcacccctgtagccaccacagcattcagccctgcagcctgggaccttgctaaggtcttgctttacccctaaaaaccaaaaatagtgtgtcacctttagcagtgattgccaacgcctctggagtgctggctgggacaggcatctctattttcatcctcaccaatcctgccagggagctactctggggagccccatcctgctgatgaatgaccgagtctcgcagcgatgacggaacctgcaggtcccaggcttgggcccaggtctgtctttctccaggggcctcacatccatctccttcccagctctccttttctgtaagacttcacagaacaggttcaaaatccatttgctggccgagcacagtggttcacgcctgtaatccagcactgtgggaggcctcgaggcaggtggatcacctgaggtcaggagttcgagaccagcctggccaacatggcgaaaccccatctctact

SEQ ID NO: 20713 - DNA, 3675 bp, Homo sapiens
agcattcctctggaggccaagtgttgtaaattggcctgtggctatcatctggcagactcccttgggaaagagccagccagccccatgcttcttttcagcagcaagggttagggaggttggttgaacttgaagagcagattggacatggagcagattttgaccagttgaaataagacataaatttatgactccgagtgaggcagaaataaagaacttagcagggggaataggaggaggatgattatggcaaattttgctataaactttagttttagaaaagattgatattgaaaagccttcaggatttgcctgtggttgctactcaagttaaaaagactgggagcctgcattgtttggtcctggagctcaaggttttcagtgaaggcttgtcctggcacctctgggcattccttttcattactggttgagcatccttccttctgctctgtcaattggcaaaatatgctggagcacattctggactagcagttgccttggggtagtcaggctgggtatttgtttggtatctcttggtgtagcagaccccagaatctcatggcaattaggatttggtggctaaacgaaagagttagtgcaaggaaaagcctagttggaatttctgagtctgggccatccttaagctgctgtctactgcctgaatgggaagtaatgtcgaattggaaaattagctcaccatttttgttctagctttgcagacatttattcctctgatgataggctgagaaatgcctaggccggcttagaaggcacacagcatgacagaagtactccttcaaagcagctgtgtcaagaaggaagagctggaaaagtggatttgctggggaattagatgcatttagttttccacttacgcacaactgccttctccagtatatcataccaaggttttttaggcctttgtggcttaccctgcaggaacatactgtgtcctgttgttctggactgtagcatcttcaccaccatcctcttggcaatggttttttgtttggggttttttttttttttttttggacaaagtataataatattgagggacctttctagggagcctttggtcctttgtccccattttccaaagggagggaactttcctcttaaaagagacagtgggaacttttagccaggtttttggaaaaggcctgtgggctattaatgagagtgagctgcaaaaggaggaagggtttgtttgggtactttgaagtacttagctaggtgttttctacagtatcttatataattgcatcttacagcatctttacatgcgaaatagtttatcagttatcttcaattgcatattacaaaattctgattaaatttttcttaaataagaaaactatcatttcatatgacaagaaatcctaatttaatgttactccaaggttggttaattcagtggctcagtgataacaccaaagactcagtttcttgaaatttttttgctctgccatcctccatgtttatcctcacgccagttcgcctcatggtcccaatatggctactgtaattctgggaaggaaatgctgacagaaccgtgtctggcaaaagagagacagatttttctgtgtccttctaaagcaaggaagtcttcccctggaagctccagcagatacggcctcatggctttgctagaaatgggtcatctcactcctgtcattggcaaagcaagtaagatcatccatcaggagtggcttagattaatgaattatcctttgagtcgtgtagactagaaagttcagtcatgtctactagcaagaaaggagataagggctgttggataagcagcatctggtctcaaaggtacttcaacttttacagatgagaaacatgaatcagagtgactttcccaggctcacagcaagtaagagagggccttcagtgttagctgtgtctgtccctaaagcccatgttttatattgtatcttgctagagtataaagtaacttactttctaccttgtagaaactgatggtctaggagaagagatttgaactcaggtgcccagttgactctaatcttggcccatgtgagaggattgtactcagttgctctcctcatccagtgatgtttcttgtctaacacaagaagcctaggagtagaaagtcctaagcagagtagaataatagcggcagcagggagggaagtgtgaactgtgtgtccctgagcctgacttactgggcagggacatgacacttaaagcggcagctggccactctgtctttcctgcatgcactgagtatttggtagctcattagtgaccagtgatattgatcatcttttcatgtgctcacttactatccccatatctttgttgtttgcatcttttacccattgtatttgttgtttttgagacagtgtctcactctgtcacccaggctggagtgcagtctcatgatcgcggctcactgcagtttctgcctcctgggctcaagcaatcctcccacctcagcctcctgagtagctgggcttacaggcgcacaccaccatgcccagctaattaaaaaaaaaattttttttgtagcagttcggtctcattagtattgcccaggctggcctctcttagcttcaagctatcctcccgcctcggcctcccaaagtggctggaattacaggcataagccacaagccactgggcccagcctcttttacctgtttcaaaattgagttttattgagttgtaagagttctttattcattttaaacacaagtcctttgttggatatatcttttacatctatttttcccagtctgtggcttgccttttcattttgaagagcaaaagtttaaaattttgtgaatttattaaagctccgtttgttgcttttttctgttctagtttatacttttgtatcatattttaggaaattttgcactgggtatttgatggctcctgaggaggttcaactttcagagcgcactgatttctctgcacctgagattttgtactatttctgtatttctttcttctcagaacaaccagtgtcaccaggtatgagggcagagttttagcttgtttgctgagccccattcttgaagctcatttatttattcacctatctgtccatcaatccaacaaatatactgaatgctgctatgtgccaggtactggcactgttctaggtactggggcaatgacagttaagataatacccaatgaccctgctctgtacccttaagagcagactcagttgggaatgagttatccaaatatagggtgtacatgtagtcaggagagagcctcatacagctttgcctttggcagaatccttcaaacctctttgtcttcctacttcttgatattacaaatcatgagcctttcacatgcattgactctaaagaggtgggttcctggatagcagaagtagataggaaggcatcattgacatttactgagatggattgaatcagagggtgtaaattctgctccatcaatgttgaaaaagactagcccaccccaaaggtttatcactgtcaccatgtctaatgtctattctggaagaagctgaagaagtctgcctttgtttagggaaccggttccagaatcagaggggttgaggatataaaagacccttgcacaagagttggtatttaccctgtcagatgctgctaccaagatttggattgtgtacagtcgaggattaaaaatgacttttaagat

SEQ ID NO: 20714 - DNA, 3949 bp, Homo sapiens
agcattcctctggaggccaagtgttgtaaattggcctgtggctatcatctggcagactcccttgggaaagagccagccagccccatgcttcttttcagcagcaagggttagggaggttggttgaacttgaagagcagattggacatggagcagattttgaccagttgaaataagacataaatttatgactccgagtgaggcagaaataaagaacttagcagggggaataggaggaggatgattatggcaaattttgctataaactttagttttagaaaagattgatattgaaaagccttcaggatttgcctgtggttgctactcaagttaaaaagactgggagcctgcattgtttggtcctggagctcaaggttttcagtgaaggcttgtcctggcacctctgggcattccttttcattactggttgagcatccttccttctgctctgtcaattggcaaaatatgctggagcacattctggactagcagttgccttggggtagtcaggctgggtatttgtttggtatctcttggtgtagcagaccccagaatctcatggcaattaggatttggtggctaaacgaaagagttagtgcaaggaaaagcctagttggaatttctgagtctgggccatccttaagctgctgtctactgcctgaatgggaagtaatgtcgaattggaaaattagctcaccatttttgttctagctttgcagacatttattcctctgatgataggctgagaaatgcctaggccggcttagaaggcacacagcatgacagaagtactccttcaaagcagctgtgtcaagaaggaagagctggaaaagtggatttgctggggaattagatgcatttagttttccacttacgcacaactgccttctccagtatatcataccaaggttttttaggcctttgtggcttaccctgcaggaacatactgtgtcctgttgttctggactgtagcatcttcaccaccatcctcttggcaatggttttttgtttggggttttttttttttttttttggacaaagtataataatattgagggacctttctagggagcctttggtcctttgtccccattttccaaagggagggaactttcctcttaaaagagacagtgggaacttttagccaggtttttggaaaaggcctgtgggctattaatgagagtgagctgcaaaaggaggaagggtttgtttgggtactttgaagtacttagctaggtgttttctacagtatcttatataattgcatcttacagcatctttacatgcgaaatagtttatcagttatcttcaattgcatattacaaaattctgattaaatttttcttaaataagaaaactatcatttcatatgacaagaaatcctaatttaatgttactccaaggttggttaattcagtggctcagtgataacaccaaagactcagtttcttgaaatttttttgctctgccatcctccatgtttatcctcacgccagttcgcctcatggtcccaatatggctactgtaattctgggaaggaaatgctgacagaaccgtgtctggcaaaagagagacagatttttctgtgtccttctaaagcaaggaagtcttcccctggaagctccagcagatacggcctcatggctttgctagaaatgggtcatctcactcctgtcattggcaaagcaagtaagatcatccatcaggagtggcttagattaatgaattatcctttgagtcgtgtagactagaaagttcagtcatgtctactagcaagaaaggagataagggctgttggataagcagcatctggtctcaaaggtacttcaacttttacagatgagaaacatgaatcagagtgactttcccaggctcacagcaagtaagagagggccttcagtgttagctgtgtctgtccctaaagcccatgttttatattgtatcttgctagagtataaagtaacttactttctaccttgtagaaactgatggtctaggagaagagatttgaactcaggtgcccagttgactctaatcttggcccatgtgagaggattgtactcagttgctctcctcatccagtgatgtttcttgtctaacacaagaagcctaggagtagaaagtcctaagcagagtagaataatagcggcagcagggagggaagtgtgaactgtgtgtccctgagcctgacttactgggcagggacatgacacttaaagcggcagctggccactctgtctttcctgcatgcactgagtatttggtagctcattagtgaccagtgatattgatcatcttttcatgtgctcacttactatccccatatctttgttgtttgcatcttttacccattgtatttgttgtttttgagacagtgtctcactctgtcacccaggctggagtgcagtctcatgatcgcggctcactgcagtttctgcctcctgggctcaagcaatcctcccacctcagcctcctgagtagctgggcttacaggcgcacaccaccatgcccagctaattaaaaaaaaaattttttttgtagcagttcggtctcattagtattgcccaggctggcctctcttagcttcaagctatcctcccgcctcggcctcccaaagtggctggaattacaggcataagccacaagccactgggcccagcctcttttacctgtttcaaaattgagttttattgagttgtaagagttctttattcattttaaacacaagtcctttgttggatatatcttttacatctatttttcccagtctgtggcttgccttttcattttgaagagcaaaagtttaaaattttgtgaatttattaaagctccgtttgttgcttttttctgttctagtttatacttttgtatcatattttaggaaattttgcactgggtatttgatggctcctgaggaggttcaactttcagagcgcactgatttctctgcacctgagattttgtactatttctgtatttctttcttctcagaacaaccagtgtcaccaggtatgagggcagagttttagcttgtttgctgagccccattcttgaagctcatttatttattcacctatctgtccatcaatccaacaaatatactgaatgctgctatgtgccaggtactggcactgttctaggtactggggcaatgacagttaagataatacccaatgaccctgctctgtacccttaagagcagactcagttgggaatgagttatccaaatatagggtgtacatgtagtcaggagagagcctcatacagctttgcctttggcagaatccttcaaacctctttgtcttcctacttcttgatattacaaatcatgagcctttcacatgcattgactctaaagaggtgggttcctggatagcagaagtagataggaaggcatcattgacatttactgagatggattgaatcagagggtgtaaattctgctccatcaatgttgaaaaagactagcccaccccaaaggtttatcactgtcaccatgtctaatgtctattctggaagaagctgaagaagtctgcctttgtttagggaaccggttccagaatcagaggggttgaggatataaaagacccttgcacaagagttggtatttaccctgtcagatgctgctaccaagatttggattgtgtacagtcgaggattaaaaatgacttttaagatgcagtgtttcatctggtgacatttaatttgatattttaaaattggggagggtattttcagccatgggggtagggatgtgaaagaagaagaaagtaagaattggagtcagatgtggttttgagtcccatacatttattgtttaatattatatggtaagtactttaaaatggtaaatagtaaatacttgtgttattcactaacatttggggaggattttctctgtgctttatgtatattacctaaccttacaaactgtgtaaggtacatgctgttc

SEQ ID NO: 20715 - DNA, 318 bp, Homo sapiens
tttttttccctgccacatgtgactcacctcccctccctcaaacctaacctgcccctcaggggccttctgcccgctttggggtacccatagcgggaccgagacgctccctgggttcgaaccagggtccggggccatgtgcaggggctgatgggaaggcactttcgtccgtgggagacccacgaacgcttctcggcggcgcggttgttttttttttttttttcctgacacaggtgcttcacctcccctccctcaaatcttaccttcacctcaggggccatctgcccactttggggtacccctagcgggcccgagaagctc

SEQ ID NO: 20716 - DNA, 397 bp, Homo sapiens
tactaaaaatacaaaaggcaataagaggttctatgtggactttgaaggtcgtctctatcaatttgaggttggaaagaacagttttgttgacatcctttagctgtgttacaagtacaattttgttttttactcaggcaaaagaaaatgtgtgtgtgtgttaaatacagtcagccctctttatctgtgggtcctgcatccttgctttctaccaacctcagatcaaaaatattccagaaaaaaaaggatggttgcatctgtactgaatatgtacaagctttttttcttgtcattctttatgcaataaagtataacaaccatttacgttgcatttccattgtattaggtattgtgggtaatctagagatgatttgaaggatattggagggtgtgtccaggc

SEQ ID NO: 20717 - DNA, 5828 bp, Homo sapiens
ctgcaggccgcccgcgtctgccctcgcggcgcgctcccgggcccggccgcggttccccactcgggccggctggctcgcgggttctctcgccccgcccccctcggcgccaccgctgggcgcttgcgcggggcgcgtggccgtggccagggtctccgccgcagcccgagcagccgccgccgcctcagtcagtcagtcagtccccagcaatggcggacggaggtgagcgagaggagctgctctcgccgtcaccggtctctccggctaagcggcagtgttcgtggcccagcccgcaggctcatcaccctcgcggttcgcctggggcagccggcggaggggcagggggcgtcggcagcagctgcctggtcctcggggcccgcccccacctgcagccggattccttactggactgcgccgccaagacggtggcggaaaagtgggcatacgaacgggtggaggagcgcttcgagcggatcccggagcccgtgcagcgccgcatcgtctactggtccttcccgcggaatgagcgggagatctgcatgtactccagcttccagtaccggggcggccccggcgccggcgctgctggcggcgccgcgggggcttcgccggccgaggaggggccgcagccaccccccggggccgccgctccggccggctccgcccccgggggcgtcgcggctggggcatcccccgggctgggcgcaggggccggcgcggccggctgcggtggcgaggggctcccgttccgccggggcatccgtctgctggacagcggctccgtggagaacgtgctgcaagtcggctttcatctgagtggcacagtaactgagctggccactgcctctgaaccagcagtgacttataaagttgcaatcagttttgatcgatgcaaaatcacctcagtgacatgtggctgtgggaacaaggacatattctactgtgcccatgtggtagcactctcactctacaggatccgtaaaccagaccaagtcaaattgcgtcttcctatctccgaaacccttttccagatgaatagggaccagctacaaaagtttattcaatatttaatcacggcacaccacactgaagttcttcctactgcacagaaactggcagatgagattctatcctccaactcagaaatcaaccaagtgaatggtgcccctgaccccacagctggggccagcattgacgatgagaactgttggcatttggatgaagaacaggtgaaagaacaagtgaagctttttctctcccagggcggttactgtggctctggaaagcaactcaactcaatgtttgccaaggttcgagaaatgctgcggatgagagattccaatggagcaaggatgctgacactaataactgagcagtttgtggctgacccacgactcacactctggaggcagcaaggaacaaacatgacagacaagtgcaggcagctctgggatgagctaggggctttatgggtgtgcataattttaaatccacactgcaaactggaggagaaatcctgctggctgcagcagctgcagaagtggagcgacctggatgtctgtcccctggaggatggaaactatggacatgagctgcccaacatcaccaatgcacttccccagagtgccattcacagcccagactccttatccagaccaagacgaacagtattcactagagccattgaggggcgtgaattacattggcaggatagccacctacagcgaataatcagcagtgatgtttatacagctcctgcctgccagcgggaaagtgaaagactactctttaattcccaaggccagccactgtggcttgagcatgtgcctacagcctgtgctcgagttgacgccctgcgttcccatggttatccaaaagaggccctcagactcacagtggccattattaatactctgaggttgcagcagcagcggcaactggaaatctacaagcatcagaagaaagaactgttgcagagaggaaccacaaccatcacaaacctggagggctgggtgggccaccccctggatcccatcgactgcctgtttctcactttgactgaggcctgccgcctgaatgatgatggctatctggagatgtcagatatgaatgaaagcagaccccctgtgtaccagcatgtacctgtggctgcaggctccccaaacagcagtgagtcctacctgtcattggccctggaagttgcactgatgggcctgggtcaacagaggttaatgcctgaaggcctctacgcacaggacaaggtatgccgtaatgaggagcagctcctgagccaactccaagagctgcagctggacgatgagctagtgcaaacactgcaaaaacaatgcatcttactgctggaaggaggtcctttcagcggtctgggagaagtcatccaccgagagagtgttcccatgcatacctttgccaagtatttgttctcagctctgctgcctcatgatccagacctgtcctataaattagccttacgtgccatgaggttacctgttttagaaaactcagcttctgcaggcgacacatcccaccctcaccatatggtgtctgtggtgcccagccgttatcctcgctggttcacgcttggacacttggaatcacagcagtgtgaactggcctccaccatgctgactgctgccaaaggagacactttgagactccgaacaattctggaagcaatacagaagcacattcattcttcctccctcatcttcaaactggcccaagatgcattcaagattgctactcccaccgacagtagtactgacagcaccctgctcaacgttgccctggaacttgggttacaggtgatgcggatgaccttatcaacccttaactggagacgcagggagatggtacgatggttggtgacctgtgctacagaagtgggtgtgcgggccctggtgagcatcttgcagagctggtacacactcttcacccctactgaggctactagtattgtagctgccacagccgtatcccacaccactatcctgcgcctcagtcttgactatccacagcgggaggaactggctagctgtgctcgcacactggctctacagtgtgctatgaaggatccacagagctgtgccctgtcagcccttacactctgtgagaaagaccacattgcctttgaggcagcctaccagattgccattgatgctgctgctggtggtatgacccattcacagctgttcaccatcgcccgctacatggagctccgtggctacccgctacgtgccttcaagctggcctcattggccatgagccatcttaacctggcctacaaccaggatactcacccagccatcaatgatgtgctctgggcttgtgctctcagccactctctgggcaagaatgagctggcagctctcatccccctggtggtgaagagtgtgcactgtgccacagtgctttcagacatcttacgacgctgcacagtgactgcacctggcctggccggcatcccaggccgccgaagctctggaaagctcatgtccactgacaaagctccattgcgccagttgctggatgccaccatcaatgcctatatcaacactacacactcacgcctaacacacatcagccctcgccactatggagagttcattgagtttctaagcaaggctcgggagaccttcctgctgccccaggatggccacctgcagtttgcccagttcatcgacaacctcaaacagatctacaaaggcaagaaaaagttgatgctgctggtgcgagagcgctttggctgagagagcagatagctcactgccagagcagcctgggttcccaggtagtatcaggtcaggccaagggcactgaaacatttgtccaccctgagagaactctgagcacctgtggatgaggccaaaggaccacagggctaaggatggggaaagtccagctctagtcgataatgcctaccttggcaagcttctgactacagcctactgttcatggaggagctgggccctgcagatcgaccagaaaccccacaacatgccacctcatgcccctatatcctgcgtgtcctgagcattggccctgtctcccttggcaaacacagaacactgttccatctcagggattgcttaaccagagaaacagacacatttgtgggactgtaaatactatatgtgttgctaattattgtaaacttgtaactatttataattctgcttctgatttgatgggcacttgaagtagctgtgggtaggaggatatgcttattttctgaggagactcacaaccatttctcaggtttcccttgcagagtgtttgctggtagcagtggaagagtgggggtgccaaggagaaaaatggccagttaggatcaacccaagtctagtctatgcagaatcccccacctacagacagggcatttatagtccagtggtgagtgagggacagaggccaggactggacttagacttttgcctcacaaaactgtgaggacattgaagctcctgcctcacacagcctcttcaggagcctgctgaacacctgagaaacaagtgcagggagaagatgaaggtctgggaagccgctgagttcataatattcatctactgtggtcacctttgtgttagcaagtgtgtggtttcatctataattgtgtgtgtgtatctttatggctaagtacatgtgtgtatgtacatagatacatctgtgcatgcctgtttgtgcacatatatatttatgtgtatgtgtcagttctatggctgtgtacctgtttgaatatgtgcacactggactgtgagtttctacgtgaggatatacacattttgtgtacatgtgaggatgcacatctttgtgcaaatgcactcatgtttgtgcatgtttagtatgtgtatctgcgtacacgagtgcatgtgtataaacatgtttgtatccatgtgtatgcttgttatccatgcatctgtgtctttatatgtgtaactgagcgtatttctacatgtagggatgtctgtgtattcatgtttgaggatctgcatcaatgtgtcctttttgccagatttctctttcccattcctcttaaatctctctcgccagctaaacgtttgttccccatctctgtgcctcctctattcattctctcaccaaacaagcttctaagcaccaatctccctctgccatcagattggctgctttagctccatagttctcttctcgcctcatacttgctttcttcccctgcctttctacctcaagcttcctcgccggcttttgtcacagtctcattgctcgctgacttggaggctagggctggtctgcacttagcctctcccttcctaatttctagccctagtgggcagtcctgtcttagccctggctgacctccatagtgtatcatgttcctgctaccttcctgacccctgtgctcagcctggaattgttataggaggtagcaagggcactcagaaaagtcagttggaaccagtgtcttggtgtttactgtttcatgtcttagttcctgagttgggggtggggtttgatagggaaggggtggtatagctagaatgtgaactaagaacttctccatctgctttactttttctttcttcgacaaactgtcaccttttttactccaaactgaccaagaagttgtatttgccatttgtggctactcaagtcttactgtccagccaagggcccctacgtctcagcccaatgggttggttaaaaaaaagagagaagccactctcatttctgtatcacagttgcccttttttagcaagtgtgtgaattcacagtgcttttctatgaataaatcatggatcacataaaagatcatttttctaaaagcagaaattgtg

SEQ ID NO: 20718 - DNA, 6491 bp, Homo sapiens
cagttaattcagaaactttattttgccaaggttgaagatgcgtgcccgtgacacagcctcagggagtcctggcgacatgtgcccaaggtggtcagggcacagtttgttttcatacattttaaggagacatgagacatcaatcgatatatgtaagaagtacgttggttccgtccagaaaggcggggacaactcgaagtggggagggggcttccaggtcgcaggtagctgagagacaaatggttgcattattttgtttctgacaagcctctccaaaggaggcaatcaggtatgtgtctatctcagcgagcagaggatgctgctgaaccctggggtcgctggggccttaaatgactttgatgatgagagactgggcatggagagctagaggccctcatctcccttccccagcgagtcggaagcgtccccattactagttcctagaatatgctgagatgtctcaggttgcggtgtgcagctgggagttgcagcctggcaggaggcccaggttttagcctgtgaaccggggccctgctatgtaggccagggtggctctgacctggcactctgtggggccagggcagacatagcagcaaaggccatggggtcacaaagagagagactgcagaaggatcaggagtaacaggcataatggggctattcttccctaggcctgaacactgggaaggcactggcagggccccggttttgatggtggattcttggagtaggggccttggtaatagggctctgagtgctggggcagaatgggctatcttgacccttcatagtcagggtcccaagtgggcaatcctggagcctccaggtctttggtccagcggcggggttttccactcaagggccacaggtacagacaagcagagcagaaacagcccccccggcctttcacttcccacctgctcccgagggagagagtaaggtttctgggggtaagtgggggctatctgaaagaaaagggtgattttggctggggctcggtgccctacaagagcccttgcttgactttgacgcaaggcacagactgggctctgaaggggcaggctggggggtagacgtcgtcatggatgttggatctcccttccggccatggcccaagtacgacccctgttcccttaaagtcaggacctcgcagaactttcgcaagatgggtcctcggagtctgcccgcgattgcgctcccaaggggtgccgctgccgagggtaggcgcgccagtcgagatcaaagcggatgggatgacgccactggagggcgcgcggggccgcggggcagggtggtgctcctgctgcaggtttcaggcctcttctgccttctacagccgccaggtcagcagaggcggaggcccgggctgtggatggccgaggagccgaactcgtgaagccacgttcctcctgcagctcttaacccaggcgcggcggctcgccgggccgctccccttactccgaaaccgctttcatctgagtggcacagtaactgagctggccactgcctctgaaccagcagtgacttataaagttgcaatcagttttgatcgatgcaaaatcacctcagtgacatgtggctgtgggaacaaggacatattctactgtgcccatgtggtagcactctcactctacaggatccgtaaaccagaccaagtcaaattgcgtcttcctatctccgaaacccttttccagatgaatagggaccagctacaaaagtttattcaatatttaatcacggcacaccacactgaagttcttcctactgcacagaaactggcagatgagattctatcctccaactcagaaatcaaccaagtgaatggtgcccctgaccccacagctggggccagcattgacgatgagaactgttggcatttggatgaagaacaggtgaaagaacaagtgaagctttttctctcccagggcggttactgtggctctggaaagcaactcaactcaatgtttgccaaggttcgagaaatgctgcggatgagagattccaatggagcaaggatgctgacactaataactgagcagtttgtggctgacccacgactcacactctggaggcagcaaggaacaaacatgacagacaagtgcaggcagctctgggatgagctaggggctttatgggtgtgcataattttaaatccacactgcaaactggaggagaaatcctgctggctgcagcagctgcagaagtggagcgacctggatgtctgtcccctggaggatggaaactatggacatgagctgcccaacatcaccaatgcacttccccagagtgccattcacagcccagactccttatccagaccaagacgaacagtattcactagagccattgaggggcgtgaattacattggcaggatagccacctacagcgaataatcagcagtgatgtttatacagctcctgcctgccagcgggaaagtgaaagactactctttaattcccaaggccagccactgtggcttgagcatgtgcctacagcctgtgctcgagttgacgccctgcgttcccatggttatccaaaagaggccctcagactcacagtggccattattaatactctgaggttgcagcagcagcggcaactggaaatctacaagcatcagaagaaagaactgttgcagagaggaaccacaaccatcacaaacctggagggctgggtgggccaccccctggatcccatcgactgcctgtttctcactttgactgaggcctgccgcctgaatgatgatggctatctggagatgtcagatatgaatgaaagcagaccccctgtgtaccagcatgtacctgtggctgcaggctccccaaacagcagtgagtcctacctgtcattggccctggaagttgcactgatgggcctgggtcaacagaggttaatgcctgaaggcctctacgcacaggacaaggtatgccgtaatgaggagcagctcctgagccaactccaagagctgcagctggacgatgagctagtgcaaacactgcaaaaacaatgcatcttactgctggaaggaggtcctttcagcggtctgggagaagtcatccaccgagagagtgttcccatgcatacctttgccaagtatttgttctcagctctgctgcctcatgatccagacctgtcctataaattagccttacgtgccatgaggttacctgttttagaaaactcagcttctgcaggcgacacatcccaccctcaccatatggtgtctgtggtgcccagccgttatcctcgctggttcacgcttggacacttggaatcacagcagtgtgaactggcctccaccatgctgactgctgccaaaggagacactttgagactccgaacaattctggaagcaatacagaagcacattcattcttcctccctcatcttcaaactggcccaagatgcattcaagattgctactcccaccgacagtagtactgacagcaccctgctcaacgttgccctggaacttgggttacaggtgatgcggatgaccttatcaacccttaactggagacgcagggagatggtacgatggttggtgacctgtgctacagaagtgggtgtgcgggccctggtgagcatcttgcagagctggtacacactcttcacccctactgaggctactagtattgtagctgccacagccgtatcccacaccactatcctgcgcctcagtcttgactatccacagcgggaggaactggctagctgtgctcgcacactggctctacagtgtgctatgaaggatccacagagctgtgccctgtcagcccttacactctgtgagaaagaccacattgcctttgaggcagcctaccagattgccattgatgctgctgctggtggtatgacccattcacagctgttcaccatcgcccgctacatggagctccgtggctacccgctacgtgccttcaagctggcctcattggccatgagccatcttaacctggcctacaaccaggatactcacccagccatcaatgatgtgctctgggcttgtgctctcagccactctctgggcaagaatgagctggcagctctcatccccctggtggtgaagagtgtgcactgtgccacagtgctttcagacatcttacgacgctgcacagtgactgcacctggcctggccggcatcccaggccgccgaagctctggaaagctcatgtccactgacaaagctccattgcgccagttgctggatgccaccatcaatgcctatatcaacactacacactcacgcctaacacacatcagccctcgccactatggagagttcattgagtttctaagcaaggctcgggagaccttcctgctgccccaggatggccacctgcagtttgcccagttcatcgacaacctcaaacagatctacaaaggcaagaaaaagttgatgctgctggtgcgagagcgctttggctgagagagcagatagctcactgccagagcagcctgggttcccaggtagtatcaggtcaggccaagggcactgaaacatttgtccaccctgagagaactctgagcacctgtggatgaggccaaaggaccacagggctaaggatggggaaagtccagctctagtcgataatgcctaccttggcaagcttctgactacagcctactgttcatggaggagctgggccctgcagatcgaccagaaaccccacaacatgccacctcatgcccctatatcctgcgtgtcctgagcattggccctgtctcccttggcaaacacagaacactgttccatctcagggattgcttaaccagagaaacagacacatttgtgggactgtaaatactatatgtgttgctaattattgtaaacttgtaactatttataattctgcttctgatttgatgggcacttgaagtagctgtgggtaggaggatatgcttattttctgaggagactcacaaccatttctcaggtttcccttgcagagtgtttgctggtagcagtggaagagtgggggtgccaaggagaaaaatggccagttaggatcaacccaagtctagtctatgcagaatcccccacctacagacagggcatttatagtccagtggtgagtgagggacagaggccaggactggacttagacttttgcctcacaaaactgtgaggacattgaagctcctgcctcacacagcctcttcaggagcctgctgaacacctgagaaacaagtgcagggagaagatgaaggtctgggaagccgctgagttcataatattcatctactgtggtcacctttgtgttagcaagtgtgtggtttcatctataattgtgtgtgtgtatctttatggctaagtacatgtgtgtatgtacatagatacatctgtgcatgcctgtttgtgcacatatatatttatgtgtatgtgtcagttctatggctgtgtacctgtttgaatatgtgcacactggactgtgagtttctacgtgaggatatacacattttgtgtacatgtgaggatgcacatctttgtgcaaatgcactcatgtttgtgcatgtttagtatgtgtatctgcgtacacgagtgcatgtgtataaacatgtttgtatccatgtgtatgcttgttatccatgcatctgtgtctttatatgtgtaactgagcgtatttctacatgtagggatgtctgtgtattcatgtttgaggatctgcatcaatgtgtcctttttgccagatttctctttcccattcctcttaaatctctctcgccagctaaacgtttgttccccatctctgtgcctcctctattcattctctcaccaaacaagcttctaagcaccaatctccctctgccatcagattggctgctttagctccatagttctcttctcgcctcatacttgctttcttcccctgcctttctacctcaagcttcctcgccggcttttgtcacagtctcattgctcgctgacttggaggctagggctggtctgcacttagcctctcccttcctaatttctagccctagtgggcagtcctgtcttagccctggctgacctccatagtgtatcatgttcctgctaccttcctgacccctgtgctcagcctggaattgttataggaggtagcaagggcactcagaaaagtcagttggaaccagtgtcttggtgtttactgtttcatgtcttagttcctgagttgggggtggggtttgatagggaaggggtggtatagctagaatgtgaactaagaacttctccatctgctttactttttctttcttcgacaaactgtcaccttttttactccaaactgaccaagaagttgtatttgccatttgtggctactcaagtcttactgtccagccaagggcccctacgtctcagcccaatgggttggttaaaaaaaagagagaagccactctcatttctgtatcacagttgcccttttttagcaagtgtgtgaattcacagtgcttttctatgaataaatcatggatcacataaaagatcatttttctaaaagcagaaattgtg

SEQ ID NO: 20719 - DNA, 5254 bp, Homo sapiens
ctgaacaagaattaggatccttaaacaacaacttcagactggaacaaagcaacaacaacaaaaaaaccaacaatatgatcactgagcgctctaatgccgccaggtcagcagaggcggaggcccgggctgtggatggccgaggagccgaactcgtgaagccacgttcctcctgcagctcttaacccaggcgcggcggctcgccgggccgctccccttactccgaaaccgctttcatctgagtggcacagtaactgagctggccactgcctctgaaccagcagtgacttataaagttgcaatcagttttgatcgatgcaaaatcacctcagtgacatgtggctgtgggaacaaggacatattctactgtgcccatgtggtagcactctcactctacaggatccgtaaaccagaccaagtcaaattgcgtcttcctatctccgaaacccttttccagatgaatagggaccagctacaaaagtttattcaatatttaatcacggcacaccacactgaagttcttcctactgcacagaaactggcagatgagattctatcctccaactcagaaatcaaccaagtgaatggtgcccctgaccccacagctggggccagcattgacgatgagaactgttggcatttggatgaagaacaggtgaaagaacaagtgaagctttttctctcccagggcggttactgtggctctggaaagcaactcaactcaatgtttgccaaggttcgagaaatgctgcggatgagagattccaatggagcaaggatgctgacactaataactgagcagtttgtggctgacccacgactcacactctggaggcagcaaggaacaaacatgacagacaagtgcaggcagctctgggatgagctaggggctttatgggtgtgcataattttaaatccacactgcaaactggaggagaaatcctgctggctgcagcagctgcagaagtggagcgacctggatgtctgtcccctggaggatggaaactatggacatgagctgcccaacatcaccaatgcacttccccagagtgccattcacagcccagactccttatccagaccaagacgaacagtattcactagagccattgaggggcgtgaattacattggcaggatagccacctacagcgaataatcagcagtgatgtttatacagctcctgcctgccagcgggaaagtgaaagactactctttaattcccaaggccagccactgtggcttgagcatgtgcctacagcctgtgctcgagttgacgccctgcgttcccatggttatccaaaagaggccctcagactcacagtggccattattaatactctgaggttgcagcagcagcggcaactggaaatctacaagcatcagaagaaagaactgttgcagagaggaaccacaaccatcacaaacctggagggctgggtgggccaccccctggatcccatcgactgcctgtttctcactttgactgaggcctgccgcctgaatgatgatggctatctggagatgtcagatatgaatgaaagcagaccccctgtgtaccagcatgtacctgtggctgcaggctccccaaacagcagtgagtcctacctgtcattggccctggaagttgcactgatgggcctgggtcaacagaggttaatgcctgaaggcctctacgcacaggacaaggtatgccgtaatgaggagcagctcctgagccaactccaagagctgcagctggacgatgagctagtgcaaacactgcaaaaacaatgcatcttactgctggaaggaggtcctttcagcggtctgggagaagtcatccaccgagagagtgttcccatgcatacctttgccaagtatttgttctcagctctgctgcctcatgatccagacctgtcctataaattagccttacgtgccatgaggttacctgttttagaaaactcagcttctgcaggcgacacatcccaccctcaccatatggtgtctgtggtgcccagccgttatcctcgctggttcacgcttggacacttggaatcacagcagtgtgaactggcctccaccatgctgactgctgccaaaggagacactttgagactccgaacaattctggaagcaatacagaagcacattcattcttcctccctcatcttcaaactggcccaagatgcattcaagattgctactcccaccgacagtagtactgacagcaccctgctcaacgttgccctggaacttgggttacaggtgatgcggatgaccttatcaacccttaactggagacgcagggagatggtacgatggttggtgacctgtgctacagaagtgggtgtgcgggccctggtgagcatcttgcagagctggtacacactcttcacccctactgaggctactagtattgtagctgccacagccgtatcccacaccactatcctgcgcctcagtcttgactatccacagcgggaggaactggctagctgtgctcgcacactggctctacagtgtgctatgaaggatccacagagctgtgccctgtcagcccttacactctgtgagaaagaccacattgcctttgaggcagcctaccagattgccattgatgctgctgctggtggtatgacccattcacagctgttcaccatcgcccgctacatggagctccgtggctacccgctacgtgccttcaagctggcctcattggccatgagccatcttaacctggcctacaaccaggatactcacccagccatcaatgatgtgctctgggcttgtgctctcagccactctctgggcaagaatgagctggcagctctcatccccctggtggtgaagagtgtgcactgtgccacagtgctttcagacatcttacgacgctgcacagtgactgcacctggcctggccggcatcccaggccgccgaagctctggaaagctcatgtccactgacaaagctccattgcgccagttgctggatgccaccatcaatgcctatatcaacactacacactcacgcctaacacacatcagccctcgccactatggagagttcattgagtttctaagcaaggctcgggagaccttcctgctgccccaggatggccacctgcagtttgcccagttcatcgacaacctcaaacagatctacaaaggcaagaaaaagttgatgctgctggtgcgagagcgctttggctgagagagcagatagctcactgccagagcagcctgggttcccaggtagtatcaggtcaggccaagggcactgaaacatttgtccaccctgagagaactctgagcacctgtggatgaggccaaaggaccacagggctaaggatggggaaagtccagctctagtcgataatgcctaccttggcaagcttctgactacagcctactgttcatggaggagctgggccctgcagatcgaccagaaaccccacaacatgccacctcatgcccctatatcctgcgtgtcctgagcattggccctgtctcccttggcaaacacagaacactgttccatctcagggattgcttaaccagagaaacagacacatttgtgggactgtaaatactatatgtgttgctaattattgtaaacttgtaactatttataattctgcttctgatttgatgggcacttgaagtagctgtgggtaggaggatatgcttattttctgaggagactcacaaccatttctcaggtttcccttgcagagtgtttgctggtagcagtggaagagtgggggtgccaaggagaaaaatggccagttaggatcaacccaagtctagtctatgcagaatcccccacctacagacagggcatttatagtccagtggtgagtgagggacagaggccaggactggacttagacttttgcctcacaaaactgtgaggacattgaagctcctgcctcacacagcctcttcaggagcctgctgaacacctgagaaacaagtgcagggagaagatgaaggtctgggaagccgctgagttcataatattcatctactgtggtcacctttgtgttagcaagtgtgtggtttcatctataattgtgtgtgtgtatctttatggctaagtacatgtgtgtatgtacatagatacatctgtgcatgcctgtttgtgcacatatatatttatgtgtatgtgtcagttctatggctgtgtacctgtttgaatatgtgcacactggactgtgagtttctacgtgaggatatacacattttgtgtacatgtgaggatgcacatctttgtgcaaatgcactcatgtttgtgcatgtttagtatgtgtatctgcgtacacgagtgcatgtgtataaacatgtttgtatccatgtgtatgcttgttatccatgcatctgtgtctttatatgtgtaactgagcgtatttctacatgtagggatgtctgtgtattcatgtttgaggatctgcatcaatgtgtcctttttgccagatttctctttcccattcctcttaaatctctctcgccagctaaacgtttgttccccatctctgtgcctcctctattcattctctcaccaaacaagcttctaagcaccaatctccctctgccatcagattggctgctttagctccatagttctcttctcgcctcatacttgctttcttcccctgcctttctacctcaagcttcctcgccggcttttgtcacagtctcattgctcgctgacttggaggctagggctggtctgcacttagcctctcccttcctaatttctagccctagtgggcagtcctgtcttagccctggctgacctccatagtgtatcatgttcctgctaccttcctgacccctgtgctcagcctggaattgttataggaggtagcaagggcactcagaaaagtcagttggaaccagtgtcttggtgtttactgtttcatgtcttagttcctgagttgggggtggggtttgatagggaaggggtggtatagctagaatgtgaactaagaacttctccatctgctttactttttctttcttcgacaaactgtcaccttttttactccaaactgaccaagaagttgtatttgccatttgtggctactcaagtcttactgtccagccaagggcccctacgtctcagcccaatgggttggttaaaaaaaagagagaagccactctcatttctgtatcacagttgcccttttttagcaagtgtgtgaattcacagtgcttttctatgaataaatcatggatcacataaaagatcatttttctaaaagcagaaattgtg

SEQ ID NO: 20720 - DNA, 4462 bp, Homo sapiens
  misc_feature (4427)..(4428): n is a, c, g, or t
cagttaattcagaaactttattttgccaaggttgaagatgcgtgcccgtgacacagcctcagggagtcctggcgacatgtgcccaaggtggtcagggcacagtttgttttcatacattttaaggagacatgagacatcaatcgatatatgtaagaagtacgttggttccgtccagaaaggcggggacaactcgaagtggggagggggcttccaggtcgcaggtagctgagagacaaatggttgcattattttgtttctgacaagcctctccaaaggaggcaatcaggtatgtgtctatctcagcgagcagaggatgctgctgaaccctggggtcgctggggccttaaatgactttgatgatgagagactgggcatggagagctagaggccctcatctcccttccccagcgagtcggaagcgtccccattactagttcctagaatatgctgagatgtctcaggttgcggtgtgcagctgggagttgcagcctggcaggaggcccaggttttagcctgtgaaccggggccctgctatgtaggccagggtggctctgacctggcactctgtggggccagggcagacatagcagcaaaggccatggggtcacaaagagagagactgcagaaggatcaggagtaacaggcataatggggctattcttccctaggcctgaacactgggaaggcactggcagggccccggttttgatggtggattcttggagtaggggccttggtaatagggctctgagtgctggggcagaatgggctatcttgacccttcatagtcagggtcccaagtgggcaatcctggagcctccaggtctttggtccagcggcggggttttccactcaagggccacaggtacagacaagcagagcagaaacagcccccccggcctttcacttcccacctgctcccgagggagagagtaaggtttctgggggtaagtgggggctatctgaaagaaaagggtgattttggctggggctcggtgccctacaagagcccttgcttgactttgacgcaaggcacagactgggctctgaaggggcaggctggggggtagacgtcgtcatggatgttggatctcccttccggccatggcccaagtacgacccctgttcccttaaagtcaggacctcgcagaactttcgcaagatgggtcctcggagtctgcccgcgattgcgctcccaaggggtgccgctgccgagggtaggcgcgccagtcgagatcaaagcggatgggatgacgccactggagggcgcgcggggccgcggggcagggtggtgctcctgctgcaggtttcaggcctcttctgccttctacagccgccaggtcagcagaggcggaggcccgggctgtggatggccgaggagccgaactcgtgaagccacgttcctcctgcagctcttaacccaggcgcggcggctcgccgggccgctccccttactccgaaaccgctttcatctgagtggcacagtaactgagctggccactgcctctgaaccagcagtgacttataaagttgcaatcagttttgatcgatgcaaaatcacctcagtgacatgtggctgtgggaacaaggacatattctactgtgcccatgtggtagcactctcactctacaggatccgtaaaccagaccaagtcaaattgcgtcttcctatctccgaaacccttttccagatgaatagggaccagctacaaaagtttattcaatatttaatcacggcacaccacactgaagttcttcctactgcacagaaactggcagatgagattctatcctccaactcagaaatcaaccaagtgaatggtgcccctgaccccacagctggggccagcattgacgatgagaactgttggcatttggatgaagaacaggtgaaagaacaagtgaagctttttctctcccagggcggttactgtggctctggaaagcaactcaactcaatgtttgccaaggttcgagaaatgctgcggatgagagattccaatggagcaaggatgctgacactaataactgagcagtttgtggctgacccacgactcacactctggaggcagcaaggaacaaacatgacagacaagtgcaggcagctctgggatgagctaggggctttatgggtgtgcataattttaaatccacactgcaaactggaggagaaatcctgctggctgcagcagctgcagaagtggagcgacctggatgtctgtcccctggaggatggaaactatggacatgagctgcccaacatcaccaatgcacttccccagagtgccattcacagcccagactccttatccagaccaagacgaacagtattcactagagccattgaggggcgtgaattacattggcaggatagccacctacagcgaataatcagcagtgatgtttatacagctcctgcctgccagcgggaaagtgaaagactactctttaattcccaaggccagccactgtggcttgagcatgtgcctacagcctgtgctcgagttgacgccctgcgttcccatggttatccaaaagaggccctcagactcacagtggccattattaatactctgaggttgcagcagcagcggcaactggaaatctacaagcatcagaagaaagaactgttgcagagaggaaccacaaccatcacaaacctggagggctgggtgggccaccccctggatcccatcgactgcctgtttctcactttgactgaggcctgccgcctgaatgatgatggctatctggagatgtcagatatgaatgaaagcagaccccctgtgtaccagcatgtacctgtggctgcaggctccccaaacagcagtgagtcctacctgtcattggccctggaagttgcactgatgggcctgggtcaacagaggttaatgcctgaaggcctctacgcacaggacaaggtatgccgtaatgaggagcagctcctgagccaactccaagagctgcagctggacgatgagctagtgcaaacactgcaaaaacaatgcatcttactgctggaaggaggtcctttcagcggtctgggagaagtcatccaccgagagagtgttcccatgcatacctttgccaagtatttgttctcagctctgctgcctcatgatccagacctgtcctataaattagccttacgtgccatgaggttacctgttttagaaaactcagcttctgcaggcgacacatcccaccctcaccatatggtgtctgtggtgcccagccgttatcctcgctggttcacgcttggacacttggaatcacagcagtgtgaactggcctccaccatgctgactgctgccaaaggagacactttgagactccgaacaattctggaagcaatacagaagcacattcattcttcctccctcatcttcaaactggcccaagatgcattcaagattgctactcccaccgacagtagtactgacagcaccctgctcaacgttgccctggaacttgggttacaggtgatgcggatgaccttatcaacccttaactggagacgcagggagatggtacgatggttggtgacctgtgctacagaagtgggtgtgcgggccctggtgagcatcttgcagagctggtacacactcttcacccctactgaggctactagtattgtagctgccacagccgtatcccacaccactatcctgcgcctcagtcttgactatccacagcgggaggaactggctagctgtgctcgcacactggctctacagtgtgctatgaaggatccacagagctgtgccctgtcagcccttacactctgtgagaaagaccacattgcctttgaggcagcctaccagattgccattgatgctgctgctggtggtatgacccattcacagctgttcaccatcgcccgctacatggagctccgtggctacccgctacgtgccttcaagctggcctcattggccatgagccatcttaacctggcctacaaccaggatactcacccagccatcaatgatgtgctctgggcttgtgctctcagccactctctgggcaagaatgagctggcagctctcatccccctggtggtgaagagtgtgcactgtgccacagtgctttcagacatcttacgacgctgcacagtgactgcacctggcctggccggcatcccaggccgccgaagctctggaaagctcatgtccactgacaaagctccattgcgccagttgctggatgccaccatcaatgcctatatcaacactacacactcacgcctaacacacatcagccctcgccactatggagagttcattgagtttctaagcaaggctcgggagaccttcctgctgccccaggatggccacctgcagtttgcccagttcatcgacaacctcaaacagatctacaaaggcaagaaaaagttgatgctgctggtgcgagagcagatagcctgnnagattgtccaccgtgagagatctgtgacactggg

SEQ ID NO: 20721 - DNA, 401 bp, Homo sapiens
gctgaggctgcaaggtagctctttcaagatatcacctgtgatttattcaactttttatatccttaaagataaagacacagttcctggtatacagtaggtgtcaggttgaatttgaggaactggactgaatacaaactctctttgtcaggtataaattttcctgacttgaaattttaactagaccaaaatatcttcttcttacttggtagagcatgtgcctacagcctgtgctcgagttgacgccctgcgttcccatggttatccaaaagaggccctcagactcacagtggccattattaatactctgaggttgcagcagcagcggcaactggaaatctacaagcatcagaagaaaggtatagtaattaggagccatctaacccccttaggcccaaagctga

SEQ ID NO: 20722 - DNA, 494 bp, Homo sapiens
ctcacacgcgggccacattcttgtgtgtcggtgtgacggtatgtttagttaacgactccagaacttactgtttcctgggtaggcctcttgtgcaccagaactgctggctgtattttgcaggtattagtatgcctagacggtggagttaccaaagttgttcttttgtgccaggcctcgaaatgcagtgcgatggtttggccagttccgctcaaccgatgtttagacttatgccgagaatttggattctctgtgaccatttttggttaggagttagaactgtttaccatactgtttggattggagggcatagttgagcagattaacacttttaaaaaaccagaacttaagctggccttttgcatgtcactggtacacgatacggtagtagtatgacaggcagcagttcggtaaaaagtttaccttacctaccactaatactgtataatgttgaacagttaccatatgatgctgtgatttgattggaaggcagtttg

SEQ ID NO: 20723 - DNA, 418 bp, Homo sapiens
ccattaggtattcattacatagacattaagctttttctgtgtgtctgtgggtgtgagagagggagacagaaaagaaagggagtgataatgtatatgtctccagagatcactgtgttgtttacttttactgttaaagatctagggccaggtgcggtgacttacacctgtaatcccagcactttgggaggctgagagcaggtggattgcttgagcccaggagttcgagaccagcctgggcaacatggcgaaatgctgtctctacaaaaaatacaaaaattagctgggtgtggacccagctactcaggaggctgaggtgggaagatcgcttgggcccggggggtcgaggctgcagtgagctatgattttgccactgcactacagtctaggtgacagagaccctgtatcaattaaaaaaaaa

SEQ ID NO: 20724 - DNA, 789 bp, Homo sapiens
ctttttttttcagttctgtatcaatgaatattttcttctgaaaaactcaactttaaactttgtaattttacagttccattgagattatattgtttatttgttttaagacatatactataactgttttggttttgcttctagaaaaactgattgcttatcaacgagaattccttgctttgaaagaacgtcttcgaatagctgaacacagaatctcacagcgctcttctgaattaaatacgattgtgcaacagttcaagcgtgtaggagcagaaacaaatggaagtaaggatgcgttgaataagttttcaggtacaaacagtattttttatattataaaaagattttatatatatatatatatatttttttttttttttttctttgagacagagtctcactctgtagcccaggctggaatgcagtggcgcaatcttggctcactgccagctccacctccagggttcacaccattcttctgcctcagcctcctgaatggctgggactacaggcgcccgccaccacacctggctaatttttttgtattgttggtggagacggggtttcacgatgttggccaggatggtcttgatctcctgacctcgtgatccaccccctcagcctcccaaagtgctgagattacaggcgtgagccactgcacccggctgaaaaagattagatttgcaaaggggcatgtggaatttttttttgaaagtcatgtagaatagtttataagccagccctttcagagagaaaaaccaccacacaaaactttcttttctagtaaattac

SEQ ID NO: 20725 - DNA, 2462 bp, Homo sapiens
  misc_feature (67)..(67): n is a, c, g, or t
  misc_feature (70)..(70): n is a, c, g, or t
ggcggcacggcggcggcggctacagcagctccgccggcagccgcgggagcacggcgacgccagcggnggnaagggaaaaggccgaggcatcagcgtgtgaagaccgcaaagacgatcccgagtacagttgtgaacagcattgctgctaggctcctcctgcagatcatctgaaatgaacctctcttattgatttttattggcctagagccaggagtactgcattcagttgactttcagggtaaaaagaaaacagtcctggttgttgtcatcataaacatatggaccagtgtgatggtgaaatgagatgaggctccgcaatggaactgtagccactgctttagcatttatcacttccttccttactttgtcttggtatactacatggcaaaatgggaaagaaaaactgattgcttatcaacgagaattccttgctttgaaagaacgtcttcgaatagctgaacacagaatctcacagcgctcttctgaattaaatacgattgtgcaacagttcaagcgtgtaggagcagaaacaaatggaagtaaggatgcgttgaataagttttcagataataccctaaagctgttaaaggagttaacaagcaaaaaatctcttcaagtgccaagtatttattatcatttgcctcatttattgaaaaatgaaggaagtcttcaacctgctgtacagattggcaacggaagaacaggagtttcaatagtcatgggcattcccacagtgaagagagaagttaaatcttacctcatagaaactcttcattcccttattgataacctgtatcctgaagagaagttggactgtgttatagtagtcttcataggagagacagatattgattatgtacatggtgttgtagccaacctggagaaagaattttctaaagaaatcagttctggcttggtggaagtcatatcaccccctgaaagctattatcctgacttgacaaacctaaaggagacatttggagactccaaagaaagagtaagatggagaacaaagcaaaacctagattactgttttctaatgatgtatgctcaagaaaagggcatatattacattcagcttgaagatgatattattgtcaaacaaaattattttaataccataaaaaattttgcacttcaactttcttctgaggaatggatgattctagagttttcccagctgggcttcattggtaaaatgtttcaagcgccggatcttactctgattgtagaattcatattcatgttttacaaggagaaacccattgattggctcctggaccatattctctgggtgaaagtctgcaaccctgaaaaagatgcaaaacattgtgatagacagaaagcaaatctgcgaattcgcttcagaccttcccttttccaacatgttggtctgcactcatcactatcaggaaaaatccaaaaactcacggataaagattatatgaaaccattacttcttaaaatccatgtaaacccacctgcggaggtatctacttccttgaaggtctaccaagggcatacgctggagaaaacttacatgggagaggatttcttctgggctatcacaccgatagctggagactacatcttgtttaaatttgataaaccagtcaatgtagaaagttatttgttccatagcggcaaccaagaacatcctggagatattctgctaaacacaactgtggaagttttgccttttaagagtgaaggtttggaaataagcaaagaaaccaaagacaaacgattagaagatggctatttcagaataggaaaatttgagaatggtgttgcagaaggaatggtggatccaagtctcaatcccatttcagcctttcgactttcagttattcagaattctgctgtttgggccattcttaatgagattcatattaaaaaagccaccaactgatcatctgagaaaccaacacattttttcctgtgaatttgttaattaaagatagttaagcatgtatcttttttttatttctacttgaacactacctcttgtgaagtctactgtagataagacgattgtcatttccacttggaaagtgaatctcccataataattgtatttgtttgaaactaagctgtcctcagattttaacttgactcaaacatttttcaattatgacagcctgttaatatgacttgtactattttggtattatactaatacataagagttgtacatattgttacattctttaaatttgagaaaaactaatgttacatacattttatgaagggggtacttttgaggttcacttattttactattatagaccctcttttataggattatcagggattatatatataaatatataaatatacataaaaatgttatggaattaatttattagaaacacttaagaagtacatatttttgtgcagtagatttttgaatcgatactttttttgaaaaccagtttccttgcttttttaagttctttcta

SEQ ID NO: 20726 - DNA, 2205 bp, Homo sapiens
ctttttttttcagttctgtatcaatgaatattttcttctgaaaaactcaactttaaactttgtaattttacagttccattgagattatattgtttatttgttttaagacatatactataactgttttggttttgcttctagaaaaactgattgcttatcaacgagaattccttgctttgaaagaacgtcttcgaatagctgaacacagaatctcacagcgctcttctgaattaaatacgattgtgcaacagttcaagcgtgtaggagcagaaacaaatggaagtaaggatgcgttgaataagttttcagataataccctaaagctgttaaaggagttaacaagcaaaaaatctcttcaagtgccaagtatttattatcatttgcctcatttattgaaaaatgaaggaagtcttcaacctgctgtacagattggcaacggaagaacaggagtttcaatagtcatgggcattcccacagtgaagagagaagttaaatcttacctcatagaaactcttcattcccttattgataacctgtatcctgaagagaagttggactgtgttatagtagtcttcataggagagacagatattgattatgtacatggtgttgtagccaacctggagaaagaattttctaaagaaatcagttctggcttggtggaagtcatatcaccccctgaaagctattatcctgacttgacaaacctaaaggagacatttggagactccaaagaaagagtaagatggagaacaaagcaaaacctagattactgttttctaatgatgtatgctcaagaaaagggcatatattacattcagcttgaagatgatattattgtcaaacaaaattattttaataccataaaaaattttgcacttcaactttcttctgaggaatggatgattctagagttttcccagctgggcttcattggtaaaatgtttcaagcgccggatcttactctgattgtagaattcatattcatgttttacaaggagaaacccattgattggctcctggaccatattctctgggtgaaagtctgcaaccctgaaaaagatgcaaaacattgtgatagacagaaagcaaatctgcgaattcgcttcagaccttcccttttccaacatgttggtctgcactcatcactatcaggaaaaatccaaaaactcacggataaagattatatgaaaccattacttcttaaaatccatgtaaacccacctgcggaggtatctacttccttgaaggtctaccaagggcatacgctggagaaaacttacatgggagaggatttcttctgggctatcacaccgatagctggagactacatcttgtttaaatttgataaaccagtcaatgtagaaagttatttgttccatagcggcaaccaagaacatcctggagatattctgctaaacacaactgtggaagttttgccttttaagagtgaaggtttggaaataagcaaagaaaccaaagacaaacgattagaagatggctatttcagaataggaaaatttgagaatggtgttgcagaaggaatggtggatccaagtctcaatcccatttcagcctttcgactttcagttattcagaattctgctgtttgggccattcttaatgagattcatattaaaaaagccaccaactgatcatctgagaaaccaacacattttttcctgtgaatttgttaattaaagatagttaagcatgtatcttttttttatttctacttgaacactacctcttgtgaagtctactgtagataagacgattgtcatttccacttggaaagtgaatctcccataataattgtatttgtttgaaactaagctgtcctcagattttaacttgactcaaacatttttcaattatgacagcctgttaatatgacttgtactattttggtattatactaatacataagagttgtacatattgttacattctttaaatttgagaaaaactaatgttacatacattttatgaagggggtacttttgaggttcacttattttactattatagaccctcttttataggattatcagggattatatatataaatatataaatatacataaaaatgttatggaattaatttattagaaacacttaagaagtacatatttttgtgcagtagatttttgaatcgatactttttttgaaaaccagtttccttgcttttttaagttctttcta

SEQ ID NO: 20727 - DNA, 1983 bp, Homo sapiens
gttcggggttggatattggaccctgggacagagcagccagttgttcatgtactgcccgaagctgttcctgtagttctgctaagcgatgagtaagggaaaggaagcctcctagggtgtagaataggaagtatgtgcctgcgttcaggcgttctggctggttgcctcatttattgaaaaatgaaggaagtcttcaacctgctgtacagattggcaacggaagaacaggagtttcaatagtcatgggcattcccacagtgaagagagaagttaaatcttacctcatagaaactcttcattcccttattgataacctgtatcctgaagagaagttggactgtgttatagtagtcttcataggagagacagatattgattatgtacatggtgttgtagccaacctggagaaagaattttctaaagaaatcagttctggcttggtggaagtcatatcaccccctgaaagctattatcctgacttgacaaacctaaaggagacatttggagactccaaagaaagagtaagatggagaacaaagcaaaacctagattactgttttctaatgatgtatgctcaagaaaagggcatatattacattcagcttgaagatgatattattgtcaaacaaaattattttaataccataaaaaattttgcacttcaactttcttctgaggaatggatgattctagagttttcccagctgggcttcattggtaaaatgtttcaagcgccggatcttactctgattgtagaattcatattcatgttttacaaggagaaacccattgattggctcctggaccatattctctgggtgaaagtctgcaaccctgaaaaagatgcaaaacattgtgatagacagaaagcaaatctgcgaattcgcttcagaccttcccttttccaacatgttggtctgcactcatcactatcaggaaaaatccaaaaactcacggataaagattatatgaaaccattacttcttaaaatccatgtaaacccacctgcggaggtatctacttccttgaaggtctaccaagggcatacgctggagaaaacttacatgggagaggatttcttctgggctatcacaccgatagctggagactacatcttgtttaaatttgataaaccagtcaatgtagaaagttatttgttccatagcggcaaccaagaacatcctggagatattctgctaaacacaactgtggaagttttgccttttaagagtgaaggtttggaaataagcaaagaaaccaaagacaaacgattagaagatggctatttcagaataggaaaatttgagaatggtgttgcagaaggaatggtggatccaagtctcaatcccatttcagcctttcgactttcagttattcagaattctgctgtttgggccattcttaatgagattcatattaaaaaagccaccaactgatcatctgagaaaccaacacattttttcctgtgaatttgttaattaaagatagttaagcatgtatcttttttttatttctacttgaacactacctcttgtgaagtctactgtagataagacgattgtcatttccacttggaaagtgaatctcccataataattgtatttgtttgaaactaagctgtcctcagattttaacttgactcaaacatttttcaattatgacagcctgttaatatgacttgtactattttggtattatactaatacataagagttgtacatattgttacattctttaaatttgagaaaaactaatgttacatacattttatgaagggggtacttttgaggttcacttattttactattatagaccctcttttataggattatcagggattatatatataaatatataaatatacataaaaatgttatggaattaatttattagaaacacttaagaagtacatatttttgtgcagtagatttttgaatcgatactttttttgaaaaccagtttccttgcttttttaagttctttcta

SEQ ID NO: 20728 - DNA, 428 bp, Homo sapiens
tactgttttctaatgatgtatgctcaagaaaagggcatatattacattcaggtaagtgtagtttttcctttgtttttcatgcttgtaaagaaaaagtgttatcaagggtatgttttcattaaaacaggaagttttgaaagtgcaaaccctctgagatctgacaaatcataactatctcagagcagaggggtctccatggtaactgagcatgtgggctctgatgtttctccactgagtagggaagccagccctccacttagcgggggacctgcaactcacttatctttttcctctttttctcccattcccccatcttctcttccctcttccctctctccactgtcaagaagaactaagatgtcattatttggcagattttaaagaggaattttcttacaatttttctttagtggtcttacaatgaacta

SEQ ID NO: 20729 - DNA, 294 bp, Homo sapiens
agccgaagcaactttgtttaattttgataatacaagtggggaaattgtttatgatgatttatagttgaaagcgcaagcctcagtgtatgtcgtgggcaagatttcatgaatgtaagccattttggtgcttggtttcttcattgcagctattgactgggaatatcttttcaggtaaaatgtttcaagcgccggatcttactctgattgtagaattcatattcatgttttacaaggagaaacccattgattggctcctggaccatattctctgggtgaaagtctgcaaccctgaaa

SEQ ID NO: 20730 - DNA, 5502 bp, Homo sapiens
ctgccgccctccattgtctccacggcggcgaggagcgccggcgagcgcagcccgggaccgagcggggcggcgcggctggcggggccggcggcggctgaagcgagagcgcggacgcgacgcgaccgcggcttcccgagctgcgcctggccgcccagcgccgcggcccgcccgaggcctggaggggtccgggccgccgtccatggtcgcggcgtcctgaggcgggggacgcgcccggcgcccccggccctcctccgcctcctcccgcggggcgggcggcctcctccggcgcctccccgcgcccgcccgccgctcgccgccgcctccctccctccttccctgcggctcccccggctttcggagcccgggggcggcctgtggcgcgcggagcccgcgccggactgcgcctctttggaccttgaggggaaacatgcgtttgccttggatcgtttgaaattctgagtttgggatccccgcccgcccgcctgcctcttccgccccgcgggttttttccttttttccttttgctttttttccttttctccctccgggtctcctttttgactccctccccctttatgctcgcccagccctccccctgctgctgagaagtgggggagggtctcggcctccaggttcccgccccaccggggcccgggcgagcatggggggcaagcagagcacggcggcccgctcccggggccccttcccgggggtctccaccgatgacagcgccgtgccgccgccgggaggggcgccccatttcgggcactaccggacgggcggcggggccatggggctgcgcagccgctcggtcagctcggtggcaggcatgggcatggaccccagcacggccgggggggtgccctttggcctctacacccccgcctcccggggcaccggcgactccgagagggcgcccggcggcggagggtctgcgtccgactccacctatgcccatggcaatggttaccaggagacgggcggcggtcaccatagagacgggatgctgtacctgggctcccgagcctcgctggcggatgctctacctctgcacatcgcacccaggtggttcagctcgcatagtggtttcaagtgccccatttgctccaagtctgtggcttctgacgagatggaaatgcactttataatgtgtttgagcaaacctcgcctctcctacaacgatgatgtgctgactaaagacgcgggtgagtgtgtgatctgcctggaggagctgctgcagggggacacgatagccaggctgccctgcctgtgcatctatcacaaaagctgcatagactcgtggtttgaagtgaacagatcttgtccggaacaccctgcggactgacctgcgggcttgcttgctgactcctctcaaagggacagagcgcccctgctccagggaggaggctcaccggaccctggggcagagctgagcttgggacaccagcgggaacagggcaccccttctgcactgacttccagatcatggttctcccttcctccctgaggacaccaaattggatgagagcaagtttgagagaagaatgaatcaactgctatccttcccctcacccctcagcccaggagggaaagggcattttctttttcatctttgaaaggcattgtgggtctgtctttaaagtgtttacaaaaaaaaattatataaaaaaaaagtctagtgtcgactggtgttttccctcgtgatgtttacagcttgctgtttgctgcccagccataacccactcagtgacagacgaacacagctaaggcctcgctgccagccttctgacggcgggcgagcacacggtctcttcccctgccccaactggccctctccaccaccaacttctctactttgggtttgtttggttttttccctctatttttctggctggttttttgctcttttctccccttgagaccctaatatcttgacttcattgccaaaaaacaacccattgagaactttcttcctactgatcccatctcttttcccttctttcctcctggttccggtcagttcagaggatttaacaatcacaagtgtcctgcaaaaatgcctgaacattattcttaggccctcgtggattttttttttcagaaaacttaaacaaaaaaagacttactaagaaatatgtacagctacccctgttttcaggcactatgtttgagaacattttagccattgatgttcacacgtggcatcagcccatgcaagataggtttctgtatttatatattaaaatacaaaaaaaaacttataaaatgtttaaaaaaatgttcaaagcttgggagaaaagctttcttcattagtcaaggtgttttgatatggtattaaaatgtctaataaaagatggcactgcgtgattttattttaatgaagtgttatacaatcaagaaatgggggcaagggcctgccccccactccctcacctacctccttagcattccttcaggctgctactcggggctccaggtgtgtgaattggtcctcagatagtcaggcctgggtggagggagtggcaagtcaggcgtgcctcctacaagcttcctaacctcttaagcatcatggaaccagtcagccctctgtggagtcattgtgctggacctctgaaaagatctgcaggggccaagatgttgcagccaccggaggctgcaaggatgtgggttcttccaggtgtgggcccagcccccctccttccagcctttgctccccatcccacgttccactcgccctgcctgttgttcagtttgcgtctcagtgctgactcacgggcatgcttcattgaggcccaggaagaggccctggtttggggctgtgccagctcagagcccttgaaccagaaccaactgctcaggctcacaaaagttggcaaaatgcgggctgggcaggcagctcggggcagggagcagcagtgcaggcctggcctgtgtccccgtgcccagcgggctcccggagcagcattccagagcctcctgcagagccagcgaaggaaagctctagagggagacgactccaccgcctctctgctctgacccttctcaggcccgcctgatgtgctggaccatccccctgctgccacggcccctggctccgcagtcaccctccatcagatgcttccagaagcacctactctgtgcaagggcattcacaacaggccagtgggcaaacgtgagccagggccagcggagaaacactaaagaagactcggtggttcagagcctgggtctcagcgcgggacccgtctggggtgaagaccttggggctgttgtgagtcggtggcaggaacgtgggctctagactgtgcattcaggctctcctacttggcagaatgatcttggggaaacgacttcatctgaacttcagatatttcacatgtgaagcggggacaaaaccatgcagctcagaggtccctgtgggggctgggggagctgccctgcaggtcttggcacatgcacagcaggctccccatagctttgtcaccacaaagggcactgttctattcacagcacctcctgcttctgcctggcaactgtgtctccctgtgctatatttaattccaccagcaaagctggcggaggcagggcccagccctgaaaggagatctccttgcctgacccctggacctggaaatggaggcttcatgtgcccgccttggcggcttaagcctgctgctttggcagtgccatgggtgagccgagcagctgtgaggtgggtggggcagggctgtagcccacgccgggtgctattccaggctctaggggctggtgctcatccccacccccagcgacttccgtcctacctggcatgctgcagccctctgccggctgtggtgtcctctgaatttggacccaggttgcctgctcttgttgtgggggtgggattggggctgtctgtgtttcccaggtggagctcatgtttgtgatcctctatctggacagctctccagaatcctgtgttgcccctgttctgcctttctgggatgggagagaaggtgagggagccggcgagccggttctaccctctctgctaagggcctagcacgctttgatgaggttcctggacgtgagaccctcacaaagaccaaccattcctctaatagccatttaacggtactgcagttcatgggaaaatgtcctcattcttaggagatagatgctggattatataggtgaatgccttcaagaaatgtgtaatttaattccaaatagttccccccaaaatacacaaagcaaataaggccaaaatgttcattgttgaatctgcagtggctggtatttcagtgaacagtgtacttgttctttcaacttttctgtatgtttggaatttttcttaataaaagattgtgggaaatggtcatttgctgagcgcctcctagttgccaggcactggagggcgcatcaaagaagagtcctacccaggagggagagcgcagctgctgcaggattctcgcctggaagagtgggtggctggctggctggctggaaggggaggggcgagagggctgtctcggtgatgagcacacgcgtgctggggtggtttggggagagggctgagatttgtcaccagtgagcccttggcacggtctctgctccccaccagggcagcacgggacagaaacgtcacggaggagtagcctccaggctcaggttggtgtaactgctgtcggctggagcccagtattagcacggaggaggggttccaagaactgaagttggactggggcgtctcagcgcagctgcctctgcctaaggcctagcagcctgcctgagcactgacagctgatgggaggaggagaggggcggaggccagggagggcgtggggtgtgacatgcctctttccaaaagggaccgaaggctagaggggcaaggaagatgagacagcactgcaggttcctgggacctgcaggggatggaggactagcttggcttccaggctgccaggacttacctgaccctaggaggaggtttgcccagggctgagtgccgcaggccctgggcagaggagtcgtgagctgcagatgccgcgtggtatctgagcttcatgatttcgggcgccctcctgtgggcttaggggggaacaactgccaaggtctcaagacgggctccggcccaagacaggggcaggccctcgggtggacagaccttgagggcaaaacagctggtggtacgatacatcaccccatgaagaggtgggtgcaaaaatagtctcatctctgtttctagagacgtggcagctgctgaggaacacattcagtgtgttcagaggcccggttcaggcccagttggggagcccatcctgagtgacatgtgccgtgggcaggtcctcagctctgaggcggagtagctgggacagggacctgggttcctttccgaaccctgagcaccaacctcctccccaggctataagaagtcagaggacagccccaaaacaaaggggtcactgaccaaaggacagagaccctggagggggaggggaggaagtgctgcctgctgacttc

SEQ ID NO: 20731 - DNA, 5330 bp, Homo sapiens
  misc_feature (126)..(126): n is a, c, g, or t
gttaaaagtagcagggcccagatatgccttgggactccagtgtgagcctcgtccttgtttccagctggaaggaaggcaccctcttgcccaagacaggacactgtgctgcctggggccagcacctgntgaatcctcgagcccagagcttcttcctgacactcaggcctttcaaagcctgactctcagggccactgctgcacagggtgacaaccgggcatggcacgcagtgtggctggtgcagaggaggcttaaggctggcctgggagagattcttggtctagctcccagcacggagccttgcttgtgtcccagggcggcactaaccagaaccagaaaaggaaatctttggccctcggggagaattatgccaattatctgtctggttcctgtctttgaaaatgcccagatgttggtttacaaatcaggaagctgtcttggggcaatctctgttccctctttgatgcagagagcctttctctgtaaacactggagagcagggcttcactgtctggctcccctcccgcctcttgcaggaaggactagatgctgctgatcagctgatcatggctgagccgggtagagcttggggctctcctaagaggtcacccactgggagggagcttcacagctgttcttttgacccaggaaggagctctttcaggactgtggcacccagagccgtggccctcctgccatgccattgttcccacttccctgcccttgggagtcttggagacagctgactagctgccctgaggggtccaccgctctcaccttctcactggtggctgctgccattctcctgggctctgcacagaaagctttggtccttctgaaagccactctgccccttcctgcagcaccagatccccctgagccggtactgctgcctccacctgggccaagactagtcttggtgttcacccttcttcgtgcttcagaaagtagggatatctggggacatgactgtgtttccctggggtcctttcagaagagacttaggaagctcctgctcaggaatctggccctctgaaagagccccttcaaagcagcctgggcagcaggtaacgtggtttcccttgcggccccctcctcccagctgcatagactcgtggtttgaagtgaacagatcttgtccggaacaccctgcggactgacctgcgggcttgcttgctgactcctctcaaaggtgagcccgcgtttgggggtgctccgggctcaaggcttggggtcaggtcactttgggggcctgcagtttagggagccgggctgcccttatgccactgagaagaaagcaggagcagagggaaggagcacctcatcagtgagcagttagtcatccggaaatgattttccctgggaaggacaagagatacaaaccaacatggacagttatgaagaacaggctcagaagagttaggatcagttggggaagagaccagtacaatctacattcctaaagaaagttcaggaatatcccctgggaatgtgcacgggcaggaaaaggagcctgagcggtgggtttgtgcctggcttggcctcatcctcgctcacctctgagtctccgcctcttctatggtaacggggataatctcactccctgttgccataaggacattgcacttactaaacagccatgggcagtgcattgttccctgcaaagtgctggtcagcgatcatttgaccactgcttcttcccatgccgcttccagatgaatctgaggcctccaggccagactcgatccctctatcccacagcactgggtgctgactccacacatccccctggcttaccgctgggtctggcctccccatttctcccccaggggtaccccacttgctgccaaccatccacccctgacccccatctcacctgtcccctccaagttctgggctggcattttcctttttctggcaaacaagtagacaaaacccccataaaaaccaaaagcccaactccatctcacagccaaaggttttgggacctttttcttcccccctccctttctctctctcttgctttcgttttcttttgttaggtttattttatttattccaagtaaactcccagaacagctgatgatgtcagacaaatcagggacatttgctctttttacctccacctcaaaaactgatgacaaggggagaagaaagagccaggggggagagtgaggcaggggagtagaacctgcccaggcacatggctgcaaattccccgtgtgctgtttggcttctggggtcctgtgtagacgccccagccccgcctgccctcttgggatgcagctgccctgggatgagcagacagccctcggcccgatggagcacgacttatttattacggtccacacagggacagagcgcccctgctccagggaggaggctcaccggaccctggggcagagctgagcttgggacaccagcgggaacagggcaccccttctgcactgacttccagatcatggttctcccttcctccctgaggacaccaaattggatgagagcaagtttgagagaagaatgaatcaactgctatccttcccctcacccctcagcccaggagggaaagggcattttctttttcatctttgaaaggcattgtgggtctgtctttaaagtgtttacaaaaaaaaattatataaaaaaaaagtctagtgtcgactggtgttttccctcgtgatgtttacagcttgctgtttgctgcccagccataacccactcagtgacagacgaacacagctaaggcctcgctgccagccttctgacggcgggcgagcacacggtctcttcccctgccccaactggccctctccaccaccaacttctctactttgggtttgtttggttttttccctctatttttctggctggttttttgctcttttctccccttgagaccctaatatcttgacttcattgccaaaaaacaacccattgagaactttcttcctactgatcccatctcttttcccttctttcctcctggttccggtcagttcagaggatttaacaatcacaagtgtcctgcaaaaatgcctgaacattattcttaggccctcgtggattttttttttcagaaaacttaaacaaaaaaagacttactaagaaatatgtacagctacccctgttttcaggcactatgtttgagaacattttagccattgatgttcacacgtggcatcagcccatgcaagataggtttctgtatttatatattaaaatacaaaaaaaaacttataaaatgtttaaaaaaatgttcaaagcttgggagaaaagctttcttcattagtcaaggtgttttgatatggtattaaaatgtctaataaaagatggcactgcgtgattttattttaatgaagtgttatacaatcaagaaatgggggcaagggcctgccccccactccctcacctacctccttagcattccttcaggctgctactcggggctccaggtgtgtgaattggtcctcagatagtcaggcctgggtggagggagtggcaagtcaggcgtgcctcctacaagcttcctaacctcttaagcatcatggaaccagtcagccctctgtggagtcattgtgctggacctctgaaaagatctgcaggggccaagatgttgcagccaccggaggctgcaaggatgtgggttcttccaggtgtgggcccagcccccctccttccagcctttgctccccatcccacgttccactcgccctgcctgttgttcagtttgcgtctcagtgctgactcacgggcatgcttcattgaggcccaggaagaggccctggtttggggctgtgccagctcagagcccttgaaccagaaccaactgctcaggctcacaaaagttggcaaaatgcgggctgggcaggcagctcggggcagggagcagcagtgcaggcctggcctgtgtccccgtgcccagcgggctcccggagcagcattccagagcctcctgcagagccagcgaaggaaagctctagagggagacgactccaccgcctctctgctctgacccttctcaggcccgcctgatgtgctggaccatccccctgctgccacggcccctggctccgcagtcaccctccatcagatgcttccagaagcacctactctgtgcaagggcattcacaacaggccagtgggcaaacgtgagccagggccagcggagaaacactaaagaagactcggtggttcagagcctgggtctcagcgcgggacccgtctggggtgaagaccttggggctgttgtgagtcggtggcaggaacgtgggctctagactgtgcattcaggctctcctacttggcagaatgatcttggggaaacgacttcatctgaacttcagatatttcacatgtgaagcggggacaaaaccatgcagctcagaggtccctgtgggggctgggggagctgccctgcaggtcttggcacatgcacagcaggctccccatagctttgtcaccacaaagggcactgttctattcacagcacctcctgcttctgcctggcaactgtgtctccctgtgctatatttaattccaccagcaaagctggcggaggcagggcccagccctgaaaggagatctccttgcctgacccctggacctggaaatggaggcttcatgtgcccgccttggcggcttaagcctgctgctttggcagtgccatgggtgagccgagcagctgtgaggtgggtggggcagggctgtagcccacgccgggtgctattccaggctctaggggctggtgctcatccccacccccagcgacttccgtcctacctggcatgctgcagccctctgccggctgtggtgtcctctgaatttggacccaggttgcctgctcttgttgtgggggtgggattggggctgtctgtgtttcccaggtggagctcatgtttgtgatcctctatctggacagctctccagaatcctgtgttgcccctgttctgcctttctgggatgggagagaaggtgagggagccggcgagccggttctaccctctctgctaagggcctagcacgctttgatgaggttcctggacgtgagaccctcacaaagaccaaccattcctctaatagccatttaacggtactgcagttcatgggaaaatgtcctcattcttaggagatagatgctggattatataggtgaatgccttcaagaaatgtgtaatttaattccaaatagttccccccaaaatacacaaagcaaataaggccaaaatgttcattgttgaatctgcagtggctggtatttcagtgaacagtgtacttgttctttcaacttttctgtatgtttggaatttttcttaataaaagattgtgggaaatgg

SEQ ID NO: 20732 - DNA, 423 bp, Homo sapiens
  misc_feature (31)..(31): n is a, c, g, or t
gcctactactactacctactactactaaatncgcggccgcgtcgacagtgaacagatcttgtccggaacaccctgcggactgacctgcgggcttgcttgctgactcctctcaaagggacagagcgcccctgctccagggaggaggctcaccggaccctggggcagagctgagcttgggacaccagcgggaacagggcaccccttctgcactgacttccagatcatggttctcccttcctccctgaggacaccaaattggatgagagcaagtttgagagaagaatgaatcaactgctatccttcccctcacccctcagcccaggagggaaagggcattttctttttcatctttgaaaggcattgtgggtctgtctttaaagtgtttacaaaagtcgacgcggccgcgaatttagtagtagtagg

SEQ ID NO: 20733 - DNA, 5054 bp, Homo sapiens
ctgccgccctccattgtctccacggcggcgaggagcgccggcgagcgcagcccgggaccgagcggggcggcgcggctggcggggccggcggcggctgaagcgagagcgcggacgcgacgcgaccgcggcttcccgagctgcgcctggccgcccagcgccgcggcccgcccgaggcctggaggggtccgggccgccgtccatggtcgcggcgtcctgaggcgggggacgcgcccggcgcccccggccctcctccgcctcctcccgcggggcgggcggcctcctccggcgcctccccgcgcccgcccgccgctcgccgccgcctccctccctccttccctgcggctcccccggctttcggagcccgggggcggcctgtggcgcgcggagcccgcgccggactgcgcctctttggaccttgaggggaaacatgcgtttgccttggatcgtttgaaattctgagtttgggatccccgcccgcccgcctgcctcttccgccccgcgggttttttccttttttccttttgctttttttccttttctccctccgggtctcctttttgactccctccccctttatgctcgcccagccctccccctgctgctgagaagtgggggagggtctcggcctccaggttcccgccccaccggggcccgggcgagcatggggggcaagcagagcacggcggcccgctcccggggccccttcccgggggtctccaccgatgacagcgccgtgccgccgccgggaggggcgccccatttcgggcactaccggacgggcggcggggccatggggctgcgcagccgctcggtcagctcggtggcaggcatgggcatggaccccagcacggccgggggggtgccctttggcctctacacccccgcctcccggggcaccggcgactccgagagggcgcccggcggcggagggtctgcgtccgactccacctatgcccatggcaatggttaccaggagacgggcggcggtcaccatagagacgggatgctgtacctgggctcccgagcctcgctggcggatgctctacctctgcacatcgcacccaggtggttcagctcgcatagtggtttcaagtgccccatttgctccaagtctgtggcttctgacgagatggaaatgcactttataatgtgtttgagcaaacctcgcctctcctacaacgatgatgtgctgactaaagacgcgggtgagtgtgtgatctgcctggaggagctgctgcagggggacacgatagccaggctgccctgcctgtgcatctatcacaaaagctgcatagactcgtggtttgaagtgaacagatcttgtccggaacaccctgcggactgacctgcgggcttgcttgctgactcctctcaaagggacagagcgcccctgctccagggaggaggctcaccggaccctggggcagagctgagcttgggacaccagcgggaacagggcaccccttctgcactgacttccagatcatggttctcccttcctccctgaggacaccaaattggatgagagcaagtttgagagaagaatgaatcaactgctatccttcccctcacccctcagcccaggagggaaagggcattttctttttcatctttgaaaggcattgtgggtctgtctttaaagtgtttacaaaaaaaaattatataaaaaaaaagtctagtgtcgactggtgttttccctcgtgatgtttacagcttgctgtttgctgcccagccataacccactcagtgacagacgaacacagctaaggcctcgctgccagccttctgacggcgggcgagcacacggtctcttcccctgccccaactggccctctccaccaccaacttctctactttgggtttgtttggttttttccctctatttttctggctggttttttgctcttttctccccttgagaccctaatatcttgacttcattgccaaaaaacaacccattgagaactttcttcctactgatcccatctcttttcccttctttcctcctggttccggtcagttcagaggatttaacaatcacaagtgtcctgcaaaaatgcctgaacattattcttaggccctcgtggattttttttttcagaaaacttaaacaaaaaaagacttactaagaaatatgtacagctacccctgttttcaggcactatgtttgagaacattttagccattgatgttcacacgtggcatcagcccatgcaagataggtttctgtatttatatattaaaatacaaaaaaaaacttataaaatgtttaaaaaaatgttcaaagcttgggagaaaagctttcttcattagtcaaggtgttttgatatggtattaaaatgtctaataaaagatggcactgcgtgattttattttaatgaagtgttatacaatcaagaaatgggggcaagggcctgccccccactccctcacctacctccttagcattccttcaggctgctactcggggctccaggtgtgtgaattggtcctcagatagtcaggcctgggtggagggagtggcaagtcaggcgtgcctcctacaagcttcctaacctcttaagcatcatggaaccagtcagccctctgtggagtcattgtgctggacctctgaaaagatctgcaggggccaagatgttgcagccaccggaggctgcaaggatgtgggttcttccaggtgtgggcccagcccccctccttccagcctttgctccccatcccacgttccactcgccctgcctgttgttcagtttgcgtctcagtgctgactcacgggcatgcttcattgaggcccaggaagaggccctggtttggggctgtgccagctcagagcccttgaaccagaaccaactgctcaggctcacaaaagttggcaaaatgcgggctgggcaggcagctcggggcagggagcagcagtgcaggcctggcctgtgtccccgtgcccagcgggctcccggagcagcattccagagcctcctgcagagccagcgaaggaaagctctagagggagacgactccaccgcctctctgctctgacccttctcaggcccgcctgatgtgctggaccatccccctgctgccacggcccctggctccgcagtcaccctccatcagatgcttccagaagcacctactctgtgcaagggcattcacaacaggccagtgggcaaacgtgagccagggccagcggagaaacactaaagaagactcggtggttcagagcctgggtctcagcgcgggacccgtctggggtgaagaccttggggctgttgtgagtcggtggcaggaacgtgggctctagactgtgcattcaggctctcctacttggcagaatgatcttggggaaacgacttcatctgaacttcagatatttcacatgtgaagcggggacaaaaccatgcagctcagaggtccctgtgggggctgggggagctgccctgcaggtcttggcacatgcacagcaggctccccatagctttgtcaccacaaagggcactgttctattcacagcacctcctgcttctgcctttctgggatgggagagaaggtgagggagccggcgagccggttctaccctctctgctaagggcctagcacgctttgatgaggttcctggacgtgagaccctcacaaagaccaaccattcctctaatagccatttaacggtactgcagttcatgggaaaatgtcctcattcttaggagatagatgctggattatataggtgaatgccttcaagaaatgtgtaatttaattccaaatagttccccccaaaatacacaaagcaaataaggccaaaatgttcattgttgaatctgcagtggctggtatttcagtgaacagtgtacttgttctttcaacttttctgtatgtttggaatttttcttaataaaagattgtgggaaatggtcatttgctgagcgcctcctagttgccaggcactggagggcgcatcaaagaagagtcctacccaggagggagagcgcagctgctgcaggattctcgcctggaagagtgggtggctggctggctggctggaaggggaggggcgagagggctgtctcggtgatgagcacacgcgtgctggggtggtttggggagagggctgagatttgtcaccagtgagcccttggcacggtctctgctccccaccagggcagcacgggacagaaacgtcacggaggagtagcctccaggctcaggttggtgtaactgctgtcggctggagcccagtattagcacggaggaggggttccaagaactgaagttggactggggcgtctcagcgcagctgcctctgcctaaggcctagcagcctgcctgagcactgacagctgatgggaggaggagaggggcggaggccagggagggcgtggggtgtgacatgcctctttccaaaagggaccgaaggctagaggggcaaggaagatgagacagcactgcaggttcctgggacctgcaggggatggaggactagcttggcttccaggctgccaggacttacctgaccctaggaggaggtttgcccagggctgagtgccgcaggccctgggcagaggagtcgtgagctgcagatgccgcgtggtatctgagcttcatgatttcgggcgccctcctgtgggcttaggggggaacaactgccaaggtctcaagacgggctccggcccaagacaggggcaggccctcgggtggacagaccttgagggcaaaacagctggtggtacgatacatcaccccatgaagaggtgggtgcaaaaatagtctcatctctgtttctagagacgtggcagctgctgaggaacacattcagtgtgttcagaggcccggttcaggcccagttggggagcccatcctgagtgacatgtgccgtgggcaggtcctcagctctgaggcggagtagctgggacagggacctgggttcctttccgaaccctgagcaccaacctcctccccaggctataagaagtcagaggacagccccaaaacaaaggggtcactgaccaaaggacagagaccctggagggggaggggaggaagtgctgcctgctgacttc

SEQ ID NO: 20734 - DNA, 4357 bp, Homo sapiens
ctgccgccctccattgtctccacggcggcgaggagcgccggcgagcgcagcccgggaccgagcggggcggcgcggctggcggggccggcggcggctgaagcgagagcgcggacgcgacgcgaccgcggcttcccgagctgcgcctggccgcccagcgccgcggcccgcccgaggcctggaggggtccgggccgccgtccatggtcgcggcgtcctgaggcgggggacgcgcccggcgcccccggccctcctccgcctcctcccgcggggcgggcggcctcctccggcgcctccccgcgcccgcccgccgctcgccgccgcctccctccctccttccctgcggctcccccggctttcggagcccgggggcggcctgtggcgcgcggagcccgcgccggactgcgcctctttggaccttgaggggaaacatgcgtttgccttggatcgtttgaaattctgagtttgggatccccgcccgcccgcctgcctcttccgccccgcgggttttttccttttttccttttgctttttttccttttctccctccgggtctcctttttgactccctccccctttatgctcgcccagccctccccctgctgctgagaagtgggggagggtctcggcctccaggttcccgccccaccggggcccgggcgagcatggggggcaagcagagcacggcggcccgctcccggggccccttcccgggggtctccaccgatgacagcgccgtgccgccgccgggaggggcgccccatttcgggcactaccggacgggcggcggggccatggggctgcgcagccgctcggtcagctcggtggcaggcatgggcatggaccccagcacggccgggggggtgccctttggcctctacacccccgcctcccggggcaccggcgactccgagagggcgcccggcggcggagggtctgcgtccgactccacctatgcccatggcaatggttaccaggagacgggcggcggtcaccatagagacgggatgctgtacctgggctcccgagcctcgctggcggatgctctacctctgcacatcgcacccaggtggttcagctcgcatagtggtttcaagtgccccatttgctccaagtctgtggcttctgacgagatggaaatgcactttataatgtgtttgagcaaacctcgcctctcctacaacgatgatgtgctgactaaagacgcgggtgagtgtgtgatctgcctggaggagctgctgcagggggacacgatagccaggctgccctgcctgtgcatctatcacaaaagctgcatagactcgtggtttgaagtgaacagatcttgtccggaacaccctgcggactgacctgcgggcttgcttgctgactcctctcaaagggacagagcgcccctgctccagggaggaggctcaccggaccctggggcagagctgagcttgggacaccagcgggaacagggcaccccttctgcactgacttccagatcatggttctcccttcctccctgaggacaccaaattggatgagagcaagtttgagagaagaatgaatcaactgctatccttcccctcacccctcagcccaggagggaaagggcattttctttttcatctttgaaaggcattgtgggtctgtctttaaagtgtttacaaaaaaaaattatataaaaaaaaagtctagtgtcgactggtgttttccctcgtgatgtttacagcttgctgtttgctgcccagccataacccactcagtgacagacgaacacagctaaggcctcgctgccagccttctgacggcgggcgagcacacggtctcttcccctgccccaactggccctctccaccaccaacttctctactttgggtttgtttggttttttccctctatttttctggctggttttttgctcttttctccccttgagaccctaatatcttgacttcattgccaaaaaacaacccattgagaactttcttcctactgatcccatctcttttcccttctttcctcctggttccggtcagttcagaggatttaacaatcacaagtgtcctgcaaaaatgcctgaacattattcttaggccctcgtggattttttttttcagaaaacttaaacaaaaaaagacttactaagaaatatgtacagctacccctgttttcaggcactatgtttgagaacattttagccattgatgttcacacgtggcatcagcccatgcaagataggtttctgtatttatatattaaaatacaaaaaaaaacttataaaatgtttaaaaaaatgttcaaagcttgggagaaaagctttcttcattagtcaaggtgttttgatatggtattaaaatgtctaataaaagatggcactgcgtgattttattttaatgaagtgttatacaatcaagaaatgggggcaagggcctgccccccactccctcacctacctccttagcattccttcaggctgctactcggggctccaggtgtgtgaattggtcctcagatagtcaggcctgggtggagggagtggcaagtcaggcgtgcctcctacaagcttcctaacctcttaagcatcatggaaccagtcagccctctgtggagtcattgtgctggacctctgaaaagatctgcaggggccaagatgttgcagccaccggaggctgcaaggatgtgggttcttccaggtgtgggcccagcccccctccttccagcctttgctccccatcccacgttccactcgccctgcctgttgttcagtttgcgtctcagtgctgactcacgggcatgcttcattgaggcccaggaagaggccctggtttggggctgtgccagctcagagcccttgaaccagaaccaactgctcaggctcacaaaagttggcaaaatgcgggctgggcaggcagctcggggcagggagcagcagtgcaggcctggcctgtgtccccgtgcccagcgggctcccggagcagcattccagagcctcctgcagagccagcgaaggaaagctctagagggagacgactccaccgcctctctgctctgacccttctcaggcccgcctgatgtgctggaccatccccctgctgccacggcccctggctccgcagtcaccctccatcagatgcttccagaagcacctactctgtgcaagggcattcacaacaggccagtgggcaaacgtgagccagggccagcggagaaacactaaagaagactcggtggttcagagcctgggtctcagcgcgggacccgtctggggtgaagaccttggggctgttgtgagtcggtggcaggaacgtgggctctagactgtgcattcaggctctcctacttggcagaatgatcttggggaaacgacttcatctgaacttcagatatttcacatgtgaagcggggacaaaaccatgcagctcagaggtccctgtgggggctgggggagctgccctgcaggtcttggcacatgcacagcaggctccccatagctttgtcaccacaaagggcactgttctattcacagcacctcctgcttctgcctggcaactgtgtctccctgtgctatatttaattccaccagcaaagctggcggaggcagggcccagccctgaaaggagatctccttgcctgacccctggacctggaaatggaggcttcatgtgcccgccttggcggcttaagcctgctgctttggcagtgccatgggtgagccgagcagctgtgaggtgggtggggcagggctgtagcccacgccgggtgctattccaggctctaggggctggtgctcatccccacccccagcgacttccgtcctacctggcatgctgcagccctctgccggctgtggtgtcctctgaatttggacccaggttgcctgctcttgttgtgggggtgggattggggctgtctgtgtttcccaggtggagctcatgtttgtgatcctctatctggacagctctccagaatcctgtgttgcccctgttctgcctttctgggatgggagagaaggtgagggagccggcgagccggttctaccctctctgctaagggcctagcacgctttgatgaggttcctggacgtgagaccctcacaaagaccaaccattcctctaatagccatttaacggtactgcagttcatgggaaaatgtcctcattcttaggagatagatgctggattatataggtgaatgccttcaagaaatgtgtaatttaattccaaatagttccccccaaaatacacaaagcaaataaggccaaaatgttcattgttgaatctgcagtggctggtatttcagtgaacagtgtacttgttctttcaacttttctgtatgtttggaatttttcttaataaaagattgtgggaaatgg

SEQ ID NO: 20735 - DNA, 4519 bp, Homo sapiens
ttgaacgtgacgaacacagctggcacatccctccccctttatgctcgcccagccctccccctgctgctgagaagtgggggagggtctcggcctccaggttcccgccccaccggggcccgggcgagcatggggggcaagcagagcacggcggcccgctcccggggccccttcccgggggtctccaccgatgacagcgccgtgccgccgccgggaggggcgccccatttcgggcactaccggacgggcggcggggccatggggctgcgcagccgctcggtcagctcggtggcaggcatgggcatggaccccagcacggccgggggggtgccctttggcctctacacccccgcctcccggggcaccggcgactccgagagggcgcccggcggcggagggtctgcgtccgactccacctatgcccatggcaatggttaccaggagacgggcggcggtcaccatagagacgggatgctgtacctgggctcccgagcctcgctggcggatgctctacctctgcacatcgcacccaggtggttcagctcgcatagtggtttcaagtgccccatttgctccaagtctgtggcttctgacgagatggaaatgcactttataatgtgtttgagcaaacctcgcctctcctacaacgatgatgtgctgactaaagacgcgggtgagtgtgtgatctgcctggaggagctgctgcagggggacacgatagccaggctgccctgcctgtgcatctatcacaaaagctgcatagactcgtggtttgaagtgaacagatcttgtccggaacaccctgcggactgacctgcgggcttgcttgctgactcctctcaaagggacagagcgcccctgctccagggaggaggctcaccggaccctggggcagagctgagcttgggacaccagcgggaacagggcaccccttctgcactgacttccagatcatggttctcccttcctccctgaggacaccaaattggatgagagcaagtttgagagaagaatgaatcaactgctatccttcccctcacccctcagcccaggagggaaagggcattttctttttcatctttgaaaggcattgtgggtctgtctttaaagtgtttacaaaaaaaaattatataaaaaaaaagtctagtgtcgactggtgttttccctcgtgatgtttacagcttgctgtttgctgcccagccataacccactcagtgacagacgaacacagctaaggcctcgctgccagccttctgacggcgggcgagcacacggtctcttcccctgccccaactggccctctccaccaccaacttctctactttgggtttgtttggttttttccctctatttttctggctggttttttgctcttttctccccttgagaccctaatatcttgacttcattgccaaaaaacaacccattgagaactttcttcctactgatcccatctcttttcccttctttcctcctggttccggtcagttcagaggatttaacaatcacaagtgtcctgcaaaaatgcctgaacattattcttaggccctcgtggattttttttttcagaaaacttaaacaaaaaaagacttactaagaaatatgtacagctacccctgttttcaggcactatgtttgagaacattttagccattgatgttcacacgtggcatcagcccatgcaagataggtttctgtatttatatattaaaatacaaaaaaaaacttataaaatgtttaaaaaaatgttcaaagcttgggagaaaagctttcttcattagtcaaggtgttttgatatggtattaaaatgtctaataaaagatggcactgcgtgattttattttaatgaagtgttatacaatcaagaaatgggggcaagggcctgccccccactccctcacctacctccttagcattccttcaggctgctactcggggctccaggtgtgtgaattggtcctcagatagtcaggcctgggtggagggagtggcaagtcaggcgtgcctcctacaagcttcctaacctcttaagcatcatggaaccagtcagccctctgtggagtcattgtgctggacctctgaaaagatctgcaggggccaagatgttgcagccaccggaggctgcaaggatgtgggttcttccaggtgtgggcccagcccccctccttccagcctttgctccccatcccacgttccactcgccctgcctgttgttcagtttgcgtctcagtgctgactcacgggcatgcttcattgaggcccaggaagaggccctggtttggggctgtgccagctcagagcccttgaaccagaaccaactgctcaggctcacaaaagttggcaaaatgcgggctgggcaggcagctcggggcagggagcagcagtgcaggcctggcctgtgtccccgtgcccagcgggctcccggagcagcattccagagcctcctgcagagccagcgaaggaaagctctagagggagacgactccaccgcctctctgctctgacccttctcaggcccgcctgatgtgctggaccatccccctgctgccacggcccctggctccgcagtcaccctccatcagatgcttccagaagcacctactctgtgcaagggcattcacaacaggccagtgggcaaacgtgagccagggccagcggagaaacactaaagaagactcggtggttcagagcctgggtctcagcgcgggacccgtctggggtgaagaccttggggctgttgtgagtcggtggcaggaacgtgggctctagactgtgcattcaggctctcctacttggcagaatgatcttggggaaacgacttcatctgaacttcagatatttcacatgtgaagcggggacaaaaccatgcagctcagaggtccctgtgggggctgggggagctgccctgcaggtcttggcacatgcacagcaggctccccatagctttgtcaccacaaagggcactgttctattcacagcacctcctgcttctgcctttctgggatgggagagaaggtgagggagccggcgagccggttctaccctctctgctaagggcctagcacgctttgatgaggttcctggacgtgagaccctcacaaagaccaaccattcctctaatagccatttaacggtactgcagttcatgggaaaatgtcctcattcttaggagatagatgctggattatataggtgaatgccttcaagaaatgtgtaatttaattccaaatagttccccccaaaatacacaaagcaaataaggccaaaatgttcattgttgaatctgcagtggctggtatttcagtgaacagtgtacttgttctttcaacttttctgtatgtttggaatttttcttaataaaagattgtgggaaatggtcatttgctgagcgcctcctagttgccaggcactggagggcgcatcaaagaagagtcctacccaggagggagagcgcagctgctgcaggattctcgcctggaagagtgggtggctggctggctggctggaaggggaggggcgagagggctgtctcggtgatgagcacacgcgtgctggggtggtttggggagagggctgagatttgtcaccagtgagcccttggcacggtctctgctccccaccagggcagcacgggacagaaacgtcacggaggagtagcctccaggctcaggttggtgtaactgctgtcggctggagcccagtattagcacggaggaggggttccaagaactgaagttggactggggcgtctcagcgcagctgcctctgcctaaggcctagcagcctgcctgagcactgacagctgatgggaggaggagaggggcggaggccagggagggcgtggggtgtgacatgcctctttccaaaagggaccgaaggctagaggggcaaggaagatgagacagcactgcaggttcctgggacctgcaggggatggaggactagcttggcttccaggctgccaggacttacctgaccctaggaggaggtttgcccagggctgagtgccgcaggccctgggcagaggagtcgtgagctgcagatgccgcgtggtatctgagcttcatgatttcgggcgccctcctgtgggcttaggggggaacaactgccaaggtctcaagacgggctccggcccaagacaggggcaggccctcgggtggacagaccttgagggcaaaacagctggtggtacgatacatcaccccatgaagaggtgggtgcaaaaatagtctcatctctgtttctagagacgtggcagctgctgaggaacacattcagtgtgttcagaggcccggttcaggcccagttggggagcccatcctgagtgacatgtgccgtgggcaggtcctcagctctgaggcggagtagctgggacagggacctgggttcctttccgaaccctgagcaccaacctcctccccaggctataagaagtcagaggacagccccaaaacaaaggggtcactgaccaaaggacagagaccctggagggggaggggaggaagtgctgcctgctgacttc

SEQ ID NO: 20736 - DNA, 4242 bp, Homo sapiens
atacctaccgtctggaaactaggctttctgcgaggctgcggagcctggcgatttagggactcacggcgtgtgttcacttgtggaagggcagagcgaagcctacctattggagttccatttattggcatcaccctcctcagagaagagagacggggtttcaccgtgttagccaggatggtcttgatctcctgacctcatgatcagcccacctcggcctcccaaagtgctgggactacaggtgtgagccaccacgcccggaatgaagtatttcaggtttcaagtgccccatttgctccaagtctgtggcttctgacgagatggaaatgcactttataatgtgtttgagcaaacctcgcctctcctacaacgatgatgtgctgactaaagacgcgggtgagtgtgtgatctgcctggaggagctgctgcagggggacacgatagccaggctgccctgcctgtgcatctatcacaaaagctgcatagactcgtggtttgaagtgaacagatcttgtccggaacaccctgcggactgacctgcgggcttgcttgctgactcctctcaaagggacagagcgcccctgctccagggaggaggctcaccggaccctggggcagagctgagcttgggacaccagcgggaacagggcaccccttctgcactgacttccagatcatggttctcccttcctccctgaggacaccaaattggatgagagcaagtttgagagaagaatgaatcaactgctatccttcccctcacccctcagcccaggagggaaagggcattttctttttcatctttgaaaggcattgtgggtctgtctttaaagtgtttacaaaaaaaaattatataaaaaaaaagtctagtgtcgactggtgttttccctcgtgatgtttacagcttgctgtttgctgcccagccataacccactcagtgacagacgaacacagctaaggcctcgctgccagccttctgacggcgggcgagcacacggtctcttcccctgccccaactggccctctccaccaccaacttctctactttgggtttgtttggttttttccctctatttttctggctggttttttgctcttttctccccttgagaccctaatatcttgacttcattgccaaaaaacaacccattgagaactttcttcctactgatcccatctcttttcccttctttcctcctggttccggtcagttcagaggatttaacaatcacaagtgtcctgcaaaaatgcctgaacattattcttaggccctcgtggattttttttttcagaaaacttaaacaaaaaaagacttactaagaaatatgtacagctacccctgttttcaggcactatgtttgagaacattttagccattgatgttcacacgtggcatcagcccatgcaagataggtttctgtatttatatattaaaatacaaaaaaaaacttataaaatgtttaaaaaaatgttcaaagcttgggagaaaagctttcttcattagtcaaggtgttttgatatggtattaaaatgtctaataaaagatggcactgcgtgattttattttaatgaagtgttatacaatcaagaaatgggggcaagggcctgccccccactccctcacctacctccttagcattccttcaggctgctactcggggctccaggtgtgtgaattggtcctcagatagtcaggcctgggtggagggagtggcaagtcaggcgtgcctcctacaagcttcctaacctcttaagcatcatggaaccagtcagccctctgtggagtcattgtgctggacctctgaaaagatctgcaggggccaagatgttgcagccaccggaggctgcaaggatgtgggttcttccaggtgtgggcccagcccccctccttccagcctttgctccccatcccacgttccactcgccctgcctgttgttcagtttgcgtctcagtgctgactcacgggcatgcttcattgaggcccaggaagaggccctggtttggggctgtgccagctcagagcccttgaaccagaaccaactgctcaggctcacaaaagttggcaaaatgcgggctgggcaggcagctcggggcagggagcagcagtgcaggcctggcctgtgtccccgtgcccagcgggctcccggagcagcattccagagcctcctgcagagccagcgaaggaaagctctagagggagacgactccaccgcctctctgctctgacccttctcaggcccgcctgatgtgctggaccatccccctgctgccacggcccctggctccgcagtcaccctccatcagatgcttccagaagcacctactctgtgcaagggcattcacaacaggccagtgggcaaacgtgagccagggccagcggagaaacactaaagaagactcggtggttcagagcctgggtctcagcgcgggacccgtctggggtgaagaccttggggctgttgtgagtcggtggcaggaacgtgggctctagactgtgcattcaggctctcctacttggcagaatgatcttggggaaacgacttcatctgaacttcagatatttcacatgtgaagcggggacaaaaccatgcagctcagaggtccctgtgggggctgggggagctgccctgcaggtcttggcacatgcacagcaggctccccatagctttgtcaccacaaagggcactgttctattcacagcacctcctgcttctgcctttctgggatgggagagaaggtgagggagccggcgagccggttctaccctctctgctaagggcctagcacgctttgatgaggttcctggacgtgagaccctcacaaagaccaaccattcctctaatagccatttaacggtactgcagttcatgggaaaatgtcctcattcttaggagatagatgctggattatataggtgaatgccttcaagaaatgtgtaatttaattccaaatagttccccccaaaatacacaaagcaaataaggccaaaatgttcattgttgaatctgcagtggctggtatttcagtgaacagtgtacttgttctttcaacttttctgtatgtttggaatttttcttaataaaagattgtgggaaatggtcatttgctgagcgcctcctagttgccaggcactggagggcgcatcaaagaagagtcctacccaggagggagagcgcagctgctgcaggattctcgcctggaagagtgggtggctggctggctggctggaaggggaggggcgagagggctgtctcggtgatgagcacacgcgtgctggggtggtttggggagagggctgagatttgtcaccagtgagcccttggcacggtctctgctccccaccagggcagcacgggacagaaacgtcacggaggagtagcctccaggctcaggttggtgtaactgctgtcggctggagcccagtattagcacggaggaggggttccaagaactgaagttggactggggcgtctcagcgcagctgcctctgcctaaggcctagcagcctgcctgagcactgacagctgatgggaggaggagaggggcggaggccagggagggcgtggggtgtgacatgcctctttccaaaagggaccgaaggctagaggggcaaggaagatgagacagcactgcaggttcctgggacctgcaggggatggaggactagcttggcttccaggctgccaggacttacctgaccctaggaggaggtttgcccagggctgagtgccgcaggccctgggcagaggagtcgtgagctgcagatgccgcgtggtatctgagcttcatgatttcgggcgccctcctgtgggcttaggggggaacaactgccaaggtctcaagacgggctccggcccaagacaggggcaggccctcgggtggacagaccttgagggcaaaacagctggtggtacgatacatcaccccatgaagaggtgggtgcaaaaatagtctcatctctgtttctagagacgtggcagctgctgaggaacacattcagtgtgttcagaggcccggttcaggcccagttggggagcccatcctgagtgacatgtgccgtgggcaggtcctcagctctgaggcggagtagctgggacagggacctgggttcctttccgaaccctgagcaccaacctcctccccaggctataagaagtcagaggacagccccaaaacaaaggggtcactgaccaaaggacagagaccctggagggggaggggaggaagtgctgcctgctgacttc

SEQ ID NO: 20737 - DNA, 4949 bp, Homo sapiens
ctgccgccctccattgtctccacggcggcgaggagcgccggcgagcgcagcccgggaccgagcggggcggcgcggctggcggggccggcggcggctgaagcgagagcgcggacgcgacgcgaccgcggcttcccgagctgcgcctggccgcccagcgccgcggcccgcccgaggcctggaggggtccgggccgccgtccatggtcgcggcgtcctgaggcgggggacgcgcccggcgcccccggccctcctccgcctcctcccgcggggcgggcggcctcctccggcgcctccccgcgcccgcccgccgctcgccgccgcctccctccctccttccctgcggctcccccggctttcggagcccgggggcggcctgtggcgcgcggagcccgcgccggactgcgcctctttggaccttgaggggaaacatgcgtttgccttggatcgtttgaaattctgagtttgggatccccgcccgcccgcctgcctcttccgccccgcgggttttttccttttttccttttgctttttttccttttctccctccgggtctcctttttgactccctccccctttatgctcgcccagccctccccctgctgctgagaagtgggggagggtctcggcctccaggttcccgccccaccggggcccgggcgagcatggggggcaagcagagcacggcggcccgctcccggggccccttcccgggggtctccaccgatgacagcgccgtgccgccgccgggaggggcgccccatttcgggcactaccggacgggcggcggggccatggggctgcgcagccgctcggtcagctcggtggcaggcatgggcatggaccccagcacggccgggggggtgccctttggcctctacacccccgcctcccggggcaccggcgactccgagagggcgcccggcggcggagggtctgcgtccgactccacctatgcccatggcaatggttaccaggagacgggcggcggtcaccatagagacgggatgctgtacctgggctcccgagcctcgctggcggatgctctacctctgcacatcgcacccaggtggttcagctcgcatagtggtttcaagtgccccatttgctccaagtctgtggcttctgacgagatggaaatgcactttataatgtgtttgagcaaacctcgcctctcctacaacgatgatgtgctgactaaagacgcgggtgagtgtgtgatctgcctggaggagctgctgcagggggacacgatagccaggctgccctgcctgtgcatctatcacaaaagctgcatagactcgtggtttgaagtgaacagatcttgtccggaacaccctgcggactgacctgcgggcttgcttgctgactcctctcaaagatcatggttctcccttcctccctgaggacaccaaattggatgagagcaagtttgagagaagaatgaatcaactgctatccttcccctcacccctcagcccaggagggaaagggcattttctttttcatctttgaaaggcattgtgggtctgtctttaaagtgtttacaaaaaaaaattatataaaaaaaaagtctagtgtcgactggtgttttccctcgtgatgtttacagcttgctgtttgctgcccagccataacccactcagtgacagacgaacacagctaaggcctcgctgccagccttctgacggcgggcgagcacacggtctcttcccctgccccaactggccctctccaccaccaacttctctactttgggtttgtttggttttttccctctatttttctggctggttttttgctcttttctccccttgagaccctaatatcttgacttcattgccaaaaaacaacccattgagaactttcttcctactgatcccatctcttttcccttctttcctcctggttccggtcagttcagaggatttaacaatcacaagtgtcctgcaaaaatgcctgaacattattcttaggccctcgtggattttttttttcagaaaacttaaacaaaaaaagacttactaagaaatatgtacagctacccctgttttcaggcactatgtttgagaacattttagccattgatgttcacacgtggcatcagcccatgcaagataggtttctgtatttatatattaaaatacaaaaaaaaacttataaaatgtttaaaaaaatgttcaaagcttgggagaaaagctttcttcattagtcaaggtgttttgatatggtattaaaatgtctaataaaagatggcactgcgtgattttattttaatgaagtgttatacaatcaagaaatgggggcaagggcctgccccccactccctcacctacctccttagcattccttcaggctgctactcggggctccaggtgtgtgaattggtcctcagatagtcaggcctgggtggagggagtggcaagtcaggcgtgcctcctacaagcttcctaacctcttaagcatcatggaaccagtcagccctctgtggagtcattgtgctggacctctgaaaagatctgcaggggccaagatgttgcagccaccggaggctgcaaggatgtgggttcttccaggtgtgggcccagcccccctccttccagcctttgctccccatcccacgttccactcgccctgcctgttgttcagtttgcgtctcagtgctgactcacgggcatgcttcattgaggcccaggaagaggccctggtttggggctgtgccagctcagagcccttgaaccagaaccaactgctcaggctcacaaaagttggcaaaatgcgggctgggcaggcagctcggggcagggagcagcagtgcaggcctggcctgtgtccccgtgcccagcgggctcccggagcagcattccagagcctcctgcagagccagcgaaggaaagctctagagggagacgactccaccgcctctctgctctgacccttctcaggcccgcctgatgtgctggaccatccccctgctgccacggcccctggctccgcagtcaccctccatcagatgcttccagaagcacctactctgtgcaagggcattcacaacaggccagtgggcaaacgtgagccagggccagcggagaaacactaaagaagactcggtggttcagagcctgggtctcagcgcgggacccgtctggggtgaagaccttggggctgttgtgagtcggtggcaggaacgtgggctctagactgtgcattcaggctctcctacttggcagaatgatcttggggaaacgacttcatctgaacttcagatatttcacatgtgaagcggggacaaaaccatgcagctcagaggtccctgtgggggctgggggagctgccctgcaggtcttggcacatgcacagcaggctccccatagctttgtcaccacaaagggcactgttctattcacagcacctcctgcttctgcctttctgggatgggagagaaggtgagggagccggcgagccggttctaccctctctgctaagggcctagcacgctttgatgaggttcctggacgtgagaccctcacaaagaccaaccattcctctaatagccatttaacggtactgcagttcatgggaaaatgtcctcattcttaggagatagatgctggattatataggtgaatgccttcaagaaatgtgtaatttaattccaaatagttccccccaaaatacacaaagcaaataaggccaaaatgttcattgttgaatctgcagtggctggtatttcagtgaacagtgtacttgttctttcaacttttctgtatgtttggaatttttcttaataaaagattgtgggaaatggtcatttgctgagcgcctcctagttgccaggcactggagggcgcatcaaagaagagtcctacccaggagggagagcgcagctgctgcaggattctcgcctggaagagtgggtggctggctggctggctggaaggggaggggcgagagggctgtctcggtgatgagcacacgcgtgctggggtggtttggggagagggctgagatttgtcaccagtgagcccttggcacggtctctgctccccaccagggcagcacgggacagaaacgtcacggaggagtagcctccaggctcaggttggtgtaactgctgtcggctggagcccagtattagcacggaggaggggttccaagaactgaagttggactggggcgtctcagcgcagctgcctctgcctaaggcctagcagcctgcctgagcactgacagctgatgggaggaggagaggggcggaggccagggagggcgtggggtgtgacatgcctctttccaaaagggaccgaaggctagaggggcaaggaagatgagacagcactgcaggttcctgggacctgcaggggatggaggactagcttggcttccaggctgccaggacttacctgaccctaggaggaggtttgcccagggctgagtgccgcaggccctgggcagaggagtcgtgagctgcagatgccgcgtggtatctgagcttcatgatttcgggcgccctcctgtgggcttaggggggaacaactgccaaggtctcaagacgggctccggcccaagacaggggcaggccctcgggtggacagaccttgagggcaaaacagctggtggtacgatacatcaccccatgaagaggtgggtgcaaaaatagtctcatctctgtttctagagacgtggcagctgctgaggaacacattcagtgtgttcagaggcccggttcaggcccagttggggagcccatcctgagtgacatgtgccgtgggcaggtcctcagctctgaggcggagtagctgggacagggacctgggttcctttccgaaccctgagcaccaacctcctccccaggctataagaagtcagaggacagccccaaaacaaaggggtcactgaccaaaggacagagaccctggagggggaggggaggaagtgctgcctgctgacttc

SEQ ID NO: 20738 - DNA, 4964 bp, Homo sapiens
ctgccgccctccattgtctccacggcggcgaggagcgccggcgagcgcagcccgggaccgagcggggcggcgcggctggcggggccggcggcggctgaagcgagagcgcggacgcgacgcgaccgcggcttcccgagctgcgcctggccgcccagcgccgcggcccgcccgaggcctggaggggtccgggccgccgtccatggtcgcggcgtcctgaggcgggggacgcgcccggcgcccccggccctcctccgcctcctcccgcggggcgggcggcctcctccggcgcctccccgcgcccgcccgccgctcgccgccgcctccctccctccttccctgcggctcccccggctttcggagcccgggggcggcctgtggcgcgcggagcccgcgccggactgcgcctctttggaccttgaggggaaacatgcgtttgccttggatcgtttgaaattctgagtttgggatccccgcccgcccgcctgcctcttccgccccgcgggttttttccttttttccttttgctttttttccttttctccctccgggtctcctttttgactccctccccctttatgctcgcccagccctccccctgctgctgagaagtgggggagggtctcggcctccaggttcccgccccaccggggcccgggcgagcatggggggcaagcagagcacggcggcccgctcccggggccccttcccgggggtctccaccgatgacagcgccgtgccgccgccgggaggggcgccccatttcgggcactaccggacgggcggcggggccatggggctgcgcagccgctcggtcagctcggtggcaggcatgggcatggaccccagcacggccgggggggtgccctttggcctctacacccccgcctcccggggcaccggcgactccgagagggcgcccggcggcggagggtctgcgtccgactccacctatgcccatggcaatggttaccaggagacgggcggcggtcaccatagagacgggatgctgtacctgggctcccgagcctcgctggcggatgctctacctctgcacatcgcacccaggtggttcagctcgcatagtggtttcaagtgccccatttgctccaagtctgtggcttctgacgagatggaaatgcactttataatgtgtttgagcaaacctcgcctctcctacaacgatgatgtgctgactaaagacgcgggtgagtgtgtgatctgcctggaggagctgctgcagggggacacgatagccaggctgccctgcctgtgcatctatcacaaaagggacagagcgcccctgctccagggaggaggctcaccggaccctggggcagagctgagcttgggacaccagcgggaacagggcaccccttctgcactgacttccagatcatggttctcccttcctccctgaggacaccaaattggatgagagcaagtttgagagaagaatgaatcaactgctatccttcccctcacccctcagcccaggagggaaagggcattttctttttcatctttgaaaggcattgtgggtctgtctttaaagtgtttacaaaaaaaaattatataaaaaaaaagtctagtgtcgactggtgttttccctcgtgatgtttacagcttgctgtttgctgcccagccataacccactcagtgacagacgaacacagctaaggcctcgctgccagccttctgacggcgggcgagcacacggtctcttcccctgccccaactggccctctccaccaccaacttctctactttgggtttgtttggttttttccctctatttttctggctggttttttgctcttttctccccttgagaccctaatatcttgacttcattgccaaaaaacaacccattgagaactttcttcctactgatcccatctcttttcccttctttcctcctggttccggtcagttcagaggatttaacaatcacaagtgtcctgcaaaaatgcctgaacattattcttaggccctcgtggattttttttttcagaaaacttaaacaaaaaaagacttactaagaaatatgtacagctacccctgttttcaggcactatgtttgagaacattttagccattgatgttcacacgtggcatcagcccatgcaagataggtttctgtatttatatattaaaatacaaaaaaaaacttataaaatgtttaaaaaaatgttcaaagcttgggagaaaagctttcttcattagtcaaggtgttttgatatggtattaaaatgtctaataaaagatggcactgcgtgattttattttaatgaagtgttatacaatcaagaaatgggggcaagggcctgccccccactccctcacctacctccttagcattccttcaggctgctactcggggctccaggtgtgtgaattggtcctcagatagtcaggcctgggtggagggagtggcaagtcaggcgtgcctcctacaagcttcctaacctcttaagcatcatggaaccagtcagccctctgtggagtcattgtgctggacctctgaaaagatctgcaggggccaagatgttgcagccaccggaggctgcaaggatgtgggttcttccaggtgtgggcccagcccccctccttccagcctttgctccccatcccacgttccactcgccctgcctgttgttcagtttgcgtctcagtgctgactcacgggcatgcttcattgaggcccaggaagaggccctggtttggggctgtgccagctcagagcccttgaaccagaaccaactgctcaggctcacaaaagttggcaaaatgcgggctgggcaggcagctcggggcagggagcagcagtgcaggcctggcctgtgtccccgtgcccagcgggctcccggagcagcattccagagcctcctgcagagccagcgaaggaaagctctagagggagacgactccaccgcctctctgctctgacccttctcaggcccgcctgatgtgctggaccatccccctgctgccacggcccctggctccgcagtcaccctccatcagatgcttccagaagcacctactctgtgcaagggcattcacaacaggccagtgggcaaacgtgagccagggccagcggagaaacactaaagaagactcggtggttcagagcctgggtctcagcgcgggacccgtctggggtgaagaccttggggctgttgtgagtcggtggcaggaacgtgggctctagactgtgcattcaggctctcctacttggcagaatgatcttggggaaacgacttcatctgaacttcagatatttcacatgtgaagcggggacaaaaccatgcagctcagaggtccctgtgggggctgggggagctgccctgcaggtcttggcacatgcacagcaggctccccatagctttgtcaccacaaagggcactgttctattcacagcacctcctgcttctgcctttctgggatgggagagaaggtgagggagccggcgagccggttctaccctctctgctaagggcctagcacgctttgatgaggttcctggacgtgagaccctcacaaagaccaaccattcctctaatagccatttaacggtactgcagttcatgggaaaatgtcctcattcttaggagatagatgctggattatataggtgaatgccttcaagaaatgtgtaatttaattccaaatagttccccccaaaatacacaaagcaaataaggccaaaatgttcattgttgaatctgcagtggctggtatttcagtgaacagtgtacttgttctttcaacttttctgtatgtttggaatttttcttaataaaagattgtgggaaatggtcatttgctgagcgcctcctagttgccaggcactggagggcgcatcaaagaagagtcctacccaggagggagagcgcagctgctgcaggattctcgcctggaagagtgggtggctggctggctggctggaaggggaggggcgagagggctgtctcggtgatgagcacacgcgtgctggggtggtttggggagagggctgagatttgtcaccagtgagcccttggcacggtctctgctccccaccagggcagcacgggacagaaacgtcacggaggagtagcctccaggctcaggttggtgtaactgctgtcggctggagcccagtattagcacggaggaggggttccaagaactgaagttggactggggcgtctcagcgcagctgcctctgcctaaggcctagcagcctgcctgagcactgacagctgatgggaggaggagaggggcggaggccagggagggcgtggggtgtgacatgcctctttccaaaagggaccgaaggctagaggggcaaggaagatgagacagcactgcaggttcctgggacctgcaggggatggaggactagcttggcttccaggctgccaggacttacctgaccctaggaggaggtttgcccagggctgagtgccgcaggccctgggcagaggagtcgtgagctgcagatgccgcgtggtatctgagcttcatgatttcgggcgccctcctgtgggcttaggggggaacaactgccaaggtctcaagacgggctccggcccaagacaggggcaggccctcgggtggacagaccttgagggcaaaacagctggtggtacgatacatcaccccatgaagaggtgggtgcaaaaatagtctcatctctgtttctagagacgtggcagctgctgaggaacacattcagtgtgttcagaggcccggttcaggcccagttggggagcccatcctgagtgacatgtgccgtgggcaggtcctcagctctgaggcggagtagctgggacagggacctgggttcctttccgaaccctgagcaccaacctcctccccaggctataagaagtcagaggacagccccaaaacaaaggggtcactgaccaaaggacagagaccctggagggggaggggaggaagtgctgcctgctgacttc

SEQ ID NO: 20739 - DNA, 4866 bp, Homo sapiens
  misc_feature (126)..(126): n is a, c, g, or t
gttaaaagtagcagggcccagatatgccttgggactccagtgtgagcctcgtccttgtttccagctggaaggaaggcaccctcttgcccaagacaggacactgtgctgcctggggccagcacctgntgaatcctcgagcccagagcttcttcctgacactcaggcctttcaaagcctgactctcagggccactgctgcacagggtgacaaccgggcatggcacgcagtgtggctggtgcagaggaggcttaaggctggcctgggagagattcttggtctagctcccagcacggagccttgcttgtgtcccagggcggcactaaccagaaccagaaaaggaaatctttggccctcggggagaattatgccaattatctgtctggttcctgtctttgaaaatgcccagatgttggtttacaaatcaggaagctgtcttggggcaatctctgttccctctttgatgcagagagcctttctctgtaaacactggagagcagggcttcactgtctggctcccctcccgcctcttgcaggaaggactagatgctgctgatcagctgatcatggctgagccgggtagagcttggggctctcctaagaggtcacccactgggagggagcttcacagctgttcttttgacccaggaaggagctctttcaggactgtggcacccagagccgtggccctcctgccatgccattgttcccacttccctgcccttgggagtcttggagacagctgactagctgccctgaggggtccaccgctctcaccttctcactggtggctgctgccattctcctgggctctgcacagaaagctttggtccttctgaaagccactctgccccttcctgcagcaccagatccccctgagccggtactgctgcctccacctgggccaagactagtcttggtgttcacccttcttcgtgcttcagaaagtagggatatctggggacatgactgtgtttccctggggtcctttcagaagagacttaggaagctcctgctcaggaatctggccctctgaaagagccccttcaaagcagcctgggcagcaggtaacgtggtttcccttgcggccccctcctcccagctgcatagactcgtggtttgaagtgaacagatcttgtccggaacaccctgcggactgacctgcgggcttgcttgctgactcctctcaaagggacagagcgcccctgctccagggaggaggctcaccggaccctggggcagagctgagcttgggacaccagcgggaacagggcaccccttctgcactgacttccagatcatggttctcccttcctccctgaggacaccaaattggatgagagcaagtttgagagaagaatgaatcaactgctatccttcccctcacccctcagcccaggagggaaagggcattttctttttcatctttgaaaggcattgtgggtctgtctttaaagtgtttacaaaaaaaaattatataaaaaaaaagtctagtgtcgactggtgttttccctcgtgatgtttacagcttgctgtttgctgcccagccataacccactcagtgacagacgaacacagctaaggcctcgctgccagccttctgacggcgggcgagcacacggtctcttcccctgccccaactggccctctccaccaccaacttctctactttgggtttgtttggttttttccctctatttttctggctggttttttgctcttttctccccttgagaccctaatatcttgacttcattgccaaaaaacaacccattgagaactttcttcctactgatcccatctcttttcccttctttcctcctggttccggtcagttcagaggatttaacaatcacaagtgtcctgcaaaaatgcctgaacattattcttaggccctcgtggattttttttttcagaaaacttaaacaaaaaaagacttactaagaaatatgtacagctacccctgttttcaggcactatgtttgagaacattttagccattgatgttcacacgtggcatcagcccatgcaagataggtttctgtatttatatattaaaatacaaaaaaaaacttataaaatgtttaaaaaaatgttcaaagcttgggagaaaagctttcttcattagtcaaggtgttttgatatggtattaaaatgtctaataaaagatggcactgcgtgattttattttaatgaagtgttatacaatcaagaaatgggggcaagggcctgccccccactccctcacctacctccttagcattccttcaggctgctactcggggctccaggtgtgtgaattggtcctcagatagtcaggcctgggtggagggagtggcaagtcaggcgtgcctcctacaagcttcctaacctcttaagcatcatggaaccagtcagccctctgtggagtcattgtgctggacctctgaaaagatctgcaggggccaagatgttgcagccaccggaggctgcaaggatgtgggttcttccaggtgtgggcccagcccccctccttccagcctttgctccccatcccacgttccactcgccctgcctgttgttcagtttgcgtctcagtgctgactcacgggcatgcttcattgaggcccaggaagaggccctggtttggggctgtgccagctcagagcccttgaaccagaaccaactgctcaggctcacaaaagttggcaaaatgcgggctgggcaggcagctcggggcagggagcagcagtgcaggcctggcctgtgtccccgtgcccagcgggctcccggagcagcattccagagcctcctgcagagccagcgaaggaaagctctagagggagacgactccaccgcctctctgctctgacccttctcaggcccgcctgatgtgctggaccatccccctgctgccacggcccctggctccgcagtcaccctccatcagatgcttccagaagcacctactctgtgcaagggcattcacaacaggccagtgggcaaacgtgagccagggccagcggagaaacactaaagaagactcggtggttcagagcctgggtctcagcgcgggacccgtctggggtgaagaccttggggctgttgtgagtcggtggcaggaacgtgggctctagactgtgcattcaggctctcctacttggcagaatgatcttggggaaacgacttcatctgaacttcagatatttcacatgtgaagcggggacaaaaccatgcagctcagaggtccctgtgggggctgggggagctgccctgcaggtcttggcacatgcacagcaggctccccatagctttgtcaccacaaagggcactgttctattcacagcacctcctgcttctgcctttctgggatgggagagaaggtgagggagccggcgagccggttctaccctctctgctaagggcctagcacgctttgatgaggttcctggacgtgagaccctcacaaagaccaaccattcctctaatagccatttaacggtactgcagttcatgggaaaatgtcctcattcttaggagatagatgctggattatataggtgaatgccttcaagaaatgtgtaatttaattccaaatagttccccccaaaatacacaaagcaaataaggccaaaatgttcattgttgaatctgcagtggctggtatttcagtgaacagtgtacttgttctttcaacttttctgtatgtttggaatttttcttaataaaagattgtgggaaatggtcatttgctgagcgcctcctagttgccaggcactggagggcgcatcaaagaagagtcctacccaggagggagagcgcagctgctgcaggattctcgcctggaagagtgggtggctggctggctggctggaaggggaggggcgagagggctgtctcggtgatgagcacacgcgtgctggggtggtttggggagagggctgagatttgtcaccagtgagcccttggcacggtctctgctccccaccagggcagcacgggacagaaacgtcacggaggagtagcctccaggctcaggttggtgtaactgctgtcggctggagcccagtattagcacggaggaggggttccaagaactgaagttggactggggcgtctcagcgcagctgcctctgcctaaggcctagcagcctgcctgagcactgacagctgatgggaggaggagaggggcggaggccagggagggcgtggggtgtgacatgcctctttccaaaagggaccgaaggctagaggggcaaggaagatgagacagcactgcaggttcctgggacctgcaggggatggaggactagcttggcttccaggctgccaggacttacctgaccctaggaggaggtttgcccagggctgagtgccgcaggccctgggcagaggagtcgtgagctgcagatgccgcgtggtatctgagcttcatgatttcgggcgccctcctgtgggcttaggggggaacaactgccaaggtctcaagacgggctccggcccaagacaggggcaggccctcgggtggacagaccttgagggcaaaacagctggtggtacgatacatcaccccatgaagaggtgggtgcaaaaatagtctcatctctgtttctagagacgtggcagctgctgaggaacacattcagtgtgttcagaggcccggttcaggcccagttggggagcccatcctgagtgacatgtgccgtgggcaggtcctcagctctgaggcggagtagctgggacagggacctgggttcctttccgaaccctgagcaccaacctcctccccaggctataagaagtcagaggacagccccaaaacaaaggggtcactgaccaaaggacagagaccctggagggggaggggaggaagtgctgcctgctgacttc

SEQ ID NO: 20740 - DNA, 3881 bp, Homo sapiens
cggcaggagggcactttataatgtgtttgagcaaacctcgcacccaggtggttcagctcgcatagtggtttcaagtgccccatttgctccaagtctgtggcttctgacgagatgctgcatagactcgtggtttgaagtgaacagatcttgtccggaacaccctgcggactgacctgcgggcttgcttgctgactcctctcaaagggacagagcgcccctgctccagggaggaggctcaccggaccctggggcagagctgagcttgggacaccagcgggaacagggcaccccttctgcactgacttccagatcatggttctcccttcctccctgaggacaccaaattggatgagagcaagtttgagagaagaatgaatcaactgctatccttcccctcacccctcagcccaggagggaaagggcattttctttttcatctttgaaaggcattgtgggtctgtctttaaagtgtttacaaaaaaaaattatataaaaaaaaagtctagtgtcgactggtgttttccctcgtgatgtttacagcttgctgtttgctgcccagccataacccactcagtgacagacgaacacagctaaggcctcgctgccagccttctgacggcgggcgagcacacggtctcttcccctgccccaactggccctctccaccaccaacttctctactttgggtttgtttggttttttccctctatttttctggctggttttttgctcttttctccccttgagaccctaatatcttgacttcattgccaaaaaacaacccattgagaactttcttcctactgatcccatctcttttcccttctttcctcctggttccggtcagttcagaggatttaacaatcacaagtgtcctgcaaaaatgcctgaacattattcttaggccctcgtggattttttttttcagaaaacttaaacaaaaaaagacttactaagaaatatgtacagctacccctgttttcaggcactatgtttgagaacattttagccattgatgttcacacgtggcatcagcccatgcaagataggtttctgtatttatatattaaaatacaaaaaaaaacttataaaatgtttaaaaaaatgttcaaagcttgggagaaaagctttcttcattagtcaaggtgttttgatatggtattaaaatgtctaataaaagatggcactgcgtgattttattttaatgaagtgttatacaatcaagaaatgggggcaagggcctgccccccactccctcacctacctccttagcattccttcaggctgctactcggggctccaggtgtgtgaattggtcctcagatagtcaggcctgggtggagggagtggcaagtcaggcgtgcctcctacaagcttcctaacctcttaagcatcatggaaccagtcagccctctgtggagtcattgtgctggacctctgaaaagatctgcaggggccaagatgttgcagccaccggaggctgcaaggatgtgggttcttccaggtgtgggcccagcccccctccttccagcctttgctccccatcccacgttccactcgccctgcctgttgttcagtttgcgtctcagtgctgactcacgggcatgcttcattgaggcccaggaagaggccctggtttggggctgtgccagctcagagcccttgaaccagaaccaactgctcaggctcacaaaagttggcaaaatgcgggctgggcaggcagctcggggcagggagcagcagtgcaggcctggcctgtgtccccgtgcccagcgggctcccggagcagcattccagagcctcctgcagagccagcgaaggaaagctctagagggagacgactccaccgcctctctgctctgacccttctcaggcccgcctgatgtgctggaccatccccctgctgccacggcccctggctccgcagtcaccctccatcagatgcttccagaagcacctactctgtgcaagggcattcacaacaggccagtgggcaaacgtgagccagggccagcggagaaacactaaagaagactcggtggttcagagcctgggtctcagcgcgggacccgtctggggtgaagaccttggggctgttgtgagtcggtggcaggaacgtgggctctagactgtgcattcaggctctcctacttggcagaatgatcttggggaaacgacttcatctgaacttcagatatttcacatgtgaagcggggacaaaaccatgcagctcagaggtccctgtgggggctgggggagctgccctgcaggtcttggcacatgcacagcaggctccccatagctttgtcaccacaaagggcactgttctattcacagcacctcctgcttctgcctttctgggatgggagagaaggtgagggagccggcgagccggttctaccctctctgctaagggcctagcacgctttgatgaggttcctggacgtgagaccctcacaaagaccaaccattcctctaatagccatttaacggtactgcagttcatgggaaaatgtcctcattcttaggagatagatgctggattatataggtgaatgccttcaagaaatgtgtaatttaattccaaatagttccccccaaaatacacaaagcaaataaggccaaaatgttcattgttgaatctgcagtggctggtatttcagtgaacagtgtacttgttctttcaacttttctgtatgtttggaatttttcttaataaaagattgtgggaaatggtcatttgctgagcgcctcctagttgccaggcactggagggcgcatcaaagaagagtcctacccaggagggagagcgcagctgctgcaggattctcgcctggaagagtgggtggctggctggctggctggaaggggaggggcgagagggctgtctcggtgatgagcacacgcgtgctggggtggtttggggagagggctgagatttgtcaccagtgagcccttggcacggtctctgctccccaccagggcagcacgggacagaaacgtcacggaggagtagcctccaggctcaggttggtgtaactgctgtcggctggagcccagtattagcacggaggaggggttccaagaactgaagttggactggggcgtctcagcgcagctgcctctgcctaaggcctagcagcctgcctgagcactgacagctgatgggaggaggagaggggcggaggccagggagggcgtggggtgtgacatgcctctttccaaaagggaccgaaggctagaggggcaaggaagatgagacagcactgcaggttcctgggacctgcaggggatggaggactagcttggcttccaggctgccaggacttacctgaccctaggaggaggtttgcccagggctgagtgccgcaggccctgggcagaggagtcgtgagctgcagatgccgcgtggtatctgagcttcatgatttcgggcgccctcctgtgggcttaggggggaacaactgccaaggtctcaagacgggctccggcccaagacaggggcaggccctcgggtggacagaccttgagggcaaaacagctggtggtacgatacatcaccccatgaagaggtgggtgcaaaaatagtctcatctctgtttctagagacgtggcagctgctgaggaacacattcagtgtgttcagaggcccggttcaggcccagttggggagcccatcctgagtgacatgtgccgtgggcaggtcctcagctctgaggcggagtagctgggacagggacctgggttcctttccgaaccctgagcaccaacctcctccccaggctataagaagtcagaggacagccccaaaacaaaggggtcactgaccaaaggacagagaccctggagggggaggggaggaagtgctgcctgctgacttc

SEQ ID NO: 20741 - DNA, 3442 bp, Homo sapiens
gtcgcaccggttgtgctggtcccaggtctggtgaggagtgtaaaaattatataaaaaaaaagtctagtgtcgactggtgttttccctcgtgatgtttacagcttgctgtttgctgcccagccataacccactcagtgacagacgaacacagctaaggcctcgctgccagccttctgacggcgggcgagcacacggtctcttcccctgccccaactggccctctccaccaccaacttctctactttgggtttgtttggttttttccctctatttttctggctggttttttgctcttttctccccttgagaccctaatatcttgacttcattgccaaaaaacaacccattgagaactttcttcctactgatcccatctcttttcccttctttcctcctggttccggtcagttcagaggatttaacaatcacaagtgtcctgcaaaaatgcctgaacattattcttaggccctcgtggattttttttttcagaaaacttaaacaaaaaaagacttactaagaaatatgtacagctacccctgttttcaggcactatgtttgagaacattttagccattgatgttcacacgtggcatcagcccatgcaagataggtttctgtatttatatattaaaatacaaaaaaaaacttataaaatgtttaaaaaaatgttcaaagcttgggagaaaagctttcttcattagtcaaggtgttttgatatggtattaaaatgtctaataaaagatggcactgcgtgattttattttaatgaagtgttatacaatcaagaaatgggggcaagggcctgccccccactccctcacctacctccttagcattccttcaggctgctactcggggctccaggtgtgtgaattggtcctcagatagtcaggcctgggtggagggagtggcaagtcaggcgtgcctcctacaagcttcctaacctcttaagcatcatggaaccagtcagccctctgtggagtcattgtgctggacctctgaaaagatctgcaggggccaagatgttgcagccaccggaggctgcaaggatgtgggttcttccaggtgtgggcccagcccccctccttccagcctttgctccccatcccacgttccactcgccctgcctgttgttcagtttgcgtctcagtgctgactcacgggcatgcttcattgaggcccaggaagaggccctggtttggggctgtgccagctcagagcccttgaaccagaaccaactgctcaggctcacaaaagttggcaaaatgcgggctgggcaggcagctcggggcagggagcagcagtgcaggcctggcctgtgtccccgtgcccagcgggctcccggagcagcattccagagcctcctgcagagccagcgaaggaaagctctagagggagacgactccaccgcctctctgctctgacccttctcaggcccgcctgatgtgctggaccatccccctgctgccacggcccctggctccgcagtcaccctccatcagatgcttccagaagcacctactctgtgcaagggcattcacaacaggccagtgggcaaacgtgagccagggccagcggagaaacactaaagaagactcggtggttcagagcctgggtctcagcgcgggacccgtctggggtgaagaccttggggctgttgtgagtcggtggcaggaacgtgggctctagactgtgcattcaggctctcctacttggcagaatgatcttggggaaacgacttcatctgaacttcagatatttcacatgtgaagcggggacaaaaccatgcagctcagaggtccctgtgggggctgggggagctgccctgcaggtcttggcacatgcacagcaggctccccatagctttgtcaccacaaagggcactgttctattcacagcacctcctgcttctgcctttctgggatgggagagaaggtgagggagccggcgagccggttctaccctctctgctaagggcctagcacgctttgatgaggttcctggacgtgagaccctcacaaagaccaaccattcctctaatagccatttaacggtactgcagttcatgggaaaatgtcctcattcttaggagatagatgctggattatataggtgaatgccttcaagaaatgtgtaatttaattccaaatagttccccccaaaatacacaaagcaaataaggccaaaatgttcattgttgaatctgcagtggctggtatttcagtgaacagtgtacttgttctttcaacttttctgtatgtttggaatttttcttaataaaagattgtgggaaatggtcatttgctgagcgcctcctagttgccaggcactggagggcgcatcaaagaagagtcctacccaggagggagagcgcagctgctgcaggattctcgcctggaagagtgggtggctggctggctggctggaaggggaggggcgagagggctgtctcggtgatgagcacacgcgtgctggggtggtttggggagagggctgagatttgtcaccagtgagcccttggcacggtctctgctccccaccagggcagcacgggacagaaacgtcacggaggagtagcctccaggctcaggttggtgtaactgctgtcggctggagcccagtattagcacggaggaggggttccaagaactgaagttggactggggcgtctcagcgcagctgcctctgcctaaggcctagcagcctgcctgagcactgacagctgatgggaggaggagaggggcggaggccagggagggcgtggggtgtgacatgcctctttccaaaagggaccgaaggctagaggggcaaggaagatgagacagcactgcaggttcctgggacctgcaggggatggaggactagcttggcttccaggctgccaggacttacctgaccctaggaggaggtttgcccagggctgagtgccgcaggccctgggcagaggagtcgtgagctgcagatgccgcgtggtatctgagcttcatgatttcgggcgccctcctgtgggcttaggggggaacaactgccaaggtctcaagacgggctccggcccaagacaggggcaggccctcgggtggacagaccttgagggcaaaacagctggtggtacgatacatcaccccatgaagaggtgggtgcaaaaatagtctcatctctgtttctagagacgtggcagctgctgaggaacacattcagtgtgttcagaggcccggttcaggcccagttggggagcccatcctgagtgacatgtgccgtgggcaggtcctcagctctgaggcggagtagctgggacagggacctgggttcctttccgaaccctgagcaccaacctcctccccaggctataagaagtcagaggacagccccaaaacaaaggggtcactgaccaaaggacagagaccctggagggggaggggaggaagtgctgcctgctgacttc

SEQ ID NO: 20742 - DNA, 1699 bp, Homo sapiens
ctgccgccctccattgtctccacggcggcgaggagcgccggcgagcgcagcccgggaccgagcggggcggcgcggctggcggggccggcggcggctgaagcgagagcgcggacgcgacgcgaccgcggcttcccgagctgcgcctggccgcccagcgccgcggcccgcccgaggcctggaggggtccgggccgccgtccatggtcgcggcgtcctgaggcgggggacgcgcccggcgcccccggccctcctccgcctcctcccgcggggcgggcggcctcctccggcgcctccccgcgcccgcccgccgctcgccgccgcctccctccctccttccctgcggctcccccggctttcggagcccgggggcggcctgtggcgcgcggagcccgcgccggactgcgcctctttggaccttgaggggaaacatgcgtttgccttggatcgtttgaaattctgagtttgggatccccgcccgcccgcctgcctcttccgccccgcgggttttttccttttttccttttgctttttttccttttctccctccgggtctcctttttgactccctccccctttatgctcgcccagccctccccctgctgctgagaagtgggggagggtctcggcctccaggttcccgccccaccggggcccgggcgagcatggggggcaagcagagcacggcggcccgctcccggggccccttcccgggggtctccaccgatgacagcgccgtgccgccgccgggaggggcgccccatttcgggcactaccggacgggcggcggggccatggggctgcgcagccgctcggtcagctcggtggcaggcatgggcatggaccccagcacggccgggggggtgccctttggcctctacacccccgcctcccggggcaccggcgactccgagagggcgcccggcggcggagggtctgcgtccgactccacctatgcccatggcaatggttaccaggagacgggcggcggtcaccatagagacgggatgctgtacctgggctcccgagcctcgctggcggatgctctacctctgcacatcgcacccaggtggttcagctcgcatagtggtttcaagtgccccatttgctccaagtctgtggcttctgacgagatggaaatgcactttataatgtgtttgagcaaacctcgcctctcctacaacgatgatgtgctgactaaagacgcgggtgagtgtgtgatctgcctggaggagctgctgcagggggacacgatagccaggctgccctgcctgtgcatctatcacaaaagctgcatagactcgtggtttgaagtgaacagatcttgtccggaacaccctgcggactgacctgcgggcttgcttgctgactcctctcaaagggacagagcgcccctgctccagggaggaggctcaccggaccctggggcagagctgagcttgggacaccagcgggaacagggcaccccttctgcactgacttccagatcatggttctcccttcctccctgaggacaccaaattggatgagagcaagtttgagagaagaatgaatcaactgctatccttcccctcacccctcagcccaggagggaaagggcattttctttttcatctttgaaaggcattgtgggtctgtctttaaagtgtttacaaaattttacaacaaaaaaagaaaaacaaaacaccccgggataagcaaag

SEQ ID NO: 20743 - DNA, 835 bp, Homo sapiens
attctagtattcataaaattgctgaggttttattttataatttctattcacgtattaattaacaactccctgttgctgtttgaaggctcattagccattttaaaataagtcccaccgcagcttgcaccatggcagagtttacatgaaacttagagtcagtatgatgccaaagtctactgagtctgagttcttacctgtttcacctcaaagtgattttgagtatacctcatagcctgtgtctcaacttagagtatctgaatcattacctgttggtttactgacacttaaagcctgtggtacttgaggagtagagtaataggcaaagagaaatttaattttactatgtagataaagaatggggcaagctgtagtaattcctttatttttaatcgaggatttaagttatataagtacacattaagattctgtttttattgctcttaaaatgattattataaatactcattaatatcgttgctttagagtgccaaaggaattcttaattttagcggtaaaaagaaaatcatgttatgaacatttaaaatattcatacctgtaggtttctattggaagtaaaaaataaaatattcatacctggattttttactcagatacactaatgaattggaacattctggaatgggcatgggcatttttacatgcctagttttaaaaaccattcctgattaagaactattgccttaaagaaaatcaggccgggcatggtgtctcatgcctgtaattctagcattttaagaggccaaggcgggcggatcacctgaggtgaggagttcaagaccagcctggccaacacggtgaaaccccgtccctacta

SEQ ID NO: 20744 - DNA, 348 bp, Homo sapiens
acttttataattataatatgttctcttattcatcattttggcaagatggaaaggtttatattgttctgctttgcctctttgctatctctttttaagatatttgagaaaatgaaataatgggaactataaataactctctgacagtcttgctggtttgatgtgactttctatctcagctaccacataaaagatatttattgatggtaaaagaaatgtttctgaaactttttgttcataaaatgatatataacaaaattacattataatatgtgtactgttacaaggagtatgttttgctttgcaggggtataatttagactgctttttattgtgtatagggggaggttg

SEQ ID NO: 20745 - DNA, 322 bp, Homo sapiens
attagggttcaaaaatagacttaaaaatttgagaaaataatgcatagaattaaggttcataagtggatagttaatttttttaaaaaaattcaccaatatcttgcttatttatttacacattggtctcctttatagtcccaataattaagtattatatagtagctctatataatacttaatttctgattgtctatttcataaacaatttgactcaaatgatttaagggagaaatttctacaggatatttaagtaggagtcaatatttaacatttgcctatttttttatatcagattgtgttgtcttttggcacaaagttgtag

SEQ ID NO: 20746 - DNA, 159 bp, Homo sapiens
tcttcgcggattagctggagtgccagctcctttgtaaagtgcgtcttgcttgggaacgtactcctcctttgcccggcacgtcacagatatgaaattaatgttggctttgcttagggccctctgctgtgactgtgcaggtctcttccagggcctcctcag

SEQ ID NO: 20747 - DNA, 393 bp, Homo sapiens
gtcacactgggggttaggacttcaacatacagattttgaggggcatgcaatttagtccatattatggaataaggaaagttctttttagaatattaaatacagacctgtaggtatgttacattgtggaggttgagtatgatatagtggtcttccttatcttctggatagataacttaagcccctcactactggcagcaaatagtcaatgctactcctttctcttggccagtctactctcctacctttttttttttttaaacatttgttttggaggctgaatgcattggctcatgcctataatctcagcactttgggggtccaggtgggaggattggttgagctcaaggagtttgagaccagcttgggcaacagagggagaccctgtctttacaa

SEQ ID NO: 20748 - DNA, 592 bp, Homo sapiens
agttgtccaatgcatcaatttattcaactaatgtttaaccagtacctacaggcaatctactctgctaattactggaaatgcaaagacagatacaatgtctctaaaatttggaatgtgtctgtgtaagaatttaaagcataaagaaatgcccctcaatataatgatataacttgttgaattaaaatagttcagctgtcagttattgaaaactagtaaaaagacttaactttcaccacaatctttagtaaaacttagaatgagacttacttctacttatagtcttggtttaaaaagcatagcacactacatcaagtaggccctaggcattcatatttgtttgcagaataaatatgctatggtccatttctcagcagtctaactctgtaaggcagttcttatattttaagtgtctaaaacacgtgtcttcttgatacaggaggaaatactgaattattcataacacagatgaaagtatttttcatctacttatatccacccttcttaaaaagcatgccttcaacccccatttgcatagctcctctgctaacttttagccattccctcttatgaatgtactgccctctttgtctga

SEQ ID NO: 20749 - DNA, 249 bp, Homo sapiens
gaaacatcagacttaagttgaactttagactaagtggaccttacagacatttatagaatattctactcaacaaactgcagaatatacattcttctcatcatcacatagaactacctatctcccagatagaccatatggtaggtcacaacaagtcccaacaaattttaaaaaatcaaaatcataccaagtatatctcctcagaccacagtggaataaaataagaaatcagtactaagaggaactttacaa

SEQ ID NO: 20750 - DNA, 284 bp, Homo sapiens
gctactatactaaattctcggccgtcgaccagagagctaagtgtaagagtcaaaactataaaacacttagaaataggagtaaatcagctgggcgtggtggctcacgcctcaacactttgggaggccaaggctagtggatcacttgaggtcaggagtttgagaccaccctggccatcaaggtgaaaccccatctctactaaaaatacaaaaattagctgggcatggtggtgcgcccctgtaatcccacctgctagggaggctgagggaggagaatgacttgaacc

SEQ ID NO: 20751 - DNA, 7276 bp, Homo sapiens
gaggaccgagcgcccaaggctgggagagacgccggcgctgagcttcccagcgccgcctcacctcgcttttcgaactccgcgacccgagcgcaaggcttaagcaggtaaagcagtcactgtgaagaaaataacattttaagaaacttttctgtcacaattgatagaggaaaagccagtagagaagtacatcttcttgtgtgtgtgtctcatcgtgccactttttgtaactcagcttagtaatgaagccaccattatgtcctcagtcagtgaagtaaatgtggatataaaagatttcctaatgagcattaatttggagcagtatctcttacatttccatgagtctggttttactactgtgaaggactgtgcagcaataaatgacagcctgctgcagaaaattggaatatcacctacaggtcaccgtaggaggatacttaaacagttacagataatcttgtcaaaaatgcaagatattccaatatatgcaaatgttcataaaactaagaagaatgatgacccttcaaaggattaccatgttccatcttctgatcagaatatctgcatagaactttccaattctggtagtgttcagacatctagcccaccgcagttggagactgttagaaaaaatcttgaagacagtgatgcaagtgtggaaagaagccagtatcctcaatcagatgataagctgtctcctcctaaacgcgacttccccactgcagaggaaccacacctgaatttgggttctttgaatgattctttatttggtagtgacaatattaaaatagaatcattgattacaaagaagactgtggatcacacagttgaagaacaacaaacagaaaaagttaaattgatcacagaaaatctcagtaagctccctaatgcagactctgaatgcctttcttttgttggctgttcaacatcaggaacaaattctggaaatggaacaaatggtttattagaaggatcaccaccatccccattctttaagtttcaaggagaaatgattgtaaatgacttgtatgttccatcatcaccaatcctagcacctgtgagaagtcgtagcaagttggtttcaagaccatctcgatcttttctgctaagacatcgacctgtaccagagattccagggtcaacaaaaggagtttctgggagctatttccgtgaaagaagaaatgttgctacctcaactgaaaaatctgtggcatggcaaaattcaaatgaggagaattcatcttccatctttccttatggagagacctttctcttccagagactagaaaattccaagaagcgatctataaagaatgaatttttgacccagggagaagcactcaaaggggaagcagctactgcaacaaactcttttatcatcaaatcaagcatatacgataacagaaaggagaaaataagcgaggacaaggtggaagatatttggatacctcgagaggacaaaaacaattttttgatagacactgcttctgaatcagaatactcaacagtagaagaatgctttcagagtttaagaagaaaaaattcaaaggcatctaaatctaggactcaaaaagccttgattttggactccgttaataggcacagttatccgttaagctcaacaagtggaaatgctgattcatcagccgtttcttcacaggcaatatctccctatgcctgcttttatggagcatctgcaaagaaggttaaatcaggatggctggataaactctctcctcaaggaaaacgcatgtttcaaaagagatgggtgaaatttgatggccttagcatttcttactacaataatgagaaggagatgtattcgaaaggaataattcccctttctgctatatcaacagtacgagttcaaggagacaacaaatttgaagttgttacaacacaaagaacttttgtttttagagtagaaaaagaagaggagagaaatgactggatcagcatactattaaatgcactgaaatcacaatcccttacctcgcagtctcaagctgttgttacacctgagaaatgtggatatcttgaattgagaggctataaggcaaaaatttttactgtgttaagtggaaacagtgtgtggctttgcaaaaacgaacaggattttaagagtggacttggtattaccataattcctatgaatgtagcaaatgtaaagcaagtggaccgaactgtgaaacaatcttttgaaataatcactccctacaggagtttcagctttacagccgagactgaaaaggagaaacaagactggattgaagctgtgcagcaatcaatagcagaaactctctctgattatgaagtagctgagaagatttggttcaatgaatccaacaggagctgtgcagattgtaaagccccagatcctgactgggcatccatcaatctctgtgttgtcatctgtaagaagtgtgcaggacagcatagatctttaggaccaaaagattccaaggttagaagtctaaaaatggatgctagcatttggagcaatgaactcatcgagctttttattgtcattggaaacaaaagagcaaatgacttttgggctggtaatcttcaaaaggatgaagaattacatatggactcaccagtagaaaagagaaaaaactttattactcagaaatataaagaaggaaaattcagaaaaactcttttggcatctctcaccaaagaagaattaaataaggctctatgtgctgctgtagtgaaaccggatgttctagaaacaatggctttgctgttcagtggagcagatgtcatgtgtgccaccggagaccccgtgcatagcaccccctatctgctagccaagaaagctgggcaaagtctgcaaatggaatttctctaccataacaaattctcagatttccctcaacatgatattcattccgagggtgtattaagtcaagagtcttcccagtccacattcctctgtgactttttatatcaagctccttctgctgcttctaaactctcttcagagaaaaaactgcttgaagagacaaataaaaaatggtgtgttttggaaggaggcttcttgagttactatgaaaatgataagtctaccacacctaatggcaccattaatatcaatgaagttatctgcctggctatacacaaagaggacttctatttaaatactgggcccatctttatctttgagatctacttaccctccgaacgtgtgtttttatttggagctgaaacatctcaagctcaaagaaaatggacagaggcaatagccaagcattttgttcccttatttgctgaaaacttaacagaagctgactatgatttgattggtcaactcttctacaaagactgccatgccctggatcagtggagaaaaggctggtttgctatggacaaatccagcttgcatttttgccttcaaatgcaagaagttcagggagatagaatgcacttaagaagactgcaagagctaacaatcagcacaatggttcaaaatggggaaaaactggatgttttactcttggtagaaaaagggagaacattatacatccatgggcataccaagttggatttcacagtctggcatactgcaattgaaaaagcagcaggtacagatggtaatgctttacaagatcagcagctcagcaaaaatgacgttcccattatagtgaacagctgtatagcatttgttacacagtatggtttaggatgcaaatatatctatcaaaagaatggtgatcctttgcatataagtgaactcctggagagtttcaaaaaggatgcaagaagctttaaattgagggctggaaaacatcagcttgaagatgtgacggctgtgttgaaaagttttctctctgacattgatgatgcactgcttactaaggagctctacccatattggatctctgctttagatacgcaagatgacaaggaaagaattaaaaaatatggagcatttatacgttctcttccaggggtcaaccgagcaacactagcagctatcattgaacacctgtatagggttcagaaatgctcagaaatcaatcacatgaatgcccataatttggccttggtcttttcatcctgtttgtttcaaacgaagggacaaactagtgaagaagtgaatgtaattgaggacctaattaataattatgtagaaatatttgaggttaaagaagatcaagtcaaacaaatggacatagaaaatagctttattaccaagtggaaagacacccaagtttcccaggctggagatttgttaattgaagtatatgtagaaaggaaggaacccgactgtagtattataattcggatatctcctgtgatggaagcagaagaattaactaatgatatattagcgataaaaaatattattcctacaaaaggtgatatttgggccacatttgaagtcattgaaaatgaagagctagagcgtcctcttcactacaaggaaaatgtactggagcaggtgcttcggtggagttcattagctgaacctggctctgcttacctggtggtgaagagattcttaaccgctgacacaattaaacactgcagtgaccggagtacactgggaagcatcaaagaaggaatcttgaaaatcaaagaagaaccatccaaaatactatctggaaataagtttcaagaccggtattttgttttacgagatgggtttctctttctttacaaggatgtgaagagtagtaaacatgacaagatgttttctctcagttccatgaagttttatcgtggagtgaaaaagaaaatgaagcctccaacaagctggggattgaccgcatattctgagaaacatcactggcacctgtgttgtgatagttcacaaactcagacggagtggatgaccagtatctttattgcccagcatgaatatgatatatggccaccagctggaaaggaacgaaaacgttcaataaccaaaaatcccaaaattggaggtttgcctctgattcctatacagcatgaggggaatgcaaccttggcccggaaaaatattgagagtgcaagagcagaacttgaaaggctgcggctcagtgaaaagtgtgataaagagtccgtggactctagcttaaaggagagagcttccatggtggcccactgcctggagcacaaggacgataaacttcgaaatcgaccccgaaaacatcggagtttcaactgcctggaggacacagagcctgaagccccacttgggcaaccaaaaggccataaaggcctaaagacattgaggaagactgaggacaggaatagcaaagctactttggactctgatcataagttaccatcaagggtaattgaagaacttaatgtggttctacaacggtcaagaacccttccaaaagaattacaggatgagcagattttgaagtaggaaataaaatgaattgctccccagattatttttttaatattgtatgcaatctttatgtgtaactccaaaactgaactataagataattcataagaatttgcctattgataggcaaatttgtctatgcttaggcatttaaggagcatttaaaaatatgtatatatgtgactgaatgtaagattaactttattttggtctgaacaaaccttgtaaagttccattgtattaacgtgtgtaagaagacattgggttacttaggtggtcagtccttttaaagtagttgtctgttaagtggtataatttatgagcagaaatctcaaactgtactgtattgtataaaatgctgtgtttaaatgaagcctaagaaactatctgtaacatattttgcactttgagaaaccttgtatattaaattaccatatgtttttaggtttacagaagttctaccttagggaaaagaaagggaagtaaattgaaaaaggggggagaatttattgtagtggctgcctaaaaaccactggagtttttaaaagaagcaaggagttaaatgtcctgcaaaacaaggaagtgagctaagattcattctagttcactaatgaccagaacttgtcaatgagaaaccacttgttaagaaaaagtccagtgtttatttctcaagagtaatattcggccaacagatgtaaataatagcactagccactcttattaatatttatagtgttagaaaaccagccacattacagattcactacgtttgagctcattgttggtggctgctaagaggaaacttacactgcattggagaggttgtgtacacaggacctggcctggatgctgattgcactgtcattgtatgcaagcattttgtcttttttcagaatttctgactatacttttggtacgaacaaaattcatcaccacagggtcctgttgttttgtttgatttttagatttttttaaattattattaaggttgtaatgtttttctccgagttgtcagaaataactggaagaatacaatatatggccattatggagccaggggctagttggtggtttactatacatttgggggctacctggtcacatttaatctaggtttttttttctttttttaagtaaaggttggtcgatcactgtacttatgaataaggacaaagccctatttttgtttccacataaagatcagctactgaattggtgaatttcctgacagacaatgctatctaaccatagttcacgttaggggaagcatttttccatcagtttctttaaaattggattgtctggtgagttttgatattaaacattatgtagctaagttttttttttttagcatttcttttttatttttcaatctatattcacaggcccatacttcagtcagtccaatcatagtacagtgatgtggtggtagatgctatgaatttcttcattgtaaaatacggatcatttgtattttggggtgataaaatagttcaccatgggtatgagatatttattctttaaatcaaagtaaattagaatttttaaaaagcacaaaactgcaggacagtttatgaaataggtggcactattagggaatcttcctttaaagcaagaaatcatgttatttagaaagaaaaactaatcttaaacatactatttctaataaatatttatatttttatgaaataaagaggtatgtggaaattaatatttggtgatgttggacagtggaaaagtatctagagtttttacctgccttatctgaattcttcttgaaacttgagcttaaactctaatagctgtttccctttctattctgaacaactgtctccatttttcaagtgtgagagataagggctaatgatgacatctcatttattttgagtaaacattaaaattgttttacaagtctaaaaaaaa

SEQ ID NO: 20752 - DNA, 331 bp, Homo sapiens
tgaagtgatctagaggatcccgttggtcgatcactgtacttatgaataaggacaaagccctatttttgtttccacataaagatcagctactgaattggtgaatttcctgacagacaatgctatctaaccatagttcacgttaggggaagcatttttccatcagtttctttaaaattggattgtctggtgagttttgatattaaacattatgtagctaagttttttttttttagcatttcttttttatttttcaatctatattcacaggcccatacttcagtcagtccaatcatagtacagtgatcgaaccaccgggatcctgcagatcgac

SEQ ID NO: 20753 - DNA, 1747 bp, Homo sapiens
atcatagcaaccaaacaatgaattgagacctggaggtcttgggttgtaatttaaattcacataaaccaggccttttgtgcctattgcctaattcatggcataattattattagccgccttaggataaaaggaatacagactttatcccatacatgaaattatcagactttcactcattttaatagctagaatcttattttctttccttaagatgtatattttcttttaatgaccaggctctatgtgctgctgtagtgaaaccggatgttctagaaacaatggctttgctgttcagtggagcagatgtcatgtgtgccaccggagaccccgtgcatagcaccccctatctgctagccaagaaagctgggcaaagtctgcaaatggaatttctctaccataacaaattctcagatttccctcaacatgatattcattccgagggtgtattaagtcaagagtcttcccagtccacattcctctgtgactttttatatcaagctccttctgctgcttctaaactctcttcagagaaaaaactgcttgaagagacaaataaaaaatggtgtgttttggaaggaggcttcttgagttactatgaaaatgataagtctaccacacctaatggcaccattaatatcaatgaagttatctgcctggctatacacaaagaggacttctatttaaatactgggcccatctttatctttgagatctacttaccctccgaacgtgtgtttttatttggagctgaaacatcttttttccccagtctcataaggaagagagaaaagtcagaaaataatatttaaattgtgtaactagcttattattttcatactaaaaagtaatcactgatagtttttctataggtatgagatcaagggaatcatttttagaaatcattttcattgtaaaaagtatattagatgtcttttgccaaattttatctagttagtaattataaacagtatcagtcttattttcctattgtttatgaacaatataaagacctcttaatagtgatctaaaagttttctattgtcactgggttaccttcagaatttctaggcctgttagatttatttttgtcgttagcatttaaagttttgctctgtattagaaaatagaaaacttagaaaaacaggtagtggcagttcatcacttcccccacttttatttccaagtcattatctagtttctcaatgtggcattgcaactctgattttttactgttcgtgcactaaagcatttgagataagcccttagtgttgaggaaatcctaaatcctactgctggggggttaaaagaaatatagtgacaggctatgaaatagtgttgtcataacttatcagtggctagtaaatagggtagttgccttctgacaccattttgagtgaaggcagtttaattgcgttgcctctgtttagataagcatttggaatccacagtcaaatgtgtgaatgctgtggttaaagtatttccattatatgagatttgatttcttaagtgatttttttgtctcaggttccattctacatcaaaaggtatttggaaaatgtctttcactgtatgtgtacacggagaaccttaacctataattgtatgtaaatctagtgattgtgaaaaacaagaaacttgcagacacatattaacagttggtgacttatcgccagttggtgacttacttacctacccctgcctctcaaatcttgttataacaattaaacagttcgtattaagactttgt

SEQ ID NO: 20754 - DNA, 6802 bp, Homo sapiens
gaggaccgagcgcccaaggctgggagagacgccggcgctgagcttcccagcgccgcctcacctcgcttttcgaactccgcgacccgagcgcaaggcttaagcaggtaaagcagtcactgtgaagaaaataacattttaagaaacttttctgtcacaattgatagaggaaaagccagtagagaagtacatcttcttgtgtgtgtgtctcatcgtgccactttttgtaactcagcttagtaatgaagccaccattatgtcctcagtcagtgaagtaaatgtggatataaaagatttcctaatgagcattaatttggagcagtatctcttacatttccatgagtctggttttactactgtgaaggactgtgcagcaataaatgacagcctgctgcagaaaattggaatatcacctacaggtcaccgtaggaggatacttaaacagttacagataatcttgtcaaaaatgcaagatattccaatatatgcaaatgttcataaaactaagaagaatgatgacccttcaaaggattaccatgttccatcttctgatcagaatatctgcatagaactttccaattctggtagtgttcagacatctagcccaccgcagttggagactgttagaaaaaatcttgaagacagtgatgcaagtgtggaaagaagccagtatcctcaatcagatgataagctgtctcctcctaaacgcgacttccccactgcagaggaaccacacctgaatttgggttctttgaatgattctttatttggtagtgacaatattaaaatagaatcattgattacaaagaagactgtggatcacacagttgaagaacaacaaacagaaaaagttaaattgatcacagaaaatctcagtaagctccctaatgcagactctgaatgcctttcttttgttggctgttcaacatcaggaacaaattctggaaatggaacaaatggtttattagaaggatcaccaccatccccattctttaagtttcaaggagaaatgattgtaaatgacttgtatgttccatcatcaccaatcctagcacctgtgagaagtcgtagcaagttggtttcaagaccatctcgatcttttctgctaagacatcgacctgtaccagagattccagggtcaacaaaaggagtttctgggagctatttccgtgaaagaagaaatgttgctacctcaactgaaaaatctgtggcatggcaaaattcaaatgaggagaattcatcttccatctttccttatggagagacctttctcttccagagactagaaaattccaagaagcgatctataaagaatgaatttttgacccagggagaagcactcaaaggggaagcagctactgcaacaaactcttttatcatcaaatcaagcatatacgataacagaaaggagaaaataagcgaggacaaggtggaagatatttggatacctcgagaggacaaaaacaattttttgatagacactgcttctgaatcagaatactcaacagtagaagaatgctttcagagtttaagaagaaaaaattcaaaggcatctaaatctaggactcaaaaagccttgattttggactccgttaataggcacagttatccgttaagctcaacaagtggaaatgctgattcatcagccgtttcttcacaggcaatatctccctatgcctgcttttatggagcatctgcaaagaaggttaaatcaggatggctggataaactctctcctcaaggaaaacgcatgtttcaaaagagatgggtgaaatttgatggccttagcatttcttactacaataatgagaaggagatgtattcgaaaggaataattcccctttctgctatatcaacagtacgagttcaaggagacaacaaatttgaagttgttacaacacaaagaacttttgtttttagagtagaaaaagaagaggagagaaatgactggatcagcatactattaaatgcactgaaatcacaatcccttacctcgcagtctcaagctgttgttacacctgagaaatgtggatatcttgaattgagaggctataaggcaaaaatttttactgtgttaagtggaaacagtgtgtggctttgcaaaaacgaacaggattttaagagtggacttggtattaccataattcctatgaatgtagcaaatgtaaagcaagtggaccgaactgtgaaacaatcttttgaaataatcactccctacaggagtttcagctttacagccgagactgaaaaggagaaacaagactggattgaagctgtgcagcaatcaatagcagaaactctctctgattatgaagtagctgagaagatttggttcaatgaatccaacaggagctgtgcagattgtaaagccccagatcctgactgggcatccatcaatctctgtgttgtcatctgtaagaagtgtgcaggacagcatagatctttaggaccaaaagattccaaggttagaagtctaaaaatggatgctagcatttggagcaatgaactcatcgagctttttattgtcattggaaacaaaagagcaaatgacttttgggctggtaatcttcaaaaggatgaagaattacatatggactcaccagtagaaaagagaaaaaactttattactcagaaatataaagaaggaaaattcagaaaaactcttttggcatctctcaccaaagaagaattaaataaggctctatgtgctgctgtagtgaaaccggatgttctagaaacaatggctttgctgttcagtggagcagatgtcatgtgtgccaccggagaccccgtgcatagcaccccctatctgctagccaagaaagctgggcaaagtctgcaaatggaatttctctaccataacaaattctcagatttccctcaacatgatattcattccgagggtgtattaagtcaagagtcttcccagtccacattcctctgtgactttttatatcaagctccttctgctgcttctaaactctcttcagagaaaaaactgcttgaagagacaaataaaaaatggtgtgttttggaaggaggcttcttgagttactatgaaaatgataagtctaccacacctaatggcaccattaatatcaatgaagttatctgcctggctatacacaaagaggacttctatttaaatactgggcccatctttatctttgagatctacttaccctccgaacgtgtgtttttatttggagctgaaacatctcaagctcaaagaaaatggacagaggcaatagccaagcattttgttcccttatttgctgaaaacttaacagaagctgactatgatttgattggtcaactcttctacaaagactgccatgccctggatcagtggagaaaaggctggtttgctatggacaaatccagcttgcatttttgccttcaaatgcaagaagttcagggagatagaatgcacttaagaagactgcaagagctaacaatcagcacaatggttcaaaatggggaaaaactggatgttttactcttggtagaaaaagggagaacattatacatccatgggcataccaagttggatttcacagtctggcatactgcaattgaaaaagcagcaggtacagatggtaatgctttacaagatcagcagctcagcaaaaatgacgttcccattatagtgaacagctgtatagcatttgttacacagtatggtttaggatgcaaatatatctatcaaaagaatggtgatcctttgcatataagtgaactcctggagagtttcaaaaaggatgcaagaagctttaaattgagggctggaaaacatcagcttgaagatgtgacggctgtgttgaaaagttttctctctgacattgatgatgcactgcttactaaggagctctacccatattggatctctgctttagatacgcaagatgacaaggaaagaattaaaaaatatggagcatttatacgttctcttccaggggtcaaccgagcaacactagcagctatcattgaacacctgtatagggttcagaaatgctcagaaatcaatcacatgaatgcccataatttggccttggtcttttcatcctgtttgtttcaaacgaagggacaaactagtgaagaagtgaatgtaattgaggacctaattaataattatgtagaaatatttgaggttaaagaagatcaagtcaaacaaatggacatagaaaatagctttattaccaagtggaaagacacccaagtttcccaggctggagatttgttaattgaagtatatgtagaaaggaaggaacccgactgtagtattataattcggatatctcctgtgatggaagcagaagaattaactaatgatatattagcgataaaaaatattattcctacaaaaggtgatatttgggccacatttgaagtcattgaaaatgaagagctagagcgtcctcttcactacaaggaaaatgtactggagcaggtgcttcggtggagttcattagctgaacctggctctgcttacctggtggtgaagagattcttaaccgctgacacaattaaacactgcagtgaccggagtacactgggaagcatcaaagaaggaatcttgaaaatcaaagaagaaccatccaaaatactatctggaaataagtttcaagaccggtattttgttttacgagatgggtttctctttctttacaaggatgtgaagagtagtaaacatgacaagatgttttctctcagttccatgaagttttatcgtggagtgaaaaagaaaatgaagcctccaacaagctggggattgaccgcatattctgagaaacatcactggcacctgtgttgtgatagttcacaaactcagacggagtggatgaccagtatctttattgcccagcatgaatatgatatatggccaccagctggaaaggaacgaaaacgttcaataaccaaaaatcccaaaattggaggtttgcctctgattcctatacagcatgaggggaatgcaaccttggcccggaaaaatattgagagtgcaagagcagaacttgaaaggctgcggctcagtgaaaagtgtgataaagagtccgtggactctagcttaaaggagagagcttccatggtggcccactgcctggagcacaaggacgataaacttcgaaatcgaccccgaaaacatcggagtttcaactgcctggaggacacagagcctgaagccccacttgggcaaccaaaaggccataaaggcctaaagacattgaggaagactgaggacaggaatagcaaagctactttggactctgatcataagttaccatcaagggtaattgaagaacttaatgtggttctacaacggtcaagaacccttccaaaagaattacaggatgagcagattttgaagtaggaaataaaatgaattgctccccagattatttttttaatattgtatgcaatctttatgtgtaactccaaaactgaactataagataattcataagaatttgcctattgataggcaaatttgtctatgcttaggcatttaaggagcatttaaaaatatgtatatatgtgactgaatgtaagattaactttattttggtctgaacaaaccttgtaaagttccattgtattaacgtgtgtaagaagacattgggttacttaggtggtcagtccttttaaagtagttgtctgttaagtggtataatttatgagcagaaatctcaaactgtactgtattgtataaaatgctgtgtttaaatgaagcctaagaaactatctgtaacatattttgcactttgagaaaccttgtatattaaattaccatatgtttttaggtttacagaagttctaccttagggaaaagaaagggaagtaaattgaaaaaggggggagaatttattgtagtggctgcctaaaaaccactggagtttttaaaagaagcaaggagttaaatgtcctgcaaaacaaggaagtgagctaagattcattctagttcactaatgaccagaacttgtcaatgagaaaccacttgttaagaaaaagtccagtgtttatttctcaagagtaatattcggccaacagatgtaaataatagcactagccactcttattaatatttatagtgttagaaaaccagccacattacagattcactacgtttgagctcattgttggtggctgctaagaggaaacttacactgcattggagaggttgtgtacacaggacctggcctggatgctgattgcactgtcattgtatgcaagcattttgtcttttttcagaatttctgactatacttttggtacgaacaaaattcatcaccacagggtcctgttgttttgtttgatttttagatttttttaaattattattaaggttgtaatgtttttctccgagttgtcagaaataactggaagaatacaatatatggccattatggagccaggggctagttggtggtttactatacatttgggggctacctggtcacatttaatctaggtttttttttctttttttaagtaaaggttggtcgatcactgtacttatgaataaggacaaagccctatttttgtttccacataaagatcagctactgaattggtgaatttcctgacagacaatgctatctaaccatagttcacgttaggggaagcatttttccatcagtttctttaaaattggattgtctggtgagttttgatattaaacattatgtagctaagttttttttttttagcatttcttttttatttttcaatctatattcacaggcccatacttcagtcagtccaatcatagtacagtgatcgaaccaccgggatcctgcagatcgac

SEQ ID NO: 20755 - DNA, 6813 bp, Homo sapiens
gaggaccgagcgcccaaggctgggagagacgccggcgctgagcttcccagcgccgcctcacctcgcttttcgaactccgcgacccgagcgcaaggcttaagcaggtaaagcagtcactgtgaagaaaataacattttaagaaacttttctgtcacaattgatagaggaaaagccagtagagaagtacatcttcttgtgtgtgtgtctcatcgtgccactttttgtaactcagcttagtaatgaagccaccattatgtcctcagtcagtgaagtaaatgtggatataaaagatttcctaatgagcattaatttggagcagtatctcttacatttccatgagtctggttttactactgtgaaggactgtgcagcaataaatgacagcctgctgcagaaaattggaatatcacctacaggtcaccgtaggaggatacttaaacagttacagataatcttgtcaaaaatgcaagatattccaatatatgcaaatgttcataaaactaagaagaatgatgacccttcaaaggattaccatgttccatcttctgatcagaatatctgcatagaactttccaattctggtagtgttcagacatctagcccaccgcagttggagactgttagaaaaaatcttgaagacagtgatgcaagtgtggaaagaagccagtatcctcaatcagatgataagctgtctcctcctaaacgcgacttccccactgcagaggaaccacacctgaatttgggttctttgaatgattctttatttggtagtgacaatattaaaatagaatcattgattacaaagaagactgtggatcacacagttgaagaacaacaaacagaaaaagttaaattgatcacagaaaatctcagtaagctccctaatgcagactctgaatgcctttcttttgttggctgttcaacatcaggaacaaattctggaaatggaacaaatggtttattagaaggatcaccaccatccccattctttaagtttcaaggagaaatgattgtaaatgacttgtatgttccatcatcaccaatcctagcacctgtgagaagtcgtagcaagttggtttcaagaccatctcgatcttttctgctaagacatcgacctgtaccagagattccagggtcaacaaaaggagtttctgggagctatttccgtgaaagaagaaatgttgctacctcaactgaaaaatctgtggcatggcaaaattcaaatgaggagaattcatcttccatctttccttatggagagacctttctcttccagagactagaaaattccaagaagcgatctataaagaatgaatttttgacccagggagaagcactcaaaggggaagcagctactgcaacaaactcttttatcatcaaatcaagcatatacgataacagaaaggagaaaataagcgaggacaaggtggaagatatttggatacctcgagaggacaaaaacaattttttgatagacactgcttctgaatcagaatactcaacagtagaagaatgctttcagagtttaagaagaaaaaattcaaaggcatctaaatctaggactcaaaaagccttgattttggactccgttaataggcacagttatccgttaagctcaacaagtggaaatgctgattcatcagccgtttcttcacaggcaatatctccctatgcctgcttttatggagcatctgcaaagaaggttaaatcaggatggctggataaactctctcctcaaggaaaacgcatgtttcaaaagagatgggtgaaatttgatggccttagcatttcttactacaataatgagaaggagatgtattcgaaaggaataattcccctttctgctatatcaacagtacgagttcaaggagacaacaaatttgaagttgttacaacacaaagaacttttgtttttagagtagaaaaagaagaggagagaaatgactggatcagcatactattaaatgcactgaaatcacaatcccttacctcgcagtctcaagctgttgttacacctgagaaatgtggatatcttgaattgagaggctataaggcaaaaatttttactgtgttaagtggaaacagtgtgtggctttgcaaaaacgaacaggattttaagagtggacttggtattaccataattcctatgaatgtagcaaatgtaaagcaagtggaccgaactgtgaaacaatcttttgaaataatcactccctacaggagtttcagctttacagccgagactgaaaaggagaaacaagactggattgaagctgtgcagcaatcaatagcagaaactctctctgattatgaagtagctgagaagatttggttcaatgaatccaacaggagctgtgcagattgtaaagccccagatcctgactgggcatccatcaatctctgtgttgtcatctgtaagaagtgtgcaggacagcatagatctttaggaccaaaagattccaaggttagaagtctaaaaatggatgctagcatttggagcaatgaactcatcgagctttttattgtcattggaaacaaaagagcaaatgacttttgggctggtaatcttcaaaaggatgaagaattacatatggactcaccagtagaaaagagaaaaaactttattactcagaaatataaagaaggaaaattcagaaaaactcttttggcatctctcaccaaagaagaattaaataaggctctatgtgctgctgtagtgaaaccggatgttctagaaacaatggctttgctgttcagtggagcagatgtcatgtgtgccaccggagaccccgtgcatagcaccccctatctgctagccaagaaagctgggcaaagtctgcaaatggaatttctctaccataacaaattctcagatttccctcaacatgatattcattccgagggtgtattaagtcaagagtcttcccagtccacattcctctgtgactttttatatcaagctccttctgctgcttctaaactctcttcagagaaaaaactgcttgaagagacaaataaaaaatggtgtgttttggaaggaggcttcttgagttactatgaaaatgataagtctaccacacctaatggcaccattaatatcaatgaagttatctgcctggctatacacaaagaggacttctatttaaatactgggcccatctttatctttgagatctacttaccctccgaacgtgtgtttttatttggagctgaaacatctcaagctcaaagaaaatggacagaggcaatagccaagcattttgttcccttatttgctgaaaacttaacagaagctgactatgatttgattggtcaactcttctacaaagactgccatgccctggatcagtggagaaaaggctggtttgctatggacaaatccagcttgcatttttgccttcaaatgcaagaagttcagggagatagaatgcacttaagaagactgcaagagctaacaatcagcacaatggttcaaaatggggaaaaactggatgttttactcttggtagaaaaagggagaacattatacatccatgggcataccaagttggatttcacagtctggcatactgcaattgaaaaagcagcaggtacagatggtaatgctttacaagatcagcagctcagcaaaaatgacgttcccattatagtgaacagctgtatagcatttgttacacagtatggtttaggatgcaaatatatctatcaaaagaatggtgatcctttgcatataagtgaactcctggagagtttcaaaaaggatgcaagaagctttaaattgagggctggaaaacatcagcttgaagatgtgacggctgtgttgaaaagttttctctctgacattgatgatgcactgcttactaaggagctctacccatattggatctctgctttagatacgcaagatgacaaggaaagaattaaaaaatatggagcatttatacgttctcttccaggggtcaaccgagcaacactagcagctatcattgaacacctgtatagggttcagaaatgctcagaaatcaatcacatgaatgcccataatttggccttggtcttttcatcctgtttgtttcaaacgaagggacaaactagtgaagaagtgaatgtaattgaggacctaattaataattatgtagaaatatttgaggttaaagaagatcaagtcaaacaaatggacatagaaaatagctttattaccaagtggaaagacacccaagtttcccaggctggagatttgttaattgaagtatatgtagaaaggaaggaacccgactgtagtattataattcggatatctcctgtgatggaagcagaagaattaactaatgatatattagcgataaaaaatattattcctacaaaaggtgatatttgggccacatttgaagtcattgaaaatgaagagctagagcgtcctcttcactacaaggaaaatgtactggagcaggtgcttcggtggagttcattagctgaacctggctctgcttacctggtggtgaagagattcttaaccgctgacacaattaaacactgcagtgaccggagtacactgggaagcatcaaagaaggaatcttgaaaatcaaagaagaaccatccaaaatactatctggaaataagtttcaagaccggtattttgttttacgagatgggtttctctttctttacaaggatgtgaagagtagtaaacatgacaagatgttttctctcagttccatgaagttttatcgtggagtgaaaaagaaaatgaagcctccaacaagctggggattgaccgcatattctgagaaacatcactggcacctgtgttgtgatagttcacaaactcagacggagtggatgaccagtatctttattgcccagcatgaatatgatatatggccaccagctggaaaggaacgaaaacgttcaataaccaaaaatcccaaaattggaggtttgcctctgattcctatacagcatgaggggaatgcaaccttggcccggaaaaatattgagagtgcaagagcagaacttgaaaggctgcggctcagtgaaaagtgtgataaagagtccgtggactctagcttaaaggagagagcttccatggtggcccactgcctggagcacaaggacgataaacttcgaaatcgaccccgaaaacatcggagtttcaactgcctggaggacacagagcctgaagccccacttgggcaaccaaaaggccataaaggcctaaagacattgaggaagactgaggacaggaatagcaaagctactttggactctgatcataagttaccatcaagggtaattgaagaacttaatgtggttctacaacggtcaagaacccttccaaaagaattacaggatgagcagattttgaagtaggaaataaaatgaattgctccccagattatttttttaatattgtatgcaatctttatgtgtaactccaaaactgaactataagataattcataagaatttgcctattgataggcaaatttgtctatgcttaggcatttaaggagcatttaaaaatatgtatatatgtgactgaatgtaagattaactttattttggtctgaacaaaccttgtaaagttccattgtattaacgtgtgtaagaagacattgggttacttaggtggtcagtccttttaaagtagttgtctgttaagtggtataatttatgagcagaaatctcaaactgtactgtattgtataaaatgctgtgtttaaatgaagcctaagaaactatctgtaacatattttgcactttgagaaaccttgtatattaaattaccatatgtttttaggtttacagaagttctaccttagggaaaagaaagggaagtaaattgaaaaaggggggagaatttattgtagtggctgcctaaaaaccactggagtttttaaaagaagcaaggagttaaatgtcctgcaaaacaaggaagtgagctaagattcattctagttcactaatgaccagaacttgtcaatgagaaaccacttgttaagaaaaagtccagtgtttatttctcaagagtaatattcggccaacagatgtaaataatagcactagccactcttattaatatttatagtgttagaaaaccagccacattacagattcactacgtttgagctcattgttggtggctgctaagaggaaacttacactgcattggagaggttgtgtacacaggacctggcctggatgctgattgcactgtcattgtatgcaagcattttgtcttttttcagaatttctgactatacttttggtacgaacaaaattcatcaccacagggtcctgttgttttgtttgatttttagatttttttaaattattattaaggttgtaatgtttttctccgagttgtcagaaataactggaagaatacaatatatggccattatggagccaggggctagttggtggtttactatacatttgggggctacctggtcacatttaatctaggtttttttttctttttttaagtaaaggttggtcgatcactgtacttatgaataaggacaaagccctatttttgtttccacataaagatcagctactgaattggtgaatttcctgacagacaatgctatctaaccatagttcacgttaggggaagcatttttccatcagtttctttaaaattggattgtctggtgagttttgatattaaacattatgtagctaagttttttttttttagcatttcttttttatttttcaatctatattcacaggcccatacttcagtcagtccaatcatagtacagtgatcgaccaacagtacagtgatcgaccgggatcctctagac

SEQ ID NO: 20756 - DNA, 5593 bp, Homo sapiens
gaggaccgagcgcccaaggctgggagagacgccggcgctgagcttcccagcgccgcctcacctcgcttttcgaactccgcgacccgagcgcaaggcttaagcaggtaaagcagtcactgtgaagaaaataacattttaagaaacttttctgtcacaattgatagaggaaaagccagtagagaagtacatcttcttgtgtgtgtgtctcatcgtgccactttttgtaactcagcttagtaatgaagccaccattatgtcctcagtcagtgaagtaaatgtggatataaaagatttcctaatgagcattaatttggagcagtatctcttacatttccatgagtctggttttactactgtgaaggactgtgcagcaataaatgacagcctgctgcagaaaattggaatatcacctacaggtcaccgtaggaggatacttaaacagttacagataatcttgtcaaaaatgcaagatattccaatatatgcaaatgttcataaaactaagaagaatgatgacccttcaaaggattaccatgttccatcttctgatcagaatatctgcatagaactttccaattctggtagtgttcagacatctagcccaccgcagttggagactgttagaaaaaatcttgaagacagtgatgcaagtgtggaaagaagccagtatcctcaatcagatgataagctgtctcctcctaaacgcgacttccccactgcagaggaaccacacctgaatttgggttctttgaatgattctttatttggtagtgacaatattaaaatagaatcattgattacaaagaagactgtggatcacacagttgaagaacaacaaacagaaaaagttaaattgatcacagaaaatctcagtaagctccctaatgcagactctgaatgcctttcttttgttggctgttcaacatcaggaacaaattctggaaatggaacaaatggtttattagaaggatcaccaccatccccattctttaagtttcaaggagaaatgattgtaaatgacttgtatgttccatcatcaccaatcctagcacctgtgagaagtcgtagcaagttggtttcaagaccatctcgatcttttctgctaagacatcgacctgtaccagagattccagggtcaacaaaaggagtttctgggagctatttccgtgaaagaagaaatgttgctacctcaactgaaaaatctgtggcatggcaaaattcaaatgaggagaattcatcttccatctttccttatggagagacctttctcttccagagactagaaaattccaagaagcgatctataaagaatgaatttttgacccagggagaagcactcaaaggggaagcagctactgcaacaaactcttttatcatcaaatcaagcatatacgataacagaaaggagaaaataagcgaggacaaggtggaagatatttggatacctcgagaggacaaaaacaattttttgatagacactgcttctgaatcagaatactcaacagtagaagaatgctttcagagtttaagaagaaaaaattcaaaggcatctaaatctaggactcaaaaagccttgattttggactccgttaataggcacagttatccgttaagctcaacaagtggaaatgctgattcatcagccgtttcttcacaggcaatatctccctatgcctgcttttatggagcatctgcaaagaaggttaaatcaggatggctggataaactctctcctcaaggaaaacgcatgtttcaaaagagatgggtgaaatttgatggccttagcatttcttactacaataatgagaaggagatgtattcgaaaggaataattcccctttctgctatatcaacagtacgagttcaaggagacaacaaatttgaagttgttacaacacaaagaacttttgtttttagagtagaaaaagaagaggagagaaatgactggatcagcatactattaaatgcactgaaatcacaatcccttacctcgcagtctcaagctgttgttacacctgagaaatgtggatatcttgaattgagaggctataaggcaaaaatttttactgtgttaagtggaaacagtgtgtggctttgcaaaaacgaacaggattttaagagtggacttggtattaccataattcctatgaatgtagcaaatgtaaagcaagtggaccgaactgtgaaacaatcttttgaaataatcactccctacaggagtttcagctttacagccgagactgaaaaggagaaacaagactggattgaagctgtgcagcaatcaatagcagaaactctctctgattatgaagtagctgagaagatttggttcaatgaatccaacaggagctgtgcagattgtaaagccccagatcctgactgggcatccatcaatctctgtgttgtcatctgtaagaagtgtgcaggacagcatagatctttaggaccaaaagattccaaggttagaagtctaaaaatggatgctagcatttggagcaatgaactcatcgagctttttattgtcattggaaacaaaagagcaaatgacttttgggctggtaatcttcaaaaggatgaagaattacatatggactcaccagtagaaaagagaaaaaactttattactcagaaatataaagaaggaaaattcagaaaaactcttttggcatctctcaccaaagaagaattaaataaggctctatgtgctgctgtagtgaaaccggatgttctagaaacaatggctttgctgttcagtggagcagatgtcatgtgtgccaccggagaccccgtgcatagcaccccctatctgctagccaagaaagctgggcaaagtctgcaaatggaatttctctaccataacaaattctcagatttccctcaacatgatattcattccgagggtgtattaagtcaagagtcttcccagtccacattcctctgtgactttttatatcaagctccttctgctgcttctaaactctcttcagagaaaaaactgcttgaagagacaaataaaaaatggtgtgttttggaaggaggcttcttgagttactatgaaaatgataagtctaccacacctaatggcaccattaatatcaatgaagttatctgcctggctatacacaaagaggacttctatttaaatactgggcccatctttatctttgagatctacttaccctccgaacgtgtgtttttatttggagctgaaacatctcaagctcaaagaaaatggacagaggcaatagccaagcattttgttcccttatttgctgaaaacttaacagaagctgactatgatttgattggtcaactcttctacaaagactgccatgccctggatcagtggagaaaaggctggtttgctatggacaaatccagcttgcatttttgccttcaaatgcaagaagttcagggagatagaatgcacttaagaagactgcaagagctaacaatcagcacaatggttcaaaatggggaaaaactggatgttttactcttggtagaaaaagggagaacattatacatccatgggcataccaagttggatttcacagtctggcatactgcaattgaaaaagcagcaggtacagatggtaatgctttacaagatcagcagctcagcaaaaatgacgttcccattatagtgaacagctgtatagcatttgttacacagtatggtttaggatgcaaatatatctatcaaaagaatggtgatcctttgcatataagtgaactcctggagagtttcaaaaaggatgcaagaagctttaaattgagggctggaaaacatcagcttgaagatgtgacggctgtgttgaaaagttttctctctgacattgatgatgcactgcttactaaggagctctacccatattggatctctgctttagatacgcaagatgacaaggaaagaattaaaaaatatggagcatttatacgttctcttccaggggtcaaccgagcaacactagcagctatcattgaacacctgtatagggttcagaaatgctcagaaatcaatcacatgaatgcccataatttggccttggtcttttcatcctgtttgtttcaaacgaagggacaaactagtgaagaagtgaatgtaattgaggacctaattaataattatgtagaaatatttgaggttaaagaagatcaagtcaaacaaatggacatagaaaatagctttattaccaagtggaaagacacccaagtttcccaggctggagatttgttaattgaagtatatgtagaaaggaaggaacccgactgtagtattataattcggatatctcctgtgatggaagcagaagaattaactaatgatatattagcgataaaaaatattattcctacaaaaggtgatatttgggccacatttgaagtcattgaaaatgaagagctagagcgtcctcttcactacaaggaaaatgtactggagcaggtgcttcggtggagttcattagctgaacctggctctgcttacctggtggtgaagagattcttaaccgctgacacaattaaacactgcagtgaccggagtacactgggaagcatcaaagaaggaatcttgaaaatcaaagaagaaccatccaaaatactatctggaaataagtttcaagaccggtattttgttttacgagatgggtttctctttctttacaaggatgtgaagagtagtaaacatgacaagatgttttctctcagttccatgaagttttatcgtggagtgaaaaagaaaatgaagcctccaacaagctggggattgaccgcatattctgagaaacatcactggcacctgtgttgtgatagttcacaaactcagacggagtggatgaccagtatctttattgcccagcatgaatatgatatatggccaccagctggaaaggaacgaaaacgttcaataaccaaaaatcccaaaattggaggtttgcctctgattcctatacagcatgaggggaatgcaaccttggcccggaaaaatattgagagagacccttgtgagcatacaagctctcatttggaagcctcgggaagccatatggttggagcaggtatgaattggaatcttgacagaacatcatcaaaactgcccacaacctcaattcagctcagtcccattggatcaggatcatcagcctcctctttgccagaagatggaaaggtatgaactgttctaacagcaagcgctagagcagtggtccagaaaatggtgggtaacaatgtgtctcactgtcactgttttggagattttgctgaacttggtgaacttgctctactctggcctggacagaaaagaaaagaaaagcttacacttcttggtttccttgttctgccttcctattgtgatgggaaaagacaacatagagtagaaattaacaaaggaatctctggagtgaggcattctgaaattttactgaagctctaaaacttaacagctatggaaatggtatatgatacatcagcaaaatgccgctgtgcaggaacagcatcccttgagtgattgtggtcttccttgtaacttcactacttattctactactgaaccaagcataattaaagatgaaaacaagtgaacagtattatg

SEQ ID NO: 20757 - DNA, 560 bp, Homo sapiens
cttctctcaagtgctacactctcttggatgggagataactttgtcccctggtgaaagcttgcattggttgctcaggcactgggaagctgtttttgtttggagtgtgcttatatgcgtcctgtaggaggacagctgaaaacctggtctccacctgctaatctggtgggcagacgccacagtgcagagaaacctggtatgcagaagatgaagacatagcacaacgtaagtcatgtcctatagatctatatcacctgtaaggcataatatcccagcatgtgcctctgaactcacattctgaaggtgcagcaaacatggatgggatctctagaggagtgggcacccggaatatatgcttcttgaccatgcaggcaagagtggaaaattgttagtatttagatttatgtatatggtaatatgatttaaacatgttttgttcacatatttctatctaatgaagttatcttcctgtcctaatgaggtgggtaacaatgtgtctcactgtcactgttttggagattttgctgaacttggtgaacttgctctactctggcctggacaga

SEQ ID NO: 20758 - DNA, 357 bp, Homo sapiens
cctactttcaaaagcaaagcatgtctagttcagtgtcagtggcctagtcaatgtttctttcacatggaagaaacccatacgctatcaatagtccaactgtcaagcttaagttggcccagtgctattatgtattgagagtggctacctaaagtgagactgattttgttgtaaaatttggtagaatttattggaatttagaaaatgtaattatactttcaaaatctttttttttgtttctttatagttttttatgtttttctccaaactaggattttaagagtggacttggtattaccataattcctatgaatgtagcaaatgtaaagcaagtggaccgaactgtgaaacaatcttttg

SEQ ID NO: 20759 - DNA, 305 bp, Homo sapiens
ctgcctagcagccatatttttcagctgttgtttaatttgtgagtgaaatgaatatgcaaactgaacatactgcttaattggcctttacaagggagatcgataacacagaaacgttaattgtttcagctttacagccgagactgaaaaggagaaacaagactggattgaagctgtgcagcaatcaatagcagaaactctctctgattatgaagtagctgagaagatttggttcaatgaatccaacaggagctgtgcagattgtaaagccccagatcctgactgggcatccatcaatctctgtgttg

SEQ ID NO: 20760 - DNA, 415 bp, Homo sapiens
cccatggcagatgccctgtggcgctcagtgcatgctgctctcccttctcctctctggtcgcccttggaatgagcctcttctgatcccaaagtgcagttggtagacttttcttcttctccgccagtttccactctgggggcctgagcatggcagagttctgatgtgggggcaggagcctgtgccctcccgtatctgctatgctgggggagggagaaatgacttccttccgtctttgcccttcgaatcatctctgatttttattttttaaaccagatatctcagtttttaacccatgctttaatttctcagatacctcaaaccctttggatggagggaaaatttgaaactgcaacgacatggatagaactatttgatgcagcagttttctaaagtatccataaaaactagtccgggg

SEQ ID NO: 20761 - DNA, 314 bp, Homo sapiens
  misc_feature (31)..(32): n is a, c, g, or t
cggaccaacttaggctgagctgctactcagnngcgagctgctaactcagggcgagctgctgagcacagagctgctgctcctggaggccttcagctggaacctctgcctgcccacgcctgcccacttcctggactactacctcttggcctccgtcagccagaaggaccaccactgccacacctggcccaccacctgcccccgcaagaccaaagagtgcctcctccctgggcagaaagtggccatgccaccctgttttcagctaaagcccaacctcctgacctgtcaccgtgagcagctcgcccctgagttaggca

SEQ ID NO: 20762 - DNA, 3343 bp, Homo sapiens
tgcgagccgcggcgggacccgagcgcacgcaggggcgcggcgacggcgggggctagtcgggctgcggaggcggccgtcgggagtgcggagcgcctcggacgagggtccaaccgccggcaggcaccagagggcacggctggctcggcactgggaggggcccggcgctcgcagccccccacgcccagagaggatgcggtgcgccctgagagccgggtagcctcggatagcggcgctgcgtacgcgatgatggatgagccgtggtgggaagggcgcgtcgcctcggacgtccactgcaccctgcgcgagaaggtccttgatactttatgagcctgtgcttagtgaaagcagatgggagatagcccaggcggggctgccatcctgggacttgcaggaaaactaagaagggtatggagggaatcgttgcctcccattcaggccctgaggtcccatttcctgggacagccgagactctcaggaggcagccctgaccgtcacccctccgccccgcctgtcctccaggaactgaagctgcccaccttccgagcccactccccactcctgaagagccgccggttcttcgtggacatcctgaccctgctgagcagccactgccagctctgccctgcagcccggcacctggcggtctacctgctggaccacttcatggatcgctacaacgtcaccacctccaagcagctctacaccgtggccgtctcctgcctcctgcttgcaagtaagttcgaggatcgggaagaccacgtccccaagttggagcaaataaacagcacgaggatcctgagcagccagaacttcaccctcaccaagaaggagctgctgagcacagagctgctgctcctggaggccttcagctggaacctctgcctgcccacgcctgcccacttcctggactactacctcttggcctccgtcagccagaaggaccaccactgccacacctggcccaccacctgcccccgcaagaccaaagagtgcctcaaggagtatgcccattacttcctagaggtcaccctgcaagatcacatattctacaaattccagccttctgtggtcgctgcggcctgtgttggggcctccaggatttgcctgcagctttctccctactggaccagagacctgcagaggatctcaagctattccctggagcacctcagcacgtgtattgaaatcctgctggtagtgtatgacaacgtcctcaaggatgccgtagccgtcaagagccaggccttggcaatggtgcccggcacaccccccacccccactcaagtgctgttccagccaccagcctacccggccctcggccagccagcgaccaccctggcacagttccagacccccgtgcaggacctatgcttggcctatcgggactccttgcaggcccaccgttcagggagcctgctctcggggagtacaggctcatccctccacaccccgtaccaaccgctgcagcccttggatatgtgtcccgtgcccgtccctgcatcccttagcatgcatatggccattgcagctgagcccaggcactgcctcgccaccacctatggaagcagctacttcagtgggagccacatgttccccaccggctgctttgacagataggccacctccagacctcacgaggaagccttggagatgtgggcagaggaagaggacactgaagaggagagctcagccaagtgaggcagcaggaggccatccctgaagagccttggaacgtggagggtctgtgctccttttaaataaaactgacccagagcaaaacattcaataacatacctcacccgagagcattcctctgagaaacgtctgccacgtgtggctagggtacaaaaggatggcttggtggccgtccccccacacaggggcccagtgaatcgagaaagacttgataagaggccaggagagtgggaactggacacagaccactgatctcaagcatgtccagtttttagcattaaagacttttctattctttgctgatggcagctacaccgctgaaaaaggaggggcagcctggcgtgttctcaggacccccggaggatcccatattgggtgcttttctttccctggctctatgcagaggggcctgagttggtgtgtatgcctgagtgtttgccttgcgaggcacagtgggtggctgtcttgcctttgttttcgaacctaaaaccattttcagccttttagatatgtcatgtgctgctgcttcccgaagtggtcttgctttctgtttcgtaagatgtcttgtttacacactgtatcagggatttggtgatacttgaaaattcctttggagaaaaaaacaaatttaattgccacactgcctgtcccacatgagggctgttaatttggaacccaagtttgaacccaacttgtgatggacccgcaggtaaccacagagcttcctttttgaaggcatatggttggagagaaccattttcccagctctcggttccggaagattccacgtcttggaggctgtgttcaccactagaactttaataactacccagggagggagaagctcgttgaaaggaagacaaagatttaaacagttcccacctctctccaccacatacttacagggcatgagtttaacccagtctaggctttgagtgtggctgatagcgaaggatagcaatgtggaaaatttgcttagtcccacctgtatttggggagtgggatgtacatgggcgtttgataccaccattgataggcaagcgactggttggatcaaaagccagtatttagggatctgcagcgagagggccctcaggaagactcttgtaaccatgtgcaatatgtttttattctgactcgcagcttgtgctcagcatgttctttggtttagtttggggttgggggacacattgttcacccagcagaactgggaggtgcaaaggaccgtggaagcaatttttgttttgtttgaggaatacctgtcttggattccttagccccttgccagtcctggagactgtggcaggggccgccaggaaggcagctgtctgctgctgagtcagatcggaaggtggtgaatctttccagagcagctgaaaatctcagcatggagacagtaagaaaagagacggggtgtggataagactctgccaccgtgtcacactagcataggaggctgcacgttcatttgttgttgtttttttttcctttgccaacctccgttctatttatgtgcaagcagtttggattcaagttcttgtatctgtctgttctgggacctggggattgtgagggttccctcacagccagcacgacccccagaaagaggcgtcccacaataaacacgtcacctgctcttgatctctca

SEQ ID NO: 20763 - DNA, 3550 bp, Homo sapiens
tgcgagccgcggcgggacccgagcgcacgcaggggcgcggcgacggcgggggctagtcgggctgcggaggcggccgtcgggagtgcggagcgcctcggacgagggtccaaccgccggcaggcaccagagggcacggctggctcggcactgggaggggcccggcgctcgcagccccccacgcccagagaggatgcggtgcgccctgagagccgggtagcctcggatagcggcgctgcgtacgcgatgatggatgagccgtggtgggaagggcgcgtcgcctcggacgtccactgcaccctgcgcgagaaggtccttgatactttatgagcctgtgcttagtgaaagcagatgggagatagcccaggcggggctgccatcctgggacttgcaggaaaactaagaagggtatggagggaatcgttgcctcccattcaggccctgaggtcccatttcctgggacagccgagactctcaggaggcagccctgaccgtcacccctccgccccgcctgtcctccaggaactgaagctgcccaccttccgagcccactccccactcctgaagagccgccggttcttcgtggacatcctgaccctgctgagcagccactgccagctctgccctgcagcccggcacctggcggtctacctgctggaccacttcatggatcgctacaacgtcaccacctccaagcagctctacaccgtggccgtctcctgcctcctgcttgcaagtaagttcgaggatcgggaagaccacgtccccaagttggagcaaataaacagcacgaggatcctgagcagccagaacttcaccctcaccaagaaggagctgctgagcacagagctgctgctcctggaggccttcagctggaacctctgcctgcccacgcctgcccacttcctggactactacctcttggcctccgtcagccagaaggaccaccactgccacacctggcccaccacctgcccccgcaagaccaaagagtgcctcaaggagtatgcccattacttcctagaggtcaccctgcaagatcacatattctacaaattccagccttctgtggtcgctgcggcctgtgttggggcctccaggatttgcctgcagctttctccctactggaccagagacctgcagaggatctcaagctattccctggagcacctcagcacgtgtattgaaatcctgctggtcccccttttcagatgaaaaatcctaggccccagcggtcaatttggttgatatcagctagctaaggagtgaccccgctggggatggagctggcccagaattgcctggaaagcagagattgggctcattcaggccccaggaacactccagtgccaggggatgggaaggcattggtgagcacaagcaggcgccatcctcctggaagccagagtgtatgacaacgtcctcaaggatgccgtagccgtcaagagccaggccttggcaatggtgcccggcacaccccccacccccactcaagtgctgttccagccaccagcctacccggccctcggccagccagcgaccaccctggcacagttccagacccccgtgcaggacctatgcttggcctatcgggactccttgcaggcccaccgttcagggagcctgctctcggggagtacaggctcatccctccacaccccgtaccaaccgctgcagcccttggatatgtgtcccgtgcccgtccctgcatcccttagcatgcatatggccattgcagctgagcccaggcactgcctcgccaccacctatggaagcagctacttcagtgggagccacatgttccccaccggctgctttgacagataggccacctccagacctcacgaggaagccttggagatgtgggcagaggaagaggacactgaagaggagagctcagccaagtgaggcagcaggaggccatccctgaagagccttggaacgtggagggtctgtgctccttttaaataaaactgacccagagcaaaacattcaataacatacctcacccgagagcattcctctgagaaacgtctgccacgtgtggctagggtacaaaaggatggcttggtggccgtccccccacacaggggcccagtgaatcgagaaagacttgataagaggccaggagagtgggaactggacacagaccactgatctcaagcatgtccagtttttagcattaaagacttttctattctttgctgatggcagctacaccgctgaaaaaggaggggcagcctggcgtgttctcaggacccccggaggatcccatattgggtgcttttctttccctggctctatgcagaggggcctgagttggtgtgtatgcctgagtgtttgccttgcgaggcacagtgggtggctgtcttgcctttgttttcgaacctaaaaccattttcagccttttagatatgtcatgtgctgctgcttcccgaagtggtcttgctttctgtttcgtaagatgtcttgtttacacactgtatcagggatttggtgatacttgaaaattcctttggagaaaaaaacaaatttaattgccacactgcctgtcccacatgagggctgttaatttggaacccaagtttgaacccaacttgtgatggacccgcaggtaaccacagagcttcctttttgaaggcatatggttggagagaaccattttcccagctctcggttccggaagattccacgtcttggaggctgtgttcaccactagaactttaataactacccagggagggagaagctcgttgaaaggaagacaaagatttaaacagttcccacctctctccaccacatacttacagggcatgagtttaacccagtctaggctttgagtgtggctgatagcgaaggatagcaatgtggaaaatttgcttagtcccacctgtatttggggagtgggatgtacatgggcgtttgataccaccattgataggcaagcgactggttggatcaaaagccagtatttagggatctgcagcgagagggccctcaggaagactcttgtaaccatgtgcaatatgtttttattctgactcgcagcttgtgctcagcatgttctttggtttagtttggggttgggggacacattgttcacccagcagaactgggaggtgcaaaggaccgtggaagcaatttttgttttgtttgaggaatacctgtcttggattccttagccccttgccagtcctggagactgtggcaggggccgccaggaaggcagctgtctgctgctgagtcagatcggaaggtggtgaatctttccagagcagctgaaaatctcagcatggagacagtaagaaaagagacggggtgtggataagactctgccaccgtgtcacactagcataggaggctgcacgttcatttgttgttgtttttttttcctttgccaacctccgttctatttatgtgcaagcagtttggattcaagttcttgtatctgtctgttctgggacctggggattgtgagggttccctcacagccagcacgacccccagaaagaggcgtcccacaataaacacgtcacctgctcttgatctctca

SEQ ID NO: 20764 - DNA, 282 bp, Homo sapiens
attcgtgctggtgctggagtctgcgcgggacaaaatcatttacctacacgagaaggtgcatgagtgcctctggggatggggatggagaggctgcacgttcatttgttgttgtttttttttcctttgccaacctccgttctatttatgtgcaagcagtttggattcaagttcttgtatctgtctgttctgggacctggggattgtgagggttccctcacagccagcacgacccccagaaagaggcgtcccacaataaacacgtcacctgctcttgatctctca

SEQ ID NO: 20765 - DNA, 411 bp, Homo sapiens
cagagccccagcctcgagcgagctagcggagttgacaactttctctgcaacttttgcaaaagggaagataaaaattctgcaagttgttgcacagctccatatcgccccgtgtccggcgagcagaggggagggggcaccgcagccttccgcggaccagaggcgacctccagctcctctgagcggcgcaggagggggcgcccgccggggcccggggccaggggcgagagaggatagggacaccgggggtcggagcccggggtacgctctggccgctgaagttgcccgtgtccacgcagggtgcgccctgagagccgggtagcctcggatagcggcgctgcgtacgcgatgatggatgagccgtggtgggaagggcgcgtcgcctcggacgtccactgcaccctgcgcgagaag

SEQ ID NO: 20766 - DNA, 473 bp, Homo sapiens
gtttaagggagcacttagcttgatcctccccctgcccacttcagtaaaccttcagtgcttgaagatcaggtattattaagttggtgcaaaaggaattgtggtttttgcctttgaaaataatgacagaaacctctgttacttttgcaccaaccaaataatctttataccagggcttgatcccactttgcttttggtatagaagtagaagaatgtctagaaaaatcactcagcaatcccagcactttgagaggccgagacaggtggatcacgaagtcaggagatcgagaccatcctggccaacatggtgaaaccccgtctctactaaaattgcacactcctgtagtcccagctactcaggagactgaggcagggaaatcgcttgaacccgggaggcggaggttgcagttggccgagattgcgtcgctgcactccagcctggcgacagagcaagactccgtctcaaaaaaaaaaaa

SEQ ID NO: 20767 - DNA, 248 bp, Homo sapiens
ggaggaatgcagttagcagagtctcagggagaaaggcaattagcaggtgcttccagggatcagagagaaggctagtttccaggcttggtgatggcgtgcactgtgaaacctgccagaggaactcatctcttatctgcccaggcactgggtgtccctggaggaggtgaccaggctaggtgggcactggcctggaatatggcatggctgtgaccctcccagactcctcaggagggcttcaagttctgtct

SEQ ID NO: 20768 - DNA, 433 bp, Homo sapiens
ttatgaaacaccactttaaagcttagtatactagattagagcagtgattctcaaactttagtgtgccttaatatcgctatagggcttatgaaatcacaggttgcttggtctcaccctcagagtttctgattcagtagatcagtaggtagggcctgagaatctgcattttagcaattcccctaggtgatgcaaatggggcttgtctgaagccatactttgagaacccctggactagagcattactgagaaccctggtgtctttatgtgtgtttataaaaatgaatgtgtgttactaaatatgttatttgattttcaaagctaattttctgcttttatagttatcgtggtaaatatacagtaaattcagtattctaattagtttttcatataatcaattaggcaaactaccaaagaaaataaaatgacttattca

SEQ ID NO: 20769 - DNA, 670 bp, Homo sapiens
  misc_feature (670)..(670): n is a, c, g, or t
ttttattctccatagccaagacatggaatcagtccaaatgtccatcagtggctgagtggataaagaaaacatggaatatatacaaaatggaataataaacggccataaaaaatatcaaaatcctgtcatttgcaacatgaatgaacctggaaaacattatgctgagtgaaataagaaggagtgttaagtctgatattgaagaatccagtttatccaggtcagtgaaatccagaatgttctgtctggcatcattaattgtggagctgaagatgtgtagatttctaaatctataaacagatgtgatatacaggctgtatacatgttagggtccctgtacaaggttttcctttcatgtcattaaataaaaatactggcagctacaaaaaaaaaaaaaaaaaaaaaaaaaaaaaatttggggggggctggggcctgggaaaaaagttttgaaaaaccaattcggtggggggccggggcccaggaagggtaaccggcacccgtgggcacacagcgggtcccaaagggagaccggggacaagacatgggggggggtttcccaccatataaaaacggcggggggaacccgaggttttggaacaaccagaggagtccggggccaaagggacttccaagggggccaggaggcggatatatccggcgcagcggggggggn

SEQ ID NO: 20770 - DNA, 454 bp, Homo sapiens
ttttattctccatagccaagacatggaatcagtccaaatgtccatcagtggctgagtggataaagaaaacatggaatatatacaaaatggaataataaacggccataaaaaatatcaaaatcctgtcatttgcaacatgaatgaacctggaaaacattatgctgagtgaaataagaaggagtgttaagtctgatattgaagaatccagtttatccaggtcagtgaaatccagaatgttctgtctggcatcattaattgtggagctgaagatgtgtagatttctaaatctataaacagatgtgatatacaggctgtatacatgttagggtccctgtacaaggttttcctttcatgtcattaaataaaaatactggcagcttcttcttgtgtttctgaaatcatttggcattcacaactttaataatatgaacaaactgatttgtagtattgtttt

SEQ ID NO: 20771 - DNA, 961 bp, Homo sapiens
tccatgtttttgctattgtgaatagtgctgcaatgaacatacatgtgcatgtctttttataatagaatgatttatattctgttgtgtatatacccagtaatgggattgctgagttgaatgctatttctgcctttaggtctttgatgaattgccacactgtcttccacaatggttgaactaatttacactcccaccaacggtgaataagtgttcacttttctccacaaccttgtcagcatctattattttttgactttttagtaatagccattctgactgctcacatctattttgtaaataaagttttattgaaacatggccttacccatttgtttacatatattcatggctgtttttgtgccacaatgtcagagttgtcttaaagtagacagagactatctggctgtaaagcctgagatatatactaactggttctttatgtaaaaagtttgctgaccacctactctaaacgttttgcagtgatggtagtgttggcaaaaaaaccaaatagcttaccctctttaaatttcccttttacttccttacaaactccctaacaccatttacgactttgtcatcaatatggtcaactaagcttggtttgcatggctcctacttcctttcaccttccacttaggcagtgtctcccaagtcccactgcagtttctatttgtctcctgactgttactgtatcagttcttacctaaataacataacaactgatctccctactttttgcctatgccctcaaatgtgctcattgttgatctatctccctgttaggtgttctttttctcctctttagaaagcagccaaggaaaccagggttctctcaaagtggaaaatactggaacttatgtactgttatcataatgatagttggtgttttgaattataagaatgattccaggtggtttctaaatcatccaataaagctgtattcactctgtaaaaaaaatta

SEQ ID NO: 20772 - DNA, 335 bp, Homo sapiens
atgagatgcatgactgtgtctcgtcgtctcctcactgcggccccttggaggaagcgccgttggggtcgacatggctttcccgagttctgctacctgtggtctttgtctctttaccctgaagacctctttgcttgttccacttaggtcctgccctccaactctcctgccggtgtcagcggtgacctttattcatgggtccagtggacaccctaatgctgtctttctgcattctacaacttcatttggcagtgttgacttttccccactctttgaaacactcactgctggtttccttggcaggatgttcttctttccctccccccaccccttttctt

SEQ ID NO: 20773 - DNA, 331 bp, Homo sapiens
tgttgatcagcatttcctcatcctcaggcctctcccatcttaagcagcacctttgcgtgtccccctttctttccctatacttctgctacctgtggtctttgtctctttaccctgaagacctctttgcttgttccacttaggtcctgccctccaactctcctgccggtgtcagcggtgacctttattcatgggtccagtggacaccctaatgctgtctttctgcattctacaacttcatttggcagtgttgacttttccccactctttgaaacactcactgctggtttccttggcaggatgttcttctttccctccccccaccccttttctt

SEQ ID NO: 20774 - DNA, 385 bp, Homo sapiens
ctgctgctgtggcacatgcaagtagccatagacagtacagaacccaacaaaatttcatttgcaaaaacaggaggtgagctgaatttggcgagggggctgtagtttgctgcctgcaccttgctataaggtctcacacctagtaaatactcaatggatacagtcattgttattgatgttatctatcaaaatagctttaacaatatatgataataatatacatacatctctgagccaacttctccagtacagacacaaaatcgtggagaacagtgattcttcaactttaccgtgcatgagaatccatggaacttcttaacaatgcggaagtggcctcatcttcaaagaacctgatgcagataatctgagttagagcccaagaactggc

SEQ ID NO: 20775 - DNA, 363 bp, Homo sapiens
agcctttcatagcctgaggttccatccacatggaaacttatacataatgtgacacatctttacattcttccattcaaaacgcttcaaagttactgccattatgaaggaataacttcttcaagatcatggaaccccaaagggtttctttgtgttctttttgacagctaattttatagatggggtctttgaaaatgtgattcttggattgctctataacttcccttgcattatctttttagtcctctccaagtggactttcactcttcactgggccagaaccactcctgccactcacccccatggggccgaatccgggggtcatttctcagtcttcatcttactctgtctgcatcattgacacag

SEQ ID NO: 20776 - DNA, 329 bp, Homo sapiens
gacaggacttaatgggaatggttggtttctgctccaagatcagcctcaactgaaaagattctaatggcaaggggttagaattatctagacgttttcttcacacacatctagatcctggattagaatgactcaaagactgggctcaactgggaatgttaaccaaagaacctgtgtatgacctctctgtgaggcttgggcttccttacagcatggtggccttggggtagtcagctatcagagcttcaaaatgagtgttccagtgaacaagtcagaagctctgtggctctttgtatagcctcagaactcacacagtgccacttttaccatgt

SEQ ID NO: 20777 - DNA, 351 bp, Homo sapiens
ctactactactaaattcgcggccgcgtcgacaagaacgcagtgaattacgcagtccagtgatgctaaaaaccaaccacatacgttaagtctgcaaaataaccagctgacagcatgacgacaggataaaatccacacataccattactaaccttaaatgaaaatgggctaaatgctcccattgaaagacacggggcaagctggataaagaaccaagacccactggagtatgctgtcttcaagaaacccatctcacatgcggtggcatacataggctcaaaataaaggaatgcacaattcatatgattactgaggtcgacgcggccgcgaatttagtagtagtaggcggacga

SEQ ID NO: 20778 - DNA, 443 bp, Homo sapiens
ccttacaagagctcctgaaggaagcactaaatatggaaagaaaaaaccatcaccagccactacaaaaatgcagtgaagaacgcagtgaattacgcagtccagtgatgctaaaaaccaaccacatacgttaagtctgcaaaataaccagctgacagcatgacgacaggataaaatccacacataccattactaaccttaaatgaaaatgggctaaatgctcccattgaaagacacggggcaagctggataaagaaccaagacccactggagtatgctgtcttcaagaaacccatctcacatgcggtggcatacataggctcaaaataaaggaatggagaaaaatatttcaagcaaatggaaaacagaaaaaagcaggtgttgcactcctactttctgacaaaacagactatgcgaataaagataaaaaagagaaggacattaca

SEQ ID NO: 20779 - DNA, 1596 bp, Homo sapiens
  misc_feature (586)..(586): n is a, c, g, or t
  misc_feature (592)..(592): n is a, c, g, or t
  misc_feature (661)..(662): n is a, c, g, or t
  misc_feature (666)..(666): n is a, c, g, or t
gcctttgtaacaataaatagtgatagtgttgttttcattcatctcatccatttataagtctaggtattagatctaagagaagataccctctgcatccaactgctaaagcagggaactgggcaaggagctacatccttcatcaactatccagtcaaatgcaagggaaagggctgaagcagcaagcaaatgaactcagaagaggtgaaatcaatgaatttcatgttctttccattaccatttgctaggtcagcctagctatcctcatggtcaaagattaataaacagaaataaaaacaaattcaccattgctaggcactacaggaagctaaaaaggaaatacttgaagattcagaaaaaaataaaaggaacacttacagtgatttactaccaaaataaaaacatttgtgtttctcgataagtattgtattcccggctcctaaaatctttgtatgacagatggtcagcattcaataaatatacattgaattagtgaataatcttttagaaaatgattccatatcctcagtgggtggcaagaagtctttgaatccataaagcatgaatgtaaggctatagaaagaataanctgagnccaaaaaatatatagagagagaaagagagaaaagaaaagaaagcaagaaggcaagcaagaaagaaaaanncagnaacaaaagagaaagaaatgaaaacaatgtacaaagtaagaaaatatgaaaaatgaaagtgcaattgagggattaatagatgcgtgtaaataaaattttccacatatataagaatttttccatagatagatagatagatagatagatagacagacagatagatagatagatagatagatcctactctaggtctataatttgtcttttgatgtcatgttattttttaataaacagaaatatttattatataaaaaaatctctctctccccccatggccccttcttcctggtttctagtttttatgtctgacttagaaaaacccttatcaaactaaaattatctttctgattttccctaattttatatcatatttttaattttaatctttttaacctaactgaaattttttattatgtctgatgagcaatttgtgtttaataaatgatattaaagaaagaaactttggaagaagtcactgatggtggcttgtaattacagactaagtaatttggatcatgattccttccaaagacatcttaaaagctgaaaaattataaaaataatctctttgtaggctttggagaattaagaagatggtgagaaaatagtgggcaatgatccataagaagataaacatctcaggccgggagcggtggctcacacctgtaatgtcagcactttgggaggccgaggtgggcagatgcttgagctcagaagttcaagatcaccctggctaacatggtgaaaccctgtctctactaaaaatacaaaaattagccaggtatggtggcaggtgcctgtaattccatctacttgagaggcttaggtaggagaagtgcttgaactggggaggcagaggttgtagtgagccaagattgtgccattgcactccagcctgggcaacagagtgagactccatctcaaaaaaaaa

SEQ ID NO: 20780 - DNA, 411 bp, Homo sapiens
gtcctcttggaaaaggaggctacagatggagccatcgtagggcagtggtgcccagaggagggggcctcccagacacacttcatgggtgtagaagttcatgagatggcttttgtcttacaaagtgtgtcactcggccaggtgcggtggctcacgcctgtaatcccggcactttgggaggccaaggcgggcagatcacgaggataagagatggagactatcctggccaacctggggaaaccccgtctctactaaaaataccaaaactaggggggcatggtggcgcgtgcttgtagtcccagctactcgggaggctgaggcaggagaattgcttgactccgggaggcggaggttgcagcgagccgaggtagcgccactgcactccagcctggcgacagagcgagactgcatctt

SEQ ID NO: 20781 - DNA, 362 bp, Homo sapiens
cttagggactccgagctaggtgagaagtccacccttccctccacctacttcctccatggccaaaattctgccttccctctctgcctggctgtctctcttgaaatctgtattcttttcagcagataatgtcaataagccctttatgtgagtaggatttggagcttctctgtttctcatctgaaaatctgccctgtgccagtgagtttgggcctctggcccacacgttaattattgtaccaggattcctggagtcgactggggacagagtgcctctttggttagaagaggggtattctggcagtatttcttttttgaggcattaatctagcttagagaggctgagcaagtgaaaatcgttgtgt

SEQ ID NO: 20782 - DNA, 922 bp, Homo sapiens
gagcacgcactggaacccggggccttcagacctcacgatacctgatcttactggttgctggcaaattaaaagcttatggggttttgttttgtttatacttcgtgaggtcaaaaaagtagcaatggggaaggctggggatacggtaattcctcagagtttctatgcccagagatactttctcttcaaactgttgaccagagcagctacttgtaacccaggccccatcgggtaggaaggtcgtttccctgtgagtcccactaaaacgtgttgggagcaataggttctttgcccatccgaacaagaactagggtactccctcagtccgaattaatgagaattaatttcctagaggttcagcttgagtcggtaacagattttgagccatacatggaaaaatggcaaatacatgattaagtttcaattttgagggggaatgtttggtagaaattgctcatctttggttatgcaagggattagagatgtgaataggatggtatgttgtgttctttgacattttaataaactgtcactttccctgttgtctcctaagtttggagagagaaggaaccagtatttgcaaaaaccaaatggaaagataaaaaagttactaaagtttctacagaatttctggtaacactgaagttgcaaagcagaagttaaattaactcttgtcagtaagcaatccaggaacacgtcagccagtgtatgctaattgtgccgtaacagggtgatttggatatttgtaggggaaatgggtagtaaatatcaagactggtgaccgtaggtcagcccagcacaaaggaagtggagatttttccatgcacaagaatctgatcactgtaaatagctaatttgaataattcagtccccagataaccaacatgggttggttattcataataaactacatattttaatagtt

SEQ ID NO: 20783 - DNA, 390 bp, Homo sapiens
  misc_feature (29)..(29): n is a, c, g, or t
  misc_feature (107)..(107): n is a, c, g, or t
catttgagccccgggaggccagagggttncagtgagcccaggacttgcgccaactgcaattccagcctggggtgaccagagagggactctgtctcacaaaaaaaaangaaaaaaagcctgaggcaagaggatcactggagcccaggagttccaggctgcagtgaaccatgattgcaccactgcactccggacctcaggtgatctgcccgcctcagcctcccaaagtgctgggattacaggcatgagccaccatgccccgcctgtgagtaagtttttatcaatcaatgaaatgatctataagccatacacattaactgattaaaacaatcccttggtttaaataaaaagtacagaaatacctttatatagcatcatctttccccccaacag

SEQ ID NO: 20784 - DNA, 1041 bp, Homo sapiens
caggtctgtttctttattctgttgccctcgtggagcatggtatgttcccttcctaagaaggtttagaactccccttgaggtaaaaagctgcctacatttctgtaccgtaccttacatttgggtggtttttctccccagtctctcctgactcaagtcttgattttcttttgctttatcagaatcttacactttttggttccttttattagttattcatccctctccaggagctctttattacccaataatttacaacacagggaagtgttctgtgacccttttaacccttcttgagcatgataacccattgcacataaaatatatctggttttggctttgctgagtaacgaaaataaaatatatctggtgattgcctgtaagtgggaagactgcagggccctgcagcagcctcctcagcttcctctcctttatgggatccttctagcccactggctaaaatagaaatagaaatgaatattcctgctaccaccttgacagtccccattttaaccattctttagtacctcaccagccccttggctgacccactgcagtaatagtcctgccttcaacttccatgtgccagctctaagaacaacagattgtaaacctctcaacaactaaaaaagaaaaaatatctgaggattacaaagcatccattttttccctatcttctaacatctgttgcacagatagtcctgtttactccagacttggtcctcataccctgtgtaattaccttctaagaaaattgccactagttggtgggcatggtggcttaggcctgtaatcccagcactttgggaggctgaggccggcagatcacctgaggccaggagttcgagaccagcctggccaacatggcaaaacaccgtctctactaaaaatacaaaaattagctgagtgtggtggcacgtgcctgtagtcccagctactcgggaggctgaggcacaagaatcacttaactcggggcgcagaggttacagtgggtcgacatcacgccactgcacaccagcctgggtgacagcaaagctctgtctt

SEQ ID NO: 20785 - DNA, 423 bp, Homo sapiens
attttttaaaaatacataggctttattctagaggtatgcattccattttgtttttacatccatgggtagaccctagaaaataatatttaatagggtgcactggggtaaagagaaaagtttactaatagactgtgaaagaggaccagcccatgtctgcctcagcaagcacacccagcaccccaagggctgagaagattcaaatctcaatagattgcaaacttcttaatttcctaacatagcaatgttcccaggaacactggatgaacagctctactctagaacagagattataaaatttagctgcatattagaatcttcccaggagcttttaaaaaactctacgcctaggctataccccggaatgattaaattagaatatctgacagtaggatcaagacatcagtgatttataaaaaaaaaaaa

SEQ ID NO: 20786 - DNA, 388 bp, Homo sapiens
tcatttgccaaactcatgacagatggtttaacaggggggctactgctcccagggaactgtcagataaatcctcatttccagtgcagcagctgttggcagtctttcatcaaaagtccatccatctggagttacctattgtgattggccaagtagttttgctttggctaccagggcttcgttctgttgaatatgatattcctgaaatctcttggatattctttgtgtcatttaaaaataatttttgtgggaggccaggcgcattggcttatgcctgtaatcccagcactttcatgaggcccaggcgggtagatcacctgaggtcaggagtttgagaccagcctggccaacatggtgaaaccccttctctactgaaaatacaaaaattagc

SEQ ID NO: 20787 - DNA, 2365 bp, Homo sapiens
ggattaattcatgatggacaggtgaactccagaaaagcagtcacccttggcagctttcgtccatcgagcgattctgagagagggaacctctggggtgagccccgaaacgttaggttgcgctcagatcagccctgcactttgggatgtcactgagcagacttcccgagtctccatggcttcctgtaacctgccctttccattggctctgatttaagctgcagcctctggcacaccgatggaagctcgcggcatcgtgttttccatccacgtgctcccacagagccaggttgtccaaaaggaaaataatcccactctggagaagcaaaaactgctggggctgctaagaggagcacactgagtaaaccacccaccttccaacagaatccgccttttttgttatttttccattgcagaaagacgaatggcgggacaggcagggcttttgaggaggtgtggatttcatcctccatcataaacaagcagtggctcaggccagctgatgctttcctcactgagctccttctctgcacatgaagcggaagatggggcgtgccatcctgaggtcgggctgctttccgccatccacccaagccaggtccctactgccccgcactgtgcaccttgcctggttaggacctctttgctctcccacctccagtctctccagacccttcgtccagcttcaattccacatcccccagcgagcctttctcaaacacctgggtgcacgattcgtagtttacaagtattgtggaatcgtgcctttcaacttgtattccttggagccctagagtttctgcggtgtcccaggagctgtcacagtggggagagagctgggtggaagggattctgaccccccactcaccgtccctgcctcaagagccccagtcaccccgagtatgtcacaggccaccttctctccatttctaggagagaaaagagtctaaactttcattccatggatgacaaaacagaggtcctcagaggtcagcctattctccaaagacacatatcaaactcatggcagcaccggacctagaaccttggtcttctaatcaccgccattgctctccccttcaagccttctctcctcctctgaacttggaggagacacagcaggggaaggaatccttggctgggaggaggactccaggctgtgggccaggctggatgaccctaggcaggtccctcccccgctggaccttgggaaatcttttggagacagacagaagctcccttaggtctcttccttccactctgggatgctatgaagaggagcctttagctgtctcctctaggcccttcagggccgtgctggctcatggagcaatcatgtgtggctctttaattaaaattacattttagaaaagcacttcctcaatcacaccagtccctttaagtgctcagcagccacatgtggctttagtttctgtgtcaacagcactgtggtagaggaacccacctgttaccagtacacctgccccagccccttctcagcacagaggtgtgctttagcgtccagaaggaactggccccagtaagtctgggataattgcctattcgctaaatgaaaatgagacacttcctgtccggggtaggcataaaagaaacagaaataaaagccaattaaataggaatgacaagatgatagtgcagattcaaaagaaataggtatgcacaagtgacttaaagcagagtcctcctctagcccaggacactcttcagtctggctgcagctggctagcttcttttttttttttttttaattctaagaaatagattgaaatgaaacgatggaaaagaagcaggacttctccccgtgggtgtctgtgatgtcctaaaaaaaaaaaaaaaaaaggcacctctcctaaaaaggactccaaacgctgtcctgagatcagttttaacctcgtctttcgggccgaaagtagttcacatttcccgagcacaagcatggagattttgaggtgcccaggttagaatttgcgtgtcgtcctcatgatccccaaatgcacttttattccccgagaatcttgcctcccggtggctagtacagtattgtttccttcttgatcatttgtgaagggctggaagctcggggccatccagggtgtttctccagcagcagccgccctgttctcctctctagaatcggcttcctgttgagcggtaactaacctggctgcttagaaccaggtgcgggacctggttagcactgcatcaccagtgtcacgggaaagaggtactttcctagctccccagagacgtaagaatctctctgatctcttattcttgtctagatcagcagggatgaagctatttgaaacagaaaaatgttttcttccctcgaatactctgtgaaaag

SEQ ID NO: 20788 - DNA, 2419 bp, Homo sapiens
ggattaattcatgatggacaggtgaactccagaaaagcagtcacccttggcagctttcgtccatcgagcgattctgagagagggaacctctggggtgagccccgaaacgttaggttgcgctcagatcagccctgcactttgggatgtcactgagcagacttcccgagtctccatggcttcctgtaacctgccctttccattggctctgatttaagctgcagcctctggcacaccgatggaagctcgcggcatcgtgttttccatccacgtgctcccacagagccaggttgtccaaaaggaaaataatcccactctggagaagcaaaaactgctggggctgctaagaggagcacactgagtaaaccacccaccttccaacagaatccgccttttttgttatttttccattgcagaaagacgaatggcgggacaggcagggcttttgaggaggtgtggatttcatcctccatcataaacaagcagtggctcaggccagctgatgctttcctcactgagctccttctctgcacatgaagcggaagatggggcgtgccatcctgaggtcgggctgctttccgccatccacccaagccaggtccctactgccccgcactgtgcaccttgcctggttaggacctctttgctctcccacctccagtctctccagacccttcgtccagcttcaattccacatcccccagcgagcctttctcaaacacctgggtgcacgattcgtagtttacaagtattgtggaatcgtgcctttcaacttgtattccttggagccctagagtttctgcggtgtcccaggagctgtcacagtggggagagagctgggtggaagggattctgaccccccactcaccgtccctgcctcaagagccccagtcaccccgagtatgtcacaggccaccttctctccatttctaggagagaaaagagtctaaactttcattccatggatgacaaaacagaggtcctcagaggtcagcctattctccaaagacacatatcaaactcatggcagcaccggacctagaaccttggtcttctaatcaccgccattgctctccccttcaagccttctctcctcctctgaacttggaggagacacagcaggggaaggaatccttggctgggaggaggactccaggctgtgggccaggctggatgaccctaggcaggtccctcccccgctggaccttgggaaatcttttggagacagacagaagctcccttaggtctcttccttccactctgggatgctatgaagaggagcctttagctgtctcctctaggcccttcagggccgtgctggctcatggagcaatcatgtgtggctctttaattaaaattacattttagaaaagcacttcctcaatcacaccagtccctttaagtgctcagcagccacatgtggctttagtttctgtgtcaacagcactgtggtagaggaacccacctgttaccagtacacctgccccagccccttctcagcacagaggtgtgctttagcgtccagaaggaactggccccagtaagtctgggataattgcctattcgctaaatgaaaatgagacacttcctgtccggggtaggcataaaagaaacagaaataaaagccaattaaataggaatgacaagatgatagtgcagattcaaaagaaataggtatgcacaagtgacttaaagcagagtcctcctctagcccaggacactcttcagtctggctgcagctggctagcttcttttttttttttttttaattctaagaaatagattgaaatgaaacgatggaaaagaagcaggacttctccccgtgggtgtctgtgatgtcctaaaaaaaaaaaaaaaaaaggcacctctcctaaaaaggactccaaacgctgtcctgagatcagttttaacctcgtctttcgggccgaaagtagttcacatttcccgagcacaagcatggagattttgaggaaaatctcccgggccctgtgaagtacaacgtgtcttatcttccccaatgtcaggtgcccaggttagaatttgcgtgtcgtcctcatgatccccaaatgcacttttattccccgagaatcttgcctcccggtggctagtacagtattgtttccttcttgatcatttgtgaagggctggaagctcggggccatccagggtgtttctccagcagcagccgccctgttctcctctctagaatcggcttcctgttgagcggtaactaacctggctgcttagaaccaggtgcgggacctggttagcactgcatcaccagtgtcacgggaaagaggtactttcctagctccccagagacgtaagaatctctctgatctcttattcttgtctagatcagcagggatgaagctatttgaaacagaaaaatgttttcttccctcgaatactctgtgaaaag

SEQ ID NO: 20789 - DNA, 477 bp, Homo sapiens
gtttttgagaaagagttagggcgagtttaaggcactgtggcagctgtgagataaagtctggttcctccccagctggctcaggaaatgttcgcggatacaacggcggccccctctgggcatacctgcctgtggagcggagagtggacggtgtgagggggaccgggagaggcaccaaatctggcctgggggcccgagaagcttcctctcagtgaccacaatatgaatgggaacagcaagatggcaaaagcttgctgagtggtacagcgccagcctgggtagtggcctccccagcaagttgcatgtcactagcttcctgtggctgtcactcctgggcccaggcacctccgaagatcagcacctcctcatgggctcaagcgaggacaggagcccgtcacccatgagctctcaagggcagagccactgtcctgtctcgatggctccaccgtgactccagtggactttggacagtggggagca

SEQ ID NO: 20790 - DNA, 507 bp, Homo sapiens
ggcgcttgcttcaggtggagtctgttagtttttgagaaagagttagggcgagtttaaggcactgtggcagctgtgagataaagtctggttcctccccagctggctcaggaaatgttcgcggatacaacggcggccccctctgggcatacctgcctgtggagcggagagtggacggtgtgagggggaccgggagaggcaccaaatctggcctgggggcccgagaagcttcctctcaggtggggtggcgtgagagtcgaggcctggaggtcggggagggttagctacgtgaagaggggattctgccgcgcttcaggtgcctggaggggatgcccgagctcttccgcagggctagggtgaagccagccagggcctgggggaaaggtagcagaggtttgccatggcttggtatttgagggactttacacatcgtattaagggtttgagcttcaacttggggtcgtcgggagccattgaaggttttttgttgtttgttttttgagacggggt

SEQ ID NO: 20791 - DNA, 890 bp, Homo sapiens
caaggttggggcaagatagaaaaactatttgaagaaataatgggcaaaaacatacttgaggagaaactcatccaggaatcccaacaaaccctaaatagcataagtacaaagagatcttgacctagatacatcatagtcaaactgtagaaagccaaagaaaagaagaaaatcttgaaagtagcaaaagaaaaacaactcagcacatctggggagcattaataagatgaacagctgacttctgactcgagacaatggaaacaaaaaggagttgaatgatgttaaaagtatccaaagaagaaaactgccaacccagaattctataccagtaaaaacagtccttcaaaaatgaaagcaaaaaagacattgtcaggtaaacaagactgaaggaatccattgctggtagacctgccagttcttcagcctgaaaataaatgacacgttggcagcttgagtctatgagaagaaataaagaacactggaaatggtaaatgcatgggttaactggaaagacttaactagttctgcagtctggaagccaaccaaaggctttgaatgatttgttgggtttataatatccacagataaaatatatgtcatattagtacaaaagatggggaattaaatggagcaatattggagcaaaatttctgtatcttactggaatcaagttagcatcagtcttatatagattgtgattaagatgcttactgtaatgcctagagcagctctgaacaaaataactttaaaatatagttttttaaaaaaatcagggctgggcacagtggctgactcctgtaattccagcactttgggaggctgaggcaggtggatcacaaggtcaggagaccaagaccatcctggctaacgcagtgaaaccccgtctctactaa

SEQ ID NO: 20792 - DNA, 951 bp, Homo sapiens
caaggttggggcaagatagaaaaactatttgaagaaataatgggcaaaaacatacttgaggagaaactcatccaggaatcccaacaaaccctaaatagcataagtacaaagagatcttgacctagatacatcatagtcaaactgtagaaagccaaagaaaagaagaaaatcttgaaagtagcaaaagaaaaacaactcagcacatctggggagcattaataagatgaacagctgacttctgactcgagacaatggaaacaaaaaggagttgaatgatgttaaaagtatccaaagaagaaaactgccaacccagaattctataccagtaaaaacagtccttcaaaaatgaaagcaaaaaagacattgtcaggtaaacaagactgaaggaatccattgctggtagacctgccagttcttcagcctgaaaataaatgacacgttggcagcttgagtctatgagaagaaataaagaacactggaaatggtaaatgcatgggttaactggaaagacttaactagttctgcagtctggaagccaaccaaaggctttgaatgatttgttgggtttataatatccacagataaaatatatgtcatattagtacaaaagatggggaattaaatggagcaatattggagcaaaatttctgtatcttactggaatcaagttagcatcagtcttatatagattgtgattaagatgcttactgtaatgcctagagcagctctgaacaaaataactttaaaatatagttttttaaaaaaatcagggctgggcacagtggctgactcctgtaattccagcactttgggaggctgaggcaggtggatcacaaggctggtctcaaacttctgacctcatgatctgcctacctcggcctcacaaagggctgggattacaggcatgtgccactgtgaacatccataattttctttaacttctctgctact

SEQ ID NO: 20793 - DNA, 1413 bp, Homo sapiens
gcggtggagcttagccccttcttccgaaagtcaggttggaggcggcctttaagcgccgcgcgtctctcggaacttaaatattacccggaatcgtctctgtgaattggaaagcccattgaagcctcagagaagccgcgccattgcggaggcacgtaacgtcaagcagggacttcctgcgtcctcgccgcggtggccattttggcttgtcgggaccatccacctatgctgcgtctgtacctctttgtcaggaccgagagcgcgcgagaggagtggttgtgcccattgcacacaggcggatctgaggcttggcgacgccgctggtcgcgacctgggacaggacgagcacaggaaccgcctggcctgcgtccccgcccgcgcatgaagtcgtggcggcggccgctcaagtgagccctgcgacctccaggcctcacccgccatccccacacagaccctgagacccctgactgtgaggggcgcttcctcgcgtccttgcagctcaggcctctgtcagggacctagaggcgccggcgggtggaatccctgtttccgacacccggttgatgcggtcgggagagcgagactggccgagggaccggcttaggcaaaggcctggaggcacgactgcgccaggaggattcggaacacagggacatcttgtgtccactgagaacaaagtatgagtcggagttatttcctcagtaccaggctgaggattgatctttgtgaggaccgtagaagccatggacagttttgaacaaaggaggaaatctgtgttagagttaaagattccgaaaagatgttcaaaggaagaacggagtgtaaggcggtgatgaggacagtgaggcattgagaggttgaatatttgctcaaggtcacgtagctggtaagaggtgacattgagcactgggccacaagattagagactcagcctgaggtcacctggctacagggccaaaaaaagcttacagagaaacctgagtctatcaaatcccagcagggacacattcctgaaagctccgccttttggcacaccttctcatggctatggaagtatttaaggaacccacagaaggaagtataggatgctctagtccctcactggtcctcatcctcacctatatgtctagatcttaatgtcctgggaatttatttatttagcgacagagtgtcactcttggtacccaggttggagtgcagtgacgcgatcatggctcagcatagtcttgacctccccaggctcaggtgatcctcccatctcagtctcccgagaaactggctaatgtttgtgtttttaatagagacggggttttgccatgttgcctaagatggtcgaaaactcctgggctcaagcaatcctcccgccttggcctcctaaagtgctgggattacaggcgtgagccgctggtctggcca

SEQ ID NO: 20794 - DNA, 1207 bp, Homo sapiens
gcggtggagcttagccccttcttccgaaagtcaggttggaggcggcctttaagcgccgcgcgtctctcggaacttaaatattacccggaatcgtctctgtgaattggaaagcccattgaagcctcagagaagccgcgccattgcggaggcacgtaacgtcaagcagggacttcctgcgtcctcgccgcggtggccattttggcttgtcgggaccatccacctatgctgcgtctgtacctctttgtcaggaccgagagcgcgcgagaggagtggttgtgcccattgcacacaggcggatctgaggcttggcgacgccgctggtcgcgacctgggacaggacgagcacaggaaccgcctggcctgcgtccccgcccgcgcatgaagtcgtggcggcggccgctcaagtgagccctgcgacctccaggaggattcggaacacagggacatcttgtgtccactgagaacaaagtatgagtcggagttatttcctcagtaccaggctgaggattgatctttgtgaggaccgtagaagccatggacagttttgaacaaaggaggaaatctgtgttagagttaaagattccgaaaagatgttcaaaggaagaacggagtgtaaggcggtgatgaggacagtgaggcattgagaggttgaatatttgctcaaggtcacgtagctggtaagaggtgacattgagcactgggccacaagattagagactcagcctgaggtcacctggctacagggccaaaaaaagcttacagagaaacctgagtctatcaaatcccagcagggacacattcctgaaagctccgccttttggcacaccttctcatggctatggaagtatttaaggaacccacagaaggaagtataggatgctctagtccctcactggtcctcatcctcacctatatgtctagatcttaatgtcctgggaatttatttatttagcgacagagtgtcactcttggtacccaggttggagtgcagtgacgcgatcatggctcagcatagtcttgacctccccaggctcaggtgatcctcccatctcagtctcccgagaaactggctaatgtttgtgtttttaatagagacggggttttgccatgttgcctaagatggtcgaaaactcctgggctcaagcaatcctcccgccttggcctcctaaagtgctgggattacaggcgtgagccgctggtctggcca

SEQ ID NO: 20795 - DNA, 763 bp, Homo sapiens
acttttttaggggacaggatctaggtgggtgctggtaggctctcctttgggttggggaatggtcctgaaagggaggaaccaaaaaaaacagccctccacctcccccgcccttttttaaccctttgcagttggccacctagtgggggaacacggttgtgtttttaaggattcgggggctggaaaagttttcactctccctccattctaaaattattttttggaaaatcactgggtctgatggcactggacccttgcaagtttcgctggttcctcctgttgcccagggaatctgcccccgacatttgctgctgtagatatttgtttgcctgatagatgctttttttcttccctgagcatttggttgcttcttttataatgctttgcttagagtgggcaaagtgatatcaattccacccgccccctccaaattgttctccccagtagtttttcaccaacgtgaatttactgtctgatattggtgttcgttaggccaacaaattgggtttttttcccagagccttggagaagagagctgcaggctggaagcttgtgtggagtgaccgactcccattggggcagaattacagtgattgaaagtgctcaagaatgtgcctttcacttttttttttccttttaaaggctttttcaattttgctgtgagagtttggtcgtcatctcatggtgagaaaatagctcttgatgatgccttggaaatggagagggcctgcggaagcagggagagactgacacgtgaacaagaaaa

SEQ ID NO: 20796 - DNA, 407 bp, Homo sapiens
caattttaaattttgtggtaactacatgaaacaagttgaaaaagtactaattttagtagtatccttttattaacttagcatatccaaaatattattttaacacgtattcaatatgaaaaaaccactaatgagatattatacattttttctggtactaagtgtctgaaatctggtgtgaatccggtgacagtttgcattttacagcacacacctcagctcagactagcacatttccagtgctcagtagctacatgtgcttagtgactaccatattggacaacataggcttagagtatattttattttatttgaaaattggcaattagtatataatgtcgtggtaacttttttctttttttctttttttgtgacagagtctcactctgttgcccaggctggagtgcaac

SEQ ID NO: 20797 - DNA, 447 bp, Homo sapiens
actattcccagtcttttgctatacaaaagtttccttgtgcatatataatatgcttttgccagtgggtctttagcatagatttctataaatgggattgttaggtcaaagggtaaaagaacatgttattttgtttaattctgccaaattccccttcataggggttgtgcagttttgtattcacaccagcagcatttcctgtttctctgcagcctctccaatagaatgaattgtcaaactcctagatgtttgctaaatcgatatgtgggaaatgttatcaaagtgtagttttttttttttttgagacggagtctcactctgttgcccaggcggaggttgcagtgagccaagatccggccactgcacttcagcctgggtgacacagtgagactccatctaaacaaaataataataaataaaataaaataaaatgtaaaagcaactcctaaa

SEQ ID NO: 20798 - DNA, 522 bp, Homo sapiens
  misc_feature (64)..(64): n is a, c, g, or t
agagacagacaggccagagacagacaggcgagactgtggaaggccagggagatgctgcctctgnctttggtggacctggctccctccctaggaggcttttgccctcagcttgaatacagttcctggtgcatcaaagctgtaagttctcagctgctggcctgcactcatcacctcttcctacaaataaacatttggaaaaaagtccatcttcaatatgcttaaagagaagggtaggagataaggagaaagaacagatacggtttttttcccctttaaggcctttagattttgaggtactgtaaggggcctagaaggacaaaaggctttcattccctcttccttttggcaggcaggttatcagtccttggcagaagggcccagccctatccttttctgtatcaaacaaaatccttgaggttggtatacaagttaaggctgaaaaaaggccttaaattcccagtaaagaatgtgaaagcaagcatgtaaaataaactggtcttcatgaaaaaaatggataatttt

SEQ ID NO: 20799 - DNA, 3014 bp, Homo sapiens
ggcagctctgtaatgagatcaccatggccagcctcccacccgagcaaaaacaaggttagcctgcagcagagccgcagcagcaacagccaccaaagcgggggctgaaagggaagagaacttagatttgacctgtgcaaggacctcagcagcttggacacagcccactgcagagatgaaaggagaagctggacatatgctacacaatgaaaagtcaaagcaggagggacacatctggggctctatgaggaggacagctttcatcctgggctctggacttctctcatttgtggccttctggaactcagtgacatggcatcttcagagattttggggtgcttctggctacttttggcaagcccagtgggagaggctgctgactacatttgaagggaaggagtggatcctcttctttataggtgccatccaagtgccttgtctcttcttctggagcttcaatgggcttctattggtggttgacacaacaggaaaacctaacttcatctctcgctaccgaattcaggtcggcaagaatgaacctgtggatcctgtgaaactgcgccagtctatccgcacagttcttttcaaccagtgcatgatatctttccccatggtggtcttcctctatcccttcctcaaatggtggagagacccctgccgccgtgagctacccaccttccactggttcctcctggagctggccatcttcacgctgatcgaggaagtcttgttctactattcacaccggctccttcaccacccaacattctacaagaaaatccacaagaaacaccatgagtggacagctcccattggcgtgatctctctctatgcccaccctatagagcatgcagtctccaacatgctaccggtgatagtgggcccattagtaatgggctcccacttgtcctccatcaccatgtggttttccttggccctcatcatcaccaccatctcccactgtggctaccaccttcccttcctgccttcgcctgaattccacgactaccaccatctcaagttcaaccagtgctatggggtgctgggtgtgctggaccacctccatgggactgacaccatgttcaagcagaccaaggcctacgagagacatgtcctcctgctgggcttcaccccgctctctgagagcatcccagactccccaaagaggatggagtgagagacagcctaagtgtcatcctggctgtccctcagccatgggatgcagacacggcttcctgattgcacctaacaatttgcctccttcggccacacgccctaatgatggcaccaccagggtagagggaaggtcggcttcccggaaaagcagggccaaggatgaggctttcttcaaactactgcccttgatgtccctcaatgggatcaggagttagcttaagaaaaaggaaaacacagctccccagactggaggctggtcagagggaggagacccctggtcctctgctgtggaaggagaggggttcagccccagataactcctttgtggcctgggcaggatgcagagaatgacaaggctgaaaggagggggactggaggctgcctggctccagcgagagctccttctgggaccagagggtgggacggccaggtatcactttgccccttcctgccccaaaaggctttcacatacccgactcaggccagagccaagacaccctggcaaatcattataggtctcaattcatgacataccagatgccagtcgccacttcacccaacacacacacaaacatacacacaccaaacactctgagtgagtggtaaaggccccgttttaactctggcccaccgcaaacaaaaggtttccctctgtgggggagaaaaagaaatccaggagctcctccctggattaaaaccaacgaggtgcagaccaaactttaacacctttagccttatgtggaaaccaaaaaccaactgctgggaaactgtgaaaagcccttttacccacaaggggaggggtcaaagttgctgccctttggggacacccgagacccctaattagcctatctgaatgaggaccaaaggttagagccctctttctccccgaagaaagagcccggaaaaacatggcagagcaaagagcaaaatcctttctcccccgaatgctttaccagtttctcagcaacatttattcaagatgatttttaccaggaaccttatcaaaggcaaaaccacagctgcttgggttgaagtccccatcctggcctcctctcagccgccagacatggccaggaaccctgtggttcccaagaacaatttaaagatcactctttgatttgaaagaccaccattatcattttactaaattcttatatatacttgtgccttttccaactttcagttctcttaagaaaaacatccactgtagctttataaaataccttagtatcagctaggtccaagtctccaggcaggactatcaaaatggactccttcttcctatcagctctagaaccccagaggacttgcccagtaggccagctgagcacttaccaggcagcatctccctggccttccacagtctcgcctgtctgtctctggccttggtggacctggctccctccctaggaggcttttgccctcagcttgaatacagttcctggtgcatcaaagctgtaagttctcagctgctggcctgcactcatcacctcttcctacaaataaacatttggaaaaaagtccatcttcaatatgcttaaagagaagggtaggagataaggagaaagaacagatacggtttttttcccctttaaggcctttagattttgaggtactgtaaggggcctagaaggacaaaaggctttcattccctcttccttttggcaggcaggttatcagtccttggcagaagggcccagccctatccttttctgtatcaaacaaaatccttgaggttggtatacaagttaaggctgaaaaaaggccttaaattcccagtaaagaatgtgaaagcaagcatgtaaaataaactggtcttcatgaaaaaaatggataatttt

SEQ ID NO: 20800 - DNA, 3150 bp, Homo sapiens
aagttgaggctcaaactgcgtaatttgtcccaagttacaaaggtgaatgccttcaacaaatcaaagtcccgaaactctcaccttctccagatctgggtcaaggaagtttgcctctggtaccaccttgggactaagtgtatacccaactaagtcccttcatctccctggaccctgccttcaatcatccctcctcttgcaggtctccaacatgctaccggtgatagtgggcccattagtaatgggctcccacttgtcctccatcaccatgtggttttccttggccctcatcatcaccaccatctcccactgtggctaccaccttcccttcctgccttcgcctgaattccacgactaccaccatctcaagtaaggaccttctccccacaatgggtccctaggcaacaaccatcaccctccctccttaagcttctgatagcaggcactggtatctcagtttacatgtgagtgctagttggggaagaggtctgatggctgggaaaataaccacactgggatgaccttactcttttccttctgaaattgggtcctcctccaactgggggttttaaacctttatttggactctgggccctttgaataagctctggacattctctttagaaaagtacatatatgcataaaactcctgcaggcaatcacaaggaagtcatgtatctctgaaagccccagactttttcaagtgtagtctacaaacctcctataccagaatcacctgagatgcttgtttaaaatataggctcttgaattccactccaaatatgctgaactaaggtatctgggggagcagggcctggaaacctgcattttagttaagtgttccaggggattctgatgctggtgatctcatacctgaagaagcctagttctgctagagattctcagactgtgggcatcaatcacacagcaagcttttcaaaggaggactccagatacggcaaattgcaggtttggagtggcccccgggagatgcattggtagcaactccccagcttattctgatgcagatggtcaggatggtggtgacaggtgtggggtaggagggctgagaaatgtgtgaggctggcacaaatgaaatgggatctgcacggaagcctccagcatgggcactgcagtgccgtcctctctcttctaggttcaaccagtgctatggggtgctgggtgtgctggaccacctccatgggactgacaccatgttcaagcagaccaaggcctacgagagacatgtcctcctgctgggcttcaccccgctctctgagagcatcccagactccccaaagaggatggagtgagagacagcctaagtgtcatcctggctgtccctcagccatgggatgcagacacggcttcctgattgcacctaacaatttgcctccttcggccacacgccctaatgatggcaccaccagggtagagggaaggtcggcttcccggaaaagcagggccaaggatgaggctttcttcaaactactgcccttgatgtccctcaatgggatcaggagttagcttaagaaaaaggaaaacacagctccccagactggaggctggtcagagggaggagacccctggtcctctgctgtggaaggagaggggttcagccccagataactcctttgtggcctgggcaggatgcagagaatgacaaggctgaaaggagggggactggaggctgcctggctccagcgagagctccttctgggaccagagggtgggacggccaggtatcactttgccccttcctgccccaaaaggctttcacatacccgactcaggccagagccaagacaccctggcaaatcattataggtctcaattcatgacataccagatgccagtcgccacttcacccaacacacacacaaacatacacacaccaaacactctgagtgagtggtaaaggccccgttttaactctggcccaccgcaaacaaaaggtttccctctgtgggggagaaaaagaaatccaggagctcctccctggattaaaaccaacgaggtgcagaccaaactttaacacctttagccttatgtggaaaccaaaaaccaactgctgggaaactgtgaaaagcccttttacccacaaggggaggggtcaaagttgctgccctttggggacacccgagacccctaattagcctatctgaatgaggaccaaaggttagagccctctttctccccgaagaaagagcccggaaaaacatggcagagcaaagagcaaaatcctttctcccccgaatgctttaccagtttctcagcaacatttattcaagatgatttttaccaggaaccttatcaaaggcaaaaccacagctgcttgggttgaagtccccatcctggcctcctctcagccgccagacatggccaggaaccctgtggttcccaagaacaatttaaagatcactctttgatttgaaagaccaccattatcattttactaaattcttatatatacttgtgccttttccaactttcagttctcttaagaaaaacatccactgtagctttataaaataccttagtatcagctaggtccaagtctccaggcaggactatcaaaatggactccttcttcctatcagctctagaaccccagaggacttgcccagtaggccagctgagcacttaccaggcagcatctccctggccttccacagtctcgcctgtctgtctctggccttggtggacctggctccctccctaggaggcttttgccctcagcttgaatacagttcctggtgcatcaaagctgtaagttctcagctgctggcctgcactcatcacctcttcctacaaataaacatttggaaaaaagtccatcttcaatatgcttaaagagaagggtaggagataaggagaaagaacagatacggtttttttcccctttaaggcctttagattttgaggtactgtaaggggcctagaaggacaaaaggctttcattccctcttccttttggcaggcaggttatcagtccttggcagaagggcccagccctatccttttctgtatcaaacaaaatccttgaggttggtatacaagttaaggctgaaaaaaggccttaaattcccagtaaagaatgtgaaagcaagcatgtaaaataaactggtcttcatgaaaaaaatggataatttt

SEQ ID NO: 20801 - DNA, 2978 bp, Homo sapiens
ggcagctctgtaatgagatcaccatggccagcctcccacccgagcaaaaacaaggttagcctgcagcagagccgcagcagcaacagccaccaaagcgggggctgaaagggaagagaacttagatttgacctgtgcaaggacctcagcagcttggacacagcccactgcagagatgaaaggagaagctggacatatgctacacaatgaaaagtcaaagcaggagggacacatctggggctctatgaggaggacagctttcatcctgggctctggacttctctcatttgtggccttctggaactcagtgacatggcatcttcagagattttggggtgcttctggctacttttggcaagcccagtgggagaggctgctgactacatttgaagggaaggagtggatcctcttctttataggtgccatccaagtgccttgtctcttcttctggagcttcaatgggcttctattggtggttgacacaacaggaaaacctaacttcatctctcgctaccgaattcaggtcggcaagaatgaacctgtggatcctgtgaaactgcgccagtctatccgcacagttcttttcaaccagtgcatgatatctttccccatggtggtcttcctctatcccttcctcaaatggtggagagacccctgccgccgtgagctacccaccttccactggttcctcctggagctggccatcttcacgctgatcgaggaagtcttgttctactattcacaccggctccttcaccacccaacattctacaagaaaatccacaagaaacaccatgagtggacagctcccattggcgtgatctctctctatgcccaccctatagagcatgcagtctccaacatgctaccggtgatagtgggcccattagtaatgggctcccacttgtcctccatcaccatgtggttttccttggccctcatcatcaccaccatctcccactgtggctaccaccttcccttcctgccttcgcctgaattccacgactaccaccatctcaagttcaaccagtgctatggggtgctgggtgtgctggaccacctccatgggactgacaccatgttcaagcagaccaaggcctacgagagacatgtcctcctgctgggcttcaccccgctctctgagagcatcccagactccccaaagaggatggagtgagagacagcctaagtgtcatcctggctgtccctcagccatgggatgcagacacggcttcctgattgcacctaacaatttgcctccttcggccacacgccctaatgatggcaccaccagggtagagggaaggtcggcttcccggaaaagcagggccaaggatgaggctttcttcaaactactgcccttgatgtccctcaatgggatcaggagttagcttaagaaaaaggaaaacacagctccccagactggaggctggtcagagggaggagacccctggtcctctgctgtggaaggagaggggttcagccccagataactcctttgtggcctgggcaggatgcagagaatgacaaggctgaaaggagggggactggaggctgcctggctccagcgagagctctttgccccttcctgccccaaaaggctttcacatacccgactcaggccagagccaagacaccctggcaaatcattataggtctcaattcatgacataccagatgccagtcgccacttcacccaacacacacacaaacatacacacaccaaacactctgagtgagtggtaaaggccccgttttaactctggcccaccgcaaacaaaaggtttccctctgtgggggagaaaaagaaatccaggagctcctccctggattaaaaccaacgaggtgcagaccaaactttaacacctttagccttatgtggaaaccaaaaaccaactgctgggaaactgtgaaaagcccttttacccacaaggggaggggtcaaagttgctgccctttggggacacccgagacccctaattagcctatctgaatgaggaccaaaggttagagccctctttctccccgaagaaagagcccggaaaaacatggcagagcaaagagcaaaatcctttctcccccgaatgctttaccagtttctcagcaacatttattcaagatgatttttaccaggaaccttatcaaaggcaaaaccacagctgcttgggttgaagtccccatcctggcctcctctcagccgccagacatggccaggaaccctgtggttcccaagaacaatttaaagatcactctttgatttgaaagaccaccattatcattttactaaattcttatatatacttgtgccttttccaactttcagttctcttaagaaaaacatccactgtagctttataaaataccttagtatcagctaggtccaagtctccaggcaggactatcaaaatggactccttcttcctatcagctctagaaccccagaggacttgcccagtaggccagctgagcacttaccaggcagcatctccctggccttccacagtctcgcctgtctgtctctggccttggtggacctggctccctccctaggaggcttttgccctcagcttgaatacagttcctggtgcatcaaagctgtaagttctcagctgctggcctgcactcatcacctcttcctacaaataaacatttggaaaaaagtccatcttcaatatgcttaaagagaagggtaggagataaggagaaagaacagatacggtttttttcccctttaaggcctttagattttgaggtactgtaaggggcctagaaggacaaaaggctttcattccctcttccttttggcaggcaggttatcagtccttggcagaagggcccagccctatccttttctgtatcaaacaaaatccttgaggttggtatacaagttaaggctgaaaaaaggccttaaattcccagtaaagaatgtgaaagcaagcatgtaaaataaactggtcttcatgaaaaaaatggataatttt

SEQ ID NO: 20802 - DNA, 2912 bp, Homo sapiens
ctggcggatcacaaggccaggagatcgagaccatcctggctaacacggtgaaaccctgtctctactaaaaatacaaaaaattagccgggcgtggtggtggaagcctgtagtcccagctactcaggaggctgagcaggagaatggcgtgaacctgggaggcagagcttgcagtgagccaagattgtgccactgcactccagcctgggcgacagagcgagactctgtctcaaaaaaaaaagaacaaacgcatcttcagagattttggggtgcttctggctacttttggcaagcccagtgggagaggctgctgactacatttgaagggaaggagtggatcctcttctttataggtgccatccaagtgccttgtctcttcttctggagcttcaatgggcttctattggtggttgacacaacaggaaaacctaacttcatctctcgctaccgaattcaggtcggcaagaatgaacctgtggatcctgtgaaactgcgccagtctatccgcacagttcttttcaaccagtgcatgatatctttccccatggtggtcttcctctatcccttcctcaaatggtggagagacccctgccgccgtgagctacccaccttccactggttcctcctggagctggccatcttcacgctgatcgaggaagtcttgttctactattcacaccggctccttcaccacccaacattctacaagaaaatccacaagaaacaccatgagtggacagctcccattggcgtgatctctctctatgcccaccctatagagcatgcagtctccaacatgctaccggtgatagtgggcccattagtaatgggctcccacttgtcctccatcaccatgtggttttccttggccctcatcatcaccaccatctcccactgtggctaccaccttcccttcctgccttcgcctgaattccacgactaccaccatctcaagttcaaccagtgctatggggtgctgggtgtgctggaccacctccatgggactgacaccatgttcaagcagaccaaggcctacgagagacatgtcctcctgctgggcttcaccccgctctctgagagcatcccagactccccaaagaggatggagtgagagacagcctaagtgtcatcctggctgtccctcagccatgggatgcagacacggcttcctgattgcacctaacaatttgcctccttcggccacacgccctaatgatggcaccaccagggtagagggaaggtcggcttcccggaaaagcagggccaaggatgaggctttcttcaaactactgcccttgatgtccctcaatgggatcaggagttagcttaagaaaaaggaaaacacagctccccagactggaggctggtcagagggaggagacccctggtcctctgctgtggaaggagaggggttcagccccagataactcctttgtggcctgggcaggatgcagagaatgacaaggctgaaaggagggggactggaggctgcctggctccagcgagagctctttgccccttcctgccccaaaaggctttcacatacccgactcaggccagagccaagacaccctggcaaatcattataggtctcaattcatgacataccagatgccagtcgccacttcacccaacacacacacaaacatacacacaccaaacactctgagtgagtggtaaaggccccgttttaactctggcccaccgcaaacaaaaggtttccctctgtgggggagaaaaagaaatccaggagctcctccctggattaaaaccaacgaggtgcagaccaaactttaacacctttagccttatgtggaaaccaaaaaccaactgctgggaaactgtgaaaagcccttttacccacaaggggaggggtcaaagttgctgccctttggggacacccgagacccctaattagcctatctgaatgaggaccaaaggttagagccctctttctccccgaagaaagagcccggaaaaacatggcagagcaaagagcaaaatcctttctcccccgaatgctttaccagtttctcagcaacatttattcaagatgatttttaccaggaaccttatcaaaggcaaaaccacagctgcttgggttgaagtccccatcctggcctcctctcagccgccagacatggccaggaaccctgtggttcccaagaacaatttaaagatcactctttgatttgaaagaccaccattatcattttactaaattcttatatatacttgtgccttttccaactttcagttctcttaagaaaaacatccactgtagctttataaaataccttagtatcagctaggtccaagtctccaggcaggactatcaaaatggactccttcttcctatcagctctagaaccccagaggacttgcccagtaggccagctgagcacttaccaggcagcatctccctggccttccacagtctcgcctgtctgtctctggccttggtggacctggctccctccctaggaggcttttgccctcagcttgaatacagttcctggtgcatcaaagctgtaagttctcagctgctggcctgcactcatcacctcttcctacaaataaacatttggaaaaaagtccatcttcaatatgcttaaagagaagggtaggagataaggagaaagaacagatacggtttttttcccctttaaggcctttagattttgaggtactgtaaggggcctagaaggacaaaaggctttcattccctcttccttttggcaggcaggttatcagtccttggcagaagggcccagccctatccttttctgtatcaaacaaaatccttgaggttggtatacaagttaaggctgaaaaaaggccttaaattcccagtaaagaatgtgaaagcaagcatgtaaaataaactggtcttcatgaaaaaaatggataatttt

SEQ ID NO: 20803 - DNA, 2443 bp, Homo sapiens
ggcagctctgtaatgagatcaccatggccagcctcccacccgagcaaaaacaaggttagcctgcagcagagccgcagcagcaacagccaccaaagcgggggctgaaagggaagagaacttagatttgacctgtgcaaggacctcagcagcttggacacagcccactgcagagatgaaaggagaagctggacatatgctacacaatgaaaagtcaaagcaggagggacacatctggggctctatgaggaggacagctttcatcctgggctctggacttctctcatttgtggccttctggaactcagtgacatggcatcttcagagattttggggtgcttctggctacttttggcaagcccagtgggagaggctgctgactacatttgaagggaaggagtggatcctcttctttataggtgccatccaagtgccttgtctcttcttctggagcttcaatgggcttctattggtggttgacacaacaggaaaacctaacttcatctctcgctaccgaattcaggtcggcaagaatgaacctgtggatcctgtgaaactgcgccagtctatccgcacagttcttttcaaccagtgcatgatatctttccccatggtggtcttcctctatcccttcctcaaatggtggagagacccctgccgccgtgagctacccaccttccactggttcctcctggagctggccatcttcacgctgatcgaggaagtcttgttctactattcacaccggctccttcaccacccaacattctacaagaaaatccacaagaaacaccatgagtggacagctcccattggcgtgatctctctctatgcccaccctatagagcatgcagtctccaacatgctaccggtgatagtgggcccattagtaatgggctcccacttgtcctccatcaccatgtggttttccttggccctcatcatcaccaccatctcccactgtggctaccaccttcccttcctgccttcgcctgaattccacgactaccaccatctcaagttcaaccagtgctatggggtgctgggtgtgctggaccacctccatgggactgacaccatgttcaagcagaccaaggcctacgagagacatgtcctcctgctgggcttcaccccgctctctgagagcatcccagactccccaaagaggatggagtgagagacagcctaagtgtcatcctggctgtccctcagccatgggatgcagacacggcttcctgattgcacctaacaatttgcctccttcggccacacgccctaatgatggcaccaccagggtagagggaaggtcggcttcccggaaaagcagggccaaggatgaggctttcttcaaactactgcccttgatgtccctcaatgggatcaggagttagcttaagaaaaaggaaaacacagctccccagactggaggctggtcagagggaggagacccctggtcctctgctgtggaaggagaggggttcagccccagataactcctttgtggcctgggcaggatgcagagaatgacaaggctgaaaggagggggactggaggctgcctggctccagcgagagctccttctgggaccagagggtgggacggccaggtatcaccaaaaccacagctgcttgggttgaagtccccatcctggcctcctctcagccgccagacatggccaggaaccctgtggttcccaagaacaatttaaagatcactctttgatttgaaagaccaccattatcattttactaaattcttatatatacttgtgccttttccaactttcagttctcttaagaaaaacatccactgtagctttataaaataccttagtatcagctaggtccaagtctccaggcaggactatcaaaatggactccttcttcctatcagctctagaaccccagaggacttgcccagtaggccagctgagcacttaccaggcagcatctccctggccttccacagtctcgcctgtctgtctctggccttggtggacctggctccctccctaggaggcttttgccctcagcttgaatacagttcctggtgcatcaaagctgtaagttctcagctgctggcctgcactcatcacctcttcctacaaataaacatttggaaaaaagtccatcttcaatatgcttaaagagaagggtaggagataaggagaaagaacagatacggtttttttcccctttaaggcctttagattttgaggtactgtaaggggcctagaaggacaaaaggctttcattccctcttccttttggcaggcaggttatcagtccttggcagaagggcccagccctatccttttctgtatcaaacaaaatccttgaggttggtatacaagttaaggctgaaaaaaggccttaaattcccagtaaagaatgtgaaagcaagcatgtaaaataaactggtcttcatgaaaaaaatggataatttt

SEQ ID NO: 20804 - DNA, 2958 bp, Homo sapiens
ggcagctctgtaatgagatcaccatggccagcctcccacccgagcaaaaacaaggttagcctgcagcagagccgcagcagcaacagccaccaaagcgggggctgaaagggaagagaacttagatttgacctgtgcaaggacctcagcagcttggacacagcccactgcagagatgaaaggagaagctggacatatgctacacaatgaaaagtcaaagcaggagggacacatctggggctctatgaggaggacagctttcatcctgggctctggacttctctcatttgtggccttctggaactcagtgacatggcatcttcagagattttggggtgcttctggctacttttggcaagcccagtgggagaggctgctgactacatttgaagggaaggagtggatcctcttctttataggtgccatccaagtgccttgtctcttcttctggagcttcaatgggcttctattggtggttgacacaacaggaaaacctaacttcatctctcgctaccgaattcaggtcggcaagaatgaacctgtggatcctgtgaaactgcgccagtctatccgcacagttcttttcaaccagtgcatgatatctttccccatggtggtcttcctctatcccttcctcaaatggtggagagacccctgccgccgtgagctacccaccttccactggttcctcctggagctggccatcttcacgctgatcgaggaagtcttgttctactattcacaccggctccttcaccacccaacattctacaagaaaatccacaagaaacaccatgagtggacagctcccattggcgtgatctctctctatgcccaccctatagagcatgcagtctccaacatgctaccggtgatagtgggcccattagtaatgggctcccacttgtcctccatcaccatgtggttttccttggccctcatcatcaccaccatctcccactgtggctaccaccttcccttcctgccttcgcctgaattccacgactaccaccatctcaagttcaaccagtgctatggggtgctgggtgtgctggaccacctccatgggactgacaccatgttcaagcagaccaaggcctacgagagacatgtcctcctgctgggcttcaccccgctctctgagagcatcccagactccccaaagaggatggagtgagagacagcctaagtgtcatcctggctgtccctcagccatgggatgcagacacggcttcctgattgcacctaacaatttgcctccttcggccacacgccctaatgatggcaccaccagggtagagggaaggtcggcttcccggaaaagcagggccaaggatgaggctttcttcaaactactgcccttgatgtccctcaatgggatcaggagttagcttaagaaaaaggaaaacacagctccccagactggaggctggtcagagggaggagacccctggtcctctgctgtggaaggagaggggttcagccccagataactcctttgtggcctgggcaggatgcagagaatgacaaggctgaaaggagggggactggaggctgcctggctccagcgagagctccttctgggaccagagggtgggacggccaggtatcactttgccccttcctgccccaaaaggctttcacatacccgactcaggccagagccaagacaccctggcaaatcattataggtctcaattcatgacataccagatgccagtcgccacttcacccaacacacacacaaacatacacacaccaaacactctgagtgagtggtaaaggccccgttttaactctggcccaccgcaaacaaaaggtttccctctgtgggggagaaaaagaaatccaggagctcctccctggattaaaaccaacgaggtgcagaccaaactttaacacctttagccttatgtggaaaccaaaaaccaactgctgggaaactgtgaaaagcccttttacccacaaggggaggggtcaaagttgctgccctttggggacacccgagacccctaattagcctatctgaatgaggaccaaaggttagagccctctttctccccgaagaaagagcccggaaaaacatggcagagcaaagagcaaaatcctttctcccccgaatgctttaccagtttctcagcaacatttattcaagatgatttttaccaggaaccttatcaaaggacatggccaggaaccctgtggttcccaagaacaatttaaagatcactctttgatttgaaagaccaccattatcattttactaaattcttatatatacttgtgccttttccaactttcagttctcttaagaaaaacatccactgtagctttataaaataccttagtatcagctaggtccaagtctccaggcaggactatcaaaatggactccttcttcctatcagctctagaaccccagaggacttgcccagtaggccagctgagcacttaccaggcagcatctccctggccttccacagtctcgcctgtctgtctctggccttggtggacctggctccctccctaggaggcttttgccctcagcttgaatacagttcctggtgcatcaaagctgtaagttctcagctgctggcctgcactcatcacctcttcctacaaataaacatttggaaaaaagtccatcttcaatatgcttaaagagaagggtaggagataaggagaaagaacagatacggtttttttcccctttaaggcctttagattttgaggtactgtaaggggcctagaaggacaaaaggctttcattccctcttccttttggcaggcaggttatcagtccttggcagaagggcccagccctatccttttctgtatcaaacaaaatccttgaggttggtatacaagttaaggctgaaaaaaggccttaaattcccagtaaagaatgtgaaagcaagcatgtaaaataaactggtcttcatgaaaaaaatggataatttt

SEQ ID NO: 20805 - DNA, 2960 bp, Homo sapiens
ggcagctctgtaatgagatcaccatggccagcctcccacccgagcaaaaacaaggttagcctgcagcagagccgcagcagcaacagccaccaaagcgggggctgaaagggaagagaacttagatttgacctgtgcaaggacctcagcagcttggacacagcccactgcagagatgaaaggagaagctggacatatgctacacaatgaaaagtcaaagcaggagggacacatctggggctctatgaggaggacagctttcatcctgggctctggacttctctcatttgtggccttctggaactcagtgacatggcatcttcagagattttggggtgcttctggctacttttggcaagcccagtgggagaggctgctgactacatttgaagggaaggagtggatcctcttctttataggtgccatccaagtgccttgtctcttcttctggagcttcaatgggcttctattggtggttgacacaacaggaaaacctaacttcatctctcgctaccgaattcaggtcggcaagaatgaacctgtggatcctgtgaaactgcgccagtctatccgcacagttcttttcaaccagtgcatgatatctttccccatggtggtcttcctctatcccttcctcaaatggtggagagacccctgccgccgtgagctacccaccttccactggttcctcctggagctggccatcttcacgctgatcgaggaagtcttgttctactattcacaccggctccttcaccacccaacattctacaagaaaatccacaagaaacaccatgagtggacagctcccattggcgtgatctctctctatgcccaccctatagagcatgcagtctccaacatgctaccggtgatagtgggcccattagtaatgggctcccacttgtcctccatcaccatgtggttttccttggccctcatcatcaccaccatctcccactgtggctaccaccttcccttcctgccttcgcctgaattccacgactaccaccatctcaagttcaaccagtgctatggggtgctgggtgtgctggaccacctccatgggactgacaccatgttcaagcagaccaaggcctacgagagacatgtcctcctgctgggcttcaccccgctctctgagagcatcccagactccccaaagaggatggagtgagagacagcctaagtgtcatcctggctgtccctcagccatgggatgcagacacggcttcctgattgcacctaacaatttgcctccttcggccacacgccctaatgatggcaccaccagggtagagggaaggtcggcttcccggaaaagcagggccaaggatgaggctttcttcaaactactgcccttgatgtccctcaatgggatcaggagttagcttaagaaaaaggaaaacacagctccccagactggaggctggtcagagggaggagacccctggtcctctgctgtggaaggagaggggttcagccccagataactcctttgtggcctgggcaggatgcagagaatgacaaggctgaaaggagggggactggaggctgcctggctccagcgagagctccttctgggaccagagggtgggacggccaggtatcactttgccccttcctgccccaaaaggctttcacatacccgactcaggccagagccaagacaccctggcaaatcattataggtctcaattcatgacataccagatgccagtcgccacttcacccaacacacacacaaacatacacacaccaaacactctgagtgagtggtaaaggccccgttttaactctggcccaccgcaaacaaaaggtttccctctgtgggggagaaaaagaaatccaggagctcctccctggattaaaaccaacgaggtgcagaccaaactttaacacctttagccttatgtggaaaccaaaaaccaactgctgggaaactgtgaaaagcccttttacccacaaggggaggggtcaaagttgctgccctttggggacacccgagacccctaattagcctatctgaatgaggaccaaaggttagagccctctttctccccgaagaaagagcccggaaaaacatggcagagcaaagagcaaaatcctttctcccccgaatgctttaccagtttctcagcaacatttattcaagatgatttttaccaggaaccttatcaaaggcaaaaccacagctgcttgggttgaagtccccatcctggcctcctctcagccgccagacatggccaggaaccctgtggttcccaagaacaatttaaagatcactctttgatttgaaagaccaccattatcattttactaaattcttatatatacttgtgccttttccaactttcagttctcttaagaaaaacatccactgtagctttataaaataccttagtatcagctaggtccaagtctccaggcaggactataggccagctgagcacttaccaggcagcatctccctggccttccacagtctcgcctgtctgtctctggccttggtggacctggctccctccctaggaggcttttgccctcagcttgaatacagttcctggtgcatcaaagctgtaagttctcagctgctggcctgcactcatcacctcttcctacaaataaacatttggaaaaaagtccatcttcaatatgcttaaagagaagggtaggagataaggagaaagaacagatacggtttttttcccctttaaggcctttagattttgaggtactgtaaggggcctagaaggacaaaaggctttcattccctcttccttttggcaggcaggttatcagtccttggcagaagggcccagccctatccttttctgtatcaaacaaaatccttgaggttggtatacaagttaaggctgaaaaaaggccttaaattcccagtaaagaatgtgaaagcaagcatgtaaaataaactggtcttcatgaaaaaaatggataatttt

SEQ ID NO: 20806 - DNA, 2833 bp, Homo sapiens
ggcagctctgtaatgagatcaccatggccagcctcccacccgagcaaaaacaaggttagcctgcagcagagccgcagcagcaacagccaccaaagcgggggctgaaagggaagagaacttagatttgacctgtgcaaggacctcagcagcttggacacagcccactgcagagatgaaaggagaagctggacatatgctacacaatgaaaagtcaaagcaggagggacacatctggggctctatgaggaggacagctttcatcctgggctctggacttctctcatttgtggccttctggaactcagtgacatggcatcttcagagattttggggtgcttctggctacttttggcaagcccagtgggagaggctgctgactacatttgaagggaaggagtggatcctcttctttataggtgccatccaagtgccttgtctcttcttctggagcttcaatgggcttctattggtggttgacacaacaggaaaacctaacttcatctctcgctaccgaattcaggtcggcaagaatgaacctgtggatcctgtgaaactgcgccagtctatccgcacagttcttttcaaccagtgcatgatatctttccccatggtggtcttcctctatcccttcctcaaatggtggagagacccctgccgccgtgagctacccaccttccactggttcctcctggagctggccatcttcacgctgatcgaggaagtcttgttctactattcacaccggctccttcaccacccaacattctacaagaaaatccacaagaaacaccatgagtggacagctcccattggcgtgatctctctctatgcccaccctatagagcatgcagtctccaacatgctaccggtgatagtgggcccattagtaatgggctcccacttgtcctccatcaccatgtggttttccttggccctcatcatcaccaccatctcccactgtggctaccaccttcccttcctgccttcgcctgaattccacgactaccaccatctcaagttcaaccagtgctatggggtgctgggtgtgctggaccacctccatgggactgacaccatgttcaagcagaccaaggcctacgagagacatgtcctcctgctgggcttcaccccgctctctgagagcatcccagactccccaaagaggatggagtgagagacagcctaagtgtcatcctggctgtccctcagccatgggatgcagacacggcttcctgattgcacctaacaatttgcctccttcggccacacgccctaatgatggcaccaccagggtagagggaaggtcggcttcccggaaaagcagggccaaggatgaggctttcttcaaactactgcccttgatgtccctcaatgggatcaggagttagcttaagaaaaaggaaaacacagctccccagactggaggctggtcagagggaggagacccctggtcctctgctgtggaaggagaggggttcagccccagataactcctttgtggcctgggcaggatgcagagaatgacaaggctgaaaggagggggactggaggctgcctggctccagcgagagctccttctgggaccagagggtgggacggccaggtatcactttgccccttcctgccccaaaaggctttcacatacccgactcaggccagagccaagacaccctggcaaatcattataggtctcaattcatgacataccagatgccagtcgccacttcacccaacacacacacaaacatacacacaccaaacactctgagtgagtggtaaaggccccgttttaactctggcccaccgcaaacaaaaggtttccctctgtgggggagaaaaagaaatccaggagctcctccctggattaaaaccaacgaggtgcagaccaaactttaacacctttagccttatgtggaaaccaaaaaccaactgctgggaaactgtgaaaagcccttttacccacaaggggaggggtcaaagttgctgccctttggggacacccgagacccctaattagcctatctgaatgaggaccaaaggttagagccctctttctccccgaagaaagagcccggaaaaacatggcagagcaaagagcaaaatcctttctcccccgaatgctttaccagtttctcagcaacatttattcaagatgatttttaccaggaaccttatcaaaggcaaaaccacagctgcttgggttgaagtccccatcctggcctcctctcagccgccagacatggccaggaaccctgtggttcccaagaacaatttaaagatcactctttgatttgaaagaccaccattatcattttactaaattcttatatatacttgtgccttttccaactttcagttctcttaagaaaaacatccactgtagctttataaaataccttagtatcagctaggtccaagtctccaggcaggactatcaaaatggactccttcttcttctcagctgctggcctgcactcatcacctcttcctacaaataaacatttggaaaaaagtccatcttcaatatgcttaaagagaagggtaggagataaggagaaagaacagatacggtttttttcccctttaaggcctttagattttgaggtactgtaaggggcctagaaggacaaaaggctttcattccctcttccttttggcaggcaggttatcagtccttggcagaagggcccagccctatccttttctgtatcaaacaaaatccttgaggttggtatacaagttaaggctgaaaaaaggccttaaattcccagtaaagaatgtgaaagcaagcatgtaaaataaactggtcttcatgaaaaaaatggataatttt

SEQ ID NO: 20807 - DNA, 2550 bp, Homo sapiens
ggcagctctgtaatgagatcaccatggccagcctcccacccgagcaaaaacaaggttagcctgcagcagagccgcagcagcaacagccaccaaagcgggggctgaaagggaagagaacttagatttgacctgtgcaaggacctcagcagcttggacacagcccactgcagagatgaaaggagaagctggacatatgctacacaatgaaaagtcaaagcaggagggacacatctggggctctatgaggaggacagctttcatcctgggctctggacttctctcatttgtggccttctggaactcagtgacatggcatcttcagagattttggggtgcttctggctacttttggcaagcccagtgggagaggctgctgactacatttgaagggaaggagtggatcctcttctttataggtgccatccaagtgccttgtctcttcttctggagcttcaatgggcttctattggtggttgacacaacaggaaaacctaacttcatctctcgctaccgaattcaggtcggcaagaatgaacctgtggatcctgtgaaactgcgccagtctatccgcacagttcttttcaaccagtgcatgatatctttccccatggtggtcttcctctatcccttcctcaaatggtggagagacccctgccgccgtgagctacccaccttccactggttcctcctggagctggccatcttcacgctgatcgaggaagtcttgttctactattcacaccggctccttcaccacccaacattctacaagaaaatccacaagaaacaccatgagtggacagctcccattggcgtgatctctctctatgcccaccctatagagcatgcagtctccaacatgctaccggtgatagtgggcccattagtaatgggctcccacttgtcctccatcaccatgtggttttccttggccctcatcatcaccaccatctcccactgtggctaccaccttcccttcctgccttcgcctgaattccacgactaccaccatctcaagttcaaccagtgctatggggtgctgggtgtgctggaccacctccatgggactgacaccatgttcaagcagaccaaggcctacgagagacatgtcctcctgctgggcttcaccccgctctctgagagcatcccagactccccaaagaggatggagtgagagacagcctaagtgtcatcctggctgtccctcagccatgggatgcagacacggcttcctgattgcacctaacaatttgcctccttcggccacacgccctaatgatggcaccaccagggtagagggaaggtcggcttcccggaaaagcagggccaaggatgaggctttcttcaaactactgcccttgatgtccctcaatgggatcaggagttagcttaagaaaaaggaaaacacagctccccagactggaggctggtcagagggaggagacccctggtcctctgctgtggaaggagaggggttcagccccagataactcctttgtggcctgggcaggatgcagagaatgacaaggctgaaaggagggggactggaggctgcctggctccagcgagagctccttctgggaccagagggtgggacggccaggtatcactttgccccttcctgccccaaaaggctttcacatacccgactcaggccagagccaagacaccctggcaaatcattataggtctcaattcatgacataccagatgccagtcgccacttcacccaacacacacacaaacatacacacaccaaacactctgagtgagtggtaaaggccccgttttaactctggcccaccgcaaacaaaaggtttccctctgtgggggagaaaaagaaatccaggagctcctccctggattaaaaccaacgaggtgcagaccaaactttaacacctttagccttatgtggaaaccaaaaaccaactgctgggaaactgtgaaaagcccttttacccacaaggggaggggtcaaagttgctgccctttggggacacccgagacccctaattagcctatctgaatgaggaccaaaggttagagccctctttctccccgaagaaagagcccggaaaaacatggcagagcaaagagcaaaatcctttctcccccgaatgctttaccagtttctcacttgaatacagttcctggtgcatcaaagctgtaagttctcagctgctggcctgcactcatcacctcttcctacaaataaacatttggaaaaaagtccatcttcaatatgcttaaagagaagggtaggagataaggagaaagaacagatacggtttttttcccctttaaggcctttagattttgaggtactgtaaggggcctagaaggacaaaaggctttcattccctcttccttttggcaggcaggttatcagtccttggcagaagggcccagccctatccttttctgtatcaaacaaaatccttgaggttggtatacaagttaaggctgaaaaaaggccttaaattcccagtaaagaatgtgaaagcaagcatgtaaaataaactggtcttcatgaaaaaaatggataatttt

SEQ ID NO: 20808 - DNA, 3880 bp, Homo sapiens
ggcagctctgtaatgagatcaccatggccagcctcccacccgagcaaaaacaaggttagcctgcagcagagccgcagcagcaacagccaccaaagcgggggctgaaagggaagagaacttagatttgacctgtgcaaggacctcagcagcttggacacagcccactgcagagatgaaaggagaagctggacatatgctacacaatgaaaagtcaaagcaggagggacacatctggggctctatgaggaggacagctttcatcctgggctctggacttctctcatttgtggccttctggaactcagtgacatggcatcttcagagattttggggtgcttctggctacttttggcaagcccagtgggagaggctgctgactacatttgaagggaaggagtggatcctcttctttataggtgccatccaagtgccttgtctcttcttctggagcttcaatgggcttctattggtggttgacacaacaggaaaacctaacttcatctctcgctaccgaattcaggtcggcaagaatgaacctgtggatcctgtgaaactgcgccagtctatccgcacagttcttttcaaccagtgcatgatatctttccccatggtggtcttcctctatcccttcctcaaatggtggagagacccctgccgccgtgagctacccaccttccactggttcctcctggagctggccatcttcacgctgatcgaggaagtcttgttctactattcacaccggtgagcaggccctgcctgaggcacagctggctcctcatcctgtctagggctcactgatcaacaaggaaactgaggccaggctccttcaccacccaacattctacaagaaaatccacaagaaacaccatgagtggacagctcccattggcgtgatctctctctatgcccaccctatagagcatgcagtctccaacatgctaccggtgatagtgggcccattagtaatgggctcccacttgtcctccatcaccatgtggttttccttggccctcatcatcaccaccatctcccactgtggctaccaccttcccttcctgccttcgcctgaattccacgactaccaccatctcaagtaaggaccttctccccacaatgggtccctaggcaacaaccatcaccctccctccttaagcttctgatagcaggcactggtatctcagtttacatgtgagtgctagttggggaagaggtctgatggctgggaaaataaccacactgggatgaccttactcttttccttctgaaattgggtcctcctccaactgggggttttaaacctttatttggactctgggccctttgaataagctctggacattctctttagaaaagtacatatatgcataaaactcctgcaggcaatcacaaggaagtcatgtatctctgaaagccccagactttttcaagtgtagtctacaaacctcctataccagaatcacctgagatgcttgtttaaaatataggctcttgaattccactccaaatatgctgaactaaggtatctgggggagcagggcctggaaacctgcattttagttaagtgttccaggggattctgatgctggtgatctcatacctgaagaagcctagttctgctagagattctcagactgtgggcatcaatcacacagcaagcttttcaaaggaggactccagatacggcaaattgcaggtttggagtggcccccgggagatgcattggtagcaactccccagcttattctgatgcagatggtcaggatggtggtgacaggtgtggggtaggagggctgagaaatgtgtgaggctggcacaaatgaaatgggatctgcacggaagcctccagcatgggcactgcagtgccgtcctctctcttctaggttcaaccagtgctatggggtgctgggtgtgctggaccacctccatgggactgacaccatgttcaagcagaccaaggcctacgagagacatgtcctcctgctgggcttcaccccgctctctgagagcatcccagactccccaaagaggatggagtgagagacagcctaagtgtcatcctggctgtccctcagccatgggatgcagacacggcttcctgattgcacctaacaatttgcctccttcggccacacgccctaatgatggcaccaccagggtagagggaaggtcggcttcccggaaaagcagggccaaggatgaggctttcttcaaactactgcccttgatgtccctcaatgggatcaggagttagcttaagaaaaaggaaaacacagctccccagactggaggctggtcagagggaggagacccctggtcctctgctgtggaaggagaggggttcagccccagataactcctttgtggcctgggcaggatgcagagaatgacaaggctgaaaggagggggactggaggctgcctggctccagcgagagctccttctgggaccagagggtgggacggccaggtatcactttgccccttcctgccccaaaaggctttcacatacccgactcaggccagagccaagacaccctggcaaatcattataggtctcaattcatgacataccagatgccagtcgccacttcacccaacacacacacaaacatacacacaccaaacactctgagtgagtggtaaaggccccgttttaactctggcccaccgcaaacaaaaggtttccctctgtgggggagaaaaagaaatccaggagctcctccctggattaaaaccaacgaggtgcagaccaaactttaacacctttagccttatgtggaaaccaaaaaccaactgctgggaaactgtgaaaagcccttttacccacaaggggaggggtcaaagttgctgccctttggggacacccgagacccctaattagcctatctgaatgaggaccaaaggttagagccctctttctccccgaagaaagagcccggaaaaacatggcagagcaaagagcaaaatcctttctcccccgaatgctttaccagtttctcagcaacatttattcaagatgatttttaccaggaaccttatcaaaggcaaaaccacagctgcttgggttgaagtccccatcctggcctcctctcagccgccagacatggccaggaaccctgtggttcccaagaacaatttaaagatcactctttgatttgaaagaccaccattatcattttactaaattcttatatatacttgtgccttttccaactttcagttctcttaagaaaaacatccactgtagctttataaaataccttagtatcagctaggtccaagtctccaggcaggactatcaaaatggactccttcttcctatcagctctagaaccccagaggacttgcccagtaggccagctgagcacttaccaggcagcatctccctggccttccacagtctcgcctgtctgtctctggccttggtggacctggctccctccctaggaggcttttgccctcagcttgaatacagttcctggtgcatcaaagctgtaagttctcagctgctggcctgcactcatcacctcttcctacaaataaacatttggaaaaaagtccatcttcaatatgcttaaagagaagggtaggagataaggagaaagaacagatacggtttttttcccctttaaggcctttagattttgaggtactgtaaggggcctagaaggacaaaaggctttcattccctcttccttttggcaggcaggttatcagtccttggcagaagggcccagccctatccttttctgtatcaaacaaaatccttgaggttggtatacaagttaaggctgaaaaaaggccttaaattcccagtaaagaatgtgaaagcaagcatgtaaaataaactggtcttcatgaaaaaaatggataatttt

SEQ ID NO: 20809 - DNA, 2103 bp, Homo sapiens
ggcagctctgtaatgagatcaccatggccagcctcccacccgagcaaaaacaaggttagcctgcagcagagccgcagcagcaacagccaccaaagcgggggctgaaagggaagagaacttagatttgacctgtgcaaggacctcagcagcttggacacagcccactgcagagatgaaaggagaagctggacatatgctacacaatgaaaagtcaaagcaggagggacacatctggggctctatgaggaggacagctttcatcctgggctctggacttctctcatttgtggccttctggaactcagtgacatggcatcttcagagattttggggtgcttctggctacttttggcaagcccagtgggagaggctgctgactacatttgaagggaaggagtggatcctcttctttataggtgccatccaagtgccttgtctcttcttctggagcttcaatgggcttctattggtggttgacacaacaggaaaacctaacttcatctctcgctaccgaattcaggtcggcaagaatgaacctgtggatcctgtgaaactgcgccagtctatccgcacagttcttttcaaccagtgcatgatatctttccccatggtggtcttcctctatcccttcctcaaatggtggagagacccctgccgccgtgagctacccaccttccactggttcctcctggagctggccatcttcacgctgatcgaggaagtcttgttctactattcacaccggctccttcaccacccaacattctacaagaaaatccacaagaaacaccatgagtggacagctcccattggcgtgatctctctctatgcccaccctatagagcatgcagtctccaacatgctaccggtgatagtgggcccattagtaatgggctcccacttgtcctccatcaccatgtggttttccttggccctcatcatcaccaccatctcccactgtggctaccaccttcccttcctgccttcgcctgaattccacgactaccaccatctcaagttcaaccagtgctatggggtgctgggtgtgctggaccacctccatgggactgacaccatgttcaagcagaccaaggcctacgagagacatgtcctcctgctgggcttcaccccgctctctgagagcatcccagactccccaaagaggatggagtgagagacagcctaagtgtcatcctggctgtccctcagccatgggatgcagacacggcttcctgattgcacctaacaatttgcctccttcggccacacgccctaatgatggcaccaccagggtagagggaaggtcggcttcccggaaaagcagggccaaggatgaggctttcttcaaactactgcccttgatgtccctcaatgggatcaggagttagcttaagaaaaaggaaaacacagctccccagactggaggctggtcagagggaggagacccctggtcctctgctgtggaaggagaggggttcagccccagataactcctttgtggcctgggcaggatgcagagaatgacaaggctgaaaggagggggactggaggctgcctggctccagcgagagctccttctgggaccagagggtgggacggccaggtatcactttgccccttcctgccccaaaaggctttcacatacccttggtggacctggctccctccctaggaggcttttgccctcagcttgaatacagttcctggtgcatcaaagctgtaagttctcagctgctggcctgcactcatcacctcttcctacaaataaacatttggaaaaaagtccatcttcaatatgcttaaagagaagggtaggagataaggagaaagaacagatacggtttttttcccctttaaggcctttagattttgaggtactgtaaggggcctagaaggacaaaaggctttcattccctcttccttttggcaggcaggttatcagtccttggcagaagggcccagccctatccttttctgtatcaaacaaaatccttgaggttggtatacaagttaaggctgaaaaaaggccttaaattcccagtaaagaatgtgaaagcaagcatgtaaaataaactggtcttcatgaaaaaaatggataatttt

SEQ ID NO: 20810 - DNA, 447 bp, Homo sapiens
taaagatttgatggtgaaaagtgctctggagaaaagtcaagcaggcacaggggaaatggcaagctgagatttggctgagggagtaagtggtcatggtgggcctaaagaataactggggaaaggtgacattttagcaaataagtgagggactgagccctgtagaagtaaaggaaagatcagtcttggtagagagaatatccccaaggcccttgttaagtttcattttattgacaagattttcttgatcagactatgcatgtctatactgagacatgttatagaagatgaaatatatatcagttggaataaaaatagtttaaaaatggccaagtgtggctgggtgcggtggttcacgcctgtaatcccagcactttgggaggccgaggattccttggggccaggagtttgggaccagcctggccaacatggtgaaaccccgtctctact

SEQ ID NO: 20811 - DNA, 344 bp, Homo sapiens
tttttttttaaacggagtctcactctgtcgcccaggctggagtgcagtggtgcgatctcggctcactgcaagcttcacctcccgggttcacgccattctcctgcctcagcctcccgagtagctgggactacaggtgcccgccaccacgcccggctaattttttgtatttttagtagagacggggtttcaccatgttagccaggatggtctcaatctcctgacctcatgatccgcctgtcttggcctcccaaagtgctgggattacaggcgtgagccaccacgcctggcctgtactaggtacattttaagtgctcaatatccacacatgactagtggctattata

SEQ ID NO: 20812 - DNA, 314 bp, Homo sapiens
cccacttctctaacctctttctccacccatcctatccctggctacctgagttccaaacaaagaagacctgccttccattcctcccctgggtcaaaatctctcaaatgcctcagtgtactagtaacacgctgctcccttctgcctagaaatgttatttcttggattttcttattgcttggatgtctctttttcatcgcttcagttccagagccttccctgaccactctggctgatgctgcctcaacaactgtggcagaagctactggttgtgcacaatattcttctcgttcctgagcacatggctacacaacact

SEQ ID NO: 20813 - DNA, 818 bp, Homo sapiens
atgtcccaagaaggacacatttttataaacataagttactattgttatatatatgctaacgtttgtctagaaaaagtctagaaaaatacacactgaactgtgaatagcagttatatttagaaagcaacattaggatggacttaagtcagggctcggactagagcaaggcaagtgaggtgccaggatgcaaaagttaaggagacacctgacctcaggggcccacaactgcagagcccctgacagtgagtgtctcagtagcctcgccctagtcctggctttcacttaaatatgttttcgaatgtttgtaataaaatatttcttttggaaggcaaaaatagcaaggaaaataaataggattaaaggatactaaagcccattcaataaaatttgtaggaggccactgatttggcctaggctcctatgatgtaaccaacagaccaaaccaatatggagtcattcatgctaaatgaaactagttaggagtatattcatataacaagtggctaagtgtcagttacagcctctgagctttagtcaattgtaggtggtcaatagattcagataaggcaatccagttaaactgtatatcccacttgctgttttctgtccctaaattctctctgagtacactgcagccctgaagttctttgaacctgttctgggttctgagggctgtccaattactgaatcatacataaaagccaagtaagattttaaaatttgttataattttggtttttaacaacttctgttgtaaataataaaagcactaaatccctactgaaaataaagggcctaaagactgaaaaaaaatgcaa

SEQ ID NO: 20814 - DNA, 617 bp, Homo sapiens
gggacaactacaaaggctgtaacatacacataatgggaatactggtggtgttgcggaccagttggaggtgaccaggtgggtgctatctgatggttttactgcctgtgccacatacaactgtttcctcatgatgatgccattttcataagttggatttcttcacgtgggcagacacacgagccattggcatctcacttagactcttcctatttcacacaaacttaaactttagtggtatttcctgagcttaacagaaaatgaagaaagcattccacatacctgttttggggtcctccccatttttcctaactctgcacagaaattagaagcagggagttctttctatatttactaacataacacacatcacttcttttaatttggcatccttcctccctttatgtaattgacgcactgaccagttctgtccttttaatgggactctctctacttaaggagctgctaatttccaatcacctttggcatctttctttgagcataatgtgatcctgctggaattcacggcacacctaaaccttattttggtctcaagagaaatactactaccagcaattgatcttcgatgtctggatcatcagtaaaagtttccacttatg

SEQ ID NO: 20815 - DNA, 528 bp, Homo sapiens
tgtgcctgagtagtaactttaatttgttgtcaagatggttttgagtcctgtgcggtttagtttcccactttttgtcttgcctccctggctataggcctgggggcaggaccacagtttcaagctcctgagtcttctgctgagtctggccagatacctgaggcccagtgggtgctcccacatccttttgagttgatggattttacaaggcaggggccaaaactccctactaaataattgatcaacacgcctcttggattttgtatccactcctgtgtgtagatatcacctgctgtatttggccctatctttgcttaaaaaaaaaaaaaaaaaaggtcttcgggggaacccgacctcgaatgacaactcaagctaagagctgatctgtgcggaaagccatcacccccactgacagcagaatcagaagcatcttgcagaaggctctgttgtcactcccaactttatgctctacctacagcgccttaacctacacgccttgtgactttccctgaggaggtgttggaccttgtt

SEQ ID NO: 20816 - DNA, 669 bp, Homo sapiens
caggctggtctcgaactcctgggctcaagcagtctgcccgcctcagcctcccaaagttctgggattacaggtgtgaaccaccatgccccgctgccccttctttacttagctatattttccttactaagagttagttccctagcccatcagaaagattcccaggctggctacttcgggatgacccttgcattttttattgaaatcatttctgaatcttttttccccactagcttttaagacataggaactatatcttgttcagctttgcacttccaattataaaaaaatgcctggcgtgtgttaggcactcagaaaatgtttgaactgaaccaatggtgtgtgtgtctctgcacactctaagttagtgtaaatcagaacagcttgttgttgctgcttgttttgatccaagaccaaagagtgattgataaatgtgctaagtattttctgtgttcttaagtatgtttggtgtaacataatttggcatacacacatattaaattgccttcattcttaaaaaaaaaaaaaaggacaacaacatcatgcctttagattatgtggaacccctgaattttttctcagggtacctgccagggagtggtccctttttacagtataactaaaaaaacttctgcttgtatttattttgtaagttcagccgctcagtcgaag

SEQ ID NO: 20817 - DNA, 431 bp, Homo sapiens
taacctctacatccaaattaggaactgtctaaggctgaccccttttacagtggtgactcaagacccagctagattttgggaattctaatgtgaattcatagagttctaatgctagattaggaactctaatgtgttctgatgttaagaaggagtgtattctgtgttattcacaggaatggtgtagagattagtaaagatgtggatagccaaagagaagttgagcaacccgtagtattttactcactgcagcaaaatgttttgataaccattttagagttgctctgataggtttcaagctgggagataattagattttattttaaaatatttctattttttgtagagacagggtctcgctatgctgtctaagattgcttgagcccaggcatttgaaaccagcccggacaacgtgatgaaaccctttctcttcc

SEQ ID NO: 20818 - DNA, 279 bp, Homo sapiens
gtctagatgtacatagtactgccaaattgcttttaagaaagattatgtcaacttagactgtcactggcaatggatgaaagtacttcctactttgtttttatctatattgccttaaaattatgattttaaaaatttgcaaattagaagatataaaaattttgccaggtgcattggttcacacctgtaatcccagcgctttggaagaccaaggtgggaggattgcttgagcccaggcatttgaaaccagcccggacaacgtgatgaaaccctttctcttcc

SEQ ID NO: 20819 - DNA, 837 bp, Homo sapiens
tggtcccagtactctagaagggcacacctctgtcctggaaaataatacaagaatgaatactcttcccgtgacccattctggtcattcttccagcatcacaaaaaccaaaaaatggaaatatggccaaatacgtgattagctgtccctcatcttcaggtttcttatctgttacttatagataatagcattaccttaaggattatgatgaagatacaatgtccaaatataaacacagttttgagcaaaatgccttgtatgaattggtcaatgaataattactaaatatgtgaatatttactggattgtatggatcctatgaataattactgaataattattgtgattgcttttattggcagtgctgaaaactcatccctttgtgacctcaagtaacccatgacactttgtgaacctgcagttttttcatttagaaacttgacagattttcattctgacacagaatgtcaggtctcccagaccctagaaaatacattgacttaaagcctttgatacatctcaaagcagtatccttacagtgtcactggaagatggtgcgggctgcagagagggatgctttcaaatgggattaaccagtcctccttccttcacttccacatgaatgctgggcagcccagggtcaacccactgcaccctcaactcaggcaagtccagcagccaatcttaggagacctgggctacagaacagtctctcaagttccaggctcacaaaacctaggtggggatgaaagctgagaaagcgaagaggtggttcaggggatcactctttcctacttgttcctctcacctcaaactcaccttctactgcacagcaacact

SEQ ID NO: 20820 - DNA, 762 bp, Homo sapiens
tgagatggagtctcgttctgttgctcaggccggactgcagtggcgctatctcggctcactgtaagttccacctcccgggttcatgccattctcctgtctctactaaaaatcaaaaaaaaaaaaaaaaaaaatggctgatttcagagtcatattcaggtttaaattctgtcattcagcccaaactcattactttatgttacttatgggaacctcatctaaaaagcaaggatcctgatacctgcctcatattgtggcaaggatcaaatgagtcaaataagatgcttgtgaaagtgaggacaggatctatcctcaacacctagtgcaattctttttacacattaggtacttagtaatttgggttgaattgtgttgaactaacctggcggtataggcaaaatttggaagtttggttttcagaaagtcttgacttcctcttatctctaagtaattggcatgtcctctaattcatattttcccccctcatctgttgggtgaaatactgtttatcctttagtactaaaattaaaagttacctcattcttctagctagctgattttttttttaatctaggctaaatcatgaatacatttacatttaaataaaatattacagttgaaagtaaagggtcctttcattatctccacttccaattccagtaccctgtgtaaaggaaaacatatacatcttgcagacattttttaatgtgtttgtaatataggtacataaaaatatatgtgcttgttttaagcaaaaaaaaaact

SEQ ID NO: 20821 - DNA, 1395 bp, Homo sapiens
aaaacagtgcaatacagaacagtggaaattggaaattccaatcttggaatctctaggaaagtaactgaggcatacgatgcctgaaaaggagtagaaaataaaattaataaggtgggaccatatgataagagatttgaggccgggcactgtggctcacacctgtaatcccagcactatgggaggctgaggcgggcggatcacctgaggtcaggggtccgagaccagcttggccaacatggtgaaaccccgtctttactaaaaatacaaaaattagacaggcatggtggagcatgcctgtaatcccagctacttgggaggctgaggcgggagaatcgcttgaacccaggaggtggaggttgcagtgggctgacattacgccatagcactccagcttgggcgacagagggagactctgtctcaaaaaaaagacttgagcaagggcgtaatcttcaggaaggtcagtctggtagcatagtgtggattgggttgggggatggggaaggagagcagaaaattattgaaatatccaggtgcataaaagtctactttgattatggagaactacacacttgttcagtcaccctcattggagacgggggatggcatacgaaaagaatgctgatttcaggctgggcacggtggctcatgcctttaatcccagcactttgggaggctgaggcaggtgaatcaggggttcaagaccagcctggccaatgtggtgaaaccctgtctctactaaaaatcaaaaaaaaaaaaaaaaaaaatggctgatttcagagtcatattcaggtttaaattctgtcattcagcccaaactcattactttatgttacttatgggaacctcatctaaaaagcaaggatcctgatacctgcctcatattgtggcaaggatcaaatgagtcaaataagatgcttgtgaaagtgaggacaggatctatcctcaacacctagtgcaattctttttacacattaggtacttagtaatttgggttgaattgtgttgaactaacctggcggtataggcaaaatttggaagtttggttttcagaaagtcttgacttcctcttatctctaagtaattggcatgtcctctaattcatattttcccccctcatctgttgggtgaaatactgtttatcctttagtactaaaattaaaagttacctcattcttctagctagctgattttttttttaatctaggctaaatcatgaatacatttacatttaaataaaatattacagttgaaagtaaagggtcctttcattatctccacttccaattccagtaccctgtgtaaaggaaaacatatacatcttgcagacattttttaatgtgtttgtaatataggtacataaaaatatatgtgcttgttttaagcaaaaaaaaaact

SEQ ID NO: 20822 - DNA, 378 bp, Homo sapiens
gtttcgggagagaggaaaatatatgaaatcactgtctagaaatgagaaagaatggtcctgaatgtagcatcaatgccagtggtgtgaagttcttgcttgaagtcagtggtcattttaaagaataccagtcatcgtagctgaatgacatttccaatcacgcttagctgctcagctgcaggtccgtaagagggtgaagagctgcagctaagcaagtctgaggtcttaccaagacagtatgcaatgctaccctcccatcttctttccacagaacttcattatccacaaacagtcacatgatctcatttgatccaaacagccccttgatgtgtccgtctccattaggggaggaccctgaggctcaattaggttaaacgactt

SEQ ID NO: 20823 - DNA, 906 bp, Homo sapiens
gcctccagttctccagcagtgaccccagcaagccccaggagacagtcctgcaggcacaagccctggagtgtgctgggcctgctgtggccctgcgttggcatcagtgccaggcatgcccagaagcagggggtgcgacacagcactccgggtggcagggaaggggcctcggcgccctgcatgccgctgaggacttgtgcgagtcactggacccttcatcttggcacctgtcacttgctggagatggactcactttgccgtggtgaacactggaggcaacaggaggaaaaagcgccattcaaaagagaatcaaatgaaaaaagtcaccttgtttctatctgcctgtgattcagtctaaagattatcaggtggtagaagaggaagacgagaaacagacacctaggcccccatggaaggatcccggctgcagcttccctcgagagcacagcgtgggggatccactgcccaaatggtcatccgtgtcaaactcccggtgacagggaccctgctgccccaatccgcctgctcttcagggagggagtggggttttaccctgtccttctgcttccttttcatgggagaaaaggggcaaggcccggcccggccgacggaggacctggcaaggggagcccgcccacgcttcacctgtgctcagcagcgtgcgggagctgctgggctgtgcaccagaagcaggacagctggcaattccaggctttaccagttgccatcaggcaaaggagctccccaggcagaatctgcacggcgtcccatcagcccccacaccgtgagaggaacggggcaagccttggctctaatattagtcagctgcttggctccccgcagagtcactgttttattcccgctagagacttcagttcaaaattaagtgataaaaaaatactccagctc

SEQ ID NO: 20824 - DNA, 454 bp, Homo sapiens
tattattttttacaaaaagaaaggtgacaggaaccaaaagcaaagcctgtctcaacaatatttgtaattaatacccttaaatcacctgctttttacaccatcttgtctacttatagaacctttagagtagccttagaaactggctataaagccagggaaacgcaacaaagacaattcattattccaataaactacaggctattttcagtaacgtgaagcataacaaaaatatcaataacaaagatataaagaagaccaggtaacaaaacggagcttaagaaaaaaggagctgggtgcggtggctcacatctgtaatccctgcactttgggggccgcagcaggtggatcgcttgaggtcaggagttcaacaccagcctggctaacttagtgaaaccacatctctactaaaaatcaaaaaatcattagctaggcctggtggtgggcacctgtagta

SEQ ID NO: 20825 - DNA, 476 bp, Homo sapiens
gcaatagtgtcactgttcctaattccaagtggagaagaccaaggctaggcctggttatctgctgtctctgatacacacaaccaaaccctggtggagcctggtgtgggtttcctgactcttactcagcccagtgtcccctggtgcttcctggctccacggtccctcagttacctggtgccctgggggtgggggggacgcaacacaccccccccccaaccacatgctgactgagcttgtgcaggtacttcaccgcgttgtctcatgtccttgtctgtcaaatgggtgtaacattctctcaccatattggattgttctaggatgaatttaggagttttgaaataccctttttcctttgttttctcttcatctgttccccttttcatcatttgacagctgatcagtgcctctcatgaagaaatggagaatgattggcatgagtccctcagtggtgctccctgtgagcaccccagtgtccg

SEQ ID NO: 20826 - DNA, 385 bp, Homo sapiens
atttgtatctaagtgcctcattccaggaattcaggaatgtgttgatattagaaattctattaatatgatttatcacattgagaagtttgaaaaaatccataataggctgggcacggtggctcacgcctgtaatcccagcactttgggaggcccaggtgggtggatcacgaggtcaggagatcgagaccatcctggctaacacggtgaaaccctgtctctactagaaatacaaaaaattagccgggtgtggtagcgggcgcctgtagtcccagctactcgggaggctgaggcaggagaatggcgtgaacctgggaggcggagcttgcagtgagccgagatcgcgccactgcactccagcctgggcgacagagcgagactccgtctc

SEQ ID NO: 20827 - DNA, 384 bp, Homo sapiens
gagatggagtttcactgatgttgcctaggctggagtgcaatgccacgatctcagctcactgcaacctccgcttccaggttcaagcgattctcctgcctcagcctcccaagtagctgggattacaggctcccgccaccatgcctggctaatttttgtatttttagtagagatggagtttcaccatgttggccaggctggtctcaaattcctaacctcaggtgatccacccgcctcagcctcccaaagtgctgggattacaggtgtgagccaccgcgcccggctttttgatttttttaaactgtcattactcggggtttatagtctactactatattgctgagaacagttttcaagattaaaaataaaaatgttttctgtttctct

SEQ ID NO: 20828 - DNA, 142 bp, Homo sapiens
catttatctcctttgataaagttaggtgcttatgaggttgtgaactcaattctcaggagtataggttaacttctggtttagaagccaaactacattatacaccacaacacactagggacaaaaggggccctttgataagtca

SEQ ID NO: 20829 - DNA, 298 bp, Homo sapiens
gaaggctgaggcaggagaaccatttgatcccaggagttcaaggctgcagtgagctatgatcatgccactgtactccagcctgggtgacagagtgagactccattgctaaaaaaaatagtaataataaaagagaaaaaaggatttcccagataagcaaaagactgtttgtttgtgtcttgtttgttgtggtcttacaagaaatgtttaagggagtcctacattgggaagcaaaagaacaatatctaccatcatgaaaatacatgaaagtataaaactcactggtagttcagacacacaa

SEQ ID NO: 20830 - DNA, 328 bp, Homo sapiens
ttaacaaacatcttccccctctctttccgtgaaactaaaaccagttgtcaggggtcaattggagcaagtaggattttggattaattgttccgttctcaaaattggtcagtcatgcagcaggtaacaatagtaaacctactcagtgtagaaaaatagggttactgaaaacaccacatagaggctttcattttaagatatttctgggccaggcatggtggcttatgcctgtaatcccagcactttgggaggccgaagtgggtggatcacctgaagtcgagagtttgagaccagcctggccaacatggtgagactctgtctctactaaata

SEQ ID NO: 20831 - DNA, 677 bp, Homo sapiens
gttacttccagaaccacacagtaaggaaatacactgctcttttggctaccttacagtgatttggggaaggcttctagaatgtagcagatgtagacacttcctctcctgggctcctgccaaagcacaaggctttttgaaaagcctgagctgtctgaagaagagtctagaattttctgtttaaacatacttctattctaattttcttcatggataaatgctatttgcagaaaatacaaatgttttcactgttaacagaaggctaatcacaaatgttgtctaaacttttaactctgataagagagtttagatttgtcagaaaagaggttattttgccattgctaaaatatattgtcactaaagtttttttgtcatctttcattgtccttaaatctcacaaggaattaaaaaccattagcctacagaaataactaaaaagcagcttaagatggtatttttcttcgaatagcttgaaaatattttaagaatgacagagcctacataaaaattcaaaacaatcgtaaaaagaataaatatctttaccttacataatgtttcaaaatgaattctaggatggattaaatagttataatcaacaaaacaaagtaaaacaaatagcaacaacagaatagttatcagatctctaaaagcagagaatttctaaacttaaaaataagaaa

SEQ ID NO: 20832 - DNA, 811 bp, Homo sapiens
tagatttttagttgtattatcacactttcctggtcaaggaaatctccagccttagggtatgaagtcatccattttgaaactcttcagtcccttggcagggtgagatgctttgccatcataaaatggccatatagagtggcatgtggccatgtcagtgattgtaaggttaatattccgtaatgaccgcaaaggaaccactgtgcagccatttatcttaaacacaggaaggaaaattgttggctgatgcctaataaaaatgaatcattctgggtgtcaaagctcttttaaaagcttttaagaatgaaatgctaaatcagaaaggaagtatctgtaatctatgttccttaacaaacaatttatttttatttatctatttagattattattcttgggaaagattgagaatatttgtatttttattattatatttttatcttgtctttaaaaaatctaacgattttgatgctgtagttttagatgtaaagcatcttctgagaaaaaaagagaacattttgaattcatatcttaacctttgtaaaatgtaaacttattaagcctgaatctacccatcaggcacaaaatggtgtcaccatatgccctcctgggcagtagaggggccacagccagcattataaaaatcctggtaaatagctgattttagaggcagtggcagccagaagaatggagaagctgcaatatttatggttaaagacctctatccccacttctttctggacacctgtgggccaaattcttccctccttggccccactcctagccaagtcctcccctttcaggctgaacagtgaat

SEQ ID NO: 20833 - DNA, 443 bp, Homo sapiens
tcttaagatacaaaactcaccagtaatagtaagcacacagaaaaacacagaatattataacactgtaatttgagggtataaactcctattttatgtattaggtaatagaaaaactcaatgatgaaccaatcaaaaataataaaggattacatcttttcaagacatagtacaagaatacataaaaacataaaaagttaaaaggcagtgagataaagtgtagcatttctattagtttttttctcatttgtttgtttatgccatcaactttaagttgtcattagtttaaaataatagattataagatagtatttgcatgcttcatagtaacctcaaatcaaaatatacaacagatacacaaaacataaaaagcaataaattcatcacaccactaatgaaaattgccttcactaaaaggaagacaggaaggaagaaaagaagaaaga

SEQ ID NO: 20834 - DNA, 551 bp, Homo sapiens
aggaatgaaatgggtacagcgagccctaaaaatatttttagcccagaatcaagccgtagaggttgggacagctcctatccatgggtcacagtgtaaggatgataaattagaactcaataaacatagaaaacatacaccagtcagtagagtgcctgctggaggttaccttctcgtaggacattgatggaatggaggcccaagtttacagaactcctgagacagccctaaatgttgcttttaggttgaggcatcccagggtaagaaaataatttggatggggtacagaaacgaaaccaaaaaatcttatgggaaataggagagtggctttaataggatggatttaataggaaatcaaagttacatggataaaaacaaaggtagggtaagcctttggcaaagtgtcgcaacaaggttccctcaaggatgccataccctgtgaggaagagggtggtcatcttggtgctccctctccgggtggagggtgctcccggagagattgccagcctgcaggagtcattgcaaataaaaagactgcgcctgaatgtgcttta

SEQ ID NO: 20835 - DNA, 300 bp, Homo sapiens
tgtgtgtgtgtgcaaaacatgtctttgggattttgatatggatttgacaaaatttaacagtttttatgatagaaacattcaacagactaaaaatagaaggaaattacttcaacaccataaaagccaaataggaaaagcttacaactaacacactgaatgatgaagctgaaatttttcctgtaagatcaggagtaaggtaaggatgttcactctagccacttctgtttacatggtactggttttcctagctagagcaaataggcaagaaagaaagaaagaattgcaatcaaatcatataga

SEQ ID NO: 20836 - DNA, 368 bp, Homo sapiens
taaaaaatgacattataaaaaaccttattgcacttaaatattattattgttacatttgttgtccattttgtctcccaggccttccttaagcttccctgcaaagtatgttagttatattttatgggatatatcagttttgacaaaatatttcttcttcccaaattatgtagagtccagtatgaatatgatgaagtaaaatttttaatcaggccattccacaattcatttatacctatcacggtttcaaatctgccatttctccttaattttcaggccagctctttgtaaactggcacatcttcatacttttccagggttatccaatttttttgtctatattactccatcagtcacaatacttaggaatg

SEQ ID NO: 20837 - DNA, 652 bp, Homo sapiens
tgcatttcccttgagcatcttcaagaccctttgaaagaacagctgcctagcccaggcaacctctcttcttagcctacacggaagaaatgaaattcactcccaaagtgcgggtgttttcaggacccagtgaactggaacttgcagcgtcttctgcaagctccgttgggccggcctttcatgtgagcaggaaggaaatgactgacaactttctcgtctttatggaaggcggactttatttccagctctcaggtcaaaaggcggcggaaagaaaacaaaaccactaagagataaaggctaaaaataatgtcctgtggggtgaatcaacccagtttgggaccctgaagacagcaacaaggcaaggatgtgcgtagggctaaatctgcgtcatccttcacaggtggtcgtgacccagaatcaaaatgcctgggcaagagaggaagaagttctgcaaacaggtgtgctggagggaaggcgtggggaggggagaggaagaagccattgagtcgatcctgggcttgaagcccacacactttcccagcagttcacctccgggagagcccagggactggacatggcctcggaaggagctaaaagttgatttggggttttgtggtttgggtgaatgcactttcagtttaaaatataaatagat

SEQ ID NO: 20838 - DNA, 278 bp, Homo sapiens
cttaccctatctgtgccttatctgtgttaagttagctgctatcatcatcattattactataattttaaaattgtcattaatatagtcataaatattgaaaaggtacatcacccaaggctaacagccaccagtacttcgcaggtgaagaccaacatggatcttgggtctaattagtattggagaggaacaaatctttcacttttgtagtcattgtaagttttttctaatataaaggagacttgatgactaagcaaaaagagcaatttcatttcctgggt

SEQ ID NO: 20839 - DNA, 1146 bp, Homo sapiens
ctgggttcaagcagttcccttcccttagcctcccaagtagctgggactgggggcatgcaccaccgcgcctggctagttttgtatttttggtggagatggggtttctccatgttggccaggttttctcgggctcctggcctcgggtgatccccctgcctcagcctcccaaagtgctcccaaagttacaggcgtgagccacctcacccggcatgatttagataagactttgaagcttagacttttaagggtgatgctgaaacaaattaagacttcttggggttattaggatggaatgaagatattttggatgtgagaaagatatggattaggggagctaggggagaatgctatggtttgaatgtttttctcttctccaaaaatttatgttgaaatgtaatccccattacaatagtattgggaggtggggcctaatgggaggtcatgagggctctgccctcattaatggattaataccactgtataaagggcttactgccatgtgaggacacacatttcatccctttgtaccctctgccttgtgccatgtgaggatccagcaagaaagcccttatcacaccagatgtgggcaccttctgcttggactttccagcctccagaactgtgagaaatacatttctgttctctgtaaagtacccagtctgtaatattctgtaatagcagcacaaaatggaccaagacattttgctttctcctcaggccgatcccaagacacaaaaaatgtcctgctaattagtgaaggagttcactggcacagacccaatctgcagacaaagaaatggctgccttttcaaatgcctactttccaacaacaaaaatcacaaattgtatttaaaaaaacaaggccgggtgcggtggctcacgcctgtggtcccagcactttgggaggctgaggcaggtggatcacgaggtcaggagatcaagaccaccctggctaacacggtgaaacccttctctactacaaatacaaaatattagccgggcgtggtggcggacttctgtagtcccagctactctggaggctgaggcaggagaatggcatgaacccgggaggtggagcttgcagtgagccgagatagcgccactgcagtctggcctgggcaaaagagcaagactccgtctcaaaaa

SEQ ID NO: 20840 - DNA, 604 bp, Homo sapiens
gagtgagttaggttgtggagagtgtcaaataccaggctcaggtgttagaaatgcattgaatcatcagtgcagggtattcacatataacatggctggaacagtgttcagggcggtgtctgtaccgtatagagtggattaaaggacaaaagagatgaaagaatacaggtgacccatgaatttagcaaaatgtaataatctgtgaaagtatgattgaaaatagggcaagggatgacatcgccaagggaggtcttttggaaaataaacgggattgtgaaataccaacgttttggaatggggaagaaaaggagttcgagaagaggagctacttagggagcgcccagatggttcaaacatcataaaaacaacagtgtttcaggagacggaacactgttgctttgctgcagagagccgaaagagggtgagaactaagctgatggtggaatttgggggaatgacagaggagggcaagagagagagatgttacctgtggactgtcctttcgagtggttcagaagagttggtaagactaaaaatagacaataatctcttttgagaattgtgatactgcaagaaaagaaaaagaatattggttgaactaagcaac

SEQ ID NO: 20841 - DNA, 2299 bp, Homo sapiens
  misc_feature (1883)..(1883): n is a, c, g, or t
ctaaacagtggagaggagtgcaggaggcccatcagctgtgcctttcccagaagtagcaggatctgagcaagtgtctgttggttgaagaggcacacatgtcaggctggcaaccagcagcatcaggaaataacctaagacgcggtgtgtttatcattcccctgctgggagcctttggcttggtccgtccgcataacacggggttctttgggtaggcggctagaagccgagcggccgggtcgcagcatcgtctcctttactgcattgtactccacagtcgtaatgggaggttcccgcttcccacatcctttccctcagccgttacatcttggagcctggatgcattatgaaggtatttttgtttcgtggcaacaatttttttaaaattttgttttggtgcttctttgacaacgcggcccacgcagctgccctctgtgcagccattaccccaccaggcctgacacagcttctctctctgggcctgggtatgagggcacagtccaaagtaacactgactttctctctctttccccttctgtttctttgaccatctctctttaggcctaccagttttggcaacagaagttaccggtcaataatcagcaagttaaaaagtatcggatgcgatttcaattatcagacttggtagctgcctcctaggctgtgggtatcctcaatgatctgaattacttctgtcatcttgaggagtgagagtggaaggaaatgtttggtgtgggttcctgggccaggaggttttctccctggggttcccattccagaacgctgtcctcattcatggttgctgttcacctttcaccactccctgcattatttcatgtgggcgaggaacgagtgtggaaatggggattggggactaatagacttgtctcttcaccaggtctccccacacttccagtccagaaaacactttttagttatagaaatggatatatcggctgggtgcagtggctcatgcctataatcccagcactttaggaggccgaggcaggcagatcacgaggtcaggagttcgagaccagcctggccaacatggtgaaaccccatctctactaaaaatacaaaaattagctgggcgtggtggcaggcacctgtaatcccagctactcgggaggctgaagcaggagaatctcttgaaatcggaaggcggaggttgcagtgtgctgagatcacgccactgcactcgagcctgggcgatgagagtgaaactccgtctcaaaaaagaaaaaaaaaaaaaaaacgcatgaatccgtggaccacttaggcccaagccacatttgattgcagtcttgtgtggcagaaggaacctgtgtcccatttggcacttttggttgcaaacacagagacttggggctttgcaaggaaagggggttactgtttagatgtcaaggaaagaacgcttatctgcggcggtcggatgttggcccttcagctgttcggtcccttaagtgtttgcaccaaaactaggacacctagtgaggtggctgcgaagctgctgaagccccaccgccgtatgttcctgccagggaggcttttgggtgttcatctgacccaggtctctcttctcactgctgcagagcctgagcttccaggaccgttgcgggcgccctgtctgcagggggctagccaggtttcctcacatcgtgggggccccaggtgtcccttcagcttcccagaggtttgctgggggaacaggatgtagcgcctaccccaccctgggcatctgccatcaggtttcttcctctccttgagttcacttctgccactcccagtcctggccacacactgaagctccctgtcacccgccctgcctgtgacaacctcccgcgctaccacacacccttactcccgttctccctcttcgcacncccaggactcacccaagcccagggttgcccctgctaccccctcactgcccccggcccctcctgaatgccaggtccccctgtcctcctgctccgcgtcacctcagccttgaagccacagtcttcctgcatcacaccaagcccgcccctccccattgttccctataggccttggtgacacggacatccacccagtctcctgcagccatggctgaaccacgtccctcttcctcagcccgtgcagagcgtcctgtaggccttactttgtgcctctcacccccagccccaccccgcctcttgctctcgtgcctgggctttgtggtggctgacctcttcactcccgatcctctccccttcctgtccatccttctattcccctgcagcctgggtgacagagcgagacttcatctcaaaaaatc

SEQ ID NO: 20842 - DNA, 491 bp, Homo sapiens
actctatgaaggcaaaactaagagcatgataaaaagatggctgcttttgtaccagctctggaaacctgttttttcctcgaaagagaaaaaaaattatccttttaataagtcattgttattttggattttctgtcactaacagacctaatcctattataatttgcctaagatccaataaagatttcactagtatgtcaggtgtggtgcttcgtgcctgcaattccagcatgctgggaagccaaggcaggaggatcacttgagcccaggagttcgagacaagcctgggcaacatagcaagagctccatctccataaaaaaaataaaaaattagccaggcatagtgggtagtgtgtgtctgtagttccagctacttaggaggctgaggtgggagtatcacttgagcctgggaagttgaggctgcagtagtgagctgagatgatgccattgcactccagcctggtgacagagcaaaaccctgtcttgaaaaaaaa

SEQ ID NO: 20843 - DNA, 215 bp, Homo sapiens
tggggaaaacatttcccttcatctgtttattgcaatcaaataatgtgaaatgaaggtaatgaaaacactctgccaggtggcttcctgtatctgcagccaaaatatatgaaagagagactgtcccttgaatatttttgaggagcaaaggaggacaaagaatggagtttttgcctgggtaggataaatacatgtgcaaatcaagccaatctttagaa

SEQ ID NO: 20844 - DNA, 477 bp, Homo sapiens
ttccggtcccagggagccaaatgtcagggagatgtgctcaggctcggtccccctcttgctccatccctccccaagaaacgccgtgtgctgactgcctcccttgagcaagtatgtttcccagggcgtgggtaaaaagtgccgagagcaggctatttggagacgcgtggaaagagaaggacacatttcttgcgtcttctgcacaagccagtgaggagggtgagcagagcagccttgttttttgctggcaaaagtgacactagatggaggcttgatgaatggtgccacattcacgggatgttggtccagcattttgacatatgctagtcttttgtgcagttgctgaaaatcaagaaattcattcttttttctttttcttgtggcagctgataatttgcttgggtgttgaatagccagcctgagctattttactgtaatgaaatcccagaccacacaaaattaagtcacttcaaagtaaaa

SEQ ID NO: 20845 - DNA, 351 bp, Homo sapiens
atgcagccgcgtcgacaggactcacttccttcttgggggttctactcagtggttgtattttttcgaagcatttgtttcttactctgacgataattgcacataggagaatagttaatgattaacaacactttaaagtgggataatcggcagtgtcttgttttctatcttgttttaaggggttggtaatatcataattaataacttacagaatggtaataatgtcttaaaatagctttcccatagtactataatcccagagctttgggaggaagagataggaagatcccttgaggccagcaattcaagaccagcctgggtaacagggcaagactccatctctacaaaaagatt

SEQ ID NO: 20846 - DNA, 347 bp, Homo sapiens
attgccattgtggtatagtattctattgtttacctaaatcacaatttatttattctgctactaacagtgagtaatcatacttgtaaatacaaaatatgtttatatgtttttacacataatatactttatgtaagtcctatagtgtcccaagaaacaagttttggaggcaaaatgtatccttgaattaacaatttctacacttgattctgtgtagtattagtgttgctgagcaattcaaattttacattattttaatgttatccaataacattcacagatattttccagtgtttgaatatttgctgtagggtacagttgtgtacaaatacttaaaatgcaaaaaaaaa

SEQ ID NO: 20847 - DNA, 607 bp, Homo sapiens
tggttctttctgatatatgcctaggattggaattgctgggtcttatggtaattccatgtttaactttttgaggaactcacaaactgttttctactgtatacttaccatttcatatcccacttgcaatgtacaagagttataatttatccacatccttgccagcgctttttattttctttttttttaattgtagccatgccaatgtatgtgaaataatatctcactgtggtaaaatgagttttatatgtagcttttctgcctgtaacttactctgtatgttaaaaggaggcacaatgatcaatgtgttaaaatctattaatatctgaaaaatgggctgggcacagtgactcacacctgtaatcccagcactttgggaggccaaagtgggcacatcaacttgaggccaggagttcaagaccgatctggttaacatggtgaaaccccatctctactaaaaatacaaaaaattatccaggtgtggtgctacaaacctataatcccagcaactcaggaggctgaggcacaagaattgcttgagtctgggatgtggagtttgcagtgagctgagattgcaccactgagctccagcctgggcgacagagcaaga

SEQ ID NO: 20848 - DNA, 649 bp, Homo sapiens
aacctatgaacaatttcgtcataaaattagtaattttattccagtctgaaatttaaaaacacagaaataccttggtagcatgatgaatccattgccttgatctttaacgtaagtgtgttcttgtttgttctcctagctgttacagacggccatgtacgaaccgccagaaggcttgtgagccaggattttcatatagtgaagaagtgtgtcgttgtgtcccttcatattggaaaagaccacaaatgagctaagattgtactgttttccagttcatcgattttctattatggaaaactgtgttgccacagtagaactgtctgtgaacagagagacccttgtgggtccatgctaacaaagacaaaagtctgtctttcctgaaccatgtggataactttacagaaatggactggagctcatctgcaaaaggcctcttgtaaagactggttttctgccaatgaccaaacagccaagattttcctcttgtgatttctttaaaagaatgactatataatttatttccactaaaaatattgtttctgcattcatttttatagcaacaacaattggtaaaactcactgtgatcaatatttttatatcatgcaaaatatgtttaaaataaaatgaaaattgtattataaaaaaaaaaaa

SEQ ID NO: 20849 - DNA, 2029 bp, Homo sapiens
cgcggggtgttctggtgtcccccgccccgcctctccaaaaagctacaccgacgcggaccgcggcggcgtcctccctcgccctcgcttcacctcgcgggctccgaatgcggggagctcggatgtccggtttcctgtgaggcttttacctgacacccgccgcctttccccggcactggctgggagggcgccctgcaaagttgggaacgcggagccccggacccgctcccgccgcctccggctcgcccagggggggtcgccgggaggagcccgggggagagggaccaggaggggcccgcggcctcgcaggggcgcccgcgcccccacccctgcccccgccagcggaccggtcccccacccccggtccttccaccatgcacttgctgggcttcttctctgtggcgtgttctctgctcgccgctgcgctgctcccgggtcctcgcgaggcgcccgccgccgccgccgccttcgagtccggactcgacctctcggacgcggagcccgacgcgggcgaggccacggcttatgcaagcaaagatctggaggagcagttacggtctgtgtccagtgtagatgaactcatgactgtactctacccagaatattggaaaatgtacaagtgtcagctaaggaaaggaggctggcaacataacagagaacaggccaacctcaactcaaggacagaagagactataaaatttgctgcagcacattataatacagagatcttgaaaagtattgataatgagtggagaaagactcaatgcatgccacgggaggtgtgtatagatgtggggaaggagtttggagtcgcgacaaacaccttctttaaacctccatgtgtgtccgtctacagatgtgggggttgctgcaatagtgaggggctgcagtgcatgaacaccagcacgagctacctcagcaagacgttatttgaaattacagtgcctctctctcaaggccccaaaccagtaacaatcagttttgccaatcacacttcctgccgatgcatgtctaaactggatgtttacagacaagttcattccattattagacgttccctgccagcaacactaccacagtgtcaggcagcgaacaagacctgccccaccaattacatgtggaataatcacatctgcagatgcctggctcaggaagattttatgttttcctcggatgctggagatgactcaacagatggattccatgacatctgtggaccaaacaaggagctggatgaagagacctgtcagtgtgtctgcagagcggggcttcggcctgccagctgtggaccccacaaagaactagacagaaactcatgccagtgtgtctgtaaaaacaaactcttccccagccaatgtggggccaaccgagaatttgatgaaaacacatgccagtgtgtatgtaaaagaacctgccccagaaatcaacccctaaatcctggaaaatgtgcctgtgaatgtacagaaagtccacagaaatgcttgttaaaaggaaagaagttccaccaccaaacatgcagctgttacagacggccatgtacgaaccgccagaaggcttgtgagccaggattttcatatagtgaagaagtgtgtcgttgtgtcccttcatattggaaaagaccacaaatgagctaagattgtactgttttccagttcatcgattttctattatggaaaactgtgttgccacagtagaactgtctgtgaacagagagacccttgtgggtccatgctaacaaagacaaaagtctgtctttcctgaaccatgtggataactttacagaaatggactggagctcatctgcaaaaggcctcttgtaaagactggttttctgccaatgaccaaacagccaagattttcctcttgtgatttctttaaaagaatgactatataatttatttccactaaaaatattgtttctgcattcatttttatagcaacaacaattggtaaaactcactgtgatcaatatttttatatcatgcaaaatatgtttaaaataaaatgaaaattgtattataaaaaaaaaaaa

SEQ ID NO: 20850 - DNA, 309 bp, Homo sapiens
catcaagtttcattatccctatttctcaggtgaggaaactgaggaaaagaaatcttttgcagcttgcagcagctcaaagcatagctgtaaagtgttggccgtgagcacttagtcactgtactatactgttctttatggtcaagtatctgtagcaggagctgagatgcagtggtaggaggtaccagggcccttacctcaaagagctcagagtctcatatactagccagttaaccaaataactgattcagactacaatttgtcctgtaatcaaactataaataatgagttttaggaagaatgaaaagagac

SEQ ID NO: 20851 - DNA, 373 bp, Homo sapiens
gctatacacctaacattttagttaagataaattccacatttttaccaatacttctcccctatgtaatgtcaaacacaataccttcctcctcatagcagttatgcagtagatgagttgtataaatacaagagttatataaataaaaataaaaccacagttttactgtatcttcggaaaactcacattttggtatgcaagtcaagatatgcacatttgaaaaaaattatgccaattaacggtaataaaaatatatcagagttggccaggcatggtggcccatgccagcactttgggaggctgaggtggacgcattgcttgagctcaggagtttgagatcagcttggacaacatggcaagacttcatctctactaa

SEQ ID NO: 20852 - DNA, 378 bp, Homo sapiens
aaagagcctaagcttgaaacactctgtgacttagtttttgcatttattctgtcttctatgccccccaaccttactccaaattaatgaggcattattttatttatttatttttttgagacagagtcttgctctgtcgtccaggctggagtgcagtggcacaatcttggctcactgctacctccgcctccagggttcaagcaattattccgcctcagcctctcgagtagctgagactacaggcgcgtgctaccacacccagctagtttttttttattttcaatagagaccgggtttcaccatattggccaggctggactcaaactcctgacttcgtaatccacctgcctcagcctcccaaagtgctaggattacaggcgt

SEQ ID NO: 20853 - DNA, 313 bp, Homo sapiens
actaatgtggagcacagggaggtaaattatactgcccacattcacaaagctgattgatggcaaagctgagatttgaaaccaatcagttttgtttcagaatggcctgcctaaccattttgcgtactgcttccctaattttgacacgtaacattggctgggacttagataggaggacaatatgtctgcaacatctgtcacttcagtgatccctgtgatcacctggttagtcagaacatgatgtcttcttgatccatcacagctccatgtctgtctctctaaccttgggcttaaaaaacaaatgccctttccagac

SEQ ID NO: 20854 - DNA, 326 bp, Homo sapiens
tttagaaaatgtgtatattaaattaaaagaatattttgaaggctgggcgcagtggctcgcgcctatagtccctcggcctttgggaggtcgaggcagatggatggattgcttgagcccatgagttagagaccagccagggcaatgtggtgaaatcctgtctttacaagaaatataaaaattagctggtgtggtggcacatgcttgtagttccagctactcgggaggctaaaatggaaggattgcctgggaggcggaggctgcagtgagctgagggcgccactgccctccagcctgagcaacaaagtgagaccctcaaaaaaaaaaaa

SEQ ID NO: 20855 - DNA, 227 bp, Homo sapiens
gataaaatttccaggatatttggaaagtagaggaaaaaacaggagaagcaaactgtcaacatctacagttctctttttgaaaaattttacctatatgcattcgcatttgttgtttgattagtgttactttgtgcttctaaggaattgaataatgaacagcttttgggaacaaatgcctgtattttgcagaattctacctctcagtgttcatatttatggtgtaatta

SEQ ID NO: 20856 - DNA, 349 bp, Homo sapiens
tctttgggagaagcgtggggagtgttcagtaaagacaacacagaagtaaaattccatcactcaagccatggcgtgcaagcacagagccaatgtggaagcacatttgccaagcagtgataatgtttgcattagaagatggtgttaaagatgatttttgaactatgttatttcttacagcatttctccgaaaattgctgtcaacttgtctagagccctctcgtctccatgtctttgaaaaggaccacatttgatcttctaacttggagtcctaacaggtctgcttggcagctgggataggacccccggtccatgcatcgtttttctgtgatgatctctgcattgaggagtt

SEQ ID NO: 20857 - DNA, 363 bp, Homo sapiens
tatgaacagcaaaatcatcatgggtgcttttgtaggaatgtggattaaggaagtcaaaatcctcccaaaagggattttagctttaactgtgatggcttacatacatacctacatttttataaagaagaatgtgtacatatattatttgtgttgttcttaactatacagggaaaaagactgaccaaacattaacatttgttatttctgtgaaaatggatgattggggccaggcacaatggctcatgcctgtaatcccagcactttgagaggccaaggcgggtggatcacttgaggtcaggagttcaagaccagcctggccaatgtggcgaaaccttgtctggactaaaaatacaataattagcc

SEQ ID NO: 20858 - DNA, 1124 bp, Homo sapiens
gatgttaaagaggttctaaatcttggtggaagttattataaagttataacattgtttcctaagtaatggaagaaagacccaaaatttaatgagagtaataaatgtaaaattaactaaagctcagaaatgaagataaaatatttcaacatatctcattaatattaattttagaataactgatatgaacttaagatacttttaagaaggatctgatcagcagatagtataaaatgaaattcaagaagactgtggtggtgttggcttcacggtgtatagttatccccaaactcgttgagttgtatacattaaatatgtatagcgttttacatgtcaatcagacctcaataaagtggtttaaaaaattcagaaagactagattttcttaagagaaaaaaaagttatgaagactgatataaattatgttaaaacctcatgtacctaatgttatttccattttgagacatggatgagaataagaaggtaatttacaaaatgctttttagccaactagaattgatagactaaaatctgtgggtttaatggatttccttataggctcttatcatggataaatttaccctgctttacatacttctcttataaactggaatacttggtttctaaatccgtatgttagcagtgtaataatagagttggacagaaacagacccaggacaatagacaaagcctaacaatgtggaagcaagcagtaaaatgctgaaaagcgaatacaacctggaaatcaagttatctggagctttttatgggaaaacagaaagtctttaaattttcttaggtattccctaatcactttttctcatttataaaataatcagttaacttggctgggcaaggggctcaggcctataatgccaacactttgggaggccaaggcgggagaattgcatgagcccaggagtttgagaccagtatgtataacataccaagaccccatctcttataaaaataaaaaaaattagtcaggtgtggtggtacacacctgcagtcgcagctgaggtgggagagtcgtttgagcctgggcggttgaggctgcagtgagccaagatcatgccactgcactccagtctggacaacagagtgagaccctgtctcagacaaaaaaa

SEQ ID NO: 20859 - DNA, 346 bp, Homo sapiens
cagatactaacatgtactagcatataactggataatatatttaaaaatatactctgtggttttcatcagttcccattcaaaattgtaatattgtgaatacacgttgctttttaaaattttccttctcaaaatttattttatttatttttttgtgacggagtcttgctctgttgcccacactggagtgcagtgatgctatctcggctcaccacaacctctgcctccacctccagggttcaagcaatttttctgcctcagcctcctgagtagctggaattacaggtgcatgtcaccacacccggctactttttgtatttttaggagagatgggtttttgccatgttgg

SEQ ID NO: 20860 - DNA, 386 bp, Homo sapiens
agtatggctgaaaccaggtaaataggcatatatttaaatggttttaatcctttaggctccccttcctatttttcccccagtagtgataaagagatatttcctatctccttacccaaataaaaaacaagcctaatcctatacaaattaagaatatagtatcctacttgtatttcaacactatttattgccctgcaatttcctagtacagaactcagaacagtatacaaatccatagacagcattcttcttaactgttgtctaaattatataacatatatctttgcctccattctgtgttatgagtcaaacttatcatggctggatgtctgaataccaccttaatttgtataaatagatctaagtaaagaaattgtctaattattaca

SEQ ID NO: 20861 - DNA, 154 bp, Homo sapiens
gtgaacaccaaatttccgtatcctcaagatcagaaatagcacgacaataaaaagagggaggaagaaaaaaaacagtctaggatgtcaacaattttttttctgaagatttattttcttctctttgcttgttcatattttctttccttccttcctt

SEQ ID NO: 20862 - DNA, 652 bp, Homo sapiens
aagcaaggctgtcaatgaaaattgatccaaaccattccatccaacttctttatacgcactaaaacccaagtgctcatcctgaagaaatattttggttcttatctatttgtgatctatttttttctgtattatcaggtgatactcctcctccttgctgtgaaaaaaactccagtacttaaaaaaatataaaattcattatatcctccataccactagaggcctgctatgaatttctaagaattcatttaaatagcctatacgttaccagatttttttttttatgtatataacagagaaaaacaaaatgcattaaaattagcttcatcttgacacttagttcagatgagctggtcatacataaatggaaattgttagtagttcaaagatgttgtagttaacttctttaaagaaacagattgagaagcttttgttgtagttaacttctttaaagacacagattgagaagctttccgatatcaaaatgtattcattactttgaatgagagttctttatttgttcatttgcttatatgcgctctttcatctgggaattttttcttttatacgccacgtcatacagatcccctctaatgcagtttctggttatattggtatagataatttattcttaagaatctagcagtatttggca

SEQ ID NO: 20863 - DNA, 4174 bp, Homo sapiens
gttccccgcggaggtggcagccctgggccgcggcgttccggaacccccgcacccacggcgcggtgccccacggtgcccgcgagcgccgcccccgctggctagccgcgcctcgctccgccctggacgccgccggtcccggcgcggaggtgcggcggggagtgggagccggcccggctcagtctgatttacggctctgctgaaaaccgcttcgctcccgcagcatcagcaccggaggcggcggctgcagcagcagcaacaagtcgggacttttagagtaatgcaacagaaggcttttgaggaaagcagatatccctggcaggagtcctttgagaatgttgctgtgtgcctgccattacgctgcccgaggtgtggagaccataccagatttagaagcttgtcatccttgagggcccatctggagttcagtcacagctacgaagaaagaaccctcttgacaaaatgcagtctctttccatccctcaaagacacagacctagtcacttcctcagaactcctgaaaccgggaaaattgcagagcagtggcaacgtggtaaagcagaaaccgagctatgttaacttgtacagcatttcacatgaacattccaaggacaggaagccatttgaggtggtggcagagaggcctgtgtcctatgtgcagacctacactgccatggacctccatgcagactcgctggatgggacacggtcgggtcctggactgcccacctcagacaccaaagcttctttcgaggcacatgtcagagaaaaattcaatcgaatggttgaggctgtggataggaccattgagaagagaattgataaactcaccaaagagttggcccagaaaactgcggaactgttggaagttcgggcagcttttgtgcagctgactcagaaaaagcaggaagttcagagacgagagcgggccttaaacagacaggtggacgtggccgtggaaatgatagctgtactgaggcaacgcctgacggaatctgaggaggagcttcttaggaaagaagaagaagttgtcacattcaaccatttcctggaagcggcagctgagaaggaggttcaagggaaagcccggctccaggactttattgagaatctgttacagcgggtagaactggcggagaagcagcttgagtactatcagagccagcaggcctctggctttgtccgtgatctcagcgggcacgtgcttacagacatctcctcaaataggaagcccaaatgcctaagccgagggcacccgcattcggtatgtaaccaccctgatctcaagtcccatttccacccaaagggaaggaaccacctgaaaaaggccaaggatgacagagccagcatgcagcctgccaaggccattcacgaacaggctgagtcctcaagagacctctgcagacctccaaagaaaggggagctcctggggtttggccgcaaaggcaacatcaggcccaaaatggctaaaaaaaagccaacagccattgtgaacatcatctaaaagggtgggtggtgctggaccaatcatcgctgggctttggggaacgttgttccaggagccaacagtaatgtctttctggaaacattccatagtaagacacattggaaaagccaagggcataacacaggcaagcacctcaattaaccagagcttagcaaatgggaatcttagtgaaccagaattttattataacccccttttagaagcttgcaaattacagaaagaataaaaaaattaaatcaatcttaaagctctaacttctaaagtaactggcccagtctccagtaatcttggcatctgggcttctatgcagtggtcactaattttcaggaccaaggccacacaaaatgtcaggcctagggagaaaattcatctgtgcccactgctctccaaagtgcgaggcaaggaatggcagtgtaaagttctgttaatagcagtaaaatgaaaatatttgtgtttgtgtataaccttcccctcagctaatttgaaagcctccaaaataaggattcccattccccgagtattctggttaatcaagatttcaatttctgggttgctcaagggactcgttcagtcagacttcagttctcattccgacagggtgtctttcagttcgtttgtttgattgaggttttttggtggcctagatgcatgtttattcagattttggtacacctctgccgtcttctttggctgagtattctgcacccacagaccatgctgccagcctctatcttaatagctgcttctgtggatatggctggggagcgaagtaaaatcctcttttgattagcacccagcatgggctgggtggctaggtggttggaatgacagtggactgcacgcttggtgcatcgtgcatcgtgaccatcctggaagcactgcgggtgtcgccaagccctttcctaagacctgcttcccggccagtgtcagtggccctctctctctctgctatgggcatgactttctcttcgctggcttaacttttccactgggtggttcactttgcctcctgctgcttctgtgccctgttaaggcttcaggtatctttcaaccaagtatctggagtgttcactctatgttgcattctaaagtaatttctgaaataaacaatgcatgtaggagccagaatctgacactgtcttcccctccttccctccctaaaatggctttagtttccacaaagagctgttaagaatttcctgctgtatgattttcctcaagaatgaatttccatgttattttttccttaaatttagcaatatcatcaggtctcttgcagagtttacaagtgctgacattcttctgaaaacaggaataattttgtccacaaatatatacatatatacatatatataacacatacaaaatatatatgttaagtatattaataatttatttttaaatactcatggagaaagtgtgtgtttgtggtgggtggtttttaaactatatatgtttgttcatgtaaactgaattctcttatttaaaaaatcaaaactgtaacgtaattaacattggcagaattatgattgttactgcaataagcatcaaattagcagcgcattaaaaataggaaataaagcagttgcttaaaatgccagtcaattgaaaagtgtaacttatcattatacaaacattctgaacctaccataatgaaaatgttcttgaatcttcactttgactttcagtttatgggggggtagatcattcatgtgatatataagcagctatcaagtgggcaaaaacattgctgtgaatagcactgtttaggctaacattgtaaaaattgtaatgttataattattatttatttggagaattaacttccccctctaaagttatttattattgatgcttataccatgattgcaccttagccttttacatactaaaaacatgacttgttagttgtattgcatgctctttgtcctgtaatgtgtgtgcaatgacaacttgtttctgttttatttaaagtaactgacattttggattttcatctaacatagagggcatggcaactctctttgacagtggtaccccatgatcttcagaaagtaccataatgtcatcctactctacatttcacaagacgaattattttgagatttgtttattatattaaaatgtttttttacgttcccactaaattttgaccccatataaagaaatgtgttatgtatgttgtgcctccttagagacataaatttagtgtcaaaacatgggagatggcttactcagaagcatactccacttaacataccatggcctgagctaagtaccatgtcctgtttgtgtcttatttttaaatattttctttgtccacatgggccgttgaccttagagttaaggcggttgcttttttgaagaaatcaccaaagtttctgggaaactatgttcaaggttgaaatggagagtagatttaattttatttgtcttgtagggaagaaatcttcctttgaaccgcttttcttgctttttccctttttcccaaactaggttacaggttcttatctgcaaggttcaagttgcttagacattgttttccagtattctgcagggccagtcagttgtacagaagttggaatattctgttccagaattaaagaagtttttagattatgaaatattatgataataaagctatatttctgactaatgtgttgatatgtt

SEQ ID NO: 20864 - DNA, 3418 bp, Homo sapiens
gttccccgcggaggtggcagccctgggccgcggcgttccggaacccccgcacccacggcgcggtgccccacggtgcccgcgagcgccgcccccgctggctagccgcgcctcgctccgccctggacgccgccggtcccggcgcggaggtgcggcggggagtgggagccggcccggctcagtctgatttacggctctgctgaaaaccgcttcgctcccgcagcatcagcaccggaggcggcggctgcagcagcagcaacaagtcggagaagttgtcacattcaaccatttcctggaagcggcagctgagaaggaggttcaagggaaagcccggctccaggactttattgagaatctgttacagcgggtagaactggcggagaagcagcttgagtactatcagagccagcaggcctctggctttgtccgtgatctcagcgggcacgtgcttacagacatctcctcaaataggaagcccaaatgcctaagccgagggcacccgcattcggtatgtaaccaccctgatctcaagtcccatttccacccaaagggaaggaaccacctgaaaaaggccaaggatgacagagccagcatgcagcctgccaaggccattcacgaacaggctgagtcctcaagagacctctgcagacctccaaagaaaggggagctcctggggtttggccgcaaaggcaacatcaggcccaaaatggctaaaaaaaagccaacagccattgtgaacatcatctaaaagggtgggtggtgctggaccaatcatcgctgggctttggggaacgttgttccaggagccaacagtaatgtctttctggaaacattccatagtaagacacattggaaaagccaagggcataacacaggcaagcacctcaattaaccagagcttagcaaatgggaatcttagtgaaccagaattttattataacccccttttagaagcttgcaaattacagaaagaataaaaaaattaaatcaatcttaaagctctaacttctaaagtaactggcccagtctccagtaatcttggcatctgggcttctatgcagtggtcactaattttcaggaccaaggccacacaaaatgtcaggcctagggagaaaattcatctgtgcccactgctctccaaagtgcgaggcaaggaatggcagtgtaaagttctgttaatagcagtaaaatgaaaatatttgtgtttgtgtataaccttcccctcagctaatttgaaagcctccaaaataaggattcccattccccgagtattctggttaatcaagatttcaatttctgggttgctcaagggactcgttcagtcagacttcagttctcattccgacagggtgtctttcagttcgtttgtttgattgaggttttttggtggcctagatgcatgtttattcagattttggtacacctctgccgtcttctttggctgagtattctgcacccacagaccatgctgccagcctctatcttaatagctgcttctgtggatatggctggggagcgaagtaaaatcctcttttgattagcacccagcatgggctgggtggctaggtggttggaatgacagtggactgcacgcttggtgcatcgtgcatcgtgaccatcctggaagcactgcgggtgtcgccaagccctttcctaagacctgcttcccggccagtgtcagtggccctctctctctctgctatgggcatgactttctcttcgctggcttaacttttccactgggtggttcactttgcctcctgctgcttctgtgccctgttaaggcttcaggtatctttcaaccaagtatctggagtgttcactctatgttgcattctaaagtaatttctgaaataaacaatgcatgtaggagccagaatctgacactgtcttcccctccttccctccctaaaatggctttagtttccacaaagagctgttaagaatttcctgctgtatgattttcctcaagaatgaatttccatgttattttttccttaaatttagcaatatcatcaggtctcttgcagagtttacaagtgctgacattcttctgaaaacaggaataattttgtccacaaatatatacatatatacatatatataacacatacaaaatatatatgttaagtatattaataatttatttttaaatactcatggagaaagtgtgtgtttgtggtgggtggtttttaaactatatatgtttgttcatgtaaactgaattctcttatttaaaaaatcaaaactgtaacgtaattaacattggcagaattatgattgttactgcaataagcatcaaattagcagcgcattaaaaataggaaataaagcagttgcttaaaatgccagtcaattgaaaagtgtaacttatcattatacaaacattctgaacctaccataatgaaaatgttcttgaatcttcactttgactttcagtttatgggggggtagatcattcatgtgatatataagcagctatcaagtgggcaaaaacattgctgtgaatagcactgtttaggctaacattgtaaaaattgtaatgttataattattatttatttggagaattaacttccccctctaaagttatttattattgatgcttataccatgattgcaccttagccttttacatactaaaaacatgacttgttagttgtattgcatgctctttgtcctgtaatgtgtgtgcaatgacaacttgtttctgttttatttaaagtaactgacattttggattttcatctaacatagagggcatggcaactctctttgacagtggtaccccatgatcttcagaaagtaccataatgtcatcctactctacatttcacaagacgaattattttgagatttgtttattatattaaaatgtttttttacgttcccactaaattttgaccccatataaagaaatgtgttatgtatgttgtgcctccttagagacataaatttagtgtcaaaacatgggagatggcttactcagaagcatactccacttaacataccatggcctgagctaagtaccatgtcctgtttgtgtcttatttttaaatattttctttgtccacatgggccgttgaccttagagttaaggcggttgcttttttgaagaaatcaccaaagtttctgggaaactatgttcaaggttgaaatggagagtagatttaattttatttgtcttgtagggaagaaatcttcctttgaaccgcttttcttgctttttccctttttcccaaactaggttacaggttcttatctgcaaggttcaagttgcttagacattgttttccagtattctgcagggccagtcagttgtacagaagttggaatattctgttccagaattaaagaagtttttagattatgaaatattatgataataaagctatatttctgactaatgtgttgatatgtt

SEQ ID NO: 20865 - DNA, 1435 bp, Homo sapiens
gttccccgcggaggtggcagccctgggccgcggcgttccggaacccccgcacccacggcgcggtgccccacggtgcccgcgagcgccgcccccgctggctagccgcgcctcgctccgccctggacgccgccggtcccggcgcggaggtgcggcggggagtgggagccggcccggctcagtctgatttacggctctgctgaaaaccgcttcgctcccgcagcatcagcaccggaggcggcggctgcagcagcagcaacaagtcgggacttttagagtaatgcaacagaaggcttttgaggaaagcagatatccctggcaggagtcctttgagaatgttgctgtgtgcctgccattacgctgcccgaggtgtggagaccataccagatttagaagcttgtcatccttgagggcccatctggagttcagtcacagctacgaagaaagaaccctcttgacaaaatgcagtctctttccatccctcaaagacacagacctagtcacttcctcagaactcctgaaaccgggaaaattgcagagcagtggcaacgtggtaaagcagaaaccgagctatgttaacttgtacagcatttcacatgaacattccaaggacaggaagccatttgaggtggtggcagagaggcctgtgtcctatgtgcagacctacactgccatggacctccatgcagactcgctggatgggacacggtcgggtcctggactgcccacctcagacaccaaagcttctttcgaggcacatgtcagagaaaaattcaatcgaatggttgaggctgtggataggaccattgagaagagaattgataaactcaccaaagagttggcccagaaaactgcggaactgttggaagttcgggcagcttttgtgcagctgactcagaaaaagcaggaagttcagagacgagagcgggccttaaacagacaggtggacgtggccgtggaaatgatagctgtactgaggcaacgcctgacggaatctgaggaggagcttcttaggaaagaagaagaagttgtcacattcaaccatttcctggaagcggcagctgagaaggaggttcaagggaaagcccggctccaggactttattgagaatctgttacagcgggtagaactggcggagaagcagcttgagtactatcagagccagcaggcctctggctttgtccgtgatctcagcgggcacgtgcttacagacatctcctcaaataggaagcccaaatgcctaagccgagggcacccgcattcggttacaggttcttatctgcaaggttcaagttgcttagacattgttttccagtattctgcagggccagtcagttgtacagaagttggaatattctgttccagaattaaagaagtttttagattatgaaatattatgataataaagctatatttctgactaatgtgttgatatgtt

SEQ ID NO: 20866 - DNA, 505 bp, Homo sapiens
ccaagattttaaagactaatgtccttcctgagggttactttactatactgtgtatggtgtatagccacagaaagtcagtctgataaattttcaatgtgtaagtgtgatgcattcaacccagattattgtagacttaacttattatatttcctctgatatgtaaaatgacaaactcttctttcctttttaatctttgtctttaatccatgaattaggtgcattatctgctgttgattcttttatatctgcactcattttatgacgtcagacaaaatgttttctaggtgttgctattgtatgagtcataattggtataattttaaagaaaattgtaatattgttttttggtgaaatatattattagtagtatattttccaaaatgattttattgtagtatgaactgataagtgagtcccgtgtccaagagactgtatttattactcttaaacacgctattccaaatgatattactactataaacaaagaatattaccggtctcagca

SEQ ID NO: 20867 - DNA, 455 bp, Homo sapiens
gcatactactactactactactaaattcgcggccggtcgaactaaatggggcaatgtgtataaatcggcacttagtagataatcaatttatgtaatttactgtagctttcattcttgaatatatgtaaaaacatgtaaagacttatcaacattgcattgatttttcatataaagatattatctttaggcagggtgtagtggctcatgcctatagtcccagcgtgttggaaggccaagtggggaagatctcttgaacctaggggttccagactagcctggacaacatggcaaaaccctgtctctataaaaaaatacagaaattagtggggcatggtggcatgcacctgtagtcccagctactcgagaggattgcttgagccaggaggttgaggctgcactgagacaaaatcacacccctatataccagcttgggcaagagtgtgagactgtctcaa

SEQ ID NO: 20868 - DNA, 320 bp, Homo sapiens
gcatactactactactactactaaattcgcggccggtcgaactaaatggggcaatgtgtataaatcggcacttagtagataatcaatttatgtaatttactgtagctttcattcttgaatatatgtaaaaacatgtaaagacttatcaacattgcattgatttttcatataaagatattatctttaggcagggtgtagtggctcatgcctatagtcccagcctactcgagaggattgcttgagccaggaggttgaggctgcactgagacaaaatcacacccctatataccagcttgggcaagagtgtgagactgtctcaa

SEQ ID NO: 20869 - DNA, 724 bp, Homo sapiens
tcatgttcttctctaatttaacctgcattcttaaaaattggttatctgccacgtaagattcacaaaaggcaaacctgaagtgtctgtgactgtgtgtgtgcatatctgggggtgtctgcagatgtctgatgtgtatcctgggggtgtgtgtgtgcatgcatgtctgtgtgtctgtctgcccatgcacacatacacttgcccaggagactaagggatgctgaccaggagaaggcagccaccaagctggaggtgaagtcaggtgggacaggagctgggacatctaaaccctagatctggcccctgtccccatgtccatagtaacccccctcaccccactctcccttcctcaaagtggatcaggggctatttacaaaactccctccccctgtctctctggggtatatgtatgtgcagtttccctcttgctgaaatgcccttcatttcctctctcctccctggaaaatgcctgtctatccttgtgtgagggttcagaggctcagaaaccccttctctgggagggactctcctatctgccaccccttaaccagctcccactgtgcctcttccctcatctggcacattaaattattacttgcaaaataggcacagtggttcatgcctgtagtctcagaactttgggaggccaaggtgggagaactgcttgagggtcagaagttcaagaccaccctgggcaatgtagtgagacccccatctctacaaaaaa

SEQ ID NO: 20870 - DNA, 455 bp, Homo sapiens
gaagatggtgataaggttctgatagtgaaggcaaattaacatatccatcatcttacatggttacacattctttttttgtggggcaagagcacctaaaatctactcttaaagcaaaaatcccaagtacagcacagcacggtattattaagcatatcccttatggtgtacgttagatctctagacttgttcaccctgcatatttgctactttatattctttgacctacatctccccatttccccattgagtctttgtttgtttgtttgttatagattttacatataagtgagatcatgcagtatttgtctttctgtgtgtggcttatttcacttagcataacgtcctccagattcatccataatgtggcaattggcagaatctctttttgaaagctaaatgggccgggcatggtggctacgcttgtaatcccaacactttgtgaggccacggtaggt

SEQ ID NO: 20871 - DNA, 508 bp, Homo sapiens
gatgtaaattccctccccgtacgcccaatctccttcttcctcttccttttcttcagaccatttgcctgcccctggttcttttattctcaacctaacacgcactgtcatgcatattcaccagcattctccaaagaccttgccccctggttatcccacactacctttctaagcctatcctcacgcaacctcagacaaaccccaaccccaactaactgtgttcttcaccttcccttgctggggaaaaaaaacccctgcacagccacagatcactgcaattacatataacgcatctcctctctcagtgaagctcttagggctggcagccggttctctttgcagtctttctttttttttttggagggtgggtggcgctgttccacatgttttatcttacttcaagttctttttcccactcagacttcacctcctattcctactttacagaaacagtgaatgcttcccaggagaactccctcaaacacccttccctccaaaaccatatttactt

SEQ ID NO: 20872 - DNA, 220 bp, Homo sapiens
acgatttcttactaaacgactggagacaccagacaatgccctcactgttgtgtggctgcctgggagcgttcccgcagcatcagagtctctgtgctcaggtgacccttgtgctgggggtaggatgcccccccacgtaggccttaaacatctggatcacgctggggaacctgccacagggatctttaaaaaaaataaagtaagggtctggattttgaacaaa

SEQ ID NO: 20873 - DNA, 1333 bp, Homo sapiens
  misc_feature (802)..(802): n is a, c, g, or t
atgagcagattcgagatatgtttgttgctctcgggttttcgatacaacatcatgacacttctgtttcaagctcatgttttccgtctcccctccactcttagtaaaccttgatctgtacggagcggcctgtccgaggctacgccggcctcctggctgctgctggactgtgcttaggacagcgcccatgcctcggagggactctgtcccatgagaaccacctgtgcaaaggaacagagctggatgtttccaggtagattttggcctcccagagcaatgcggcatttgagaagcaacagttcctaactccttatcttcagggaaggaaaagaaaatcacagcctaggaagatggagattggattttaatctcggttttaaaaagaggacaaacaaaatgtctctaagccaggctagatggaatgtgctcccgctctctcctgccgtgctgaaagtcatgccttgcggatgcctcatgacagcagtggctgagtctccccacccacccccaacgtggctcatttcagattgcttcggccccaccctgcaaggatgtgggtcacggagtggccagggaggctccgtctgagccacagggatgggtgtgcagagctccctcctcctggggtgccagggcagagattccaggcaggtgagcccgacagagagctgccaggccacaccccctcggcctcctgcacggccaccttctgggtgaatcggtccagcccaagcccctctccccagcctccccttcagcctctctcccggcctgcttttataaggcgcacttcactcaatgctgnagccaaaaaacgaggggccccagggagaggggacccagatggccacacacggaacgcgcctccacagccccgggaggtggctcactctgtacaggtcttcggaggccgtgtttgtatctaactgtgactgggctgaagcatgatgtttgcctaatggttcgtagcatggtttttatttcttacgcattcttggcacacagtgtagctatcctcctgacgagcaacccgtctgcgtacctaagtgtggctccccgtgggtcagcgtcctggtagcatggatccagtctgaaaggtgaggacaacgtggaaactcatgagctgagcctgcccgctgggacacgtctccttcccgcgtcaccttctggtttagggagccgtcaggtccctaaacgttccctacaactttttctgaaattgtgcagaaaaacagatctcattaaaagaaaaaaagaaacaacttgtaggaagacagagaggtgctatgggtacaatttttaataaaaacattattttgttccttaaaaaaaaaaa

SEQ ID NO: 20874 - DNA, 874 bp, Homo sapiens
aagagcaagagcattggagtcaaaactgggatcaaattccagctgtctggtgttcttgctgtgtgatcttgggtaaatgacctcccctcccaggacctcagcttataaaatgaagcatgccaccctatctccctgggctgttgtgagaatgaccttaaaggagaaactatatgtgaagtgctgttctggagtaatgaccgcagacacaggtatcactactatgttatttatttatttatttatttagcggcagggtcccgctccgtcacctaggctagagtgcagtgatgagatcacggctcactgcagcctcaacctcccaggctgaagcaatcctcccacttcagtctccctagtagctggcactacaggcatgtgccaccaaaccaggctaattttcttttttttatttttgtagagatggggtcttgctctgttgcccaggcaggtctccagcttctgggctcaagggatcctcccgactgggcctccgaaagtgctgggatcacaggcatgagccaccatgcctggcctaccatgtaatttaaaagatctgagcaggtagagttcaaaagtaaattctagaacagcattttgtaacagaaatctctgttatgatggcaatgttctatagctgtgctgtcgaatatggcagtcaccagccatatgtggctactgagcacttgaactatggccagtgtgcccgaggaactaaatttgaaatgaaaatttattctttctttctttttttttttgagatggagtctcattctgacatccaggctggagtgcagcggtgtgatctaagctcactgcaaactccacttcccgggctcaagcaatctacctgctttaaggaggattgaagcagaag

SEQ ID NO: 20875 - DNA, 576 bp, Homo sapiens
tatttgcataaacatcatgagatatattcaggatggaacccaagtgtaaacacaaaatttatttatgttttatatatatcttatacacaaagcctgaaggtaattttatgtaatattttaaattttgtgcatgaagcaaagtttcgactgcattttgactataatctgcattttagtggaaacatgctgactctcagaaagtttcagattttggaggtttctgaatttcagattttaagattagagatgctcaacgtgtatagtagaataccacagagattggttaacttataaagaagatatatttatctgtctcatggttctaaaagttgggcagtccaaaatcgaggggctgcatctggtgagagccttctcattgcataataacatggcaggagatatcacaaagcgaggaagcagtgggagagacagagagagagtagtggatgaactcattctttttatcaggaacctactccaaagatagctaaccactcctatgataaggtcattaatccactcatgagggcagagcccccgtgacctaatcactttttaaggatgtctacctttcag

SEQ ID NO: 20876 - DNA, 510 bp, Homo sapiens
caaaacacttcaccgtgactgattatgtcctagtgaggtagcaatgcgcttgaattatgaatttatccaggatccactgtgggagttagtgtggcaacctagaaatagtatgagcttgaggccagaaaggctgggttcaaatcctagttctgccactcactgtgtatccttggacagctaatttaacttttttgaatgctacgtcctttagctaaaataagaatatcacctagataaccagttttgttacaagaagcttgggacatgaaatggtaagtgaatgatccatcacctggtctatagtagctgctcaataaagaccatttttcttctcaacatttcacatcctagaatgccaactcactatgagaagcaggagttgactctttgatttaagcttcattttcacactcttctcagtgtccccttactcagacgtaccattgttattccctccttatcacctcttcacaccctaggtctgtgaagtgcttgtgccaagcacttgct

SEQ ID NO: 20877 - DNA, 964 bp, Homo sapiens
ctgtccccctcccgcgtccccgtcttcttgatgactccaacagctgcagctgcagaggccccgaggcccctcggaggagactgggcagggagggctcctccgcatgctgggatatttttatcctgccttggacgatcgggacgattggtcctgcaatctgtttcaccctttaagaaactcatttcatgtcctgccaggtcctgggaccataagctcgcgtgtctccacagttgcacattcccgtccgtctgcagctcattatctgggccacaaggacgttaccccatgacttggaaggacgcgccatcacgcaggaggtcacaaagtggacggcaggaaacccagccttccctcttctgccttcctcctcacctctctctctctctctcagtactttgttcttgttaatatcagtgtatcaatgagcctggttttttgccttttattattattattaacatagtgagcacaggcgtttcgtactctgcgtctgattttccagcagcgaagcctctgccatccgccccaccgtcccgctggctcttgctcattgtctttcccttccctgcttgcctgctccctcacgcccctgctctgcgtgttggatgtgaaaaggatgtcagggactaggcggagggcatgttcctccgagcccaggctgcaccttggcacagtggagggtccacccaccccaggtagcccaggtgaggcccctgggtccccctgtcactcaggctgtccacatgaaagtccagatgtctccgaccaacagatccctgggagaaaggacgtgacgctgccgcttcaccgggatgggttcccacgtccctccgcgttgacccacagcttccttacggtcttgtatgtagtttgatgcttttaagggccggccacggtggctcaacgcctgtaatcccagcactttgggaggccaaggtgggcggatcatgaggtcaggaattcg

SEQ ID NO: 20878 - DNA, 614 bp, Homo sapiens
ctaaagcacagagcgcagtgcttgtcacgtactgagctttcagacattgtctatgactattacttaattcttgaaaaattcttggttatttattgcttgaatttacaattccatttttctctccacctaagcaatttttattttaggcttcagagaatcagcagagaataaatgcatgactcctggccattaatagagcaggaaagctcactccaggttcagaagtcacctcactgctgccccctctagccggctgctgacaccctgctggtggtcagagacatttcagggcaacacaggcaggtagtgaatcctaatgcagtagtcaggaaagcctgactttacagtaggcatttggaaagatttggttataaagcagcttatcgctaaatcaagccaggagggaggtacaggatatttcattccccatcacatgtaaaaattaaatctgtctctgtagaagcagcgctccctggaaacatgctaatggttgagaagtaatcttgaaccaactactgccttggctacggtaaagacaggagcctaggtactcaatacatttctgttaattaaattaattaaacctcatcattttaaaataaaggtcattgaat

SEQ ID NO: 20879 - DNA, 232 bp, Homo sapiens
tgcaaatgtttgctgattcctgcattactgatatcattttcataacagtcttaaaaacttggcatttttaaacttaaatacttttttctttttgtcgctttcttctctaccctatctctgccagcagttctttgtgaattaccattgtgatcttctaaaggcaaaaaaaatggtaggtagtcaatgactgatagctatagacctatgaaactaacatttcctatcttgtctc

SEQ ID NO: 20880 - DNA, 732 bp, Homo sapiens
gagagagagagagagaaagaatgaggttgagggtaggcaggaggaagagcaagatggggagggagggggagagcaggagagaccaaactagtagagtcacagacagagaaaaagtcaaagacaggaaggtgatacagaggagagagaagaggaagaggagagactgacaggtgcacaaatcagagaagtcccagagatagcagaaacacacacagagacagagatagagagggagaggtaagccggagacagactcagagattcgcacaaaaagcaacgtggagactcagaagcaagcgcagcgtcaaggaatgctccatttctggtgtgttgttttcccagtattcaagaaatatttattgagtgccaacctgttctagacccaatctcggccaggggatgtggtggcaaatagacggacaagggcctgctctcctgaaacacactggagagataaacaataaataatatcatttcagtaaccaaaaagtgctttaaaaattaagctgaaggccgggcgcagtggctcatgcctgtaatcccagcactttgggaggccgaggctggtggatcacttgaggtcaggagttcgagaccagcctggtcaacatggtgaaacttcatctctaccaataaataaataaagtagctgggtgtgctggtgtgcctgtagtcccagctacttgggaggctgagaaagaaggatcacttgaacccaggaggcagaggttg

SEQ ID NO: 20881 - DNA, 287 bp, Homo sapiens
agcaacattataaaaatattgcctaacacaactccatatggacatatgaaatttcattccattttatacatgtaattaagtggcccacataatgaagtactgtgagtgcaaaaagggagatgccttatgtaggtgaaagatagctgggcaggaacaagactggtttaaaagtagaataatcataaagggtggatgaaaattattgcacattattctctgatggattttttcccttaaagctagttttcatgttgtaagcaagacaaatacatttaatatcctcctgc

SEQ ID NO: 20882 - DNA, 602 bp, Homo sapiens
ctattaaaattcataactatttcaaaggattttttagagaccctgaatttttaaagtaaagtaatacagactctactccgattatattgctaaatatcttaattgaatttttagttagttcttcccacctcatgccaaaatacatataaaacatatagatatgtaaaattcactttcacacataacttattataacaaaagtataagtctctcccttgtaaccagaatgtacaggtagatgccatttgcccactaataaaaccaaaaataaatcctattaggaaattggcctttataaaaactgcttagctctcacatgtttaaaacaaaacggcaatgatcttccaaaacctttattctccaacagtaaagataaaatgatgatcacccacctgaataaacatatttaaacttagaccaaatttaaaaaattaaattgaagtcatcaaaatcttaatctgtaaaagtattaaattttaaaatatattgtaatataacctttaactatatatcatttcatacaaatttctagtttaataacacaatatttcaaatccatcagttgtaaccattaacttaaatgttataaacatggcaagtta

SEQ ID NO: 20883 - DNA, 515 bp, Homo sapiens
ttccgagatgcatacaaccttttatgagttaaagaaaactttcatttaaacttaagctctcatgttaatcattgtgaaaatgtcctaaataattgaactctcattttcaaaaggaaaaattaatttgatcattttgcaattgcctgtcatagtctggaaacatgtggaaagtatattcacaaaatctagatttttgtctctctctggtttctcattttcttaccttaaaagcattcctttcccttaaaaagatcagttattccataactatgttttctcagttttgatattttaagaatatactcaaagctaaaacttcagtttactggaaatttcttaaaaaaataacttcctcaatatcaagttcctttttgcttccctctggagaactctattgacaaaagaccattgaaaatactttcagtcagtgactgtaaagactttccctatttacttatatgtttttcctctttggatacccctcctcgtatgcatctcggcagggtaccgagctc

SEQ ID NO: 20884 - DNA, 862 bp, Homo sapiens
ttccgagatgcatacaaccttttatgagttaaagaaaactttcatttaaacttaagctctcatgttaatcattgtgaaaatgtcctaaataattgaactctcattttcaaaaggaaaaattaatttgatcattttgcaattgcctgtcatagtctggaaacatgtggaaagtatattcacaaaatctagatttttgtctctctctggtttctcattttcttaccttaaaagcattcctttcccttaaaaagatcagttattccataactatgttttctcagttttgatattttaagaatatactcaaagctaaaacttcagtttactggaaatttcttaaaaaaataacttcctcaatatcaagttcctttttgcttccctctggagaactctattgacaaaagaccattgaaaatactttcagtcagtgactgtaaagactttccctatttacttatatgtttttcctctttggatacccctcctcgtatgctttcaatttgaggatgaaaaaagaaaacaccaaaattgtggtctgattactcatatcagttttgtggtggttttactacaacaactgcaataagaagaccatattttattctttctaggactagaatgaagaggggattaaaatagccattcattgcctctcttagcagtggggagagagagtgggatttgttcttctgcttcttttttttcttactccctttctctactccacttttttttttacctttcctgggctggtgttgcaaaattatcattttctccttcgttttattgttgtgaaactgtctggttcctgttttcctgaactatgatggcaattgtgtcccaaactggaactagaaaagaa

SEQ ID NO: 20885 - DNA, 549 bp, Homo sapiens
atagggtagaaaaaaaacccaaaatgttatgcttctcacaactcaccgaaatgtggccctactccttgcaaagaatggctcttcatatcaacacttattagaatgataaaatgttagagccaaaagggcccccaagtgtcactgagaccctcactatgcaaatggagcaaccccagggaactggtgactttcaatcaaggtcgcacatctggaaaggaggaggacccagatatggcccccgttctcaggtttgtaatactaatagctgggagagtgtttattaggtgcggttcagggctcagtgcccgatgcatgtgaactggtggaatcctcactgcaggcttctgaaatgggctctagcctccccgccgccatccgcctcgtcgtcattattgcgaccagccatctggggaaacaggtccagagaaatgaagtagctcgcccgtggcacacaacctgccattggctgagcaggactcaaccggactcccatcagcgcgagcccatctggtggatcacagcatagctctgagtgagcggccgcatcac

SEQ ID NO: 20886 - DNA, 306 bp, Homo sapiens
tcttccacactgccaccatatgatctttctaaaacacaagtctgattacatgcctttctcttgaaaacccttgaagcgaactttaaaatccaaagactttggaatgacatataaggccttccagaatctagcccctacctacctgtcttccaccccaaatctcatttcactaagctttctccaagaactccatactccattctcacccaccactgaccattccaaaacatgcaatgcttactcatcctccatgatttgctgttcctagaatgtccttcttcctgccttgcatggtcaattcttctt

SEQ ID NO: 20887 - DNA, 505 bp, Homo sapiens
agatgatgtggttgggctctgtgtccccacccaaatctcatgttgaattgtaatccccatgtgtcaggggaggggcctggtgggaggtgactggatcatgagggcggacatcccccttgctgttctcgtgatagtgagttctcatgaggtctgatggtttaaaagtgtggcacttcccccttcactctctctctttctctcctgctgccgtgataacacatgccttgcttccccttagccttctgccatgattgtaagtttcctgaggcctccccagccatgtggaactgtgagtcaattaaacctctttttttttaaacattacccagtctcaggtagtatctttatagcagtgtgaaaacagacttatacagcagaacttgatcctgggcctctcaattcccagtcctgagatttttctaacccactttgcccctttatttatctgctatgtatgtagccaaaaggtacaaacaaatcaaaagcatttgccaacaggaaaaaa

SEQ ID NO: 20888 - DNA, 383 bp, Homo sapiens
tgacaaatagaatacatttagactcttcagtcctaggattgcattctgtcactatgttcaagaataatactgaacattattaaaaaatgaaaagcagatcagttgaaaaggtttctttaaggcactactgaagtttatcataatgggagacaggtaatgataactttcaagtaatggaatctgtgctacagtacattcacttgacacattttctttgaatgaaatagttttttatttttttaaataaaaggcaagccagctttctcttcccccatttaattagggcagctacattgtaggcactaggaaaagaaaatcggtgattttcaaatcagtggggaggatacacacacacacacacacacacacacacacacacacac

SEQ ID NO: 20889 - DNA, 174 bp, Homo sapiens
gaatgaagatctctattgagctggtatggaatgatagtcaggacatagtgcaaaaagcatttctcaccttcaggtgagcaaaaatatagaagtttgataacattgtttgttggtgagaccatagggaaaagtcataaaataatatctatagcatactatcttttatgtaagaaa

SEQ ID NO: 20890 - DNA, 241 bp, Homo sapiens
gaaaatttgcaaaacacattaagctaaaagatagatgatagatagatagatggtagataaaatcaaaatgttattttggtgtgggctttgttatgggtgatgtttttatgtgtgacttcctatttatttctatttttatgatataacacaaaatatcagtaaaatgcaacaaaaaagttttaaataaatgaagaaaacaattcaaagaagtgttcagatatgtaacaataaaattaggaat

SEQ ID NO: 20891 - DNA, 617 bp, Homo sapiens
cctaggaaaggtaaatgacttttcttaagtcacatggctcaccacagaaccaaagctggaacacacataccctcagctcttcttccagtgctttcaggtatacaagtatttgaacaggattcaaggtttaactccttatgtgtcattcagtgtatccagtgtaagtaaaatgttaccccttagtcagaacagccttgagaatttctcaatgactacaaaccttgcttagttctatacaagggaagtaaaagagagagaatgtcatgaccaaatgacttaacttttgaaggcagcctattgcaaacttgaataattggggcatgtattttattgattgtttgacctataaggacagatattttaaaatataaattcaaaattgcttttttgcagcattcacctgtaggccttctatatctgctctttgtgaaatagatggcttccagagcattaaaaaaagaaatagacattttcttggttcaagagctgtaatctgctttccgagtgatttttcatagttaagcatattttatgtgcacatagtttcatttgagatctgagaggatttcatctaaaacggaaaagttattacctgtgaaggagaacaaaggaaaagg

SEQ ID NO: 20892 - DNA, 741 bp, Homo sapiens
ggatctgggttggggcagtagtctctggtcttcttggtttcttttggaatctcttctcaatgacctaggtgggcattgtactccgctattctcagactgccatgactgggctggatattttaattggggtggtggaggaagctggctcaaggccttttggcagttcttttctagaatttgaagctgtaggggttgaggagcactggtggcttgcaggagatagatgcacacagagagaggtctggagatctgtaaaggggcctccatgaatgttcagcaaagtactaatcggctcatgtatatgaggaaatgagtgaaataacttttgaaaagaatcaaagggaacagtacacaatactcacatagggcctggaaaaggactgatcctgccagccagagtggaaaaactcgtaattcagagtattgggtagagtgttcagaaaggtcttttctccgtggtgaggagtaatgtgccccaaactgagcactgctccagatttgcctaagaaatcataaaagcaagacctgaaagtgtcacattgtttccaagtgacttaagtgcatcctagaaaaaagcacaaaaatacttataggaagccaaaaggacccaacatccaaccaagtaaaactctcagtcttctgtccattgaaatattaccagacttacagacatgtgggaaaacatgagctttctcaaagagactaaccaggaaattgaaatggactcagaattgccataga

SEQ ID NO: 20893 - DNA, 320 bp, Homo sapiens
ttttttttttgagatggagtctcgctctgttgcccaggctggagtgcaatggtgcaatctcagctcactgcaacccccgcctcccaggttccagcaattctgcctcagcctcctgagtagctaggatataggtgcgcgccaccgcacacggctaatttttgtatttttagtagaggcggggttcactatgttggctaggctggtctggaactcttgaccttaggtgatccctgctgggattataggagtgagctactgtgcctggcccgtttatgcaatttttaatcgttctataaaagacatatatttcttgtataacc

SEQ ID NO: 20894 - DNA, 998 bp, Homo sapiens
gggggtccggcccctccctcccatctatctccatttcccttctagtttgagtcacaacagcattctcaggaaagtgccctgtacctgctggagacactgccctcctgcccacgtgtccgggaggcctcagtgaagtaaggggatgttggtccccgaaaagcccctttctgctggccaacaggtgcccctggctgatgatgggagaagcaaggcacccacactttgtggccttccatctgggtggcttggagcaacctctgcctttctctgaatctcagggtttcctgggcatgggatcataatttctatcccctgatgcccgggtgccatggggaccatggaggccatggggtgggaaggccaggtattgccatgctcacagaatgagtttgggggtctcctctggttctgaggcctccatcctcccttgtccttgtgggtgcagccccgcttccctctctgtgccctgtgggtgccctaggtgcctaggaagctggcatgtctgggcaccgtgcttccccaggcccttctctctgcagcctgggctctgagcagagcttccggattcacttctccagagaggaccaggctgggaagacactcaggctaagtgagtgcagcttccggccagagcacgtgtccaggctggccaccggcttgagcaagtccctgcagctgacggagctcacgctgacccagtgctgcctgggccagaagcagctggccatcctcctgagcttggtggggcgacccgcagggctgttcagcctcaggtacctcctcccccgctgcctccgggaggggccatggcatgaatgggagcaggggtgggcactggagtaagaggcccccaggatcatggccccagtcatttcctgtacccacaaccctgccatctggaccctgagcaaaccctgtccatctgtcccagagactccacaaggcacacagagaaactgtccttccccacactggaggcctgtgctttgggatttaag

SEQ ID NO: 20895 - DNA, 1084 bp, Homo sapiens
gggggtccggcccctccctcccatctatctccatttcccttctagtttgagtcacaacagcattctcaggaaagtgccctgtacctgctggagacactgccctcctgcccacgtgtccgggaggcctcagtgaagtaaggggatgttggtccccgaaaagcccctttctgctggccaacaggtgcccctggctgatgatgggagaagcaaggcacccacactttgtggccttccatctgggtggcttggagcaacctctgcctttctctgaatctcagggtttcctgggcatgggatcataatttctatcccctgatgcccgggtgccatggggaccatggaggccatggggtgggaaggccaggtattgccatgctcacagaatgagtttgggggtctcctctggttctgaggcctccatcctcccttgtccttgtgggtgcagccccgcttccctctctgtgccctgtgggtgccctaggtgcctaggaagctggcatgtctgggcaccgtgcttccccaggcccttctctctgcagcctgggctctgagcagagcttccggattcacttctccagagaggaccaggctgggaagacactcaggctaagtgagtgcagcttccggccagagcacgtgtccaggctggccaccggcttgagcaagtccctgcagctgacggagctcacgtgagtgacccacccagcccgtgaggacagcagaggggtgggggcaccctgccagagccacctcagtgactgacctctgtctccaggctgacccagtgctgcctgggccagaagcagctggccatcctcctgagcttggtggggcgacccgcagggctgttcagcctcaggtacctcctcccccgctgcctccgggaggggccatggcatgaatgggagcaggggtgggcactggagtaagaggcccccaggatcatggccccagtcatttcctgtacccacaaccctgccatctggaccctgagcaaaccctgtccatctgtcccagagactccacaaggcacacagagaaactgtccttccccacactggaggcctgtgctttgggatttaag

SEQ ID NO: 20896 - DNA, 392 bp, Homo sapiens
caccaccagtaaggtagttatatacattttacatagaatttttaaagttctctggattatacagaatctataaagccaataattttcacataggtagttgaactacaccatcgatttatgcgattatgaattatttagctaaagactggacaatgggctccctagtatagttccacaaggattgatcttttggagtgacaaataacagctttacctagcatgcatctcaaaatttaatacaaggagattaacgtattgacaaaatagctgtggtctctttcacttgggtacttcgtcttatacatttttagaaataagaaaaacagagttattttgaattaaagctggccttgattttatcttttctgctttttctatgtatgtaattttta

SEQ ID NO: 20897 - DNA, 198 bp, Homo sapiens
gcggaatgcagtgaaatagcatgagaaagagcgtttttatgtacatcacagacaagccttgttctgctgaagaggtgatgccacgaggtggggaggagctcacttcaggcaccactcccacttccattgcccgcaaatccaggaaagaaatgactaatgaactctagtgatcgcaaactgctcaatcggtactcatca

SEQ ID NO: 20898 - DNA, 501 bp, Homo sapiens
atgaatttaaggatttatgtggatacaaattctcctttaaagtgtttcttcccttaatatttatctgacggtaatttttgagcagtgaattactttatatatcttaatagtttatttgggaccaaacacttaaacaaaaagttctttaagtcatataagccttttcaggaagcttgtctcatattcactcccgagacattcacctgccaagtggcctgaggatcaatccagtcctaggtttattttgcagacttacattctcccaagttattcagcctcatatgactccacggtcggctttaccaaaacagttcagagtgcactttggcacacaattgggaacagaacaatctaatgtgtggtttggtattccaagtggggtctttttcagaatctctgcactagtgtgagatgcaaacatgtttcctcatctttctggcttatccagtatgtagctatttgtgacataataaatatatacatatatgaaaatatgtattt

SEQ ID NO: 20899 - DNA, 509 bp, Homo sapiens
acttgagtaggtaaaggaggcagccaacgctaccacaggtgtgggaaaaaggtgtcattgaagcctatggactggacagttgggtaggaaccagaaggccaataggaaggagggcaaaggtgcccaactgaagggtaagcatggcagtgagtatggtatgcctagaataaagatggttgggattagaattgggtgacagtgattagtagtttaattcagaagtatctcttcccaactcaaaagtctcactttgggctgaaagtacagaggaagaaggtagacttttaagaagtctgaataagcccccaacttctggagtccctttctcaattcctgttgggagtgggaaatattataaattactctgggcattaaaaatagcttagtttaacctcgattgtggagttaaaaaataacaaagattgcattggtcaaatctggacaatttgagcattcaaaagaataacaacaataagttacaacatatttaatataaagaagaatccacg

SEQ ID NO: 20900 - DNA, 389 bp, Homo sapiens
agaggcagggaaaaaaacacaaaattactaaattatgttacatgctaccaagaaataaaatggtttatgcaataaagagaaatgggagaacctatctagactaagtgttcaaggaaggccttctgaggtacatttaagtttatctgagctcacttgctatgtgactttcagcaagttactttcaactagagcttaggttcctcttctgtaaaatggggatgaatataatgccacttatttcacaaggttgcaatgaagattaggaatacaggtacaggctgagtgtggtgacacatgcctctaatcccagcacactgggaggcagaggcaggaggatcgcttgagcccaggagtttgagagcagcctgagcagcatactaagaccctct

SEQ ID NO: 20901 - DNA, 403 bp, Homo sapiens
ttgctttttgcttttgtttttattttttaaagatggggtctactgtgttgcccaggctggattcagactcctgggctgaagcgatccttctgcctcagtgtcctgagtaggtgggactacaggcccatgccaccatgcccaggtcatccagctttgttttggtcatggtatatcttatccttctttgttaccatgatgtatcttttctatacttttactttcaaccaatttgtgttcttatacttaaagtgggatttcttaaaaacaggttatagttgtctttttttttttaactctctcatatctgccagtctgataatatcagccttttaattggggtatttaggactatttacattttatggctattgttgatatggttgcttttaaatttaccatcttg

SEQ ID NO: 20902 - DNA, 375 bp, Homo sapiens
agattgtgattctcctaaggtaggtctccttctatagccccaactgagcttctaggctgttaagcaagaccttctacactggctgcgacaggactccaatatctctcagcattgtgtgaccttcagtgcctctgttaagcattcagttctgcagaaggcaccctctactgtgtcttacagagtcccactctgtgaatatacagcctagccactggccaatggcacacaaggaaccctcattaaaccaatacaaagacaagttcaacagtattttacagaaaatcttttaagccaaagagaaaaacagtcatgattaactatgttggcaataattttaaggtacataaaaaaagatatttgtaacatatctgtatt

SEQ ID NO: 20903 - DNA, 1555 bp, Homo sapiens
cacaaagcacctaggccatggtatgtgcttaataaatggtggctgtgcttggtgttacctgactctctactcatcctttgggatttgggtgcctgcctgtccgtccagatgtccttgagatctcacgagttctctttgagtgcaaagacctcattctcattatcaaaccaggctggtcccagacctcagagttcaggtcttcatgctggaatcctgggaagcactgaacgtggagtcaggagatgtgggtttgagtcctgagatttgctgtgacttcatctggaagatggggttttgataccttttttaaaggtatgaaatgatgatgatggaagtgttttgtgcctagaaaggcatttgttgcatctcaggcattcttttcattctgaccacccagatctgaccctggctgtgcccatctgtaactctctggctatcatcttcacactgattgttgggaaggcccttggagaagatattggtggaaaacgtaagttagactactgcgagtgcgggacgcagctctgtggatctcgacatacctgtgttagttccttcccagaacccatctccccagagtgggtgaggacacggccttttcccatcctgccctttcctctgcagctgttttgcttccttgtggccatcagagttcccttcccctggacagtctggagaaagacagaggctggggtttgggattgaagaccagaccccatctgagcccttcctccagccctgtaccagctcctactggcatggctgagctcagaccctcctgatttctgcctattatcccaggagcagttgctggcatggtgctcaccgtgataggaatttcactctgcatcacaagctcagtgagtaagacccaggggcaacagtctaccctttgagtgggccgaacccacttccagctctgctgcctccaggaagcccctgggccatgaagtgctggcagtgagcggatggacctagcacttcccctctctggccttagcttcctcctctcttatggggataacagctacctcatggatcacaataagagaacaagagtgaaagagttttgtaaccttcaagtgctgttcagctgcggggatttagcacaggagactctacgctcaccctcagcaacctttctgccccagcagctctcttcctgctaacatctcaggctcccagcccagccaccattactgtggcctgatctggactatcatggtggcaggttccatggactgcagaactccagctgcatggaaagggccagctgcagactttgagccagaaatgcaaacgggaggcctctgggactcagtcagagcgctttggctgaatgaggggtggaaccgagggaagaaggtgcgtcggagtggcagatgcaggaaatgagctgtctattagccttgcctgccccacccatgaggtaggcagaaatcctcactgccagcccctcttaaacaggtagagagctgtgagccccagccccacctgactccagcacacctggcgagtagtagctgtcaataaatctatggtaaacagacaagag

SEQ ID NO: 20904 - DNA, 1398 bp, Homo sapiens
cccggaagtagaagacagcggcgttgccatggcggcgtctctgggtaggtagccggccccgcccttccatggatttcccgaccctcgcctcgaattcatttcctgctccacatccaccctctaaccccgacccctgctacaaccccagaggccggactcctggattcatctccctagcttccctgggcctgccttagccgccagtcgcagccgaggcgaagagagcgaaggagggaagtgggggcggctagctggggctagaaggccaggagagggcggggtgggcggccgtttggggtgggggtcagggtgactcactcgtctgcattcagggcaggtgttggctctggtgctggtggccgctctgtggggtggcacgcagccgctgctgaagcgggcctccgccggcctgcagcgggttcatgagccgacctgggcccagcagttgctacaggagatgaagaccctcttcttgaatactgagtacctgatgccctttctcctcaaccagtgtggatcccttctctattacctcaccttggcatcgacagatctgaccctggctgtgcccatctgtaactctctggctatcatcttcacactgattgttgggaaggcccttggagaagatattggtggaaaacgagcagttgctggcatggtgctcaccgtgataggaatttcactctgcatcacaagctcagtgagtaagacccaggggcaacagtctaccctttgagtgggccgaacccacttccagctctgctgcctccaggaagcccctgggccatgaagtgctggcagtgagcggatggacctagcacttcccctctctggccttagcttcctcctctcttatggggataacagctacctcatggatcacaataagagaacaagagtgaaagagttttgtaaccttcaagtgctgttcagctgcggggatttagcacaggagactctacgctcaccctcagcaacctttctgccccagcagctctcttcctgctaacatctcaggctcccagcccagccaccattactgtggcctgatctggactatcatggtggcaggttccatggactgcagaactccagctgcatggaaagggccagctgcagactttgagccagaaatgcaaacgggaggcctctgggactcagtcagagcgctttggctgaatgaggggtggaaccgagggaagaaggtgcgtcggagtggcagatgcaggaaatgagctgtctattagccttgcctgccccacccatgaggtaggcagaaatcctcactgccagcccctcttaaacaggtagagagctgtgagccccagccccacctgactccagcacacctggcgagtagtagctgtcaataaatctatggtaaacagacaagag

SEQ ID NO: 20905 - DNA, 1539 bp, Homo sapiens
cccggaagtagaagacagcggcgttgccatggcggcgtctctgggtaggtagccggccccgcccttccatggatttcccgaccctcgcctcgaattcatttcctgctccacatccaccctctaaccccgacccctgctacaaccccagaggccggactcctggattcatctccctagcttccctgggcctgccttagccgccagtcgcagccgaggcgaagagagcgaaggagggaagtgggggcggctagctggggctagaaggccaggagagggcggggtgggcggccgtttggggtgggggtcagggtgactcactcgtctgcattcagggcaggtgttggctctggtgctggtggccgctctgtggggtggcacgcagccgctgctgaagcgggcctccgccggcctgcagcgggttcatgagccgacctgggcccagcagttgctacaggagatgaagaccctcttcttgaatactgagtacctgatgccctttctcctcaaccagtgtggatcccttctctattacctcaccttggcatcgacaggctggtcccagacctcagagttcaggtcttcatgctggaatcctgggaagcactgaacgtggagtcaggagatgtgggtttgagtcctgagatttgctgtgacttcatctggaagatggggttttgataccttttttaaagatctgaccctggctgtgcccatctgtaactctctggctatcatcttcacactgattgttgggaaggcccttggagaagatattggtggaaaacgagcagttgctggcatggtgctcaccgtgataggaatttcactctgcatcacaagctcagtgagtaagacccaggggcaacagtctaccctttgagtgggccgaacccacttccagctctgctgcctccaggaagcccctgggccatgaagtgctggcagtgagcggatggacctagcacttcccctctctggccttagcttcctcctctcttatggggataacagctacctcatggatcacaataagagaacaagagtgaaagagttttgtaaccttcaagtgctgttcagctgcggggatttagcacaggagactctacgctcaccctcagcaacctttctgccccagcagctctcttcctgctaacatctcaggctcccagcccagccaccattactgtggcctgatctggactatcatggtggcaggttccatggactgcagaactccagctgcatggaaagggccagctgcagactttgagccagaaatgcaaacgggaggcctctgggactcagtcagagcgctttggctgaatgaggggtggaaccgagggaagaaggtgcgtcggagtggcagatgcaggaaatgagctgtctattagccttgcctgccccacccatgaggtaggcagaaatcctcactgccagcccctcttaaacaggtagagagctgtgagccccagccccacctgactccagcacacctggcgagtagtagctgtcaataaatctatggtaaacagacaagag

SEQ ID NO: 20906 - DNA, 3216 bp, Homo sapiens
cccggaagtagaagacagcggcgttgccatggcggcgtctctgggtaggtagccggccccgcccttccatggatttcccgaccctcgcctcgaattcatttcctgctccacatccaccctctaaccccgacccctgctacaaccccagaggccggactcctggattcatctccctagcttccctgggcctgccttagccgccagtcgcagccgaggcgaagagagcgaaggagggaagtgggggcggctagctggggctagaaggccaggagagggcggggtgggcggccgtttggggtgggggtcagggtgactcactcgtctgcattcagggcaggtgttggctctggtgctggtggccgctctgtggggtggcacgcagccgctgctgaagcgggcctccgccggcctgcagcgggttcatgagccgacctgggcccagcagttgctacaggagatgaagaccctcttcttgaatactgagtacctgatgccctttctcctcaaccagtgtggatcccttctctattacctcaccttggcatcgacaggctggtcccagacctcagagttcaggtcttcatgctggaatcctgggaagcactgaacgtggagtcaggagatgtgggtttgagtcctgagatttgctgtgacttcatctggaagatggggttttgataccttttttaaagatctgaccctggctgtgcccatctgtaactctctggctatcatcttcacactgattgttgggaaggcccttggagaagatattggtggaaaacgagcagttgctggcatggtgctcaccgtgataggaatttcactctgcatcacaagctcagtgagtaagacccaggggcaacagtctaccctttgagtgggccgaacccacttccagctctgctgcctccaggaagcccctgggccatgaagtgctggcagtgagcggatggacctagcacttcccctctctggccttagcttcctcctctcttatggggataacagctacctcatggatcacaataagagaacaagagtgaaagagttttgtaaccttcaagtgctgttcagctgcggggatttagcacaggagactctacgctcaccctcagcaacctttctgccccagcagctctcttcctgctaacatctcaggctcccagcccagccaccattactgtggcctgatctggactatcatggtggcaggttccatggactgcagaactccagctgcatggaaagggccagctgcagactttgagccagaaatgcaaacgggaggcctctgggactcagtcagagcgctttggctgaatgaggggtggaaccgagggaagaaggtgcgtcggagtggcagatgcaggaaatgagctgtctattagccttgcctgccccacccatgaggtaggcagaaatcctcactgccagcccctcttaaacaggtagagagctgtgagccccagccccacctgactccagcacacctggcgagtagtagctgtcaataaatctatggtaaacagacaagaggttagtaagtattcttttattgtgacaaaccctctcccaggcttagtcagctactcctttctctggccagagaatcccataaggaaatagcccccacagccagggctgctctgctcagaggaagggaaggctgggctgtgggtttaggagcaggagaacggggagggctgaggaggccgcagtgtaccctgtgagcccagcggaggtgctggctcctgaggaacaagctgctggaggctaaggacaaaaggtggccagagtagtggtccccagttgccctctggagctgctggctctcaagatggcagagctggggctgaggctgagatagcagccccagccccaggctggttttccagggacaaggcctcttccactatctgtgctgccctctgctacctgatccaagggctcctctgtctgagtgtcttcatcatctgctacttccagggcccccgctgtctccttccttcggtggggagctccatatactcctataactcctaaagaggggaggcagcactgggtgatgcccaggctgaagagccctcagcattcctgccctggaccttcatgctagcccctttccctcccctgaacctggttctgcattccccaccacctcccaggatggcaaggaagtgagaggtgggcctttggtcccacccccatcccctctatatcccacccctgaagtcttatcgctttaagcactgccctttccaggtgcttcttttcatgtgatgaggccctgtgaagaagggacaggatatacagacgggggcagctggagacagttatgatgagtgccggctttgtgtctgagcattctgctcccatggacatccccaacaacagcagggaccaacctatgtcactgtcaaagggcagctgagaagggcctgagccccagggacccctcacctgatgggaatgagagtgtggggagcttgcttcttggctgaatggtctgctggggtctggcatagaaagcagatggcttaattcggtctggttcctttggagagggctgggttacctgggccctgtggccttgggcctagagaagggacactgggcttggaccctgattgctggccattcttacctttcctactccccagttcaggcttcagagagcccctgacgcctgcaggaacatggcagaggagacaccgtctgtcttcacaaagtacgtcctccctccttgctgcctcttcccaccagcctgacttatccagggacagagcagtagatgcctggcactcctcgatgcccagtgaaaccagactgtgcttccccacccccaccaccatgccccatgctcactggctcatttcttgggagggcttagagctggataatataagttcccttggaccctgctgtgccaaatataccaattctctctcccagcgtccaacctagcaagaaggtattaagtcctgcaaatcagatgagaattctggtctggcccctggccaacatggtgaaaccccatctctactaaaaatatacaaaattagctggatatggtggagcgtgcccataatcccagctactcaggaggctgaggcaggagaattgcttgaaccgggacctgggaggcggaggttgcagtgagccaagatcctgccactgcactccagcctggactacagagcaagactctgtctc

SEQ ID NO: 20907 - DNA, 2044 bp, Homo sapiens
cccggaagtagaagacagcggcgttgccatggcggcgtctctggggcaggtgttggctctggtgctggtggccgctctgtggggtggcacgcagccgctgctgaagcgggcctccgccggcctgcagcgggttcatgagccgacctgggcccagcagttgctacaggagatgaagaccctcttcttgaatactgagtacctgatgccctttctcctcaaccagtgtggatcccttctctattacctcaccttggcatcgacagatctgaccctggctgtgcccatctgtaactctctggctatcatcttcacactgattgttgggaaggcccttggagaagatattggtggaaaacgagcagttgctggcatggtgctcaccgtgataggaatttcactctgcatcacaagctcagttccatggactgcagaactccagctgcatggaaagggccagctgcagactttgagccagaaatgcaaacgggaggcctctgggactcagtcagagcgctttggctgaatgaggggtggaaccgagggaagaagcaggtagagagctgtgagccccagccccacctgactccagcacacctggcgagtagtagctgtcaataaatctatggtaaacagacaagaggaggtggaaggccatacagaatggagccgtgagtatggccagcctccagctctcagccaggaggtccccaaccccaaggaaggaagaaactggaaattaggaactgcttcctcatttaacaagtacctgatccaagggctcctctgtctgagtgtcttcatcatctgctacttccagggcccccgctgtctccttccttcggtggggagctccatatactcctataactcctaaagaggggaggcagcactgggtgatgcccaggctgaagagccctcagcattcctgccctggaccttcatgctagcccctttccctcccctgaacctggttctgcattccccaccacctcccaggatggcaaggaagtgagaggtgggcctttggtcccacccccatcccctctatatcccacccctgaagtcttatcgctttaagcactgccctttccaggtgcttcttttcatgtgatgaggccctgtgaagaagggacaggatatacagacgggggcagctggagacagttatgatgagtgccggctttgtgtctgagcattctgctcccatggacatccccaacaacagcagggaccaacctatgtcactgtcaaagggcagctgagaagggcctgagccccagggacccctcacctgatgggaatgagagtgtggggagcttgcttcttggctgaatggtctgctggggtctggcatagaaagcagatggcttaattcggtctggttcctttggagagggctgggttacctgggccctgtggccttgggcctagagaagggacactgggcttggaccctgattgctggccattcttacctttcctactccccagttcaggcttcagagagcccctgacgcctgcaggaacatggcagaggagacaccgtctgtcttcacaaagtacgtcctccctccttgctgcctcttcccaccagcctgacttatccagggacagagcagtagatgcctggcactcctcgatgcccagtgaaaccagactgtgcttccccacccccaccaccatgccccatgctcactggctcatttcttgggagggcttagagctggataatataagttcccttggaccctgctgtgccaaatataccaattctctctcccagcgtccaacctagcaagaaggtattaagtcctgcaaatcagatgagaattctggtctggcccctggccaacatggtgaaaccccatctctactaaaaatatacaaaattagctggatatggtggagcgtgcccataatcccagctactcaggaggctgaggcaggagaattgcttgaaccgggacctgggaggcggaggttgcagtgagccaagatcctgccactgcactccagcctggactacagagcaagactctgtctc

SEQ ID NO: 20908 - DNA, 774 bp, Homo sapiens
gtgtctgtcggctctgaggtgtccccgtcgctcgctctgtggggagcttgcttcttggctgaatggtctgctggggtctggcatagaaagcagatggcttaattcggtctggttcctttggagagggctgggttacctgggccctgtggccttgggcctagagaagggacactgggcttggaccctgattgctggccattcttacctttcctactccccagttcaggcttcagagagcccctgacgcctgcaggaacatggcagaggagacaccgtctgtcttcacaaagtacgtcctccctccttgctgcctcttcccaccagcctgacttatccagggacagagcagtagatgcctggcactcctcgatgcccagtgaaaccagactgtgcttccccacccccaccaccatgccccatgctcactggctcatttcttgggagggcttagagctggataatataagttcccttggaccctgctgtgccaaatataccaattctctctcccagcgtccaacctagcaagaaggtattaagtcctgcaaatcagatgagaattctggtctggcccctggccaacatggtgaaaccccatctctactaaaaatatacaaaattagctggatatggtggagcgtgcccataatcccagctactcaggaggctgaggcaggagaattgcttgaaccgggacctgggaggcggaggttgcagtgagccaagatcctgccactgcactccagcctggactacagagcaagactctgtctc

SEQ ID NO: 20909 - DNA, 1221 bp, Homo sapiens
cccggaagtagaagacagcggcgttgccatggcggcgtctctgggtaggtagccggccccgcccttccatggatttcccgaccctcgcctcgaattcatttcctgctccacatccaccctctaaccccgacccctgctacaaccccagaggccggactcctggattcatctccctagcttccctgggcctgccttagccgccagtcgcagccgaggcgaagagagcgaaggagggaagtgggggcggctagctggggctagaaggccaggagagggcggggtgggcggccgtttggggtgggggtcagggtgactcactcgtctgcattcagggcaggtgttggctctggtgctggtggccgctctgtggggtggcacgcagccgctgctgaagcgggcctccgccggcctgcagcgggttcatgagccgacctgggcccagcagttgctacaggagatgaagaccctcttcttgaatactgagtacctgatgccctttctcctcaaccagtgtggatcccttctctattacctcaccttggcatcgacaggctggtcccagacctcagagttcaggtcttcatgctggaatcctgggaagcactgaacgtggagtcaggagatgtgggtttgagtcctgagatttgctgtgacttcatctggaagatggggttttgataccttttttaaagatctgaccctggctgtgcccatctgtaactctctggctatcatcttcacactgattgttgggaaggcccttggagaagatattggtggaaaacgagcagttgctggcatggtgctcaccgtgataggaatttcactctgcatcacaagctcagtgagtaagacccaggggcaacagtctaccctttgagtgggccgaacccacttccagctctgctgcctccaggaagcccctgggccatgaagtgctggcagtgagcggatggacctagcacttcccctctctggccttagcttcctcctctcttatggggataacagctacctcatggatcacaataagagaacaagagtgaaagagttttgtaaccttcaagtgctgttcagctgcggggatttagcacaggagactctacgctcaccctcagcaacctttctgccaggtagagagctgtgagccccagccccacctgactccagcacacctggcgagtagtagctgtcaataaatctatggtaaacagacaagag

SEQ ID NO: 20910 - DNA, 214 bp, Homo sapiens
ttccccacccccaccaccatgccccatgctcactggctcatttcttgggagggcttagagctggataatataagttcccttggaccctgctgtgccaaatataccaattctctctcccagcgtccaacctagcaagaaggtattaagtcctgcaaatcagatgagaattctggtctggcccctgccactcaataactctgtcaccctgaacaaa

SEQ ID NO: 20911 - DNA, 1557 bp, Homo sapiens
cccggaagtagaagacagcggcgttgccatggcggcgtctctggggcaggtgttggctctggtgctggtggccgctctgtggggtggcacgcagccgctgctgaagcgggcctccgccggcctgcagcgggttcatgagccgacctgggcccagcagttgctacaggagatgaagaccctcttcttgaatactgagtacctgatgccctttctcctcaaccagtgtggatcccttctctattacctcaccttggcatcgacaggctggtcccagacctcagagttcaggtcttcatgctggaatcctgggaagcactgaacgtggagtcaggagatgtgggtttgagtcctgagatttgctgtgacttcatctggaagatggggttttgataccttttttaaagatctgaccctggctgtgcccatctgtaactctctggctatcatcttcacactgattgttgggaaggcccttggagaagatattggtggaaaacgagcagttgctggcatggtgctcaccgtgataggaatttcactctgcatcacaagctcagttccatggactgcagaactccagctgcatggaaagggccagctgcagactttgagccagaaatgcaaacgggaggcctctgggactcagtcagagcgctttggctgaatgaggggtggaaccgagggaagaagcaggtagagagctgtgagccccagccccacctgactccagcacacctggcgagtagtagctgtcaataaatctatggtaaacagacaagaggaggtggaaggccatacagaatggagccgtgagtatggccagcctccagctctcagccaggaggtccccaaccccaaggaaggaagaaactggaaattaggaactgcttcctcatttaacaaggtgcttcttttcatgtgatgaggccctgtgaagaagggacaggatatacagacgggggcagctggagacagttatgatgagtgccggctttgtgtctgagcattctgctcccatggacatccccaacaacagcagggaccaacctatgtcactgtcaaagggcagctgagaagggcctgagccccagggacccctcacctgatgggaatgagagtgtggggagcttgcttcttggctgaatggtctgctggggtctggcatagaaagcagatggcttaattcggtctggttcctttggagagggctgggttacctgggccctgtggccttgggcctagagaagggacactgggcttggaccctgattgctggccattcttacctttcctactccccagttcaggcttcagagagcccctgacgcctgcaggaacatggcagaggagacaccgtctgtcttcacaaagtacgtcctccctccttgctgcctcttcccaccagcctgacttatccagggacagagcagtagatgcctggcactcctcgatgcccagtgaaaccagactgtgcttccccacccccaccaccatgccccatgctcactggctcatttcttgggagggcttagagctggataatataagttcccttgg

SEQ ID NO: 20912 - DNA, 2185 bp, Homo sapiens
cccggaagtagaagacagcggcgttgccatggcggcgtctctggggcaggtgttggctctggtgctggtggccgctctgtggggtggcacgcagccgctgctgaagcgggcctccgccggcctgcagcgggttcatgagccgacctgggcccagcagttgctacaggagatgaagaccctcttcttgaatactgagtacctgatgccctttctcctcaaccagtgtggatcccttctctattacctcaccttggcatcgacaggctggtcccagacctcagagttcaggtcttcatgctggaatcctgggaagcactgaacgtggagtcaggagatgtgggtttgagtcctgagatttgctgtgacttcatctggaagatggggttttgataccttttttaaagatctgaccctggctgtgcccatctgtaactctctggctatcatcttcacactgattgttgggaaggcccttggagaagatattggtggaaaacgagcagttgctggcatggtgctcaccgtgataggaatttcactctgcatcacaagctcagttccatggactgcagaactccagctgcatggaaagggccagctgcagactttgagccagaaatgcaaacgggaggcctctgggactcagtcagagcgctttggctgaatgaggggtggaaccgagggaagaagcaggtagagagctgtgagccccagccccacctgactccagcacacctggcgagtagtagctgtcaataaatctatggtaaacagacaagaggaggtggaaggccatacagaatggagccgtgagtatggccagcctccagctctcagccaggaggtccccaaccccaaggaaggaagaaactggaaattaggaactgcttcctcatttaacaagtacctgatccaagggctcctctgtctgagtgtcttcatcatctgctacttccagggcccccgctgtctccttccttcggtggggagctccatatactcctataactcctaaagaggggaggcagcactgggtgatgcccaggctgaagagccctcagcattcctgccctggaccttcatgctagcccctttccctcccctgaacctggttctgcattccccaccacctcccaggatggcaaggaagtgagaggtgggcctttggtcccacccccatcccctctatatcccacccctgaagtcttatcgctttaagcactgccctttccaggtgcttcttttcatgtgatgaggccctgtgaagaagggacaggatatacagacgggggcagctggagacagttatgatgagtgccggctttgtgtctgagcattctgctcccatggacatccccaacaacagcagggaccaacctatgtcactgtcaaagggcagctgagaagggcctgagccccagggacccctcacctgatgggaatgagagtgtggggagcttgcttcttggctgaatggtctgctggggtctggcatagaaagcagatggcttaattcggtctggttcctttggagagggctgggttacctgggccctgtggccttgggcctagagaagggacactgggcttggaccctgattgctggccattcttacctttcctactccccagttcaggcttcagagagcccctgacgcctgcaggaacatggcagaggagacaccgtctgtcttcacaaagtacgtcctccctccttgctgcctcttcccaccagcctgacttatccagggacagagcagtagatgcctggcactcctcgatgcccagtgaaaccagactgtgcttccccacccccaccaccatgccccatgctcactggctcatttcttgggagggcttagagctggataatataagttcccttggaccctgctgtgccaaatataccaattctctctcccagcgtccaacctagcaagaaggtattaagtcctgcaaatcagatgagaattctggtctggcccctggccaacatggtgaaaccccatctctactaaaaatatacaaaattagctggatatggtggagcgtgcccataatcccagctactcaggaggctgaggcaggagaattgcttgaaccgggacctgggaggcggaggttgcagtgagccaagatcctgccactgcactccagcctggactacagagcaagactctgtctc

SEQ ID NO: 20913 - DNA, 2605 bp, Homo sapiens
cccggaagtagaagacagcggcgttgccatggcggcgtctctgggtaggtagccggccccgcccttccatggatttcccgaccctcgcctcgaattcatttcctgctccacatccaccctctaaccccgacccctgctacaaccccagaggccggactcctggattcatctccctagcttccctgggcctgccttagccgccagtcgcagccgaggcgaagagagcgaaggagggaagtgggggcggctagctggggctagaaggccaggagagggcggggtgggcggccgtttggggtgggggtcagggtgactcactcgtctgcattcagggcaggtgttggctctggtgctggtggccgctctgtggggtggcacgcagccgctgctgaagcgggcctccgccggcctgcagcgggttcatgagccgacctgggcccagcagttgctacaggagatgaagaccctcttcttgaatactgagtacctgatgccctttctcctcaaccagtgtggatcccttctctattacctcaccttggcatcgacagatctgaccctggctgtgcccatctgtaactctctggctatcatcttcacactgattgttgggaaggcccttggagaagatattggtggaaaacgagcagttgctggcatggtgctcaccgtgataggaatttcactctgcatcacaagctcagttccatggactgcagaactccagctgcatggaaagggccagctgcagactttgagccagaaatgcaaacgggaggcctctgggactcagtcagagcgctttggctgaatgaggggtggaaccgagggaagaagcaggtagagagctgtgagccccagccccacctgactccagcacacctggcgagtagtagctgtcaataaatctatggtaaacagacaagaggttagtaagtattcttttattgtgacaaaccctctcccaggcttagtcagctactcctttctctggccagagaatcccataaggaaatagcccccacagccagggctgctctgctcagaggaagggaaggctgggctgtgggtttaggagcaggagaacggggagggctgaggaggccgcagtgtaccctgtgagcccagcggaggtgctggctcctgaggaacaagctgctggaggctaaggacaaaaggtggccagagtagtggtccccagttgccctctggagctgctggctctcaagatggcagagctggggctgaggctgagatagcagccccagccccaggctggttttccagggacaaggcctcttccactatctgtgctgccctctgctacctgatccaagggctcctctgtctgagtgtcttcatcatctgctacttccagggcccccgctgtctccttccttcggtggggagctccatatactcctataactcctaaagaggggaggcagcactgggtgatgcccaggctgaagagccctcagcattcctgccctggaccttcatgctagcccctttccctcccctgaacctggttctgcattccccaccacctcccaggatggcaaggaagtgagaggtgggcctttggtcccacccccatcccctctatatcccacccctgaagtcttatcgctttaagcactgccctttccaggtgcttcttttcatgtgatgaggccctgtgaagaagggacaggatatacagacgggggcagctggagacagttatgatgagtgccggctttgtgtctgagcattctgctcccatggacatccccaacaacagcagggaccaacctatgtcactgtcaaagggcagctgagaagggcctgagccccagggacccctcacctgatgggaatgagagtgtggggagcttgcttcttggctgaatggtctgctggggtctggcatagaaagcagatggcttaattcggtctggttcctttggagagggctgggttacctgggccctgtggccttgggcctagagaagggacactgggcttggaccctgattgctggccattcttacctttcctactccccagttcaggcttcagagagcccctgacgcctgcaggaacatggcagaggagacaccgtctgtcttcacaaagtacgtcctccctccttgctgcctcttcccaccagcctgacttatccagggacagagcagtagatgcctggcactcctcgatgcccagtgaaaccagactgtgcttccccacccccaccaccatgccccatgctcactggctcatttcttgggagggcttagagctggataatataagttcccttggaccctgctgtgccaaatataccaattctctctcccagcgtccaacctagcaagaaggtattaagtcctgcaaatcagatgagaattctggtctggcccctggccaacatggtgaaaccccatctctactaaaaatatacaaaattagctggatatggtggagcgtgcccataatcccagctactcaggaggctgaggcaggagaattgcttgaaccgggacctgggaggcggaggttgcagtgagccaagatcctgccactgcactccagcctggactacagagcaagactctgtctc

SEQ ID NO: 20914 - DNA, 271 bp, Homo sapiens
  misc_feature (214)..(214): n is a, c, g, or t
  misc_feature (223)..(223): n is a, c, g, or t
  misc_feature (232)..(232): n is a, c, g, or t
ttcacgggtcgactactactactaaattcgcgtccgcgtccacttttgttataatattgtaatctcagttcaaaagttaactgcaaatataaaacccaatgatttctatatagtaaattgaactgtaaaggtaaaaaaaaactttacattaattcagaactttttagcataccaaattgaaatacataggttcaaatttcagatttatggcaancagtcttcnaatacaatncagacatttcttaaaagttccgtcgacgcggccgcgaat

SEQ ID NO: 20915 - DNA, 950 bp, Homo sapiens
  misc_feature (893)..(893): n is a, c, g, or t
  misc_feature (902)..(902): n is a, c, g, or t
  misc_feature (911)..(911): n is a, c, g, or t
cactccctgctttcagctgatagaactctggcaggtgaacttgattctagatagaaaatgagaagaggactctactttccttctggggagtctatccagcccaaggggaagctctaaagatactgacactagggcttccttaaggacagggttagattaccctacagtggacctcatagtagacatgcccttccaaagctcagagctcccagccagcatttcagtccctctccccgactcttaatcatgaacatacaaccaaagataggcacatatctgaggggacctctaacggtggaagacagaaaccacaataaatacatgcccaaaacaccttggaagatgtagaggcctggcagggagaataaaacacaaaacaaatgagcaaggataagcaaacagtatccgtgatgccttcagaaagacaaaagaaaaggttgcatccacaaaacagtaacacagtgctatgcaaaaagaacattcagaggagaaaagaaccggtcctgaaataagatagcagaaattgaaagatcagtagaagagttggaagataaaattgaagaaatctcaaacgtggaacaaaaagacaagaaaattggagaaaacgataggagaaaatttaaaacaacaataaaaagaaccaggtcaggaaatccagcctccaggtaatgggtttcaacaagagagatcagagaaaaggaacagggattacaaagtaaggagtttgttataatattgtaatctcagttcaaaagttaactgcaaatataaaacccaatgatttctatatagtaaattgaactgtaaaggtaaaaaaaaactttacattaattcagaactttttagcataccaaattgaaatacataggttcaaatttcagatttatggcaancagtcttcnaatacaatncagacatttcttaaaagttccgtcgacgcggccgcgaat

SEQ ID NO: 20916 - DNA, 420 bp, Homo sapiens
gaaaaggttgcatccacaaaacagtaacacagtgctatgcaaaaagaacattcagaggagaaaagaaccggtcctgaaataagatagcagaaattgaaagatcagtagaagagttggaagataaaattgaagaaatctcaaacgtggaacaaaaagacaagaaaattggagaaaacgataggagaaaatttaaaacaacaataaaaagaaccaggtcaggaaatccagcctccaggtaatgggtttcaacaagagagatcagagaaaaggaacagggattacaaagtaaggagtttgttataatattgtaatctcagttcaaaagttaactgcaaatataaaacccaatgatttctatatagtaaattgaactgtaaaggtaacttgtgtgtgattctgaatacatagataaatgtttaa

SEQ ID NO: 20917 - DNA, 2853 bp, Homo sapiens
cggcgctgggagacaccggacgcccgctcggctgcgctgcggctcaggcccccgctcgggcccgacccgctcggtcaccgccggctcgggcgcgcacctgccggctgcggccccagggccatgcggaggcccacgaggaggccggcggccacgcgcatcccgtagcccaggtggcccaggtctgcaccgcggcggcctcggcgccatggagcccccgtattcgctgacggcgcactacgatgagttccaagaggtcaagtacgtgagccgctgcggcgcggggggcgcgcgcggggcctccctgcccccgggcttcccgttgggcgctgcgcgcagcgccaccggggcccggtccgggctgccgcgctggaaccggcgcgaggtgtgcctgctgtcggggctggtgttcgccgccggcctctgcgccattctggcggctatgctggccctcaagtacctgggcccggtcgcggccggcggcggcgcctgtcccgagggctgccctgagcgcaaggccttcgcgcgcgccgctcgcttcctggccgccaacctggacgccagcatcgacccatgccaggacttctactcgttcgcctgcggcggttggctgcggcgccacgccatccccgacgacaagctcacctatggcaccatcgcggccatcggcgagcaaaacgaggagcgcctacggcgcctgctggcgcggcccgggggtgggcctggcggcgcggcccagcgcaaggtgcgcgccttcttccgctcgtgcctcgacatgcgcgagatcgagcgactgggcccgcgacccatgctagaggtcatcgaggactgcgggggctgggacctgggcggcgcggaggagcgtccgggggtcgcggcgcgatgggacctcaaccggctgctgtacaaggcgcagggcgtgtacagcgccgccgcgctcttctcgctcacggtcagcctggacgacaggaactcctcgcgctacgtcatccgcattgaccaggatgggctcaccctgccagagaggaccctgtacctcgctcaggatgaggacagtgagaaggtcctggcagcatacagggtgttcatggagcgagtgctcagcctcctgggtgcagacgctgtggaacagaaggcccaagagatcctgcaagtggagcagcagctggccaacatcactgtgtcagagtatgacgacctacggcgagatgtcagctccatgtacaacaaggtgacgctggggcagctgcagaagatcaccccccacttgcggtggaagtggctgctagaccagatcttccaggaggacttctcagaggaagaggaggtggtgctgctggcgacagactacatgcagcaggtgtcgcagctcatccgctccacaccccaccgggtcctgcacaactacctggtgtggcgcgtggtggtggtcctgagtgaacacctgtccccgccattccgtgaggcactgcacgagctggcacaggagatggagggcagcgacaagccacaggagctggcccgggtctgcttgggccaggccaatcgccactttggcatggcgcttggcgccctctttgtacatgagcacttctcagctgccagcaaagccaaggtgcagcagctagtggaagacatcaagtacatcctgggccagcgcctggaggagctggactggatggacgccgagaccagggctgctgctcgggccaagctccagtacatgatggtgatggtcggctacccggacttcctgctgaaacccgatgctgtggacaaggagtatgagtttgaggtccatgagaagacctacttcaagaacatcttgaacagcatccgcttcagcatccagctctcagttaagaagattcggcaggaggtggacaagtccacgtggctgctccccccacaggcgctcaatgcctactatctacccaacaagaaccagatggtgttccccgcgggcatcctgcagcccaccctgtacgaccctgacttcccacagtctctcaactacgggggcatcggcaccatcattggacatgagctgacccacggctacgacgactgggggggccagtatgaccgctcagggaacctgctgcactggtggacggaggcctcctacagccgcttcctgcgaaaggctgagtgcatcgtccgtctctatgacaacttcactgtctacaaccagcgggtgaacgggaaacacacgcttggggagaacatcgcagatatgggcggcctcaagctggcctaccacgcctatcagaagtgggtgcgggagcacggcccagagcacccacttccccggctcaagtacacacatgaccagctcttcttcattgcctttgcccagaactggtgcatcaagcggcggtcgcagtccatctacctgcaggtgctgactgacaagcatgcccctgagcactacagggtgctgggcagtgtgtcccagtttgaggagtttggccgggctttccactgtcccaaggactcacccatgaaccctgcccacaagtgttccgtgtggtgagcctggctgcccgcctgcacgcccccactgcccccgcacgaatcacctcctgctggctaccggggcaggcatgcacccggtgccagccccgctctgggcaccacctgccttccagcccctccaggacccggtccccctgctgcccctcacttcaggaggggcctggagcagggtgaggctggactttggggggctgtgagggaaatatactggggtccccagattctgctctaagggggccagaccctctgccaggctggattgtacgggccccaccttcgctgtgttcttgctgcaaagtctggtcaataaatcactgc

SEQ ID NO: 20918 - DNA, 656 bp, Homo sapiens
tcatccagaaataaactcttgtacttctatactaattaaagattcatgtaaattactaagttcttggaaaactatggagaactctgtgggggctgtcattcacactttagtatgaattggtttaatgacgactgtgatattggctacataaagaaatggacgtttttatttggggttaggggatcacagatgtggactggcttaggtagaatggtccctgagcaaaggagatattgaagtttatgaggatgtgcaagataagcagatttacttttgcattttattttgggctatctcagcttcttttactagaagctcatgcctataatcccagcaccttgggaggccaaggcaggaggattgcttgaagccaggggttcgagatcagcctgggcaacaaagcgagaccctgactcttaccaaaaaataaaaataaaaataaaaaaagaaactacttgagaagtgtaagtgttaagaatagcccagataaacactggaaccaacttaatttagaaagaaagaaccatttcttcctttccctactctggaaaatttagattgataaaatatgggggaaggagaaatactgatttctgtagttctaggactcatggttcctgtctgcttagaattctagctcgttggtacagacgtag

SEQ ID NO: 20919 - DNA, 457 bp, Homo sapiens
gaagtattattccatattttaaatataaagaaattgatatcaatgaatgagtattatattatcttactcttcaaagatgagttttaagacttttctgatatgctttggaaagttgataagctttttgaagcatctttatgtttttctattctcaagtcagtctcaaaaagaaaggaagaacagaaaagaaagaagagttaaaacatccttttgattgccgagttgattcaccttgaaagagctgtactttgacattggtctcagattcttactcgtgtgccctttggtctgggagcatagcatttgcaaccttggaattggttactttaacttttttcaaaatggggtaaatggcttacctctttgaaagatacttcaaaatcaagataatatttgtgaacagggtttgaaaaatggacgtgagtcagagtgatggaaatttcagttagactgcaca

SEQ ID NO: 20920 - DNA, 126 bp, Homo sapiens
gagcatgttttactctagggcaagcaaggagctctatggaaggcagctgggcaagctagttaaaaacactagttgtaatcctgcctctaccacttactaactttggaatctaaacaactgtctcac

SEQ ID NO: 20921 - DNA, 346 bp, Homo sapiens
gcagtctctctccagccagaaaggttttaaaaatactgaaatactgtaatatacagaagatacgaaatataaacaatacagatgtagagatgccaaggtgaggctggggaattccaaacagaaagtgtaatgtcagtaaaggcccagagaaggggaatatttggtaaataaatagaagtactcttagtccaattttgttagagcatttgggatataagaactttagagataataattgtattccataggaacttgggagttattgaaagagaatgattggattagctctattttttagaaagtttccatttctagcagtagggtgactgcagctgggaccatattc

SEQ ID NO: 20922 - DNA, 490 bp, Homo sapiens
gcatcatacagtagtcatccttttgtgactggctaatttcacttagcataatctcttcgtgcttcatgttgtagcatgcgtcagaatttccttctttttaaaggctgcgtaataatccattgtatgtatatcccatgttttgtttatccatctatttgttgcttctacgttttggctgttgtgaataaagatgatatgggccgggcgtggtggctcacacctgtaatcccagcactttgggaggtcgaggtgggtggatcagttgaggtcaggagttcaagagtagcctggccaacgtggtgaaactccatctctactaaaaatacaaaaattagctgggcgtggtggcatgtgcctgtaatcccagctactcaggaggctgaggcgtaagaattgcttgaacccaggagttagaggttgcagtgagccaagatcgcgccactgcactctagcctgggagatggagcgagattctgtctcaaaaaaaaaa

SEQ ID NO: 20923 - DNA, 624 bp, Homo sapiens
gagtattcctagaccttgtacttatctcattgtcctatgctcaggcaaacgtttgcaaacagcagggaaaacaactgcagattgagacttgagggagaagggtgggagatggtccttagcagatccctgggcctggggatcacctgctccctgggatcaacagaaccagctgtggagaatctgctcgacagtggccttggaacagctgcggctgctgcaccaagaagggagggcaggagggcggagcggtactggtggaagggtgagctaggaggaaaggctgcaaggaccctgccacgccacctcccggcaaaccaggaagtatttttgcagtaagtgcattggactgagccaccttttgaacctacccgaagtgttaacagcgcacagcaggccttagatgggtgcaataactgcaaactctcaacgggctggtgcctaagaggctacgggctggcagctaaatagagcccggcgcagtgagtcgcgttgtccgaaagtacacagagtggagccagccgactgtgctgtctttgcaaaccgtgaccgagcaaagtccgcggtaaacaagcctcgcagcagctgcctccggatgagcgccccctgctcattcctccacccagc

SEQ ID NO: 20924 - DNA, 570 bp, Homo sapiens
gagtattcctagaccttgtacttatctcattgtcctatgctcaggcaaacgtttgcaaacagcagggaaaacaactgcagattgagacttgagggagaagggtgggagatggtccttagcagatccctgggcctggggatcacctgctccctgggatcaacagaaccagctgtggagaatctgctcgacagtggccttggaacagctgcggctgctgcaccaagaagggagggcaggagggcggagcggtactggtggaagggtgagctaggagtgcagtaagtgcattggactgagccaccttttgaacctacccgaagtgttaacagcgcacagcaggccttagatgggtgcaataactgcaaactctcaacgggctggtgcctaagaggctacgggctggcagctaaatagagcccggcgcagtgagtcgcgttgtccgaaagtacacagagtggagccagccgactgtgctgtctttgcaaaccgtgaccgagcaaagtccgcggtaaacaagcctcgcagcagctgcctccggatgagcgccccctgctcattcctccacccagc

SEQ ID NO: 20925 - DNA, 399 bp, Homo sapiens
agttttttctcaatagtctattcaactgttaataaatccaaactggattagcattatgactcttcactaataacgtgtgacccagaaaaaaacaaagcttggagggacacaaacgacaaatgagctgttttcattgctttgtggctacaatgttgcatatttcatttctgattcatggaaaaatatccagcacacagaagtcagctagctctgtgaaaggccttggaccagggaggttaagaataaagtcccaatgtcttagtcactggggcctaggaagctgacctggaagatgttagcagcagaaagacttttgctaggaaactgctctctgaatctgctaccctcttgctcccacagctttgtttaagcagatcactaaagatttatgtattgact

SEQ ID NO: 20926 - DNA, 278 bp, Homo sapiens
aagcagatattgaaaatgaatagctcttaggacagactatcaaataaatgtgagccagaagatttttaatgggagaaattaactttaatgaaatatcttgtagaaagagttaaaaacaagatacctgccaatcccagtcactctggagagtatctaatgtagcaatgaaagtaaaaactagttaacattctccagtgtttgtcaagtttaggaagagattaacttgaaaagctgtggttgggtagaaggtttatttgaagatcgtttggcatcatagc

SEQ ID NO: 20927 - DNA, 378 bp, Homo sapiens
ggtggggtgggggggagtggggatgagggtataaagggaaaggggtcaggaaaaatattccagacaaaaggaacagcatctgtgaaggcctaaaagaaagagcaaagcatgaaacggagagaaacagaaataattcattatcagtgaacataaagttaagagcagaacatgaggagaagactcgggatgaatagggtcccaatcatgaagggtcttataagccatgttagagacactggaatcaatcccaaggacacagcaaagctagataaaggtcatcaatgaagacatgtcaagatcatattagcccattttgaaatgtcatcctcactgccttgtgaaagtggatatacagaaagagcaaccagaggtgaggga

SEQ ID NO: 20928 - DNA, 474 bp, Homo sapiens
gagaatgttgcagggtgcaatttctccccatctctagagaagccattgggaaggtcaacccataggaccctccccagggccaggctggagctgaataaagagccctctggctcgtcttagtgtcagcagttattcatcagagaacttgaattagaactcacatttctcattactggataatgtgagagagcaagcatgggttccagctaatcaaacatgccatgtgccaagtgagcttgagtcctggagagaattaactctaagcctcttaggctaccatcctttacccactggatgagcccgaggggcatctggggcagcagtgacagagacctctgggcaagatatgcccagaagaggtgtgatgctgcgcccagcttctcatgagcgatcaccaaaactgatcacaaaatatgcaccacataagagaagagtaagataaacactgttaaacaagatcatgtaagaagacta

SEQ ID NO: 20929 - DNA, 291 bp, Homo sapiens
caccagccactgcatctggttctttttattttcttactggagaaaactgagtctcagagaagagaagtgacctgggcatacagaatagtttttagttaagtgaggaccagaacccaagttttcttttcaccagagtttcccaaagtgtgcaatgatatggggtaatacaggggtgaatctttcttttcttttctttcttttgagacagagtttcactcttgtcacccaggctggagtgcaatggcgtgatctcagctcactgcaacctccgcctcccaggtacaagcgatt

SEQ ID NO: 20930 - DNA, 498 bp, Homo sapiens
gaaattatccgaactcaaacccaaaatactccaataagttgtgtgattcccttaaggcttttttttttttgcacatgctgtacacttatctgagatacagttcttagacccctttcccttttaaattacatttctcaatactcccttctcatagcactcttcttccaatgcagtttttacagttatgtatatgttggtgtactttttagttttctcgcaagatatcaaggatttgtgagattgataatttgtaataggccaggcgcatggctcacacctgtaatcccagtactttggggaagcttaggcgggaggatagtttgaggccagcctggacaacataagcgagaccctgtctctactaaaaataaaaaatttagccaggcatggtggtgcacacctgtagtcccagctactcaggaggctgaggcgggaggatggctgagctcaggagttggagtttacagtgagctataattgtgccatgacactccagac

SEQ ID NO: 20931 - DNA, 813 bp, Homo sapiens
cctagattagatgttttctgacctgtctccctaagttgttcctgtcacttgtgtctgtcattcgctcccccatcgcatcctgcccaaccctccctgtctatgattcgaattgctctctgtccagatcatttcctgcagtgaaaaacgaagaaagactttctcccttcttcccacctacacattccttttgtcccccaagatatcccttcctcttgcctggaatcttcccaggccttaattgattgatttaggccccctttgcaccaggcaccctagcggaagcccagaaagccccaagagtctggatgtgttttggagagcaggctcaggttcactgcacactaatttgcagcaggaagtgctaggaagcccgatgagggatgggaattagcaaataaggttggcagtcaattgacagaggaagcttaaggaagaggatcattttgaaaaggaaaaataatttaatccttttcaggtgtgttaatttctttcgtggaccaaattaccatggacctggaatagttgagattttccctaaggtctggctgtacttcatagggaagaagcaagggtaagtgcagtaaatttgattatggacaccagtctaactctagcttaatgagccatggaaacaaaatagctcaatctcttctaactgctgtaatgcaacactaggagcattgagagcactgtggttttggttacacaaatttgtagtacaggccttgcctcagcatttgaacatttcagcaagagagctgaacttgcttcgttcttcatgtagcagatataagtcttttggaattaatttga

SEQ ID NO: 20932 - DNA, 231 bp, Homo sapiens
gagtcaaatatacagagtgaataaaagagtgggttaccaggagcaagtgggtggggaatgggaaatgtaggtgaggggtaagaaaatagcaagtatgtaggatgaaagagcctagagatctaatgtgtaacatgtagctaataagaggactgtagctaataaaattgtactatatttggaattcctgctaaatgaatagatttttagctgtccttgccacaaaaacaaacc

SEQ ID NO: 20933 - DNA, 342 bp, Homo sapiens
tagcactaaatcccacatcaaaaagttaggaagaactcaaattaataacctaacatcacaactgaaagaactagagaagcaagacaaaaccccaaagctagaggaagacaagaaataactgaaaatctgagctgaactgaaagaaaccgagacatgaaaaaaagaaattcaaaagatctatgaattccgggtaggtttcttgaaaatattaataagaaagtctgctagcagactaatacagaggatgattgaaagaaacacaattagaaatgacaaagggaatgttaccactgaccccacagaaatagaaacagccatcagaaactactgcaaacacttcta

SEQ ID NO: 20934 - DNA, 660 bp, Homo sapiens
ctgtccccaattccattcaaggttcagttgtgttcagctttaaaaccagctatgtgaatgtgagttctagtgcagattatttagtgattatgtaactaaaattgatgaaaaaatcacactatacaactgtgaggagcacacaactgctaagtttgtacttttgaaagtaaattattctttgtttgataccttattttttaagaaagtgggattaaaaatattttggtcagtgctgttttctacccaccttcaaaagccaatggtttgatatttctattaatttgtgcttcctttagttttaataggggatagaagactgcagctggttgggtctggaaaacattaatctgggcaaacggagctggagctatgaggatctgagtcctagggggccctcattcactagcagtaagaatttaagtggtgcatggcacatagcactgtactagattctgcaggggcacaaacatagagccaaacactctccctcttggagaatttcagacccagaaaaggccacgcagttctaacttttgtcatcggttccttttgctaaaaggcaaagggtatgttccttgcctattgtccaacataccccttccaagattgtgagaagatgggtagctgggcatcaataaatattgaatcaattgacctatg

SEQ ID NO: 20935 - DNA, 189 bp, Homo sapiens
gaagagatgtgctgcctgtagcccgaatgccctaaagagactgtatagttagataatcctgtggctccagataagcgtgggtcctacggtaagttgcaaaagcctagggctttttgcagcccttggcaggtgtttcgtagcaaatctcaaagtttcgtggtcactcaggacaacctcctttctgctgag

SEQ ID NO: 20936 - DNA, 640 bp, Homo sapiens
gagagaagtcggtgcctggcttcaaagcttcaaaggataggctgactcttttggtaagggctaatacaaccagtaacttaagttgaagccattgctcatttcccattttgaaaatcctagggctcttaagaattgtgcttaatcaactctgtctgtgctctgtcagtggaacaacaaagcctggatgtcagcacatcctctttacgggatggcttactaagtattttaagctcaccattgagacctactgctcagaaataaaagactccttttaaaatattactgttcattgacaatttagctggtcacccaagagctctgatggagatgtagaaagaaatgaatgttttcatgcctgctaagacaacatccattatgctgccactgatcaagtagtttcaactcttattatttaagaaacagaatccatagaacatttgtggtagtagcgcagagttggttacaatgtcctaccacagcaatttctgacattcaaattgggcctgtagcaatgggactccttttgattccttcagctttcgtattatgttggttatctatacagcaggtttctaaattgaaacactttcactcacatcactcatatttccttcgtttttggagactaacagcttgatct

SEQ ID NO: 20937 - DNA, 452 bp, Homo sapiens
ctcctgacctcaagcgatctgcccaccttggcctcccaaagtgctgggattacaggcatgagccacagtgcctggcctacgtatttctttttaaagactgacttttcatttagattaaatgattgctcttctaaagtaatttactctttgttggttttaagaaatcttttgcatgtataaggtataaaacaacaactgtttatatgttacttccattagccgatgaactagcggttaaatgatgcttcaaatagaaaataagttaattccactaatagattgtgttttcattaaagtcataaacatgaaataacactttacaaagttcattttgttgagtatcttgcattactgtgaattatattgtaaagtagtttaaagtttaacattaaagataaaattattatttttgctgttatggtatgaataaaaaaatttgattaactttttta

SEQ ID NO: 20938 - DNA, 419 bp, Homo sapiens
cattgtctctcaaactattcacttgccactttctaattttataatctccacacctttggaatttgccaatacaacagagcagtagacaattttcttggacttcatgcttgatctgcttcaatctatactatttgttataaaccttcatgactgacagatcagacctatcatcttggatcctctgtagtggcataattttgtctttgacagattataacttaaaattgctgagaatactctgtcaactttaaaatgtatctgtaatatttacaagtatatcattcgtcttaagtactacaaaataccttccccttatgagagtcagttaactatttttaactagttgcattaaaaagtgaaaactatttttcatttctaaatatgctattctcttctaagtaaattaggataaagtactt

SEQ ID NO: 20939 - DNA, 1044 bp, Homo sapiens
agaagcaatagatcacattttcctatttgtttatgaaagtacagtcttattttcagcctaaagaaatggacacttctcagcataggcggacgtgattggttgtggtatgaatccttttcctaaccaggatccataatatcacagacaaggtaatatagcactgtgaaggatgtgtctttcttcaaatggagccatgagagatggtggttttttaagttgatttgatgttggatgtagtaagtcctgtgggagagaatttttttaaataaaaaatactgtttaaaagtgtctcttctaacttgatctctaccttttcccctctccacttctaactgccccccaccagctacactttcccagtttgaaataatgaacaataccttttgctgacagaccaaaccttagttcctgtgggcaaatgaagggttttttccccccaacaatgaacaattttcttgaaaaagtctctcaaagatgttcttattgtaataaccctccttcaacccaaacagcctaaatgattggataaatgttacacaagatcaaggagcaaccaggaatttcacagctgactcagttactgattactttgcaaaaatagaagccaagtcttgacttaactggtaatagactcagagtttgagtttgctctgggtggggtgctgatccctttttcacatgacagaagtgattgagtaatttctaatgtgctggtgttggatggctttttctttctcactatcccatatatttttacactttgatatttccctgaactaatattccttgcaacttatttcagtcaacaggatctttaagcatcagcactatgctatatatgtaaaaaaaaaaaaaaaaaatttgactgagccaaatggctccacagagtgagttgtcaaagtgtggaatgaagagaatggagattgccgatgtcaactagaaatggcttcagctaccttgtgggcttctggggagcaaacatttgctctgcatttgggtgaagggaaagtttcgcatgaatacgtgctcggtcgtctctttgtc

SEQ ID NO: 20940 - DNA, 499 bp, Homo sapiens
ttcaaccctggtgaatgtaaaacacttcaaaactattgctctaggatctaaatgaaattttattttttaaatctgtaaagaagactggcccaagggattagttatgagacaggaaacctcctctagtttaacattcaaattcaaataaggtcagtgcagagcaaaggtcattgtcatgctaaaggtatctagcagcttccatgaaatgaattgataagcttaccactccctagtgcacatagtatcccatcaggaaacccagaacgaacaatcagagtactgcacaatatttagaagcacaagtattagaaccagacttacttatactcaaattatggctccaatactaactagctataggcaaaaagcttaggctgggcgcggtggctcacacctgtaatcccagcactttgggaggccaaggcgggtggatcacgaggtcaggagttcgagaccagcctgaccaacatggtgaaacacagtctgtactaaaaataca

SEQ ID NO: 20941 - DNA, 382 bp, Homo sapiens
gggaaactccaggggttttagaatctccctcccaagaatcagggacaaaactagtataagtctttattatacatcaggtgtactgcatttttctgcacattcatttgttgctttttaatttaagcacttaattggaaagaaattttaaatcttaactgaaagttagcccttctcattcctctatccctcttatacacgatgtacattcattccatcaaaatatctcttcacattatttaataaaactgatattaatccactactttctaaaacttccatcattctaattcagatagccttcaactgtcacctagaccatgacaggtgccactaaactggtcttttttcttccatacttgcccctctactgactatgcctcaa

SEQ ID NO: 20942 - DNA, 381 bp, Homo sapiens
caacaatttatttagctcttgattgttctgcttgttggcagtttgggctgagcttggctgggcagttcttctggtcttggtctcctccacgtgtctgcaggcaactgtaggtcctccgggtagctcttctggggtttggccggctattggctggggtgtgaggggcaactggtccctgtggtttcatcacccagcaggctagcctgggcttgtcaccggccactaagcaagcactctaggaacaagaaacggtcaatccccgaaacccaagtgcttttcaagcctctgtctgtatcatttttgttcatgtccctttggccaaagaaagccacaagacaaacccagattcaagaggtggaggaaataaattctgtctcttca

SEQ ID NO: 20943 - DNA, 125 bp, Homo sapiens
aaaatccaactacagaaaaatttttaactgaaagatgccttaatagaatgatctatatcccttagagaaaagattaggacagtcctttatccccttgaattactttttaaatttttaattttctg

SEQ ID NO: 20944 - DNA, 397 bp, Homo sapiens
agcctttttgcccagttttccattgggctatctttttcttactgatttgtaggcgttctttatgtatgctggatataagtcctttgtcttatatgtgtattatgaatatcttttctcagtttatcaaccttttcctccatgtgtccttatccctttttgtgccctgtaagaaatctggcctcctgggatcccatctggaaagtgcttagtattctgcctgcttcacaaagggagggaaagcaaacgtggtgaggcaccctttccattccagcttgctcggtagctggtgattggaagacactctgtgacagcgttcagtccctgggcaggaaaacctcctttaaggattcttcttccttaactgggtctgcttctttcctaaagaaaaaaaaaatga

SEQ ID NO: 20945 - DNA, 359 bp, Homo sapiens
ataaagagttaagattttttgtgcatagttgggtagcttccttatatatattttatctaaattggcaaatcaattttaagactcagagtccttaaaaatatgcatttgtgtgtcagtaaaagtaaagtaaaaatacataaaaaatgagaggccattgaaatcctaaaagattactgattcaaagtcaaagagaaatgacatctaattcctctggtatatgttagtattactaggtggttaacgttgccagctttggagctgaattgtctgggatcctggctccactgtgtattagcttcatgtctcggtttgctccactgtaaaatgagaataacaatgagtggcctcacaaagctgct

SEQ ID NO: 20946 - DNA, 1648 bp, Homo sapiens
gtaagtaaacgtgatgataattataaacaacattcaaataaccttggaccttggtgaaatgacttgtggtggccagaatggtgcaacaagatgttatttgcaagtttttttaagacacaaatatctcagatactaataatgagaataaagactgttgaatatgaaattaaagccaagcaataatgtgccaaaaagaggcagttataccagcaaatgcatctattatgggcacaccattatataatgatggtttgctttatgaagactgactgtaacccacaggataaaataagcaaaggcatagtttctgctttcttcctggaaaaacttgtttagaagcttcataaagaggtacagcactaatgagcattagtcaggatacagttggcatctatgtttttatgtgagcccagagggaagaggagccactcaaagtcttgctggcttaaaactcaagacagctgcaaccagaagttttgttgaaatggagactttaaacttatggtaattactctttctggacactagcatgtagaaagcaattcagttaactctgcccagaggattaccagctttagctgtgaaaaaatgggctcccggatgtaaaatcactaaaacatgagatcttgtatccaaagaggcttcaaatgatgccttacagaaaacgatgctccagatgggcacttctaaatgctaactcttcatcaagtatctttctggattcaagctcaaaattaattggctgcaaaatagtaggaataaaaatcacatattttacactttagaaaaggatattgatgatcaacctgcatggtgataattatgatgagataccccagtgatttaatgatgttagaaagaattaaatgggagagaattgctaacagctttcttgatctcttaactatggagatgtcattcatttatttctggggtgaaaattatagcttgctttttgacattgctgctagtattgttctttgttgctttaaaaattgtctctctttagaaaaactcttgagcagttaaacagttttttttctgattcatatcattgcttttaataacatgtaaaggctgtgtgtagagcaaactatataaaatgagtagaaagggcttactcatgttaattggcatccttgatgattttagttgagattccttaacatttattttagatcacatctttacgtaacttatttttcctaatgttttccatcgtgtcttaaaatgatgctggtatatcaggagattgcagtattatagtcatactccccaatccctagaggagaggaaagactaattcttgttttaagggcccctggagataccttttattaaggttgaaaaaggtcaacacagcctgaaaataagaaaaatatatactagcaattactaattttctaaatgtgtgtatctctgctgtactaatgtgtgaacaatatgtcgtgcataatactgtagctggtcgtggtatgtcaatacattctgtgagtgtgtacagtctgagtgatcagttttctatttttatgtgtaaaaaaaataacttgtcgtatcccatttaaaggccaatttctgtattcaggcaggcatatgtacatacatgaataaagccaacaaaagtgtgcacatgtattcagtaacagaa

SEQ ID NO: 20947 - DNA, 910 bp, Homo sapiens
gctctctgtctccttcttcggccatgtgaagatgtgtctacttcccctttgctttctgtcatgattgtaagttccctgaggcctccccagccatgtggaactatgagtcaattaaacttcttttgtttataaattatccagtctcaggtatgtctttatagcagtgtgagaatagaataatacatatggggattatatactcattaaagataggagccagtgaattcataatgaggatttgtatattgggcaggttactgtttacttttagccaaagctggaatgatttttataggaaggtaatcactttgtaactgcaaactcattttggttaactctagagtacgttaggttgaaaatggaaaaaaaaaatagttccaaggaaaaaaagaacttatcaaaaaaaatcagtgaaacagaatttatcaaagaaaatgtaataaaataagatttagaaaaattggaggtctaggagcacaataaatagaaattgctaatgaaggatatgttgacttactggggatggatggaggcaagctagagatttgatcctgcaatccagtcatactggaaatagtggaaccataaaaaaaaatttataaaatggtcccttggcttacagagatccatacattcacaacttgatatggggtgaaatataaattgattttaaagatgttaaatgtgtgaatgaaaaataaaaagggttatagaggtttaaatgattattagataaattgctttcataaatattaagaaaatgataggtgtgtggtggtcatgtatcaccttggctagtttcctggtccccagatgtgtgggtaaacatcagtctagatcttgctttgaaggtatgttttggacatgattgacatttaaatccatagactttgaataaagtagattacac

SEQ ID NO: 20948 - DNA, 577 bp, Homo sapiens
tgggatattgagattcaaaatgactgcaaaaaggaaaaagcatcactttaacactgtatgtataaaagtattataaaatcttcagaacttatatttttagagaaaagaaaattttgttccaataattccagtggaatttttaatagctgctaaaaattgttcacctacttactgaatcactacagctctattctaagctttattaaataatgacttgaagagccttagggtataagtttctgtcttattttaaaaatagctataaagatttaaaattccaaaaaacttaacagcattcaaataaattactttgtataagcctcatgaaacagaaaagccttttaaaaatgaagaaaatccacacgaaggaataaaagacatgtatgaaacactaaaataaaaggtgaacaaatgtaagaaccaacttacaactttaaacttttgttttccctctcataagtaatgttttagcatgtatttttaaaagtatactttgacagcaaaaagtggtaggtctagttttactcagataaaaagactccatgattaacttagcattatcccatcttataaatga

SEQ ID NO: 20949 - DNA, 407 bp, Homo sapiens
ttacggtctcctctatgagttatgtcatgctgaaggggatccacttcatcgttaaagctgaaagggttaaatgcccacggagaccgccggagtgaaggtctgcagttgaacaagataaaggaacaagaacaaaacgactcaaaactgttgtaaccataactcccttgcaaaggatttaccgtgtatttttcttagggattctgatttttctttggaagccactatcaactccatttctactctagaaattattctaaaggattgttaaatgaggaaagatggaatcagtgtcttttcagctaagcatatttaagcacttaagacaaagggggttcagggcataaacggaagatccttgctgtttttcactgatatttggataattaaagaccttcattagctttgta

SEQ ID NO: 20950 - DNA, 254 bp, Homo sapiens
tactttagaaaccattgccaaatccaaggtcattaaaatttacccctttccagaacctaaggttttggttttcttcctcttttttattgtggtaaaatactcatagcataaaatttaccattttaacaattttaagtgtatagttatgtggcattaaatacatttgtattgtgtgtgcccatcaccagcacccatctccagaactttttcatctcccccaactgaaactctaaccattaaacactaatttccca

SEQ ID NO: 20951 - DNA, 502 bp, Homo sapiens
aggcatggaacctccgcacactggatgagaatccatcttccattcgagctgggaatagactttgtgaaagatattatgtaatggagtctcgggaaccctgagacctctccagcgaagctgaagtgaattaattaagtgctttaaacggtcttggtaaatattccgcgggagctggggaggaccgttgggatggctgtagcttgagttgaattttaactgtcctcattctgggttttgtcgctctgctttctgtgccaaggtgctgtgttacgggagagagtgactggaaagtaacaaagctgaatctttctccctggagtaaggccgaagactggattactacacgcctagacgtgacactacacccatagatctcatgcatcattaatgccatatgacattgccattttctttctcagttcacggacaaaagtggtgggttttcattgtcttcactgattgtcaatgcattaataaagaagatgtgtggtaaaaaaaattt

SEQ ID NO: 20952 - DNA, 396 bp, Homo sapiens
aggcatggaacctccgcacactggatgagaatccatcttccattcgagctgggaatagactttgtgaaagatattatgtaatggagtctcgggaaccctgagacctctccagcgaagctgaagtgaattaattaagtgctttaaacggtcttggtgctgtgttacgggagagagtgactggaaagtaacaaagctgaatctttctccctggagtaaggccgaagactggattactacacgcctagacgtgacactacacccatagatctcatgcatcattaatgccatatgacattgccattttctttctcagttcacggacaaaagtggtgggttttcattgtcttcactgattgtcaatgcattaataaagaagatgtgtggtaaaaaaaattt

SEQ ID NO: 20953 - DNA, 1087 bp, Homo sapiens
tggttggagctaaaatatgaaccttttttctcagtggtgtccagttgatagaaaagagagcttacttgctgtgggtgtatctgagtatctggatgacataatggaaaacatttcttgctttagaactagaccgcagtttgaatgccatttctggcactttctggcttgtgattctgtttccttgtatataaagtaggagtaataatgcctatcttggaaagtgattttgggatttaaatgagatgtcctctgttttttcccagatcttataatagacactcaggtgcgagctattgtacctttattggttactaatgaattgttacatgctcttaatttctgcattcgtgaaagcactggacaagatcttgcagccacttcagaatatttagtctgttttttaggtctttactcggaaatcatgtttatgaaacttgaacatcagctttgatatcttgatcatacatttatataccatgtatgcttaagtttataaaatacacaaatcaaaattaaccaaaatattaataatgaaatatttccatatttttggtaataatgataaaatacataaatcaaaattaaccaaaatgttaataatgaaatatttccatgtttttggtagtaatgtttctttatggttgttggcataacaggctatggatgtctctagcatcaaagcaatgttaataagtctaataagactactggctatcatctatcaacattggtctgatttgtgataattgtgttcataaaacttcttaatatatttcctggcctctctgaactattggctttttcattcttctgcatgtgcgagagatggaaaccctttgaattagggctttgtgactgacccattgtcactacttccttctttttatgtattttctcctcaaagcacaaagaaattagaaatatccttgtctgggtaccgtggctcacacctgtaatctcaacattttgggaggctgaggcaaaaggatcacttgagcctaggaggtcaaggctgcagtgagccaagtttgcaccactgcactgcagcttgggtgacagagtgagaccctgtctcaaaaaaagaaaa

SEQ ID NO: 20954 - DNA, 375 bp, Homo sapiens
gtgtacagctcaacacattcttacataagtatacgcatgtctaactaccaccatgataatgatacagaacattcctaacactctagatgttccctgtgcccttctgggacaatattctcccaccagaggaagtgacattctgactttattatcactgattagtccaatggttcttaaatattatataaatcagacagtctgtgctcttttatgtctggcttttgcagttttctgtaatgtctatgagattcaaccatgttgtagcatgtgtccataatgtgttattttttattgctgagtattattccattgtataaatagaatacagtttatttatttatatttcggaatacaatttatttatgtagtctgcta

SEQ ID NO: 20955 - DNA, 318 bp, Homo sapiens
cagtaaaactatttgtatgatattacagttatgtacatataattatgtatttgtccaaacctacaaatgcacaagagtgaactctaatgtcaactatggactgtggatgataatggtgtgtgtgtcaacgcaggaccacagattgtaacaaatgtcccactctgttgtggggtgttgacaccgaaggaggctgggcaaagagggtatacgggagctctgtattttctgctcaattttgctgtgcatctaaataaaagtgctctaaaaatggtctatttaaaaggaaaaaaattcttaagacaaagtcagatccattag

SEQ ID NO: 20956 - DNA, 1597 bp, Homo sapiens
ggagtggaggccatcctgacaacagctctatgattttctatgccaatgacacaggagcccaacagtttgaaaagtggtgggataagtccaggacagtccccttttatcttgtagggctcctcctcccactgctcaatttcaagtctccttcatttttttcaaaatttaatatcctaggcacagtgtctgtcctttatttgattttccttgtcacctttaaggctgttcgcttgggatttcatttggaatttcattggtttataccaacagaattttttgtaccagagataagatttcagtttccacagctgactggagtgcttacccttgctttttttattcataattgtatcatcacactcttgaagaacaacaagaaacaagaaaacaatgtgagggacttgtgcattgcttatatgctggtgacattaacttatctctatattggagtcctggtttttgcttcatttccttcaccaccattatccaaagattgtattgagcagaattttttagacaacttccctagcagtgacaccctgtccttcattgcaaggatattcctgctgttccagatgatgactgtatacccactcttaggctacctggctcgtgtccagcttttgggccatatcttcggtgacatttatcctagatattcaggagcagcatgtggactggcctttgtattcatatacccatctctcatctatataatttccctccaccaagaagagcgtctgacatggcctaaattaatcttccacgttttcatcatcattttgggcgtggctaacctgattgttcagttttttatgtgaaatacctcaactgtttttttcaagagctctcatgatattttgagccttgacaacagttctatataaattcacttgtaaatgctgctgttgtgtaattctaaatattttctaagataatttgaaagcaagggaaatagtggccccttaatgagtatttttttattggggtggggaaaggggcaaaaagaatgatcttagtgtctttacctttctcatattaactcacctctttattctgtggtcttttctgaatagaaatgtatgccctaggaagaaatcatgctgggttttgcttttagagataaaaggtggtggatttattttgcctgcagtaaagattctcagggtgtcagagcagcatattgtcaaatcctgcttctgttttatgtttcagtgtattcactttcattttcttacttactagaccatttctgcagtttgcccaaacctctactgtttgggacagtaagccaaatacctcatttttaaaaagaagttttcatggcatcagtgttaataaagtacatttttaactgagtcttaatctctatttgaagaaaaagtagagacaaaagtaatgtcaatgtaatccccaggatcatgaaatgtatacaaaataaataaagtaggagagtttgttgctgtctaaaaaaaaaaataacaaaaaaacaaattttggggggcgtcgtggctgaaagtttttaacaatctgtggggggggccaaggttatggaacggcaaggtccaaactggaaaagggggggtttccaaaaagg

SEQ ID NO: 20957 - DNA, 1605 bp, Homo sapiens
gatttctcttactatggacagcaggaaggagtcattttttttggaacactcttacctaagaaagtaacaaggaacaagaaggggagattgttagcctgatgcttattgaatataaagggcttaccagttcctattgaactgttcctcaagaaaacccaagtatagagaaaaggagaagaaagtgcatatttctctgtcacagtctcatgtttaagtatttttgttattatctttcgtaatcatgctgaatgccatggtagcatttatctgttcttatacttaaaccgggatgctaacggtccctcaaaaactgagaatgagtaattagtttataaaagatcaaagataggaggcctagctccagatgtttctgaggaagtagccacaatcaccaaatacagaggaactacagagatttgagggatgaataaaaagtctttgttaagcagatgctataaagatgagcaggaaatcatattttatattaacttagcaagtaaagtaagttttaaacccagatgttttatgtcaacaacaaatgaatcaaaaataatttttgttgagctatcagactgaggaggatttaaattgtactatgtttaccttaattgtaaaaagccaagtgcaagatgaatattaaccccaaaagcttttattttgcagatattcaggagcagcatgtggactggcctttgtattcatatacccatctctcatctatataatttccctccaccaagaagagcgtctgacatggcctaaattaatcttccacgttttcatcatcattttgggcgtggctaacctgattgttcagttttttatgtgaaatacctcaactgtttttttcaagagctctcatgatattttgagccttgacaacagttctatataaattcacttgtaaatgctgctgttgtgtaattctaaatattttctaagataatttgaaagcaagggaaatagtggccccttaatgagtatttttttattggggtggggaaaggggcaaaaagaatgatcttagtgtctttacctttctcatattaactcacctctttattctgtggtcttttctgaatagaaatgtatgccctaggaagaaatcatgctgggttttgcttttagagataaaaggtggtggatttattttgcctgcagtaaagattctcagggtgtcagagcagcatattgtcaaatcctgcttctgttttatgtttcagtgtattcactttcattttcttacttactagaccatttctgcagtttgcccaaacctctactgtttgggacagtaagccaaatacctcatttttaaaaagaagttttcatggcatcagtgttaataaagtacatttttaactgagtcttaatctctatttgaagaaaaagtagagacaaaagtaatgtcaatgtaatccccaggatcatgaaatgtatacaaaataaataaagtaggagagtttgttgctgtctaaaaaaaaaaataacaaaaaaacaaattttggggggcgtcgtggctgaaagtttttaacaatctgtggggggggccaaggttatggaacggcaaggtccaaactggaaaagggggggtttccaaaaagg

SEQ ID NO: 20958 - DNA, 1093 bp, Homo sapiens
aagggctcttctcttgaccagcaggatgtgccaagcaacaaatgactgtgcaagcaggtcacattttccatgtgctgattcttaatctaattattgtgggagctggagtgatcatggcctgtttctacccaaacataggagggatcataagatattcaggagcagcatgtggactggcctttgtattcatatacccatctctcatctatataatttccctccaccaagaagagcgtctgacatggcctaaattaatcttccacgttttcatcatcattttgggcgtggctaacctgattgttcagttttttatgtgaaatacctcaactgtttttttcaagagctctcatgatattttgagccttgacaacagttctatataaattcacttgtaaatgctgctgttgtgtaattctaaatattttctaagataatttgaaagcaagggaaatagtggccccttaatgagtatttttttattggggtggggaaaggggcaaaaagaatgatcttagtgtctttacctttctcatattaactcacctctttattctgtggtcttttctgaatagaaatgtatgccctaggaagaaatcatgctgggttttgcttttagagataaaaggtggtggatttattttgcctgcagtaaagattctcagggtgtcagagcagcatattgtcaaatcctgcttctgttttatgtttcagtgtattcactttcattttcttacttactagaccatttctgcagtttgcccaaacctctactgtttgggacagtaagccaaatacctcatttttaaaaagaagttttcatggcatcagtgttaataaagtacatttttaactgagtcttaatctctatttgaagaaaaagtagagacaaaagtaatgtcaatgtaatccccaggatcatgaaatgtatacaaaataaataaagtaggagagtttgttgctgtctaaaaaaaaaaataacaaaaaaacaaattttggggggcgtcgtggctgaaagtttttaacaatctgtggggggggccaaggttatggaacggcaaggtccaaactggaaaagggggggtttccaaaaagg

SEQ ID NO: 20959 - DNA, 1687 bp, Homo sapiens
ggagtggaggccatcctgacaacagctctatgattttctatgccaatgacacaggagcccaacagtttgaaaagtggtgggataagtccaggacagtccccttttatcttgtagggctcctcctcccactgctcaatttcaagtctccttcatttttttcaaaatttaatatcctaggcacagtgtctgtcctttatttgattttccttgtcacctttaaggctgttcgcttgggatttcatttggaatttcattggtttataccaacagaattttttgtaccagagataagatttcagtttccacagctgactggagtgcttacccttgctttttttattcataattgtatcatcacactcttgaagaacaacaagaaacaagaaaacaatgtgagggacttgtgcattgcttatatgctggtgacattaacttatctctatattggagtcctggtttttgcttcatttccttcaccaccattatccaaagattgtattgagcagaattttttagacaacttccctagcagtgacaccctgtccttcattgcaaggatattcctgctgttccagatgatgactgtatacccactcttaggctacctggctcgtgtccagcttttgggccatatcttcggtgacatttatcctagcattttccatgtgctgattcttaatctaattattgtgggagctggagtgatcatggcctgtttctacccaaacataggagggatcataagatattcaggagcagcatgtggactggcctttgtattcatatacccatctctcatctatataatttccctccaccaagaagagcgtctgacatggcctaaattaatcttccacgttttcatcatcattttgggcgtggctaacctgattgttcagttttttatgtgaaatacctcaactgtttttttcaagagctctcatgatattttgagccttgacaacagttctatataaattcacttgtaaatgctgctgttgtgtaattctaaatattttctaagataatttgaaagcaagggaaatagtggccccttaatgagtatttttttattggggtggggaaaggggcaaaaagaatgatcttagtgtctttacctttctcatattaactcacctctttattctgtggtcttttctgaatagaaatgtatgccctaggaagaaatcatgctgggttttgcttttagagataaaaggtggtggatttattttgcctgcagtaaagattctcagggtgtcagagcagcatattgtcaaatcctgcttctgttttatgtttcagtgtattcactttcattttcttacttactagaccatttctgcagtttgcccaaacctctactgtttgggacagtaagccaaatacctcatttttaaaaagaagttttcatggcatcagtgttaataaagtacatttttaactgagtcttaatctctatttgaagaaaaagtagagacaaaagtaatgtcaatgtaatccccaggatcatgaaatgtatacaaaataaataaagtaggagagtttgttgctgtctaaaaaaaaaaataacaaaaaaacaaattttggggggcgtcgtggctgaaagtttttaacaatctgtggggggggccaaggttatggaacggcaaggtccaaactggaaaagggggggtttccaaaaagg

SEQ ID NO: 20960 - DNA, 824 bp, Homo sapiens
aaaatattaaatggaaaattcctataacaatgcataagttatagattacataccattcagtgtagcatgatgaaatctcttgccaatctgttccatccacctgggatgtgaatcatccctctctctggtgtattcacactgtatgtgctagccgtctctgttacgagatcagctgtcgtggaatcagtgctagtgttcaggtaactcttatttaataattgcctcaaagtgcattgtgctgtgcctaatttataaaataaacggtatcataggtatgtatgtatacgaaaaacatagtatatgcagggttgggtactatccacagtttcaggcatctactggggggtcttggaatatatccccagaggttaaggggtgactactgtatacagccatgccaacatgctggttctcagagagttataagagagattaaaaatacatgcagctgtttgggcactttcttcccaaataaaatacccagtaaaatgtaacatactacctatagcttgataatctatctgagggatgtttatggatgtctgtctatatactttaatttgggccttagcttctttgtaggtatcaagttatcacttggcaaatttattttcaaaaaggcatagtttcttgtacattttagaagattagtttttcttattttgggacacctacaccaatgttttaaatgtggataaattttaatgtggaatttcttttaaaaataatcctcttcatagagcaatacaacaaaaatgtgttgtatcttggagatttacattataaatgtagtaacatttatgagcttaaatttaatgaaacct

SEQ ID NO: 20961 - DNA, 456 bp, Homo sapiens
cctcttttcttatttatcaaatcccaaaccatcctagtcttttatacttggaaactacccctgccttgaactgtccaagcctgtcactgattaacttctctctgctaactaggctcactagtatctctgggattctgatggggacatacaagcaagaaaaatgaccaaaattccccccacccaagttgtccataaaacatgacatttgatcacatactttgaggccgctgcagtgttaaaagatgaagcttagagaatgggaaaagagaaagctatgatagaggagtctaatatcttcaactgtggcaagaaagagaggttgaggaagacttcacggttgtttctgtcttcccagcattcagatgaggatacaaacatgaaatttcaagctctaccaaggtggaaaacgtcttaaatgtcatctactctgacccttaatttaatgtttcatttcct

SEQ ID NO: 20962 - DNA, 214 bp, Homo sapiens
cttacattgtacaggattattcaatatttagtgtgtgacaataaccaatacagctggccacaaatacaacagcctctgagatgcacagaagtcagctggtgggagcagaactgtgcaggtgtgatggtgacaggccgtaagcatgcagcatccactggcatcctctgatttccaggagggataggaagtgtgcattcactgggcagcgcagtca

SEQ ID NO: 20963 - DNA, 288 bp, Homo sapiens
cttaatcctcctagaaaatacctaagtgatcatgaacagaacgttggcagaaatatgggtaataaaggccagtctgataaggtctcagagggaaatgaggaccatgttattggacaatggagaaaaagccatcggggtgggggggaaagggaagggagagcatcaggacaaatacctaatgcatgcagggcttaaaacttagatgacaggttgatagatgcagtaaaccacatgtatacctgtgtaacaaacctgcacgttcagcacatatatcccagaacttaaagt

SEQ ID NO: 20964 - DNA, 638 bp, Homo sapiens
ctcagaaaaaatatctcatagcctcaactactgcataatttacttcaaaagcacattataaaaactgtaaagcaccctgtaacacagtaacttctatgtgaataacactcaaatccacttatgtattgataattgtccaattaaggtccacttccttttctttttttttttttgaaatggagtcttgctctgttgcccaggctggagtgcagtggcacgacctcggctcactgcaacctctgcctcctgggttcaggcaattatcctgcctcagcctcccgagtagttgggattacaggcacacaccaccatgcccgactagtttttgtatttttagtagagacggggtttcaccacgttggccaggctggtctcaaactcctgacctcaagtgatccacatgcctcagcagattatcaagtgctgggattacagatgtgaggcaccacgcacggccaaggtccacttccttatttcctaccgccaacaatcatttccacttgaatgaccaattacaatcacaaatactactcctaccatcaaaatcagtcttcccaacttaccagttttctattaatgacactttccttttcccagtctcaaaaccctgaaatctttgtttactcctcctcctcttc

SEQ ID NO: 20965 - DNA, 677 bp, Homo sapiens
gcctgactccacctcattccaattaaatgaatctctggggttagcccaggcatctggagtccaggtgattgtaatgcgtagcagtcagtgacaatgggatcagaccaacacagtgttgcctaatagatactgttatcctacttgctggccttttccatccaggtcagtcagagttcagccctgtcaccaccagagagggagctggcacaaccaactgttttaactactaagagttatgcagttaggagctgaagtgttgctaaattaggaagtggattcagggctgctaggatatcacatggtggcagttatggcccacttccaggttcagcccagagaaagggggctttctaactttctgaccaccctttgggtgaaaccttattaaaaactatcagtaggccagacacggtggctcacacctataatcccagcactttgggaggccgaggcgggtggatcacctgaggtcaggagttggggaccatcctgaccaacatggtgaaaccctgtctctactgaaaacatgaaaattagccgggcatggtggctggcgcctgtaatcccagctactcgggaggctgaggcaggataatcacttgaacccaggaggcggaggttgcagtgagctgagattgcaccactgcactccagcctgggcaacagaccccatctca

SEQ ID NO: 20966 - DNA, 755 bp, Homo sapiens
agttcaagacaagcctggacaacataggcaaactgtgtctctatcaaaattagaaaaacttagctgggtgtggtggcacatgcctgtagtcctagctattttggcaggctaaggcgtggtaactgcctgagctcaggagtttaaggctgcagtgtgctatgattgtgccactgtactccagcatgggtgatacagtgagatcttgtctcaaaacaaatgaataaataaaagactaccatgaatagcaaccactctttattagggaattcttccatttgacatattaaaatttcccagccaggcttggtagcaatttgggacggcaaagtaggaagactgctttaaacccaggagtttaaaaccagcctgggcttcacagtgagactctatctctaaaaaaaaaaattttttttaattagctgggcatggtggtgcggacctacagtgctagctactctcaaggctgaggcaagagggcaggatgcaatggctcacgcctataatcccagcactctgggagggtgaggatcacctgaagtcaggagttcgagaccagcctggtcaacatggcgaaaccctgtccttactaaaacaaatacaaaaattagccaggcatggtggtgtgcatctgtaatcccagctacttgggagactgacacatgagaatcacttgagcccaggaggcagagggtgcagtgagccaagactgcgccactgcactccagcctgggtgacagagagggactctgtctcac

SEQ ID NO: 20967 - DNA, 368 bp, Homo sapiens
ataggacaccagaacttattcctgggttctacatctgttaagccaaccaaagattggaaatattgggaaaaaaaattgcgtctgtactgaacatgtacagacttttttcttgtccttattccttacacaatatagtacaataactatttgcatgacatttacatcggatattatgagtgatctagagttgatatgaagtatatgggaggatgtgcaaaggtgatgtgcaaatactatgtcattttatatcagggacttgagtatcctttgttatcctcaggagatcctgaaactagtcctccatggatactgagggctgactgtctagtcctatcctcacggaactttcattgtaatgagggaagact

SEQ ID NO: 20968 - DNA, 462 bp, Homo sapiens
taaaagttcaagaaattaatactagatcagtgatctccattggaactatcttagagccacaatcaagactataattatctattaatataaggataagtttttgttatctccattttactgatgatgaaattaatattagagaactttagcacttgcattgtcaggcagtaagcagcagagccaaggtccagagctagcattcattactgtgttctttctgccttccatgtgtagagctgggacacacaggggaatgtttgagaagaccgtggaagcctcagtcggtttcaggaaagcagaatgctatagtcttttacctctgagtgcaaacatgaattctcatctcatcagaattgaccttgtcagattttcaattacctagaataaatggtttgatggattagactctttgctggtgaacagcgtccatgtgacatagttgcctctgtaaacctgtgagtg

SEQ ID NO: 20969 - DNA, 373 bp, Homo sapiens
tttttcatgcaacataaatgtttaattactgagacttccttttctcttccttccttccttcctttcttctttctttcctttctttctttctttctttctttctttctttctttctttctttctttctttctttctttctttctttctttctttctctctctctctctctctctctttctttctttctttctttctttcttttctttctttctttccttatctttcatctataaccttgctctttcacccaagtgggagtgcagtggcacaatcacagctcactgcaggctcaacctcaatctcctgtgctcaagtgattctcctgccttggccttccaaagtgctaggattacaggcatgagctaccacaccc

SEQ ID NO: 20970 - DNA, 404 bp, Homo sapiens
gagagagacttcgagcttgagagagggaggggagaggagaggagggagaaggaaatgacagagagagagagagaaaggagagagagaacgcagagggagggaggcagggagggagaccaaacccccgctttactgcgttgaaagcttctgaatttcaagcagaaagtagaaggagctccaaaggcagtgagcgtctttccttgggctgcgtgtgccgagcgtagacaatgaaaatcttcatccccctcccccattctactaggctacaagattcttgttttcgttccttctcaccggtggaagatgtgtaaaatcaaagatgtagaggtgtgtagtgatttttttaaaagccaactaaccaccgcacggactgcgacgcggattacccgagcgcacgccggctg

SEQ ID NO: 20971 - DNA, 765 bp, Homo sapiens
ggtgcgacccatctcaaaaaaaaaaaagaaataattgtctatctgtcttttagccacttcataatttttagagatagatattatcaacagaaaataaaaccaacagcagctaaaactgcacatggtaaaatgtatgagtgactagaaactaacagaagaataattttcttaatgaaatttagagcaacaaaatttgacctgggaaaaccataccttttaaaaataatggatcacctgggcatggtggttcacacctgtcatcccagcactttgggaaccctaggctgttggatcacctgagctcaggagttcaagaccagcctgggcaacatgttgagaccctgtctccacaaaaaatacaaaaattagccgggtatggtggtgcgtgcctgtggtcccaactgctcggtaggctgaggtgggatgatcgcgtgaacctgggaggcagagaggttgcagtgagctgtgatcatgccactgcactccagcctgggtaacagagtaagaccccatctgaaaaatataaaaaaaaaaaaaaaagaataatggatggccataggcagaaggtatgcttaccatatggggttaaagctggtccactaaaaaatttgatggggaccaaaaactgtcagatgaaggaaatcattattgtaaaattaacatgaaaaagaactgaatccagtgaaaataattttagtaagtaggggatgatttgatcatgctttttagaaagttggtctaccaattaaatggatgtttcaatta

SEQ ID NO: 20972 - DNA, 1050 bp, Homo sapiens
ggtgcgacccatctcaaaaaaaaaaaagaaataattgtctatctgtcttttagccacttcataatttttagagatagatattatcaacagaaaataaaaccaacagcagctaaaactgcacatggtaaaatgtatgagtgactagaaactaacagaagaataattttcttaatgaaatttagagcaacaaaatttgacctgggaaaaccataccttttaaaaataatggatcacctgggcatggtggttcacacctgtcatcccagcactttgggaaccctaggctgttggatcacctgagctcaggagttcaagaccagcctgggcaacatgttgagaccctgtctccacaaaaaatacaaaaattagccgggtatggtggtgcgtgcctgtggtcccaactgctcggtaggctgaggtgggatgatcgcgtgaacctgggaggcagagaggttgcagtgagctgtgatcatgccactgcactccagcctgggtaacagagtaagaccccatctgaaaaatataaaaaaaaaaaaaaaagaataatggatggccataggcagaaggtatgcttaccatatggggttaaagctggtccactaaaaaatttgatggggaccaaaaactgtcagatgaaggaaatcattattgtaaaattaacatgaaaaagaactgaatccagtgaaaataattttagtaagtaggggatgatttgatcatgctttttagaaagttggtctaccaattaaatggatgtttcaattaaatcgagttttcttaaatattttctcaaggaaagtctacagtgttgttagaattttgatcagctgcctgtatccacaaacttagaccttcctcaggatccaaacaacagatccaaaggtttaagacagggaaattgggctcagaggggttatgtaaccaccaggattcacagctggtaagggcaaagtgaggttttgagctcaggtctgtctgactccaaaacccctattctttacagttttggcaaaagtgaagtggggggagcttaaagagggtgggctggcc

SEQ ID NO: 20973 - DNA, 296 bp, Homo sapiens
cgcgaatgtctaaggttggctggccagcagagtttggacggttgaacacactttttggttctgcctctgcatggtggccagtttcacaaagaggctgcaggaagctgcttccagcaggctgagtcctgaggaggagacgataacagtgggagaagcacctggtaacagcggcacttcatccaggaagaaaacaggatctaaaatataaacaacatccttacaacacaaaatatgagcgtccatcatggaccaaccaataacttcaataaaagtgctgtatcccctggcagatgatg

SEQ ID NO: 20974 - DNA, 561 bp, Homo sapiens
cgcgaatgtctaaggttggctggccagcagagtttggacggttgaacacactttttggttctgcctctgcatggtggccagtttcacaaagaggctgcaggaagctgcttccagcaggctgagtcctgaggaggagacgataacagtgggagaagcacctggtaacagcggcacttcatccaggaagaaaacaggatctaaaatataaacaacatccttacaacacaagtaagtgcacagttcactctcgagtgtgttcaactatattcttccaagagtctcatgagaatcttactgaaacaggaagatggtcaaaagatgaatcaaagtgtcaagatttccagtggacaccatcaaaaaggattttgttgttgttgttgttgatcttttatttttaaacacatgagtatgaccaaccatgccatatctacaatgtcgaactttttttttttagctgaataaaaatttaaatacctcagaactgacactattttaagggaaatgatgtaaatgggaacaaaacaaaaagaagaaagagtttcgatgatcctgtctctctaa

SEQ ID NO: 20975 - DNA, 419 bp, Homo sapiens
ccaccgctgcgctgtctgttcattagcagttcctgggccaaatgtgttgttgatgttctgagttgtctccgctgctttaagacccattttgaactcaaataagaagatttctcaaatttactttatgtctaacatcatttccattgtctaagataaacataaacagcaagtaataagtcattagcaaaaaaatataaggtgagaaatgcccattaaaatgatttataacataaccatatttatgtaagaatgtattccaatatcaaatggcaaattccaacaatgcaaaaattggaattcctttttcacttttctaattttaaggcagggactatctatttatcttgtaaatctcaaatgatcaaatgaaaagcattttgcaaagttgacacctagaaagattgcaaattcaaagcaat

SEQ ID NO: 20976 - DNA, 224 bp, Homo sapiens
gttattctatttgcatgtcatatactgttatatgttttttgcttttttatcagatatttactcgtaaatgatttctagcaagtaaatacagtcaatgaacatgcagttataatttattagaaaggaaataaatacagaaacattttttcctttctttcttctagcctcctgttacgtggaatacattctgttttctaacttcttattgtaaatgtttgcaaaca

SEQ ID NO: 20977 - DNA, 431 bp, Homo sapiens
gaatgcacacattcgcaagtaggtgttacagactccagttaattgtctcccgtcgcgcgcattggctcagcctgtggttaaagctgctcaggaggctgaggcgggaggatcgcttgagcccgggatgttgaggctacaatgagctgagatcacatcactctgccccagcccagtgagctgagatcacatcactccactccagcctgggtgacagactgagaccccgtcttaaaaagaaaaaaggccaagcgccactgtgactggcctgtctctacaaaaaatttaaaaaaataaaaaaattttaaaacaatgctgggtgtgatggctcacacctgtggtcccagctacataggagactgaggtgagaggtttgcttgagcccaggaggtcaaagctgtagtgagctgtgtttgtgccactgtactgtagcc

SEQ ID NO: 20978 - DNA, 384 bp, Homo sapiens
ctcgtccccgggaatggaatgtcttggtgtaaaacccgaacgtacattctatttactgagatgggagaaaactgccttatggctggaggtgagacatgctggcgacaatactgctctttactgcactgagatgtttgtgtaaagtcaaacataaatctggcctacaagcacatcgaggcacagcacctttccttaaacttatttatgacacagagtcctttgttcacatgttttcctgctgaccctctccccaccctgccacatccccctcaccaagatagtagagatagtgatcaataaatactgagggaactcagagaccagagccggtgcgggtcctccatatgctgagcgctggtcctctgggcccactgttctttctct

SEQ ID NO: 20979 - DNA, 458 bp, Homo sapiens
ctgagtgttttatatctgctgtctcatttaattctcacaatgagctcttaaagtgggttttatcactctcattttacagataagcaaaataaggaacaaaaagtttagacgatttacccaagctcacatggctagcaatgtgatcaaaccagaatccaaatcctgttatgtcctcgctcttggccatcatttgagactgtcccatgaccctagaggaccccgacatggcagcaggacaacccttcaatcagaaaaccttctccaagccgggaagacagataggttcctcagcccactaatccaggggagacttagaactaattcaggactaacattcaacagattgttacttccccaagtccactgctaattgctgtggtactgtcatcacacaaaataatagtgggagggcctcttcagcaactgccttcaaatacacacacacatacacactatag

SEQ ID NO: 20980 - DNA, 374 bp, Homo sapiens
tcagaatgataagtgattagtaagcacattttttctcctttcaggaaaccactattttccttttctacatgctgttttgtaagtagtacttttatgaaggttgtcttcaaatgttcgcatcttccatttctactgcccttgggttatccatcctgtcattttgtgccaatcacttttttttttaacttttaagttcagggatgaaagtgtagatttgttacataggtaaacttgtgtcatggggttgttgtacagattatttcatcacccaggtgttaagcctagtatgcactagttgtttttcctgatcctctccctgctcccaccctccaccctctgataggccccagtgtgtgttgttcccctctgtgtgt

SEQ ID NO: 20981 - DNA, 366 bp, Homo sapiens
taacaaacacatgctattgatgccaactgatgagatacgtattattatttttcacattttaaagaagcagaaattgaggcatgaagctttatatatttgcccaaagtatgtggtagttgatgaaattagcatttgaatccagccagtctgcctccagagtaaataagcttacctacacaacattcaggtataaatgtcaatcagccaaagtatgttgggtacatagacacaacctgcctatgctaccatatggaaaagaaagatgaatagcaaagtggataagcaatgctctcaaaacttttcgtagatcagacatttgtgttgtccattcaaggatggtttcacaggcctattgcagtgtctttt

SEQ ID NO: 20982 - DNA, 1885 bp, Homo sapiens
ggaaccgcccgctgccagcccggccaggcacccctgcagcatggcctggaacaccaacctccgctggcggctgccgctcacctgcctgctcctgcaggtgattatggtgattctcttcggggtgttcgtgcgctacgacttcgaggccgacgcccactggtggtcagagaggacgcacaagaacttgagcgacatggagaacgaattctactatcgctacccaagcttccaggacgtgcacgtgatggtcttcgtgggcttcggcttcctcatgactttcctgcagcgctacggcttcagcgccgtgggcttcaacttcctgttggcagccttcggcatccagtgggcgctgctcatgcagggctggttccacttcttacaagaccgctacatcgtcgtgggcgtggagaacctcatcaacgctgacttctgcgtggcctctgtctgcgtggcctttggggcagttctgggtaaagtcagccccattcagctgctcatcatgactttcttccaagtgaccctcttcgctgtgaatgagttcattctccttaacctgctaaaggtgaaggatgcaggaggctccatgaccatccacacatttggcgcctactttgggctcacagtgacccggatcctctaccgacgcaacctagagcagagcaaggagagacagaattctgtgtaccagtcggacctctttgccatgattggcaccctcttcctgtggatgtactggcccagcttcaactcagccatatcctaccatggggacagccagcaccgagccgccatcaacacctactgctccttggcagcctgcgtgcttacctcggtggcaatatccagtgccctgcacaagaagggcaagctggacatggtgcacatccagaatgccacgctcgcaggaggggtggccgtgggtaccgctgctgagatgatgctcatgccttacggtgccctcatcatcggcttcgtctgcggcatcatctccaccctgggttttgtatacctgaccgcggcatcgtgggtgctgtgacagcggcctccgccagccttgaagtctatggaaaagaagggcttgtccattcctttgactttcaaggtttcaacggggactggaccgcaagaacacagggaaagttccagatttatggtctcttggtgaccctggccatggccctgatgggtggcatcattgtggggctcattttgagattaccattctggggacaaccttcagatgagaactgctttgaggatgcggtctactgggagatgcctgaagggaacagcactgtctacatccctgaggaccccaccttcaagccctcaggaccctcagtaccctcagtacccatggtgtccccactacccatggcttcctcggtacccttggtaccctaggctcccagggcaggtgaggagcaggctccacagactgtcctggggcccagaggagctggtgctgacctagctagggatgcaagagtgagcaagcagcacccccacctgctggcttggcctcaaggtgcctccacccctgccctccccttcatcccagggggtctgcctgagaatggagaaggagaagctacaaagtgggcatccaagccgggttctggctgcagaagttctgcctctgcctggggtcttggccacattggagaaaaacaggctcaaagtggggctgggacctggtgggtgaacctgagctctcccaggagacaacttagctgccagtcaccacctatgaggctcttctaccccgtgcctgcacctcggccagcatctcctatgctccctgggtcccccagacctctctgtgttgtgtgcgtggcagcctccaggaataaacattcttgttgtcctttgtaaaaaaaaaaaa

SEQ ID NO: 20983 - DNA, 1885 bp, Homo sapiens
ggaaccgcccgctgccagcccggccaggcacccctgcagcatggcctggaacaccaacctccgctggcggctgccgctcacctgcctgctcctgcaggtgattatggtgattctcttcggggtgttcgtgcgctacgacttcgaggccgacgcccactggtggtcagagaggacgcacaagaacttgagcgacatggagaacgaattctactatcgctacccaagcttccaggacgtgcacgtgatggtcttcgtgggcttcggcttcctcatgactttcctgcagcgctacggcttcagcgccgtgggcttcaacttcctgttggcagccttcggcatccagtgggcgctgctcatgcagggctggttccacttcttacaagaccgctacatcgtcgtgggcgtggagaacctcatcaacgctgacttctgcgtggcctctgtctgcgtggcctttggggcagttctgggtaaagtcagccccattcagctgctcatcatgactttcttccaagtgaccctcttcgctgtgaatgagttcattctccttaacctgctaaaggtgaaggatgcaggaggctccatgaccatccacacatttggcgcctactttgggctcacagtgacccggatcctctaccgacgcaacctagagcagagcaaggagagacagaattctgtgtaccagtcggacctctttgccatgattggcaccctcttcctgtggatgtactggcccagcttcaactcagccatatcctaccatggggacagccagcaccgagccgccatcaacacctactgctccttggcagcctgcgtgcttacctcggtggcaatatccagtgccctgcacaagaagggcaagctggacatggtgcacatccagaatgccacgctcgcaggaggggtggccgtgggtaccgctgctgagatgatgctcatgccttacggtgccctcatcatcggcttcgtctgcggcatcatctccaccctgggttttgtatacctgaccccattcctggagtcccggctgcacatccaggacacatgtggcattaacaatctgcatggcattcctggcatcataggcggcatcgtgggtgctgtgacagcggcctccgccagccttgaagtctatggaaaagaagggcttgtccattcctttgactttcaaggtttcaacggggactggaccgcaagaacacagggaaagttccagatttatggtctcttggtgaccctggccatggccctgatgggtggcatcattgtggggctcattttgagattaccattctggggacaaccttcagatgagaactgctttgaggatgcggtctactgggagatgcctgaagggaacagcactgtctacatccctgaggaccccaccttcaagccctcaggaccctcagtaccctcagtacccatggtgtccccactacccatggcttcctcggtacccttggtaccctaggctcccagggcaggtgaggagcaggctccacagactgtcctggggcccagaggagctggtgctgacctagctagggatgcaagagtgagcaagcagcacccccacctgctggcttggcctcaaggtgcctccacccctgccctccccttcatcccagggggtctgcctgagaatggagaaggagaagctacaaagtgggcatccaagccgggttctggctgcagaagttctgcctctgcctggggtcttggccacattggagaaaaacaggctcaaagtggggctgggacctggtgggtgaacctgagctctcccaggagacaacttagctgccagtcaccacctatgaggctcttctaccccgtgcctgcgaacctatgagggatcctctagacagccacacca

SEQ ID NO: 20984 - DNA, 341 bp, Homo sapiens
cgggggcctgagatgggctgcatgggaggtgggcatctggtgtgtgctgctgtactagtcctgtctcgtgtggtttcttttcattcttggagtagctctaaatgttaggtgcccattagtgtagatgatgaaactgaagctcagaaaggttaagccacaagcccaaatccatatatgaccaaagtccagggcctccagtgccactttttgctattgccccagcttctccactggcctgtctccccacagcctcatcaacgctgacttctgcgtggcctctgtctgcgtggcctttggggcagttctgggtaaagtcagccccattcagctgctcatcatga

SEQ ID NO: 20985 - DNA, 168 bp, Homo sapiens
gctgctgagatgatgctcatgccttacggtgccctcatcatcggcttcgtctgcggcatcatctccaccctgggttttgtatacctgaccgtaagtgccccaggcaaggggctgggggctagagaatgctgaggtctttgtgttcctgacagtgagctgagggttcct

SEQ ID NO: 20986 - DNA, 1961 bp, Homo sapiens
ggaaccgcccgctgccagcccggccaggcacccctgcagcatggcctggaacaccaacctccgctggcggctgccgctcacctgcctgctcctgcaggtgattatggtgattctcttcggggtgttcgtgcgctacgacttcgaggccgacgcccactggtggtcagagaggacgcacaagaacttgagcgacatggagaacgaattctactatcgctacccaagcttccaggacgtgcacgtgatggtcttcgtgggcttcggcttcctcatgactttcctgcagcgctacggcttcagcgccgtgggcttcaacttcctgttggcagccttcggcatccagtgggcgctgctcatgcagggctggttccacttcttacaagaccgctacatcgtcgtgggcgtggagaacctcatcaacgctgacttctgcgtggcctctgtctgcgtggcctttggggcagttctgggtaaagtcagccccattcagctgctcatcatgactttcttccaagtgaccctcttcgctgtgaatgagttcattctccttaacctgctaaaggtgaaggatgcaggaggctccatgaccatccacacatttggcgcctactttgggctcacagtgacccggatcctctaccgacgcaacctagagcagagcaaggagagacagaattctgtgtaccagtcggacctctttgccatgattggcaccctcttcctgtggatgtactggcccagcttcaactcagccatatcctaccatggggacagccagcaccgagccgccatcaacacctactgctccttggcagcctgcgtgcttacctcggtggcaatatccagtgccctgcacaagaagggcaagctggacatggtgcacatccagaatgccacgctcgcaggaggggtggccgtgggtaccgctgctgagatgatgctcatgccttacggtgccctcatcatcggcttcgtctgcggcatcatctccaccctgggttttgtatacctgaccccattcctggagtcccggctgcacatccaggacacatgtggcattaacaatctgcatggcattcctggcatcataggcggcatcgtgggtgctgtgacagcggcctccgccagccttgaagtctatggaaaagaagggcttgtccattcctttgactttcaaggtttcaacggggactggaccgcaagaacacagggaaagttccagatttatggtctcttggtgaccctggccatggccctgatgggtggcatcattgtggggctcattttgagattaccattctggggacaaccttcagatgagaactgctttgaggatgcggtctactgggagatgcctgaagggaacagcactgtctacatccctgaggaccccaccttcaagccctcaggaccctcagtaccctcagtacccatggtgtccccactacccatggcttcctcggtacccttggtaccctaggctcccagggcaggtgaggagcaggctccacagactgtcctggggcccagaggagctggtgctgacctagctagggatgcaagagtgagcaagcagcacccccacctgctggcttggcctcaaggtgcctccacccctgccctccccttcatcccagggggtctgcctgagaatggagaaggagaagctacaaagtgggcatccaagccgggttctggctgcagaagttctgcctctgcctggggtcttggccacattggagaaaaacaggctcaaagtggggctgggacctggtgggtgaacctgagctctcccaggagacaacttagctgccagtcaccacctatgaggctcttctaccccgtgcctgcacctcggccagcatctcctatgctccctgggtcccccagacctctctgtgttgtgtgcgtggcagcctccaggaataaacattcttgttgtcctttgtaaaaaaaaaaaa

SEQ ID NO: 20987 - DNA, 1910 bp, Homo sapiens
tcagacctaacccacgtggtatggtgcatggctgccagttctttttgggggaagggcaaacagagtttgcctatagatacttctagaatcccatatgtctgtcccccttccccatgaagctgaaagaagttggtcactcatcctgtatttcccctagaatgccccaaggcagacacagtggtaaccaggagctgctcactccatcccctgggctagggcaagatgtgcatttccacttcctgtgtccattcattccagagaagacactgaccacagccattctggtctctcaaaacccagccctgccctccaggagctcctcacagtgtagtggaagagaaagcagtgccatgtggaggatctccctacagtagagaaaagattctccctcctggcgctgtgggaacagggtgggggcatttagcccagaaatgggggtcagggtagacttcctggagtggtgtggaaggctaagtggggggtaaggaaggcagggagggccttccaggaagagcccctgcatgactaaagctgcagaggtggaaacagctgggtgtggggtcatctctagagctaaaggacaggatgcctgcctgagctgtggggctgtatctaatgcctctcctcccgggcccattgggcctgtctggtctgaccaggcaccctcttcctgtggatgtactggcccagcttcaactcagccatatcctaccatggggacagccagcaccgagccgccatcaacacctactgctccttggcagcctgcgtgcttacctcggtggcaatatccagtgccctgcacaagaagggcaagctggacatggtgcacatccagaatgccacgctcgcaggaggggtggccgtgggtaccgctgctgagatgatgctcatgccttacggtgccctcatcatcggcttcgtctgcggcatcatctccaccctgggttttgtatacctgaccccattcctggagtcccggctgcacatccaggacacatgtggcattaacaatctgcatggcattcctggcatcataggcggcatcgtgggtgctgtgacagcggcctccgccagccttgaagtctatggaaaagaagggcttgtccattcctttgactttcaaggtttcaacggggactggaccgcaagaacacagggaaagttccagatttatggtctcttggtgaccctggccatggccctgatgggtggcatcattgtggggctcattttgagattaccattctggggacaaccttcagatgagaactgctttgaggatgcggtctactgggagatgcctgaagggaacagcactgtctacatccctgaggaccccaccttcaagccctcaggaccctcagtaccctcagtacccatggtgtccccactacccatggcttcctcggtacccttggtaccctaggctcccagggcaggtgaggagcaggctccacagactgtcctggggcccagaggagctggtgctgacctagctagggatgcaagagtgagcaagcagcacccccacctgctggcttggcctcaaggtgcctccacccctgccctccccttcatcccagggggtctgcctgagaatggagaaggagaagctacaaagtgggcatccaagccgggttctggctgcagaagttctgcctctgcctggggtcttggccacattggagaaaaacaggctcaaagtggggctgggacctggtgggtgaacctgagctctcccaggagacaacttagctgccagtcaccacctatgaggctcttctaccccgtgcctgcacctcggccagcatctcctatgctccctgggtcccccagacctctctgtgttgtgtgcgtggcagcctccaggaataaacattcttgttgtcctttgtaaaaaaaaaaaa

SEQ ID NO: 20988 - DNA, 2457 bp, Homo sapiens
tttttccttagttaataactgtagtggatgtgaaaacaaacgagttgaattttaaaacatagcatttattagtgctatacagtcacattcctttcagccagtagtaaagttaaacagatgagtgatacagtacctgaatggtactgcttctgaggcaacactttggattgaaagtgctgcttttggttaaaggaactatgttgtggaaagcatattccagtgtaaatttgcagatgtgtgttttttttttttgtcacttttcataaggtttggagtaagttgcagtggcttttgatcatagtttagcccatttaatggtccttttacctagaatgttcttaagcagttaatgacaatttggaatacacagataacttgtagcttaagatactattttcatttaattctcctgtggagaatattgctttattttttactagtttcaggtcagttattaaaataaacatggaggttttaatgaatgttgtataatattttatagtgaaggaaaattgtggaaagggcaaagactttctctttcccttatgtatttaactgtgccaatctaaatacatactgttttatacaatgagatgcattacaagacttttctgttggagtgctctcgacattttggttttcatacctgaatgatcattgcattttctgtattttctaaaatggctccaattttgtgttttaagcttcagcttaagaggaagtttatgttctaattcttgactgagaatacagtattgagattctctgttttacagataacaactggtttttattactcattaagttcatttgcatcccgtagccctctgtaaatgtttcccctagttgtatgtacgtaaatgcacgcttatccagtgtatattagacatttttgtgctaaaatatattaagtgggatttttgtagcaaagcattctatttttctgttcttacagtgtgtgtgtgtgtgtgtgtgtgtgtgtgtatgcgtttttttaaccttaacttcagtttaaacactggtgtatttatttttttaagcaacttgactcttagaagccttagactgatttttttcaataaatattcaaccaaaaattataaatttattaagatgtggccttacatatggcattccttgtgttcgtaatgtgagatttttgatttagataaatcaagattcaggattaaagtttcattgtaagttgaaatagaaaatgtattaaaatgtctaggcttctgggaggaagttcttatactcttctttcttggcattagaaagaagcaatatgaatttttgtgaatattctaaatattcaggcaacactgttcagattgatttaggtttgtcttaaccaatgttctttttttagaatttcaggtagtggcattcactgagtatgcagctactatggtttttgtatgggacgtataaatacttgattatatacgacagattttaatgtctttaaagacttcctgctgtattaacatattgtaatggagtcttttaaatactaggttgaatttaattgaagtcacacacatcttgaagtggtaactgcatagtaaatactaccaagagtttttttcacgtgggagtatcctaaaactctgccatgggtgtaaatgttttacattaatttcataattggacagaccctgcatttagcgaaaacattttgttttgaaagtgtgttctttttgtcgcactgttactgcgtaacacttctcaacattctgtaagttaaattattttaaaataactatggtgaattcatgtttatttttttactttgaaaattgtagtactcaggtggtatttaatgggaaaggatcctttgggtataaatcataatgtattttaaggaatgcatctataacattgataactttagccttaaaaaaaaggtctattattccttcctctgcatcccatggtatattagcaaagtagtttacagccctgtacagccttacaaagttgttttacaatttttaatggaaagcccttaacaacaacaacaaaaaattgtatcattttaccaatatccacgaattactgatcacagtttgtaaataatttgtttaatatcagaaggccaaagaaagtcttaaaattttagctattgactctatggtgacttcacaataagatttctgtgcaaaaaggtaaggtgataattgatctaatagactttttttttttttttttttgctgtccatgagaattagacttcatattagcttcaattaaaaagctcattccattttattaaaatgtttgtaattgcaattttgtgtttaatgtttactttgtctttcctttctttagcatttaggtgactgttcggcagtttgatatatggccattgtcggccttaaactgcactagtaacaagcatggtatttatcttgtattgaaaataaaacaaacttttgataagaaaaaaaacag

SEQ ID NO: 20989 - DNA, 376 bp, Homo sapiens
gcgacaccctgccctgcttcggctcgccctccatgggctgcacccactgtccaaccagtcccaatgagatgaaccaggtacctcagttggaaatgcagaaatcacctgtcttctgtgtcgatcttgctgggagctgtacaccagagctgttcctatttggccatcttggaagtgactcagttgttcagctttattttccaaggtgggacactccacaaccttggtttgatacttagatttcctaagtaaaaggcatggttacacatgagagcacagaagaatggctattttctttgtataattaaagccttggggttagcgggtacatcaccagcaaggtagtgatttgggttttctgatcagtgggacaagaaaa

SEQ ID NO: 20990 - DNA, 100 bp, Homo sapiens
gaaaacacgttcacagcaacacctagataattactggttgaatactgtgggactgttgccttgccatgttgacacataaaaccaaccatcacaaagggtg

SEQ ID NO: 20991 - DNA, 481 bp, Homo sapiens
atggttacaagtttggagcttttagccccagccctcatcctgcaggaaggggtgagggattacacattgagttaaaaattgattatgcctacttgatgaagcctcaataaagaaccctaaactactgagttcagagtgcttccaggctggtgaatacaactatgtgccaagagggggcacaccccaactttacacatacaaaagctcttgcacacaggatcttgccagaccttgccctatgtacctcttcatctgggctgttcagctgtatcctttaaaatatcctttgtgataaattagcaatagtaagtagaattgcttttctgagctctgtgaaccactttagggaaattatccaacactaggaaggggatggcgggaatctctggatttgtaggccaaggtcaggacaggaaattgtgaataatctagggacccactacttgtgattagcatctgaagtgaggggcagtcttgtggt

SEQ ID NO: 20992 - DNA, 346 bp, Homo sapiens
tctcctgccccctgccttgcagctacgtaagcccattttgtgctcctagagaagtagattagacccattttggagataaggttctctgaaaatcgaatcttttcccaaacacctacaattttgcataaaaaatttacagaggtagccgggcacggtggctccagcttgtaatcccagcactttgggaggccgaggaggggggatcatgaggtcaggagatcgagagaccatactggcaaagacagtgaaaccccaactctactaaaaatacaaaaaaaattagctgggcgtgatggcacgcgcctgtagtcccagctattgggaggctgaggcaggagaatcactc

SEQ ID NO: 20993 - DNA, 350 bp, Homo sapiens
cactctggggactgttgtggggtggggggaggggggagggatagcattaggagatatacctaatgctaaatgacgagttaatgggtgcagcacaccagcacggcacatgtatacatatgtaactaacctgcacattgtgcacatgtaccctaaaacttaaagtataataataaacaatatatatatatatatatatataaaataccctgaaaaataaaaatgaaaaatttgttgaaagtgttttgaatatgtaggttattctgcttgtaaaacgttttatatgtatgtcaatagggtttttttgtttaatactgatataataaagttttatgtatttctgacagaagaaa

SEQ ID NO: 20994 - DNA, 103 bp, Homo sapiens
agcgaggtgggaggagagctaggcgagtgtgtggagaggggagagtgtggaaaggaggggcatggagagaactggccctttccagttgtgctaaaagaagaag

SEQ ID NO: 20995 - DNA, 287 bp, Homo sapiens
ctagccataatttagtatgtgaagggtatgtaccaaaggcttgaataccaagagatgggagtcattgggggccatcttgggtgttggctactacaacctcatagagatgtagtacagattaaaagagttaattattgtgaggctcttagtacactgcctggcatatggcaagtacatagcctgcattagcttttattcagatgttatatttcagggctacccattaaaactttacacaattatttatactgtatatagttacaacagtaataaggaacaacatagtt

SEQ ID NO: 20996 - DNA, 405 bp, Homo sapiens
agcagaattttaactaactggcatttctgtgaccgtttcctttctcctactcctactactcattttataacacagcttataaatgaggcctttcctcagggaaatgaaaggcctcagtgatactttgtatcacattaaaggttgttttctttgttaatattgcaaagagttttacaaatggccatttctcatatccctaactgttcattaaatcattcaaaatttaggctgggcgcagtggctcacgcctatgatcccagcactttgggaggctgaggtgggtggatcacgaggtcaggagatggagaccatcctggctaacacggtgaaacgctgtctctactaaaaatacaaaaaattagccgggcgtggtggcgggcgcccgtagtcccagctacttgggag

SEQ ID NO: 20997 - DNA, 407 bp, Homo sapiens
tccagacatttccaaataaaattgaaggagatcattattagtagacatgccctaccagaaatgctaaagggagtccttcatgctgaaatgaaaggatactgaacagaaacttgaagccataagaaaaaataggccaggtgccgtggctcacacctgtaatcccagcactttgggaggccgaggcgggtggatcacgaggtcaggagtttgagaccagcctggccaacatggtgaaaacccatctctacaaaaaatacaaaacttagctgggcctggtggtgctaatcccagctacttgggaggctgaggcaggagaatcgcttgaacctgggaggcagagcttgcagtgagccgagatcgcaccactgtactccagcctgggtggggcagagcaagactccatcaca

SEQ ID NO: 20998 - DNA, 541 bp, Homo sapiens
aaaacatttgaggcccactgaagggcttcccccacacacaggtgtctctgcagctggcctccggagccttcctgctcaacgaagccttctgtgaggccacgcacatccccatggagaagctcaagtggacgtcccccttcacctgccatcgagtgtccctcaccacccgcccgtctgagtccaagaccccgagtccccagctgtgcaccagctccccgcctaggcacccgtcctgtgacagcttctccctggagcctctggccaagggcaagctgggcctggagccgagggcagtggtggagcacactgggaagctgtgggccacggtggtggggctggcatggctggagcacagttcggcctcctacttcactgagtgggagttggtggctgccaaggccaactcatggctggagcagcaggaagtacccgagggccgcacgcagggcacactcaaggccgctgcccgccagctgtttgtgcttctgcggcactgggatgagaatctcgagttcaatatgctctgctataacccgaatta

SEQ ID NO: 20999 - DNA, 495 bp, Homo sapiens
cagacaccattttcctgagccctcgcagattcaagtcagctgcctgcatggctccaaagatggaggctcttcctattccccaacagggctttctgtcaacccactgaggaaattcctccctcctgtatgtgaagcatatttacaatgtagggctcattgacaaacctgaaccaatacatgatcaaatcctactcattttcccaggtttccttctgccttatcacttgggcccagtcattgggctaggagctcaaacctaaatcctgggcttcatgcttcagtctttcaggttccatatcccatcttacccataataccctgcaatacctagcaagacctgccctctgccaacctctctagccttctttccttctgctccacatcctatactctggcaacactgaactcctttcccctcattgtggttcttctcacactctgcgctgtttagtgtttccatgccttcgttctgctgagatttcatgtaattccacc

SEQ ID NO: 21000 - DNA, 418 bp, Homo sapiens
aatgaaaagtaaatcacatagatacttgagtgtttgttttatattaagactaagttattagcactgatacaatgggagtggttgttcacaatacttagcattcatgaggctgaaattaagcagtattaacaaagagaagcagaagcctgtcatatgtaggaatgaatgtgtcataggagaaagtaagcgtttgtgtgcttttttttcagaatattgcctgttttatgatcagtgccaatttaacaccaatgttttaaataaatgacttttagaactctgtatgagtctttactgaactcattgtctatattctgtatgttttatacaattaaagttttggttattttagttcaaggcttaagtgaatcccttatccttttaaataatgaaaacaagttagtattagctggagggggtt

SEQ ID NO: 21001 - DNA, 352 bp, Homo sapiens
ccttatacttctttcttttctctgttcatttttgttttccttattgtgaattttttaagttgatgtgtttcattttttattttcttataactgacaaaaccacacacacacacacacgttgtacactgtaaatatatataattttgagacggagtctcactttgttgcccaggttggagtgcagtggtgtaatcttggctcgctgcaacccccatctcctgggttcaagcaattctcttttctcagtctccctagtagctgggattataggtgtgccccaccatgcccagctaattttttttcttttctttgtattttcagtagagacggggtttcaccatgttggccagac

SEQ ID NO: 21002 - DNA, 551 bp, Homo sapiens
gggccagtcgggcctcttcacgcagtacaatatccagaagaaggccatgacagtgggcgagtaccgccgcctggccaacagcgagaagtactgtaccccgcggcaccaggactttgacgaccttgaacgcaaatactggaagaacctcacctttgtctccccgatctacggggctgacatcagcggctctttgtatgatgacgacgtggcccagtggaacatcgggagcctccggaccatcctggacatggtggagcgcgagtgcggcaccatcatcgagggcgtgaacacgccctacctgtacttcggcatgtggaagaccaccttcgcctggcacaccgaggacatggacctgtacagcatcaactacctgcctcctggtgaggctactccaggcggcccccgcagcacagagttcgtgcaccccagctcccaggcccagccagacgtgctatttgcataatggttaattgattgtggctcaggctaattggtcaacagagtggattgccaataaaccggcaccacgttccaggagtgagaatgggaaa

SEQ ID NO: 21003 - DNA, 480 bp, Homo sapiens
ggtgccctgggttccaggtggctgagggtgggctgcgtagcacccaggcctcaccctgagctggttttggggtgtttgttcaccaggtactgtaccccgcggcaccaggactttgacgaccttgaacgcaaatactggaagaacctcacctttgtctccccgatctacggggctgacatcagcggctctttgtatgatgacgtaagtatgaggctccggggaagaacagggaccagcttcctggtgggtggtggtgggagggccctgaacgggactctgccttggcagatgaagcttccaggcaggcaaggttaaccccctcgcccaggctctggatgcgggcctcgccctgtggtgacgaaagaggaagccaggctttctctgatttttgcagggcccctcctgcctcaccctgcagcccccaccctgagctcaccctggccccacctctggcctcagcagccggcccacagcgtgtta

SEQ ID NO: 21004 - DNA, 432 bp, Homo sapiens
actcttgaaataacagtttcaaaagtttaaaaacattatatagctatacaaaaatattttatgtgcttattctataaacttctattttaaaaatttttaatttttcttttttactttttaaacttttctgttaaaaatgaagacacaagctgcacacggtggctcatgtttgtaatcccagcacttgaggaggcctaggcagacgcatcacctgaggtcaggagttcaagaccagcctggtcaacatggtgaaacccttcctctaataaaaaataggaaaattagccaggcctagtggcatgtgcctgtggtcccagctgctcgggaggctgaagcaggagaatcacttgaaccaggaggtggaggttgcagtgagccgagatcgtgccacagcactccagcctgggcgacagagccagactctgtctcaaa

SEQ ID NO: 21005 - DNA, 437 bp, Homo sapiens
ccagctttgagcaggaacatgtaccttcaaacagatcaatcccgaaaccaattaaaaagaatccagaatacagttttaaagagtttattcaagcaaaaagctgggagtagccatccggaaaagagactccacataaacgggtcagcgcttcaaagttaaaagttaagatcttgcttatataggaagaaaacaaagaaatgtaatcagattacattttctgtgagttacaaccgtgtaattagttgcagtttgttttcttttccatacagctttttagttcctttccaatttaaaagagtgggccaggcacagtggttcatatctgtaatcccggcactttgggaggctgaggcgggtggatcacctgagctcaggagttcgagaccagcctgaccaacatggtgaaaccccgactctaccaaaaatacaaaaaaaaa

SEQ ID NO: 21006 - DNA, 297 bp, Homo sapiens
ccaatacatggcaaaaccccgtctctactaaaagaatacaaaaaaaatagctgggattacaggcacctgccactgcgcctggctaattttttgtatttttagggagatggaggtttcaccatgttggccatgctggtcttgaactcttggccttaagtgatctgcctgccttccaagtgctgggattacagatgtgagccactgtgcctggcctaaaaaaaatttatttcgattaaaagcattttttagactagtcacatatgcagtagtggaaagaggggaaagagtagaacaagg

SEQ ID NO: 21007 - DNA, 420 bp, Homo sapiens
gtcaggagtttgagaccagcctggccaacatggtgaaaccccgtctctactaaaaatacaaaagttagccaggcgtggtggcacgcagctgtaatcccagctagtctactcgggaggttgaggcaggagaattgctggaacctgggagggagaggctgcagtgagctgagattgcaccactgcactccaacctcggtgacagagcaagactccacctcaaaaaaaaaaaaaaaacaaaacaaaaaacaaaaaccccgcctggacaacaaaatgagaccccatctctataaataattagccagttgtggtggcatacacctgtagtccccagccacttgggaggctgaggcaggaggactgcatgaacccaggagttggaggttgcagtgagccacgactgcactactgcgctccagccgg

SEQ ID NO: 21008 - DNA, 271 bp, Homo sapiens
ctaggagtccagtcctcttagaatcatgttagggaggctagcgctttgatggcatttgtattttatttctgaagtgttccactatcgttctgaagctggaaattaggattattgggaaataccttcaaaactgatggtgccacatgactttcacataagactcgagacaaactttcttaagagtcttcattggctaatttcttgtgggttttttttttttccttccgagatggaatcttgctctctcgcccaggctggaatgcagtggcac

SEQ ID NO: 21009 - DNA, 432 bp, Homo sapiens
tccctcactgcagcactttctgttgtaccctctatactccaggcagtaatctgtccccatctcaccccgacccccaccttagcagcccacgtcacatgacaattatgaggtgtgatgagaagagctagagcaggagactgcagtggtgtcttctccccatgtttggatatatttgtggaagtatcatctgacaatctcattttcttcctgtgggttcttgacatcttgtggtaaacatctctttctgtgaacacctggaaaagctacagaagggcctgagtgattcatacatcttcacctgagcttaccacttaggttcattcatgtctgtgccaaagtcacgcactggtaggtgaataacaaaattactacatcttatagacaaaatgaggtaaagatgaaggatacgagcactgctattccaaaagttct

SEQ ID NO: 21010 - DNA, 942 bp, Homo sapiens
cgcatcgcccggctccgcggcgccagccatggcgtccgtgcgtggccccgccagggatggggcgacgcggtcagagccgcacgcgaccgaaatccgcactctggagccgcagagcgcgcggtcttgctgtttagcggctccctggcaagtgacgtggggaagaaacgcagggcgcaggagagacagctggaaagcgggctagccaggccccgttttcttcagcttctcccttgacttgatccctgaagatggctctgcctctggcgcccttgaaatatgtcgactaggtcatgatcaccgtgcattctgctcagcgtagtctccccgcctgaagtgttattaatgcagtctaaaatgactacggttctgcggtctaccgaactgcccacggaggtaggggtttcagacttttggcatctcaagagacttgagattaccgagaccacgatacccccagagacgtgacgagatgggatcaaggccacgggggaccagaatgctgacccaggcaacctgtccctgcctcgctgccctttgtaatactccttatcatatcatgaggagctattttccgttctccacaaacttggtggtggatggaagaggatatcaagctcaccttgagtgggattgaggtaggaggcggggctcagacaccagaccagattgaggacaaactaaagcaaggtcagggccaaagcagctttccaacagataggaccaccagggtgccacgtcagtttaccgttgccatgtcaataccagggagttaccgcccctttccgtggcagtaacccaataattaccaccccttccctagaaatttctgcataaaccgccccttaatctgtatgcaattaaaagtgtgtgtgtgtgagtgtgtgtgtgtgtgtgtgtgtgtgtatgtgtgtgtgtgtgtgtatatatatatatatatatata

SEQ ID NO: 21011 - DNA, 400 bp, Homo sapiens
tgtagagacaaggtctcactatgttgctcaggctggtcttgagctcctatgctcaagtgatcctcctggctcagcctcccaaagtggtgggattacaggtgtgagccaccacacttggccaaaatcctctcttgatcacacacaaccctctccagctaccaccttgtttgtctgcttctctttggcgcaaaactccttaaaagttatctgtacttgctgtttccaattcttttccttccatttctctgaaatccctttaaatcaggcttttatctgcctgactcccagaaactgctcttgtcagggtcccccatgacttccacattttaaactaaatgatcaattctcagttctcatcttatgtgcaccttattggcacaggcgtcacctcctccttctt

SEQ ID NO: 21012 - DNA, 793 bp, Homo sapiens
agcctcaggaggagcagctctgcccacatctagatgctggatccccagctgagagagtaccttcctgtcatttaagcacccccagcttgtggtgctttgttatggctgccccaggaagtaaataggagaattgtgtctgagggccagccccagcccctcgtttctgttctgggggaacacataatgatgcaagaacacgcactgcctcatagcagaggcagcctggccattgtctcggccacgacacttgttgtcatgccaggagtctgtgacacattcctgcgcctctgaccctggcacctggatgggggtttctgggctgctgggactgccaggatccccgtagggcagaggtcggtcaccctatgggtgtctgggcacaggtgagagggagaaaacaaatggtaaaatgcaggtctgagacagtcttctgagtaagatttctttggatggagaagttttatgggggagagacagggttgcaaacaactgattcaagccacgtcctttctttcccaggtgaggtcacctgtagaggtcatgctgcggagtcccgagtccctgattatattcaagacgtggagctctctttttcccgtcctgctttctttccagaagtgcctcagatgcatcctccccttctcttttctccacatgaagacgtcactgaccatcttctctggtttgctttccaacaccgagcaccaagtgcttcaaaggtcatggtgccctggggccgagagctacttatgtgggcatttataaccaaataaatattgaaatggcccacaaa

SEQ ID NO: 21013 - DNA, 618 bp, Homo sapiens
aagtagtcgagctgaaacccctgaaaacaatcgtaggacgatgacaaggttttggcagctgcaatcttaaagaccaggaagtgagggtaacagaagcaaatcatcagtgcctgtctttgaacttgatgaaactgtctcagcctcatgacctgtggtactagacagagaccacaacaccttgtctatccagagtgtgggagcactgtgtgcagttagctcctggaggcttgtcctcagtaggcttagggcatgaggagccctggaaagcccaggaccccatggagggccctggagaaacagcacctgtggctgaggggttcacaggcccagcgagatccactcaggtgaggtcacctgtagaggtcatgctgcggagtcccgagtccctgattatattcaagacgtggagctctctttttcccgtcctgctttctttccagaagtgcctcagatgcatcctccccttctcttttctccacatgaagacgtcactgaccatcttctctggtttgctttccaacaccgagcaccaagtgcttcaaaggtcatggtgccctggggccgagagctacttatgtgggcatttataaccaaataaatattgaaatggcccacaaa

SEQ ID NO: 21014 - DNA, 449 bp, Homo sapiens
tgttttcaaggaacaacagagagatggtatttccagacaagggaataaattcccggaagcaactggccaaggaatgaaaatcctggagaacagagtggaagaaacgcgtattccacatttcctgttgattttctttcctccctaaacactgacctcccgcagtcttcactagcaggtgaggtcacctgtagaggtcatgctgcggagtcccgagtccctgattatattcaagacgtggagctctctttttcccgtcctgctttctttccagaagtgcctcagatgcatcctccccttctcttttctccacatgaagacgtcactgaccatcttctctggtttgctttccaacaccgagcaccaagtgcttcaaaggtcatggtgccctggggccgagagctacttatgtgggcatttataaccaaataaatattgaaatggcccacaaa

SEQ ID NO: 21015 - DNA, 333 bp, Homo sapiens
aaaagataggcctcagctttgagcacggtcaagcaagcccttgtattcttatgtaatcacaccagaaagggctgagtctgtgtatttccccagtgggaagggtgaggtaggctttgagtttccctaggaagttgttgcgcatgttgttttggggccctggggagaagcttgaataggctttgtgatccagagagtcatcaggggagtagatggaaggaacttgtctccttgggtacgttaattgaaggaaggataagctgtaactgagatggacgcttttattttaatccccccaaatgggcactaataaccataaataaaaacaggaaaccc

SEQ ID NO: 21016 - DNA, 398 bp, Homo sapiens
tgaccaaagcaccagaggaacaaatgtatttagagtggttctgtgtgcacatggtggggggtgtatggcaagtggggagttgtcaactggcagtctttagcagtggctatatggaggcttctcatgatttccacttcagtcagaacaaaagccatagtagttccagtggactgaccttacagcactacaggatctccctgacctgacctcctaccaccttctccctcacttactcccctgcagccacaccagcctcccggctgttcctcacacatgctagcaacagtgctaccacagggcctttgcacttcatttcccctgtctagaccgctttccccagatagctgcatgaccatcccttacttccttaataccgttgcttaatgtcaccttctctc

SEQ ID NO: 21017 - DNA, 764 bp, Homo sapiens
ccaagaggcagctagctggtcaggctctcggagcaagggcagcaggtcagcccttgggctctcagccccagccacccttagaatcaccggaaagcatgtgaaatgcagatgctcaggtcccaccccagaccaagtccatcagaatcttgggagacagtgatttagcagccagatctgctctgagctacatgaggcacttgtttgttggcatcaggctgagctaggagacactcccattgctgtggggtacacccctccccaagcatctgaccttagagatctttctctaacgttatccagattccccaaataatcctcaaatgtgctacttcgaatgcatacacctagtgacgctggaggggacgagggtttccggaggccaggatagcgttcacttaatgccctgatttttttgtcccgtatctaatgggataaaatgaaaggaaagaaagtaataaagatataaaatcaaaaaattatctgggactcatggacacaagtctctccataaaaagggccagaagagaagtggaaaatagaccatactgggcacattattgtaaaacttcacaacaccagggttgagaaaatcctcaaaccatggtgcgtagagtgcggagaaaaggaatcagaatgatgttgacattctcaacagcaagtccaaaaactagaaggtcatgaagcgatgtctcagcatcctgaaggaaaactattttagtaccaatgcagtccagggggagggcagagtgagacattttccaatt

SEQ ID NO: 21018 - DNA, 763 bp, Homo sapiens
  misc_feature (508)..(508): n is a, c, g, or t
acgttggccctcttccgtggcgcctcggaggcgttcagctgcttcaagatgaagctgaacatctccttcccagccactggctgccagaaactcattgaagtggacgatgaacgcaaacttcgtactttctatgagaagcgtatggccacagaagttgctgctgacgctctgggtgaagaatggaagggttatgtggtccgaatcagtggtgggaacaataaacaaggtttccccttgaaacagggtgtcttgacccatggccgtgtccacttgctactgagtaaggggcattcctattacagaccaaggagaactggagaaaggaaacggacgaaatctcagtccgggggttgcgctttggtggcgtatcgcaatattctagacgctgtctctcaatctgtggtctactgtgttcaaccaaacacaggcagagaagggcatattcctgggaacgtgacgtggatactacagtggcctacgccgctctgggggccccaaaatgacgctnaagcagaatccgtaaacttttcagtctctctaaagaaaatgatgtctgccagtatgttgtaaaaaagcccttaaacaaagaaggtaagaaacctaggaccaaagcacccaagattcagcgccttgtcactccacatgtcctgcagcacaaacagcggcgtattgctctgaagcagccgcatattaagaaaaataaagaagaggctgcagaatatgctaaacttttggccaagagaatgaaggaggctaagaagca

SEQ ID NO: 21019 - DNA, 717 bp, Homo sapiens
acgttggccctcttccgtggcgcctcggaggcgttcagctgcttcaagatgaagctgaacatctccttcccagccactggctgccagaaactcattgaagtggacgatgaacgcaaacttcgtactttctatgagaagcgtatggccacagaagttgctgctgacgctctgggtgaagaatggaagggttatgtggtccgaatcagtggtgggaacaataaacaaggtttccccttgaaacagggtgtcttgacccatggccgtgtccacttgctactgagtaaggggcattcctattacagaccaaggagaactggagaaagaaagagaagatcagttcatggttgcatcgtggatgccaatctgagtgttctcaacttggttattgtaaaaaaaaggagagaagggtattcctggactgactgagactatgatgcctcgtcacctggggcccagtacagctagcagaatccgtaaacttttcagtctctctaaagaaaatgatgtctgccagtatgttgtaaaaaagcccttaaacaaagaaggtaagaaacctaggaccaaagcacccaagattcagcgccttgtcactccacatgtcctgcagcacaaacagcggcgtattgctctgaagcagccgcatattaagaaaaataaagaagaggctgcagaatatgctaaacttttggccaagagaatgaaggaggctaagaagca

SEQ ID NO: 21020 - DNA, 467 bp, Homo sapiens
gcaccatccaatccattgagggtttgagtagaacaacgaggccaaggaagaagtagttactttctctgccagcctgggacattggtcttctccagcccttggactagagctgataccattggtattcctgattatcaggactttgcactccaaccagaacgacgccaccagctttctggggtctccagcttgcagatggtgggacttctccacctccataattgtgtgagtcaatttcttataatctctctctgtgtgtccatatatagatatgggtattgatataaatatggaatatagataggtatatttcctatgggttctgtttctctggagaaccccaactcatacagaaggagatgacctttgtgattccagtgtagggaaagatttcttaacaagacacaagatgtacagacaatgaaaagtttcataaagtcctttctattgaaatttaaaacctgtga

SEQ ID NO: 21021 - DNA, 606 bp, Homo sapiens
agtgtgaaaggatgaatgaaaagtccggagccggagcgcgccggggccagagccgcggcagaggcagaggagggagctaggaggtgagacccgctccaccctgctcgcctaggctcggcggaggctaagagcagggcagcctcctctgcccggcgcccgctgagccccggcatctggaactcagggccctggcgctccaggggcgggaactggccgggaggaccgcgcgggagagcacggatgggcaccctgggctcgataccaaaaagaagaatgtacttcatctggttgggctggattccctctgataagccttcccagttgactgaaagatgaggctaggctctagcaagttgaagtcaaaccagctccttcaagaagctttgagcagaatgaagtggggaggacccagcttccagcccaggaagcccactgtacctggagccatctgggataagactttgacccatgactcccatatccacagcctgtccatcctagcccatcccagtttatcctgtatcatttgagctgggattcccacatcctctgagttggaagtcccatctcaagtcttcaataaagactcttgaatattgaatcaca

SEQ ID NO: 21022 - DNA, 641 bp, Homo sapiens
gggctgaggcttcagaaagaaagaggcaggggtaggaggcaaggctgtgggaacggaagcggagggtgagggaggccgccatcttaggtaactggcgcctgtaagatggctgcctgaccaggtgtgcactgaaagcctaccctggttggtggacatggaacagactgaggccataagaaggacttcctggctgaccagaaatactgttgaatcttcctgttaatggaattaggaagagaggatggagagagaaggaaggagggagagaccatgaatggcggcccccagaagagataccaaaaagaagaatgtacttcatctggttgggctggattccctctgataagccttcccagttgactgaaagatgaggctaggctctagcaagttgaagtcaaaccagctccttcaagaagctttgagcagaatgaagtggggaggacccagcttccagcccaggaagcccactgtacctggagccatctgggataagactttgacccatgactcccatatccacagcctgtccatcctagcccatcccagtttatcctgtatcatttgagctgggattcccacatcctctgagttggaagtcccatctcaagtcttcaataaagactcttgaatattgaatcaca

SEQ ID NO: 21023 - DNA, 646 bp, Homo sapiens
ctgcgcagaggggcccggggaaagccggcctcacgggcgggagggagaggcttgagcgaggggctagagccgcgaggactgaccagcaccagaggatacaagaggaggagagagacctcactggttcgggcgacatttcacccccccagcaccccagtcggcacagccttcatctcctcgtcctccaggcagcacaagccattgtggaatctccaccaggtgtacagaacggtgcctctgcgtcctgccactcaggacctctcaagtccccgatgtgatggctcctcagcatgatcaggaaccaaaaagaagaatgtacttcatctggttgggctggattccctctgataagccttcccagttgactgaaagatgaggctaggctctagcaagttgaagtcaaaccagctccttcaagaagctttgagcagaatgaagtggggaggacccagcttccagcccaggaagcccactgtacctggagccatctgggataagactttgacccatgactcccatatccacagcctgtccatcctagcccatcccagtttatcctgtatcatttgagctgggattcccacatcctctgagttggaagtcccatctcaagtcttcaataaagactcttgaatattgaatcaca

SEQ ID NO: 21024 - DNA, 770 bp, Homo sapiens
ggctgttattttggtggtggtggtggtggtagtgtctccagagaggggcagcaccccctttttgctgcctttccagggagagcagcaagagaaagaaagagagaggcaagcgaaattcctgaatggatagacagatgctacgtcatcggagctgcatcctccactccacaagaggctaggagctggggggagagaggcagtccagccgcaggggccacccgaacagtctctcctcctcacagaagcctggagctgggcatccaagaagaagcagcctcatttgttttctggtgtcatcgtaggtggccacctatggcttttgggcttctcacctggggcgggtgggttctgcaccaccctcccaccctccttcctccgtgtggacgatagagccacatccagcaccacggacagctcccgggcgaccaaaaagaagaatgtacttcatctggttgggctggattccctctgataagccttcccagttgactgaaagatgaggctaggctctagcaagttgaagtcaaaccagctccttcaagaagctttgagcagaatgaagtggggaggacccagcttccagcccaggaagcccactgtacctggagccatctgggataagactttgacccatgactcccatatccacagcctgtccatcctagcccatcccagtttatcctgtatcatttgagctgggattcccacatcctctgagttggaagtcccatctcaagtcttcaataaagactcttgaatattgaatcaca

SEQ ID NO: 21025 - DNA, 553 bp, Homo sapiens
ggactttcggaattcggctttagagaagcctggagctgggcatccaagaagaagcagcctcatttgttttctggtgtcatcgtaggtggccacctatggcttttgggcttctcacctggggcgggtgggttctgcaccaccctcccaccctccttcctccgtgtggacgatagagccacatccagcaccacggacagctcccgggcgaccaaaaagaagaatgtacttcatctggttgggctggattccctctgataagccttcccagttgactgaaagatgaggctaggctctagcaagttgaagtcaaaccagctccttcaagaagctttgagcagaatgaagtggggaggacccagcttccagcccaggaagcccactgtacctggagccatctgggataagactttgacccatgactcccatatccacagcctgtccatcctagcccatcccagtttatcctgtatcatttgagctgggattcccacatcctctgagttggaagtcccatctcaagtcttcaataaagactcttgaatattgaatcaca

SEQ ID NO: 21026 - DNA, 1225 bp, Homo sapiens
  misc_feature (826)..(826): n is a, c, g, or t
  misc_feature (834)..(834): n is a, c, g, or t
  misc_feature (838)..(838): n is a, c, g, or t
ggctgttattttggtggtggtggtggtggtagtgtctccagagaggggcagcaccccctttttgctgcctttccagggagagcagcaagagaaagaaagagagaggcaagcgaaattcctgaatggatagacagatgctacgtcatcggagctgcatcctccactccacaagaggctaggagctggggggagagaggcagtccagccgcaggggccacccgaacagtctctcctcctcacagaagcctggagctgggcatccaagaagaagcagcctcatttgttttctggtgtcatcgtaggtggccacctatggcttttgggcttctcacctggggcgggtgggttctgcaccaccctcccaccctccttcctccgtgtggacgatagagccacatccagcaccacggacagctcccgggcgaccaaaaagaagaatgtacttcatctggttgggctggattccctctgataagccttcccagttgactgaaagatgaggctaggctctagcaagttgaagtcaaaccagctccttcaagaagctttgagcagaatgaagtggggaggacccagcttccagcccaggaagcccactgtacctggagccatctgggataagactttgacccatgactcccatatccacagcctgtccatcctagcccatcccagtttatcctgtatcatttgagctgggattcccacatcctctgagttggaagtcccatctcaagtcttcaataaagactcttgaatattgaatcacaaaaaacaacaaaaacaaaaaaaaaaaaaaaaaagaaaaaaaaaaaaaaaaaaaaanaaaaaaanaaanaaaaaaaaaaaaaaaaaaaagagagggggggcggggcgcaaaaaaaaaaccccccggggggggccccaaaggcacgcccccccatttttgaaaaagggggccccccaatggggggggcttaataaaaacaccgaggcagcgggggggggcggatctttaataacaaacaggtgtgtgagcgggagaaaaacttgtgtcgtgggggagacattgggtggagaaagaccacccaaccttggggggggggagacaataattggggaacaaactccacctatagaggtattagacccgcctcgggaaaataatacattgcaggtatgttagggtggacaaccgctattatttgcggggaaaaaatttgctagggtatatagtgaaacttcc

SEQ ID NO: 21027 - DNA, 864 bp, Homo sapiens
ctgcgcagaggggcccggggaaagccggcctcacgggcgggagggagaggcttgagcgaggggctagagccgcgaggactgaccagcaccagaggatacaagaggaggagagagacctcactggttcgggcgacatttcacccccccagcaccccagtcggcacagcttctcacctggggcgggtgggttctgcaccaccctcccaccctccttcctccgtgtggacgatagagccacatccagcaccacggacagctcccgggcgccttcatctcctcgtcctccaggcagcacaagccattgtggaatctccaccaggtgtacagaacggtgcctctgcgtcctgccactcaggacctctcaagtccccgatgtgatggctcctcagcatgatcaggagaaattccatgatcttgcttattcctgtcttgggaagtccttctccatgtctaaccaagatctatatggctatagcaccagctctttggctcttggcttggcatggctaagttgggagaccaaaaagaagaatgtacttcatctggttgggctggattccctctgataagccttcccagttgactgaaagatgaggctaggctctagcaagttgaagtcaaaccagctccttcaagaagctttgagcagaatgaagtggggaggacccagcttccagcccaggaagcccactgtacctggagccatctgggataagactttgacccatgactcccatatccacagcctgtccatcctagcccatcccagtttatcctgtatcatttgagctgggattcccacatcctctgagttggaagtcccatctcaagtcttcaataaagactcttgaatattgaatcaca

SEQ ID NO: 21028 - DNA, 1572 bp, Homo sapiens
ggacccggtctatagactctgaccttagccctcagaatccctcattcagagcttagggatcgccaggccagaaggtggctgggaaggcaccagggagaagacagcctcccgcccccagttgagggaggtggtgaagagaggggagactgaaagcagtgggggagggtgagagaggggagccagcagagactcaagtggcctccagacttccaagtgctggccttcatctccccgcaagatgcgccccctccaactctcagccttcatcttcctactgtcactgtctccttcacaaggagagcagcaagagaaagaaagagagaggcaagcgaaattcctgaatggatagacagatgctacgtcatcggagctgcatcctccactccacaagaggctaggagctggggggagagaggcagtccagccgcaggggccacccgaacagtctctcctcctcacagaagcctggagctgggcatccaagaagaagcagcctcatttgttttctggtgtcatcgtaggtggccacctatggcttttgggctttcggcccctgattttggtctactccaattgtagaaagacctacatagtcaatgataggccaccctgcttccagttctgtgatagagaggaaaggcattggggatacagggaactctttccccttctccaatgggctcctgagggcaaagttggaggccaattgaccttgggggagatgattggttggagaagggaacagagatacttgtacctgggtgacagaggtgagaaagaagaggagcatggggtatggtaaatggggacccaaggagcttaaataactgtgagtgggtatgtatgccagggtatacaactgcaagcactgggaggtggtactgctgggagtatcagtggatttgtcattgcattggtctgagttgataagtttgagtatgtgtgcatgtgtgtgtgtgtgcgcacgcgtgtatgtgtgtgcgtgtgtgtatgtgtatgtgtgtgcatgtgtgtgtgtgcgtgtgtgtgtgtgtgatgcgcagcacccttgcatactcatgcttatgccccttaaggaggccatttgctgatggttgagggtcttgtagaaaggactcagtctggacgaaccagccaaccctctaccatctctgccaccttgttcttacctcccagacacataaggttctcaggcaagtgagcaatgtgtgggctcaagaatagaactgggagcaggcaaggaaggcagtacttacacaagcccaaggaattctcaagctggcccctcaataggaggaacataccactctctcgtggggaagaagtgtgacatccttagggacgatatcctccagattatttctccatacctcctaccttttctgcccacatgaatagatattttgtatatatatatttttttcacacagcctcagtattttttattgctaattcttgcttttatttgtgactatcccatagacaatgcagatttctatagcaaaaaatgtatgatattgttcataatgatgcacttataagacaaataaatatctgaatccaccctttccc

SEQ ID NO: 21029 - DNA, 790 bp, Homo sapiens
agtgtgaaaggatgaatgaaaagtccggagccggagcgcgccggggccagagccgcggcagaggcagaggagggagctaggaggtgagacccgctccaccctgctcgcctaggctcggcggaggctaagagcagggcagcctcctctgcccggcgcccgctgagccccggcatctggaactcagggccctggcgctccaggggcgggaactggccgggaggaccgcgcgggagagcacggatgggcaccctgggctcgatcttctcacctggggcgggtgggttctgcaccaccctcccaccctccttcctccgtgtggacgatagagccacatccagcaccacggacagctcccgggcgcactggaagctgagggtttgacagcggcaggccacataggcaaggaagctggtgcatgcagtgtctctgggcaaggttatgcaaaccaaaaagaagaatgtacttcatctggttgggctggattccctctgataagccttcccagttgactgaaagatgaggctaggctctagcaagttgaagtcaaaccagctccttcaagaagctttgagcagaatgaagtggggaggacccagcttccagcccaggaagcccactgtacctggagccatctgggataagactttgacccatgactcccatatccacagcctgtccatcctagcccatcccagtttatcctgtatcatttgagctgggattcccacatcctctgagttggaagtcccatctcaagtcttcaataaagactcttgaatattgaatcaca

SEQ ID NO: 21030 - DNA, 652 bp, Homo sapiens
ggataatgggtgtactatgctatgtggctactgaggaacagcctcggctcatgcccctaaagtttgaatacacacaaattaacacccccgtacgccgaggaacaagctgtgtgctcgtaggccatgatcaatcatgcccgttgcatgaatctctactctattgtgattgcatcaagccacggtggtcctgacatgaaggctgctaatcctctctattacagccactggaagctgagggtttgacagcggcaggccacataggcaaggaagctggtgcatgcagtgtctctgggcaaggttatgcaaaccaaaaagaagaatgtacttcatctggttgggctggattccctctgataagccttcccagttgactgaaagatgaggctaggctctagcaagttgaagtcaaaccagctccttcaagaagctttgagcagaatgaagtggggaggacccagcttccagcccaggaagcccactgtacctggagccatctgggataagactttgacccatgactcccatatccacagcctgtccatcctagcccatcccagtttatcctgtatcatttgagctgggattcccacatcctctgagttggaagtcccatctcaagtcttcaataaagactcttgaatattgaatcaca

SEQ ID NO: 21031 - DNA, 393 bp, Homo sapiens
  misc_feature (47)..(47): n is a, c, g, or t
atcgaaccgaagagtgaaagtacatccccccgtttcaggacaacagnaccaaaaagaagaatgtacttcatctggttgggctggattccctctgataagccttcccagttgactgaaagatgaggctaggctctagcaagttgaagtcaaaccagctccttcaagaagctttgagcagaatgaagtggggaggacccagcttccagcccaggaagcccactgtacctggagccatctgggataagactttgacccatgactcccatatccacagcctgtccatcctagcccatcccagtttatcctgtatcatttgagctgggattcccacatcctctgagttggaagtcccatctcaagtcttcaataaagactcttgaatattgaatcaca

SEQ ID NO: 21032 - DNA, 1222 bp, Homo sapiens
taagaattttcagttctattctttagatactgctacatctactatttttactggaaaccaaattgtaagctggtttctttattcatttctctcctcagcccctcattttaataccctcctattgaattctaggtccagaaagccaaaggcaattttctctcaaatatttgacccaagtgttgcattatcagccacaccctcactcttggacaaattctcctcccacccaattccaggcatggaaagggttttgttgataagttcttacagtcacaggaatcatcctagtcagcaagccgtgggagagacagaaatagaaacagcaaatttgaccaaaccaaggtccatgtttgggtgttttcatttatcaagcacacaaatctctgagcctcaattcagatatttgtataatcaggataagaaacccttaggattattgtgtgcagaaaatgaagaattctatataaaagatcgtatactatgttatgacactcatggttaaacggtaattcttagattgcagaaaggttaaaggctacagtttggaaagactgatagcatatgatttgtttcagaatgtaaaaagggcagctctctggcatgttcctgactgaggatctcataacatttaacttgaggaacttcctccttttccagctttgggagtcaaggtgagactcctggggacctaggtaggaagtatctgaagacttgggagaggaggcacagtccttgggaagcctgataaagggaagaggttggagtccgcgtggcagaatggccgttgttttctttctccttaatggatattaagacttattggtaacagcacttaggatgggtaaactgacttacatagataaatacagaatgtgtaaatgataatttcaagtttatgccattaagctcctggattctaagtaactaaaaacacagtttattaaattaaaggacaagttaggtagtggctataattaacaaatcctatagagacctgcctatcagcatgtagacttgtcttcataattgagtgactttaagaagggatgtcttctctcccttcgcctcacaaaccaacatccccccagtccccagtgcgattcctaaggttggtaacccaccagagtcacacaggcccctatgtctgaaagtctttcttgaagtctgcatgttcaaggtttgaaagttggaatctggttatttattttttcaccttccttca

SEQ ID NO: 21033 - DNA, 1088 bp, Homo sapiens
gggctgaggcttcagaaagaaagaggcaggggtaggaggcaaggctgtgggaacggaagcggagggtgagggaggccgccatcttaggtaactggcgcctgtaagatggctgcctgaccaggtgtgcactgaaagcctaccctggttggtggacatggaacagactgaggccataagaaggacttcctggctgaccagaaatactgttgaatcttcctgttaatggaattaggaagagaggatggagagagaaggaaggagggagagaccatgaatggcggcccccagaagagatgtaaggttgagcacaggagcaggggtggtagagaggcctcagcactgggcttagttcccagactacttagaggactgtgggtaataagaaaagtactggaggaatcagaatgggggaatatcagcatgaggagagagagagtaagatgtggccaggcagtatcatctgctagtttgagggtctctctggggcctgtgaaaggtgactgtgtacttgaggtgatgctccaccttctctcctcagcccagcactctggtgaaactgcatcctctcagaggccactcacagccccctcaacaaagaccactggcccttcccaagcccagtcctccttgacctgtatggaaaatgttatgccattttctcagtcttttcctttggccttctgttcttctgttacatccatgatcatctgttcttggttccattcattcagtcctccggatggaccagttccttaactagaagtggtccccaggttctgctggtagcttgttttctcttccttctcactcttctcactccacttttatcactttaaccatcacctgaagttataaattctcctgtgtttcatttttcttttcttttctcttctctttctttctctctctctctctttcttctttcttttttttttttttttttttttgagagtcttgctctctcacccaggctggagtgcagtggcgcaatctcagctcactgcaacctctgccgcccgggttcaagcaattcttctgcctcagcctcctgagtagctgggactacaggcacccgccaccacgcccag

SEQ ID NO: 21034 - DNA, 1031 bp, Homo sapiens
ggcctcaggctttaaccaggtctgggcaggaaggagagagaagctgaaaccaggccggggtctcacagtgaggccgttcatggtctggtccagctgtccccaggatgggctcctctccatcatccaaccagagacccagggccccagcaccaaggccctgacctgcccctgccttctccccatgtcttcccagctataactcctgatcctgccaggcctctccagccttccatcccctgctcatacatgctgtctcctgacactcttggaactgaccctgctcttgggactgaccctgcttgagcttctctcatcttcccagcatggggtctccttccatctcctgcacagtgctcctgctccagggagggctgtgttgagagggtagagacacaagattgaccagaactaaaaaggagtcccaaggccaccccagtctccacacccactcttgccttccccaggagaggctcctctcctggcctggcctcagtgtcacttactgctaatcatcgatgtgtagagacctttctcccatctccccaccaccaagcccttgttgagcacactgcacactggctttttatttttattttttggagacggagtcttgctctgtcacccaggctggagtgcagtggcgcgatctcagctcactgcaacctctgcctcccaggttcaagagattctcctgcctcagcctccagagtagctgggattacaggtgcctgccaccatgcccggctaatttttgtgattttagtagagacagggttttgccatgttggccaggctggtctcgaactcctgacctcaagtgatctgcccaccttggcctcccaaagtgctgggattacaggtgtgagccactgtgcgtggactgcgctggcccttctagtgaatgtttgggttcagggtacacgaagcagcagaatgctggcggacaccacctcagcttgcaggctgctctgggtttgatagtcagtggggctttgtccacaggaaggacaggaaaagaaggagcttttggt

SEQ ID NO: 21035 - DNA, 770 bp, Homo sapiens
ctgcgcagaggggcccggggaaagccggcctcacgggcgggagggagaggcttgagcgaggggctagagccgcgaggactgaccagcaccagaggatacaagaggaggagagagacctcactggttcgggcgacatttcacccccccagcaccccagtcggcacaggtaggagtcacagtcccatttcacttcagccaggtgccatatttttcccccagcagagttgagggggagcaaggaagcctcattgtggtgccctctggtggtccccgctcaggatggggccttttctggcagtctgggtcactgcttgggaagctgatctaagggagaaatcagttgaaatctagctgcagggttattccgcctcccggcccaggcctctccctccagcgggagctggtgaacactttcccacaggctgtccacagctatggctgggtgggggagtttggaggaagtcacctgagaacactggtctttgcttaagtcggctccttaaagccatgtagggctatccagcttggttggaagatgagggtgtctacgtgaaaataggaaatagaattgaaggtgccaagggtgggagggttgctcaaaaatgtaaacagggtggcagaagaaccttttgcccagtctgggttctggggcagtggagtgcagggcaatctcggttccatttccattcacattcctccttccgacccaggacctgaggccaatctctttaaaagatccttatgctgctttgtcattactgaccagaggg

SEQ ID NO: 21036 - DNA, 779 bp, Homo sapiens
atgttggccagtatggtcttgatctcttgatctcttgatctgcccgcctcggcctcccaaaatgctgggtttacaggcatgagccaccctggccggcctaacccaacccagtgctttttctactgaacttgcctgtgggaacaactggagagacagtgaaacagggagggtaagatggggttgagctgagaaaggaaggcatggggcacgggagggggagggtgcaccaagagaaaagccctgcctgtgagcaggggctgggagctgggatgagagaagaagcaccaagaaagataggattcctttaaaaacaaaaaaacaacaataacgaaagcctttcatgtagcttgttggaaatgtgtatttgggatccactgaggctcattcacatgagacttagaacctgtatcagtaaccacaatgggtttacattattattgttgtctcctattagtgcatttgacctacctcaggatatccaaaggagaacagagggaagtgaggggttgagaactgacaccctacaacgccagcacctcagtggaaaggaggaatagagcccaggagggatgtgggggtgagggtttgtgtctgccttatgtgagcatatggtgtgtgcatgtgggtgtgtgggtggggttgtcaggagagtgatgggtgactgtgtttgtgagctgtgtgtgtctgctttatgagggtgagaaactgagtggtgtgtgacctggtgtgaggttggatgtatgtgcttccatggtgtgtgggaagctcggtcgtgatat

SEQ ID NO: 21037 - DNA, 889 bp, Homo sapiens
ggacccggtctatagactctgaccttagccctcagaatccctcattcagagcttagggatcgccaggccagaaggtggctgggaaggcaccagggagaagacagcctcccgcccccagttgagggaggtggtgaagagaggggagactgaaagcagtgggggagggtgagagaggggagccagcagagactcaagtggcctccagacttccaagtgctggccttcatctccccgcaagatgcgccccctccaactctcagccttcatcttcctactgtcactgtctccttcacaaggagagcagcaagagaaagaaagagagaggcaagcgaaattcctgaatggatagacagatgctacgtcatcggagctgcatcctccactccacaagaggctaggagctggggggagagaggcagtccagccgcaggggccacccgaacagtctctcctcctcacagaagcctggagctgggcatccaagaagaagcagcctcatttgttttctggtgtcatcgtaggtggccacctatggcttttgggaccaaaaagaagaatgtacttcatctggttgggctggattccctctgataagccttcccagttgactgaaagatgaggctaggctctagcaagttgaagtcaaaccagctccttcaagaagctttgagcagaatgaagtggggaggacccagcttccagcccaggaagcccactgtacctggagccatctgggataagactttgacccatgactcccatatccacagcctgtccatcctagcccatcccagtttatcctgtatcatttgagctgggattcccacatcctctgagttggaagtcccatctcaagtcttcaataaagactcttgaatattgaatcaca

SEQ ID NO: 21038 - DNA, 901 bp, Homo sapiens
ggactttcggaattcggctttagagaagcctggagctgggcatccaagaagaagcagcctcatttgttttctggtgtcatcgtaggtggccacctatggcttttgggaatgtaaaaagggcagctctctggcatgttcctgactgaggatctcataacatttaacttgaggaacttcctccttttccagctttgggagtcaagcttctcacctggggcgggtgggttctgcaccaccctcccaccctccttcctccgtgtggacgatagagccacatccagcaccacggacagctcccgggcgccttcatctcctcgtcctccaggcagcacaagccattgtggaatctccaccaggtgtacagaacggtgcctctgcgtcctgccactcaggacctctcaagtccccgatgtgatggctcctcagcatgatcaggagaaattccatgatcttgcttattcctgtcttgggaagtccttctccatgtctaaccaagatctatatggctatagcaccagctctttggctcttggcttggcatggctaagttgggagaccaaaaagaagaatgtacttcatctggttgggctggattccctctgataagccttcccagttgactgaaagatgaggctaggctctagcaagttgaagtcaaaccagctccttcaagaagctttgagcagaatgaagtggggaggacccagcttccagcccaggaagcccactgtacctggagccatctgggataagactttgacccatgactcccatatccacagcctgtccatcctagcccatcccagtttatcctgtatcatttgagctgggattcccacatcctctgagttggaagtcccatctcaagtcttcaataaagactcttgaatattgaatcaca

SEQ ID NO: 21039 - DNA, 2817 bp, Homo sapiens
aggaatgccacctagctttagttacttcataaaggttcctggactccagctattagaataggaaaactgagacttgtctagcttggtgagaggtctgagtgccccttaaagacttgggagcccccacccaaaccttttgtttacagaagaggagtaaatgccacagaatgctttgaaattccccctctgtgccccatcagcaccccagaaagaggagccggagaccatggaatagcaatagtctctcaggccctctgggctccccctttggaagccagtctcccagctcctgccctggggggaacgttccaacagggtctcagagacatcctgggataatgagggtcccctccttctggagcccaactggaaggcagagaatggtcactttgacctcgaggggcatctataaggggcactaagcagaggccagatttgctgaggaaatcctgaatgaggagcaggtggagagaaaaaggaggccattctcaactgaggaagggtgggctgggagggaggggccagggataatttatgatatcattgctcccccgccgcacttacttcccagccctctgctactgtaccgttgctaggagagcctggctctgtctggggctgggagggtgtaacaagcgggaggctgttccatctgcactcctcctcccccacccaggggagggcaccgcatggagctgcatccaccaccccttcccaggccctgacagacaccagtctcttctgtcgttcccccaaatctagccactcaagggatagcaggactcccagttgggctgaggatctagagcaaggaatgggcaagagagcatggaaggagacacactggcagacttagaggggcactgaggaacagacagcccaccttgagtcctggcagccagcccgggtcaggaagagggccagagggggtcagggaaacaggcctggcagagatcaggtttggagaagacagggtcgttacatttgaggggctcctgatatgatgggcaaggcagacttctcatccccactcctccatactgtcaagatccaggttggagagctggcaaaggtagggggaggaggagctggggaagggaggagggatgtgagctgggagaggctgcgaagagtctaggaagaagaaaggccacactcgtctgagtggagctgggccatgcagggccgtggccgagatcccctcctctttctgaaactcttctcagatcttaaggctcttggagaagtcaagggaggtgaactttgggggtttccaaagcggctggctcccaaccctggatgggacaggaaaggaaggctgtgcccacagctgtgcctgacacctgattcctgtgcagcccctactgggtttatttgcctttcctggacatagcttccccagcccaggaaggaaggagctgaccctgatttgtgcccatttggttgtgtaagccctttcatagccattatctcagctaatcttcccaacagccctgaaaaccgggtgatattgtccccactttatgaaggaggaatcaaagcctcaggaaggctaagacactttcccagagtcacaggactggtaaattgggctgggcttcaagtgggtcttcgtagaccccaaagcatatgtccccttcctcccctgtgctgacttctgaaacacaaatggagggaccgagagaagagaggaccagataggcaggtggaattcttggcatgttctccagtgtaggggtaaagtctgagggatgataaacatcttgcaggttgaagacaggattggggaagaggccatgggagctgtggaagcgaccaaagtcttccaggctggtccttagcccaagtgcatcctgcaccctgccttcctgaagcaagtcccctgggctctctgcctaatctctcccgttcttgggatctgagtttacgccttaggcatttccctcaccccccattgccttggatggagcacctggaagaggtggaagaggtgcctagactcaagccactgtcatggtggatccctttgtgatgaccccttccctagctcctcaccttgcctgatggaagtgagctccttccaagatggctggaagtttgtcctctgcctcctcctaaagtctccatccgaagtgtattttttggctggacgtggtggctcacgcctgtaattccaacactctgggaggccgaggcaggtggatcacttgaggtcaggagttcgagaccagcctggccaacatggcgaaaccccgtgtcttctaaaaatacaaaatttagccaggtgtgatggcatgcgcctgtgatcccagctactcagaggctgaggtacgagaattgcttgaacctaggaggcagaggttgcagtgagccgagatcatgccactgcactccagcctgggtgacagagtgagattccatctcaaaaaaaagaagtatttttctttacgcttgacaatttttcttttcagaccaaaaagaagaatgtacttcatctggttgggctggattccctctgataagccttcccagttgactgaaagatgaggctaggctctagcaagttgaagtcaaaccagctccttcaagaagctttgagcagaatgaagtggggaggacccagcttccagcccaggaagcccactgtacctggagccatctgggataagactttgacccatgactcccatatccacagcctgtccatcctagcccatcccagtttatcctgtatcatttgagctgggattcccacatcctctgagttggaagtcccatctcaagtcttcaataaagactcttgaatattgaatcaca

SEQ ID NO: 21040 - DNA, 1119 bp, Homo sapiens
atgttggccagtatggtcttgatctcttgatctcttgatctgcccgcctcggcctcccaaaatgctgggtttacaggcatgagccaccctggccggcctaacccaacccagtgctttttctactgaacttgcctgtgggaacaactggagagacagtgaaacagggagggtaagatggggttgagctgagaaaggaaggcatggggcacgggagggggagggtgcaccaagagaaaagccctgcctgtgagcaggggctgggagctgggatgagagaagaagcaccaagaaagataggattcctttaaaaacaaaaaaacaacaataacgaaagcctttcatgtagcttgttggaaatgtgtatttgggatccactgaggctcattcacatgagacttagaacctgtatcagtaaccacaatgggtttacattattattgttgtctcctattagtgcatttgacctacctcaggatatccaaaggagaacagagggaagtgaggggttgagaactgacaccctacaacgccagcacctcagtggaaaggaggaatagagcccaggagggatgtggggaatgtaaaaagggcagctctctggcatgttcctgactgaggatctcataacatttaacttgaggaacttcctccttttccagctttgggagtcaagcttctcacctggggcgggtgggttctgcaccaccctcccaccctccttcctccgtgtggacgatagagccacatccagcaccacggacagctcccgggcgaccaaaaagaagaatgtacttcatctggttgggctggattccctctgataagccttcccagttgactgaaagatgaggctaggctctagcaagttgaagtcaaaccagctccttcaagaagctttgagcagaatgaagtggggaggacccagcttccagcccaggaagcccactgtacctggagccatctgggataagactttgacccatgactcccatatccacagcctgtccatcctagcccatcccagtttatcctgtatcatttgagctgggattcccacatcctctgagttggaagtcccatctcaagtcttcaataaagactcttgaatattgaatcaca

SEQ ID NO: 21041 - DNA, 1141 bp, Homo sapiens
ttggcgaggggctatattgggataggcaggtggaattcttggcatgttctccagtgtaggggtaaagtctgagggatgataaacatcttgcaggttgaagacaggattggggaagaggccatgggagctgtggaagcgaccaaagtcttccaggctggtccttagcccaagtgcatcctgcaccctgccttcctgaagcaagtcccctgggctctctgcctaatctctcccgttcttgggatctgagtttacgccttaggcatttccctcaccccccattgccttggatggagcacctggaagaggtggaagaggtgcctagactcaagccactgtcatggtggatccctttgtgatgaccccttccctagctcctcaccttgcctgatggaagtgagctccttccaagatggctggaagtttgtcctctgcctcctcctaaagtctccatccgaagtgtattttttggctggacgtggtggctcacgcctgtaattccaacactctgggaggccgaggcaggtggatcacttgaggtcaggagttcgagaccagcctggccaacatggcgaaaccccgtgtcttctaaaaatacaaaatttagccaggtgtgatggcatgcgcctgtgatcccagctactcagaggctgaggtacgagaattgcttgaacctaggaggcagaggttgcagtgagccgagatcatgccactgcactccagcctgggtgacagagtgagattccatctcaaaaaaaagaagtatttttctttacgcttgacaatttttcttttcagaccaaaaagaagaatgtacttcatctggttgggctggattccctctgataagccttcccagttgactgaaagatgaggctaggctctagcaagttgaagtcaaaccagctccttcaagaagctttgagcagaatgaagtggggaggacccagcttccagcccaggaagcccactgtacctggagccatctgggataagactttgacccatgactcccatatccacagcctgtccatcctagcccatcccagtttatcctgtatcatttgagctgggattcccacatcctctgagttggaagtcccatctcaagtcttcaataaagactcttgaatattgaatcaca

SEQ ID NO: 21042 - DNA, 776 bp, Homo sapiens
aggcctcctgggttgtgagggccatggatcaccgggtgcagtccataacggaggcctgactgagaaatggggctgggctccatggctggggcttttgtggtctgaaggaggtgagcatcttgctgaggctgtttcgagagggacccgttgttaacaattaggtggtgaactccacaacggcagcctcttttatccactggccaggtgtgaatgccacccaacataccaggaggaggggacaggtagggtgcagctctgccacattgcccctaacctgccctgctccctccctgcagccttcatctcctcgtcctccaggcagcacaagccattgtggaatctccaccaggtgtacagaacggtgcctctgcgtcctgccactcaggacctctcaagtccccgatgtgatggctcctcagcatgatcaggaaccaaaaagaagaatgtacttcatctggttgggctggattccctctgataagccttcccagttgactgaaagatgaggctaggctctagcaagttgaagtcaaaccagctccttcaagaagctttgagcagaatgaagtggggaggacccagcttccagcccaggaagcccactgtacctggagccatctgggataagactttgacccatgactcccatatccacagcctgtccatcctagcccatcccagtttatcctgtatcatttgagctgggattcccacatcctctgagttggaagtcccatctcaagtcttcaataaagactcttgaatattgaatcaca

SEQ ID NO: 21043 - DNA, 2132 bp, Homo sapiens
ggacccggtctatagactctgaccttagccctcagaatccctcattcagagcttagggatcgccaggccagaaggtggctgggaaggcaccagggagaagacagcctcccgcccccagttgagggaggtggtgaagagaggggagactgaaagcagtgggggagggtgagagaggggagccagcagagactcaagtggcctccagacttccaagtgctggccttcatctccccgcaagatgcgccccctccaactctcagccttcatcttcctactgtcactgtctccttcacaaggagagcagcaagagaaagaaagagagaggcaagcgaaattcctgaatggatagacagatgctacgtcatcggagctgcatcctccactccacaagaggctaggagctggggggagagaggcagtccagccgcaggggccacccgaacagtctctcctcctcacagaagcctggagctgggcatccaagaagaagcagcctcatttgttttctggtgtcatcgtaggtggccacctatggcttttgggcttctcacctggggcgggtgggttctgcaccaccctcccaccctccttcctccgtgtggacgatagagccacatccagcaccacggacagctcccgggcgatcccatgggagtagaagaggtgtgagcaggttgcccagctggttagcggaaatgccaagatccaggctcctgaatttcagcctggccctttctatctgtctgatacctcctttacgagtctctctgcctgcgttgtgtggagcgggcctgctgctggttgggggagtttgcaggttgcccctatgcaaaaaaggacaggatgcatgactggcatgtaaggtgttcaggaaaaccaggaaaagccttcatctcctcgtcctccaggcagcacaagccattgtggaatctccaccaggtgtacagaacggtgcctctgcgtcctgccactcaggacctctcaagtccccgatgtgatggctcctcagcatgatcaggagtgagcgtaattcagacctatttagatccgtcagcccacggaccagggggaccttgagcaggacagtcttttgtctccaagcagtcattccctgttatacaagcaagagtcaggaggaggaatggttttggcatcatcccccacagacagcaatggggcctttaggcctggaaggaaggacccaggctgcggctggcatatggaggttgagccctgggcacggggcatcagcttcacccggctggggatgccttctgctgggtttgtccatctggcaccagctggcttcccagcaccgcccccacaaccaaccagactcctccttctgctgttgccatggcaattggctgccatattgtacctcagagcactagctcctatctggattttcccgcggggttcctagagggtgggagatgggtctccagggatttatccctttcccctgatatctatccaataaaaattcataataacatatgattttttaatagcctaagtggaggattactatgtgtcaggctctgtgccagacactctctacatgttatttaatgtggctaagaacagaattaatgagatagaattcaagaggttcccatccagtttcctgctactacgacagacttttcctctctccaaccaggagaaattccatgatcttgcttattcctgtcttgggaagtccttctccatgtctaaccaagatctatatggctatagcaccagctctttggctcttggcttggcatggctaagttgggagaccaaaaagaagaatgtacttcatctggttgggctggattccctctgataagccttcccagttgactgaaagatgaggctaggctctagcaagttgaagtcaaaccagctccttcaagaagctttgagcagaatgaagtggggaggacccagcttccagcccaggaagcccactgtacctggagccatctgggataagactttgacccatgactcccatatccacagcctgtccatcctagcccatcccagtttatcctgtatcatttgagctgggattcccacatcctctgagttggaagtcccatctcaagtcttcaataaagactcttgaatattgaatcaca

SEQ ID NO: 21044 - DNA, 2068 bp, Homo sapiens
agtgtgaaaggatgaatgaaaagtccggagccggagcgcgccggggccagagccgcggcagaggcagaggagggagctaggaggtgagacccgctccaccctgctcgcctaggctcggcggaggctaagagcagggcagcctcctctgcccggcgcccgctgagccccggcatctggaactcagggccctggcgctccaggggcgggaactggccgggaggaccgcgcgggagagcacggatgggcaccctgggctcgattgcatttgacctacctcaggatatccaaaggagaacagagggaagtgaggggttgagaactgacaccctacaacgccagcacctcagtggaaaggaggaatagagcccaggagggatgtggggaatgtaaaaagggcagctctctggcatgttcctgactgaggatctcataacatttaacttgaggaacttcctccttttccagctttgggagtcaagcttctcacctggggcgggtgggttctgcaccaccctcccaccctccttcctccgtgtggacgatagagccacatccagcaccacggacagctcccgggcgatcccatgggagtagaagaggtgtgagcaggttgcccagctggttagcggaaatgccaagatccaggctcctgaatttcagcctggccctttctatctgtctgatacctcctttacgagtctctctgcctgcgttgtgtggagcgggcctgctgctggttgggggagtttgcaggttgcccctatgcaaaaaaggacaggatgcatgactggcatgtaaggtgttcaggaaaaccaggaaaagccttcatctcctcgtcctccaggcagcacaagccattgtggaatctccaccaggtgtacagaacggtgcctctgcgtcctgccactcaggacctctcaagtccccgatgtgatggctcctcagcatgatcaggagtgagcgtaattcagacctatttagatccgtcagcccacggaccagggggaccttgagcaggacagtcttttgtctccaagcagtcattccctgttatacaagcaagagtcaggaggaggaatggttttggcatcatcccccacagacagcaatggggcctttaggcctggaaggaaggacccaggctgcggctggcatatggaggttgagccctgggcacggggcatcagcttcacccggctggggatgccttctgctgggtttgtccatctggcaccagctggcttcccagcaccgcccccacaaccaaccagactcctccttctgctgttgccatggcaattggctgccatattgtacctcagagcactagctcctatctggattttcccgcggggttcctagagggtgggagatgggtctccagggatttatccctttcccctgatatctatccaataaaaattcataataacatatgattttttaatagcctaagtggaggattactatgtgtcaggctctgtgccagacactctctacatgttatttaatgtggctaagaacagaattaatgagatagaattcaagaggttcccatccagtttcctgctactacgacagacttttcctctctccaaccaggagaaattccatgatcttgcttattcctgtcttgggaagtccttctccatgtctaaccaagatctatatggctatagcaccagctctttggctcttggcttggcatggctaagttgggagaccaaaaagaagaatgtacttcatctggttgggctggattccctctgataagccttcccagttgactgaaagatgaggctaggctctagcaagttgaagtcaaaccagctccttcaagaagctttgagcagaatgaagtggggaggacccagcttccagcccaggaagcccactgtacctggagccatctgggataagactttgacccatgactcccatatccacagcctgtccatcctagcccatcccagtttatcctgtatcatttgagctgggattcccacatcctctgagttggaagtcccatctcaagtcttcaataaagactcttgaatattgaatcaca

SEQ ID NO: 21045 - DNA, 2019 bp, Homo sapiens
atgttggccagtatggtcttgatctcttgatctcttgatctgcccgcctcggcctcccaaaatgctgggtttacaggcatgagccaccctggccggcctaacccaacccagtgctttttctactgaacttgcctgtgggaacaactggagagacagtgaaacagggagggtaagatggggttgagctgagaaaggaaggcatggggcacgggagggggagggtgcaccaagagaaaagccctgcctgtgagcaggggctgggagctgggatgagagaagaagcaccaagaaagataggattcctttaaaaacaaaaaaacaacaataacgaaagcctttcatgtagcttgttggaaatgtgtatttgggatccactgaggctcattcacatgagacttagaacctgtatcagtaaccacaatgggtttacattattattgttgtctcctattagtgcatttgacctacctcaggatatccaaaggagaacagagggaagtgaggggttgagaactgacaccctacaacgccagcacctcagtggaaaggaggaatagagcccaggagggatgtggggaatgtaaaaagggcagctctctggcatgttcctgactgaggatctcataacatttaacttgaggaacttcctccttttccagctttgggagtcaagcttctcacctggggcgggtgggttctgcaccaccctcccaccctccttcctccgtgtggacgatagagccacatccagcaccacggacagctcccgggcgccttcatctcctcgtcctccaggcagcacaagccattgtggaatctccaccaggtgtacagaacggtgcctctgcgtcctgccactcaggacctctcaagtccccgatgtgatggctcctcagcatgatcaggagtgagcgtaattcagacctatttagatccgtcagcccacggaccagggggaccttgagcaggacagtcttttgtctccaagcagtcattccctgttatacaagcaagagtcaggaggaggaatggttttggcatcatcccccacagacagcaatggggcctttaggcctggaaggaaggacccaggctgcggctggcatatggaggttgagccctgggcacggggcatcagcttcacccggctggggatgccttctgctgggtttgtccatctggcaccagctggcttcccagcaccgcccccacaaccaaccagactcctccttctgctgttgccatggcaattggctgccatattgtacctcagagcactagctcctatctggattttcccgcggggttcctagagggtgggagatgggtctccagggatttatccctttcccctgatatctatccaataaaaattcataataacatatgattttttaatagcctaagtggaggattactatgtgtcaggctctgtgccagacactctctacatgttatttaatgtggctaagaacagaattaatgagatagaattcaagaggttcccatccagtttcctgctactacgacagacttttcctctctccaaccaggagaaattccatgatcttgcttattcctgtcttgggaagtccttctccatgtctaaccaagatctatatggctatagcaccagctctttggctcttggcttggcatggctaagttgggagaccaaaaagaagaatgtacttcatctggttgggctggattccctctgataagccttcccagttgactgaaagatgaggctaggctctagcaagttgaagtcaaaccagctccttcaagaagctttgagcagaatgaagtggggaggacccagcttccagcccaggaagcccactgtacctggagccatctgggataagactttgacccatgactcccatatccacagcctgtccatcctagcccatcccagtttatcctgtatcatttgagctgggattcccacatcctctgagttggaagtcccatctcaagtcttcaataaagactcttgaatattgaatcaca

SEQ ID NO: 21046 - DNA, 2104 bp, Homo sapiens
ggacccggtctatagactctgaccttagccctcagaatccctcattcagagcttagggatcgccaggccagaaggtggctgggaaggcaccagggagaagacagcctcccgcccccagttgagggaggtggtgaagagaggggagactgaaagcagtgggggagggtgagagaggggagccagcagagactcaagtggcctccagacttccaagtgctggccttcatctccccgcaagatgcgccccctccaactctcagccttcatcttcctactgtcactgtctccttcacaaggagagcagcaagagaaagaaagagagaggcaagcgaaattcctgaatggatagacagatgctacgtcatcggagctgcatcctccactccacaagaggctaggagctggggggagagaggcagtccagccgcaggggccacccgaacagtctctcctcctcacagaagcctggagctgggcatccaagaagaagcagcctcatttgttttctggtgtcatcgtaggtggccacctatggcttttgggcttctcacctggggcgggtgggttctgcaccaccctcccaccctccttcctccgtgtggacgatagagccacatccagcaccacggacagctcccgggcgatcccatgggagtagaagaggtgtgagcaggttgcccagctggttagcggaaatgccaagatccaggctcctgaatttcagcctggccctttctatctgtctgatacctcctttacgagtctctctgcctgcgttgtgtggagcgggcctgctgctggttgggggagtttgcaggttgcccctatgcaaaaaaggacaggatgcatgactggcatccttcatctcctcgtcctccaggcagcacaagccattgtggaatctccaccaggtgtacagaacggtgcctctgcgtcctgccactcaggacctctcaagtccccgatgtgatggctcctcagcatgatcaggagtgagcgtaattcagacctatttagatccgtcagcccacggaccagggggaccttgagcaggacagtcttttgtctccaagcagtcattccctgttatacaagcaagagtcaggaggaggaatggttttggcatcatcccccacagacagcaatggggcctttaggcctggaaggaaggacccaggctgcggctggcatatggaggttgagccctgggcacggggcatcagcttcacccggctggggatgccttctgctgggtttgtccatctggcaccagctggcttcccagcaccgcccccacaaccaaccagactcctccttctgctgttgccatggcaattggctgccatattgtacctcagagcactagctcctatctggattttcccgcggggttcctagagggtgggagatgggtctccagggatttatccctttcccctgatatctatccaataaaaattcataataacatatgattttttaatagcctaagtggaggattactatgtgtcaggctctgtgccagacactctctacatgttatttaatgtggctaagaacagaattaatgagatagaattcaagaggttcccatccagtttcctgctactacgacagacttttcctctctccaaccaggagaaattccatgatcttgcttattcctgtcttgggaagtccttctccatgtctaaccaagatctatatggctatagcaccagctctttggctcttggcttggcatggctaagttgggagaccaaaaagaagaatgtacttcatctggttgggctggattccctctgataagccttcccagttgactgaaagatgaggctaggctctagcaagttgaagtcaaaccagctccttcaagaagctttgagcagaatgaagtggggaggacccagcttccagcccaggaagcccactgtacctggagccatctgggataagactttgacccatgactcccatatccacagcctgtccatcctagcccatcccagtttatcctgtatcatttgagctgggattcccacatcctctgagttggaagtcccatctcaagtcttcaataaagactcttgaatattgaatcaca

SEQ ID NO: 21047 - DNA, 829 bp, Homo sapiens
  misc_feature (49)..(49): n is a, c, g, or t
gggctctggcttctctccgcgttgcgtgccgctcctcccgcagctgtgnccgctccttgtctcctcctcattgtcactgccaaacaggtcaatgtcatcatcctcgtcatcctctgctggtggggctgggctccatggctggggcttttgtggtctgaaggaggtgagcatcttgctgaggctgtttcgagagggacccgttgttaacaattaggtggtgaactccacaacggcagcctcttttatccactggccaggtgtgaatgccacccaacataccaggaggaggggacaggtagggtgcagctctgccacattgcccctaacctgccctgctccctccctgcagccttcatctcctcgtcctccaggcagcacaagccattgtggaatctccaccaggtgtacagaacggtgcctctgcgtcctgccactcaggacctctcaagtccccgatgtgatggctcctcagcatgatcaggaaccaaaaagaagaatgtacttcatctggttgggctggattccctctgataagccttcccagttgactgaaagatgaggctaggctctagcaagttgaagtcaaaccagctccttcaagaagctttgagcagaatgaagtggggaggacccagcttccagcccaggaagcccactgtacctggagccatctgggataagactttgacccatgactcccatatccacagcctgtccatcctagcccatcccagtttatcctgtatcatttgagctgggattcccacatcctctgagttggaagtcccatctcaagtcttcaataaagactcttgaatattgaatcaca

SEQ ID NO: 21048 - DNA, 1123 bp, Homo sapiens
ggacccggtctatagactctgaccttagccctcagaatccctcattcagagcttagggatcgccaggccagaaggtggctgggaaggcaccagggagaagacagcctcccgcccccagttgagggaggtggtgaagagaggggagactgaaagcagtgggggagggtgagagaggggagccagcagagactcaagtggcctccagacttccaagtgctggccttcatctccccgcaagatgcgccccctccaactctcagccttcatcttcctactgtcactgtctccttcacaaggagagcagcaagagaaagaaagagagaggcaagcgaaattcctgaatggatagacagatgctacgtcatcggagctgcatcctccactccacaagaggctaggagctggggggagagaggcagtccagccgcaggggccacccgaacagtctctcctcctcacagaagcctggagctgggcatccaagaagaagcagcctcatttgttttctggtgtcatcgtaggtggccacctatggcttttgggcttctcacctggggcgggtgggttctgcaccaccctcccaccctccttcctccgtgtggacgatagagccacatccagcaccacggacagctcccgggcgccttcatctcctcgtcctccaggcagcacaagccattgtggaatctccaccaggtgtacagaacggtgcctctgcgtcctgccactcaggacctctcaagtccccgatgtgatggctcctcagcatgatcaggaaccaaaaagaagaatgtacttcatctggttgggctggattccctctgataagccttcccagttgactgaaagatgaggctaggctctagcaagttgaagtcaaaccagctccttcaagaagctttgagcagaatgaagtggggaggacccagcttccagcccaggaagcccactgtacctggagccatctgggataagactttgacccatgactcccatatccacagcctgtccatcctagcccatcccagtttatcctgtatcatttgagctgggattcccacatcctctgagttggaagtcccatctcaagtcttcaataaagactcttgaatattgaatcaca

SEQ ID NO: 21049 - DNA, 1017 bp, Homo sapiens
ggcctcaggctttaaccaggtctgggcaggaaggagagagaagctgaaaccaggccggggtctcacagtgaggccgttcatggtctggtccagctgtccccaggatgggctcctctccatcatccaaccagagacccagggccccagcaccaaggccctgacctgcccctgccttctccccatgtcttcccagctataactcctgatcctgccaggcctctccagccttccatcccctgctcatacatgctgtctcctgacactcttggaactgaccctgctcttgggactgaccctgcttgagcttctctcatcttcccagcatggggtctccttccatctcctgcacagtgctcctgctccagggagggctgtgttgagagggtagagacacaagattgaccagaactaaaaaggagtcccaaggccaccccagtctccacacccactcttgccttccccaggagaggctcctctcctggcctggcctcagtgtcacttactgctaatcatcgatgtgtagagacctttctcccatctccccaccaccaagcccttgttgagcacactgcacactggctttttatttttattttcctgggtgacagagtgagattccatctcaaaaaaaagaagtatttttctttacgcttgacaatttttcttttcagaccaaaaagaagaatgtacttcatctggttgggctggattccctctgataagccttcccagttgactgaaagatgaggctaggctctagcaagttgaagtcaaaccagctccttcaagaagctttgagcagaatgaagtggggaggacccagcttccagcccaggaagcccactgtacctggagccatctgggataagactttgacccatgactcccatatccacagcctgtccatcctagcccatcccagtttatcctgtatcatttgagctgggattcccacatcctctgagttggaagtcccatctcaagtcttcaataaagactcttgaatattgaatcaca

SEQ ID NO: 21050 - DNA, 1455 bp, Homo sapiens
atgttggccagtatggtcttgatctcttgatctcttgatctgcccgcctcggcctcccaaaatgctgggtttacaggcatgagccaccctggccggcctaacccaacccagtgctttttctactgaacttgcctgtgggaacaactggagagacagtgaaacagggagggtaagatggggttgagctgagaaaggaaggcatggggcacgggagggggagggtgcaccaagagaaaagccctgcctgtgagcaggggctgggagctgggatgagagaagaagcaccaagaaagataggattcctttaaaaacaaaaaaacaacaataacgaaagcctttcatgtagcttgttggaaatgtgtatttgggatccactgaggctcattcacatgagacttagaacctgtatcagtaaccacaatgggtttacattattattgttgtctcctattagtgcatttgacctacctcaggatatccaaaggagaacagagggaagtgaggggttgagaactgacaccctacaacgccagcacctcagtggaaaggaggaatagagcccaggagggatgtggggaatgtaaaaagggcagctctctggcatgttcctgactgaggatctcataacatttaacttgaggaacttcctccttttccagctttgggagtcaagcttctcacctggggcgggtgggttctgcaccaccctcccaccctccttcctccgtgtggacgatagagccacatccagcaccacggacagctcccgggcgcactggaagctgagggtttgacagcggcaggccacataggcaaggaagctggtgcatgcagtgtctctgggcaaggttatgcaaccttcatctcctcgtcctccaggcagcacaagccattgtggaatctccaccaggtgtacagaacggtgcctctgcgtcctgccactcaggacctctcaagtccccgatgtgatggctcctcagcatgatcaggagaaattccatgatcttgcttattcctgtcttgggaagtccttctccatgtctaaccaagatctatatggctatagcaccagctctttggctcttggcttggcatggctaagttgggagaccaaaaagaagaatgtacttcatctggttgggctggattccctctgataagccttcccagttgactgaaagatgaggctaggctctagcaagttgaagtcaaaccagctccttcaagaagctttgagcagaatgaagtggggaggacccagcttccagcccaggaagcccactgtacctggagccatctgggataagactttgacccatgactcccatatccacagcctgtccatcctagcccatcccagtttatcctgtatcatttgagctgggattcccacatcctctgagttggaagtcccatctcaagtcttcaataaagactcttgaatattgaatcaca

SEQ ID NO: 21051 - DNA, 1412 bp, Homo sapiens
ctgcgcagaggggcccggggaaagccggcctcacgggcgggagggagaggcttgagcgaggggctagagccgcgaggactgaccagcaccagaggatacaagaggaggagagagacctcactggttcgggcgacatttcacccccccagcaccccagtcggcacagccttcatctcctcgtcctccaggcagcacaagccattgtggaatctccaccaggtgtacagaacggtgcctctgcgtcctgccactcaggacctctcaagtccccgatgtgatggctcctcagcatgatcaggagtgagcgtaattcagacctatttagatccgtcagcccacggaccagggggaccttgagcaggacagtcttttgtctccaagcagtcattccctgttatacaagcaagagtcaggaggaggaatggttttggcatcatcccccacagacagcaatggggcctttaggcctggaaggaaggacccaggctgcggctggcatatggaggttgagccctgggcacggggcatcagcttcacccggctggggatgccttctgctgggtttgtccatctggcaccagctggcttcccagcaccgcccccacaaccaaccagactcctccttctgctgttgccatggcaattggctgccatattgtacctcagagcactagctcctatctggattttcccgcggggttcctagagggtgggagatgggtctccagggatttatccctttcccctgatatctatccaataaaaattcataataacatatgattttttaatagcctaagtggaggattactatgtgtcaggctctgtgccagacactctctacatgttatttaatgtggctaagaacagaattaatgagatagaattcaagaggttcccatccagtttcctgctactacgacagacttttcctctctccaaccaggagaaattccatgatcttgcttattcctgtcttgggaagtccttctccatgtctaaccaagatctatatggctatagcaccagctctttggctcttggcttggcatggctaagttgggagaccaaaaagaagaatgtacttcatctggttgggctggattccctctgataagccttcccagttgactgaaagatgaggctaggctctagcaagttgaagtcaaaccagctccttcaagaagctttgagcagaatgaagtggggaggacccagcttccagcccaggaagcccactgtacctggagccatctgggataagactttgacccatgactcccatatccacagcctgtccatcctagcccatcccagtttatcctgtatcatttgagctgggattcccacatcctctgagttggaagtcccatctcaagtcttcaataaagactcttgaatattgaatcaca

SEQ ID NO: 21052 - DNA, 1324 bp, Homo sapiens
agtgtgaaaggatgaatgaaaagtccggagccggagcgcgccggggccagagccgcggcagaggcagaggagggagctaggaggtgagacccgctccaccctgctcgcctaggctcggcggaggctaagagcagggcagcctcctctgcccggcgcccgctgagccccggcatctggaactcagggccctggcgctccaggggcgggaactggccgggaggaccgcgcgggagagcacggatgggcaccctgggctcgattgcatttgacctacctcaggatatccaaaggagaacagagggaagtgaggggttgagaactgacaccctacaacgccagcacctcagtggaaaggaggaatagagcccaggagggatgtggggcttctcacctggggcgggtgggttctgcaccaccctcccaccctccttcctccgtgtggacgatagagccacatccagcaccacggacagctcccgggcgatcccatgggagtagaagaggtgtgagcaggttgcccagctggttagcggaaatgccaagatccaggctcctgaatttcagcctggccctttctatctgtctgatacctcctttacgagtctctctgcctgcgttgtgtggagcgggcctgctgctggttgggggagtttgcaggttgcccctatgcaaaaaaggacaggatgcatgactggcatgtaaggtgttcaggaaaaccaggaaaagccttcatctcctcgtcctccaggcagcacaagccattgtggaatctccaccaggtgtacagaacggtgcctctgcgtcctgccactcaggacctctcaagtccccgatgtgatggctcctcagcatgatcaggagaaattccatgatcttgcttattcctgtcttgggaagtccttctccatgtctaaccaagatctatatggctatagcaccagctctttggctcttggcttggcatggctaagttgggagaccaaaaagaagaatgtacttcatctggttgggctggattccctctgataagccttcccagttgactgaaagatgaggctaggctctagcaagttgaagtcaaaccagctccttcaagaagctttgagcagaatgaagtggggaggacccagcttccagcccaggaagcccactgtacctggagccatctgggataagactttgacccatgactcccatatccacagcctgtccatcctagcccatcccagtttatcctgtatcatttgagctgggattcccacatcctctgagttggaagtcccatctcaagtcttcaataaagactcttgaatattgaatcaca

SEQ ID NO: 21053 - DNA, 1241 bp, Homo sapiens
ggacccggtctatagactctgaccttagccctcagaatccctcattcagagcttagggatcgccaggccagaaggtggctgggaaggcaccagggagaagacagcctcccgcccccagttgagggaggtggtgaagagaggggagactgaaagcagtgggggagggtgagagaggggagccagcagagactcaagtggcctccagacttccaagtgctggccttcatctccccgcaagatgcgccccctccaactctcagccttcatcttcctactgtcactgtctccttcacaaggagagcagcaagagaaagaaagagagaggcaagcgaaattcctgaatggatagacagatgctacgtcatcggagctgcatcctccactccacaagaggctaggagctggggggagagaggcagtccagccgcaggggccacccgaacagtctctcctcctcacagaagcctggagctgggcatccaagaagaagcagcctcatttgttttctggtgtcatcgtaggtggccacctatggcttttgggcttctcacctggggcgggtgggttctgcaccaccctcccaccctccttcctccgtgtggacgatagagccacatccagcaccacggacagctcccgggcgccttcatctcctcgtcctccaggcagcacaagccattgtggaatctccaccaggtgtacagaacggtgcctctgcgtcctgccactcaggacctctcaagtccccgatgtgatggctcctcagcatgatcaggagaaattccatgatcttgcttattcctgtcttgggaagtccttctccatgtctaaccaagatctatatggctatagcaccagctctttggctcttggcttggcatggctaagttgggagaccaaaaagaagaatgtacttcatctggttgggctggattccctctgataagccttcccagttgactgaaagatgaggctaggctctagcaagttgaagtcaaaccagctccttcaagaagctttgagcagaatgaagtggggaggacccagcttccagcccaggaagcccactgtacctggagccatctgggataagactttgacccatgactcccatatccacagcctgtccatcctagcccatcccagtttatcctgtatcatttgagctgggattcccacatcctctgagttggaagtcccatctcaagtcttcaataaagactcttgaatattgaatcaca

SEQ ID NO: 21054 - DNA, 1329 bp, Homo sapiens
ggacccggtctatagactctgaccttagccctcagaatccctcattcagagcttagggatcgccaggccagaaggtggctgggaaggcaccagggagaagacagcctcccgcccccagttgagggaggtggtgaagagaggggagactgaaagcagtgggggagggtgagagaggggagccagcagagactcaagtggcctccagacttccaagtgctggccttcatctccccgcaagatgcgccccctccaactctcagccttcatcttcctactgtcactgtctccttcacaaggagagcagcaagagaaagaaagagagaggcaagcgaaattcctgaatggatagacagatgctacgtcatcggagctgcatcctccactccacaagaggctaggagctggggggagagaggcagtccagccgcaggggccacccgaacagtctctcctcctcacagaagcctggagctgggcatccaagaagaagcagcctcatttgttttctggtgtcatcgtaggtggccacctatggcttttgggcttctcacctggggcgggtgggttctgcaccaccctcccaccctccttcctccgtgtggacgatagagccacatccagcaccacggacagctcccgggcgatcccatgggagtagaagaggtgtgagcaggttgcccagctggttagcggaaatgccaagatccaggctcctgaatttcagcctggccctttctatctgtctgatacctcctttacgagtctctctgcctgcgttgtgtggagcgggcctgctgctggttgggggagtttgcaggttgcccctatgcaaaaaaggacaggatgcatgactggcatgtaaggtgttcaggaaaaccaggaaaaggtggaacagactgctacctctgtctgaagtggtttggagggaaggcctcagggacagggcatacctagcagtagctggcaagcccatgggagaaaagaccaaaaagaagaatgtacttcatctggttgggctggattccctctgataagccttcccagttgactgaaagatgaggctaggctctagcaagttgaagtcaaaccagctccttcaagaagctttgagcagaatgaagtggggaggacccagcttccagcccaggaagcccactgtacctggagccatctgggataagactttgacccatgactcccatatccacagcctgtccatcctagcccatcccagtttatcctgtatcatttgagctgggattcccacatcctctgagttggaagtcccatctcaagtcttcaataaagactcttgaatattgaatcaca

SEQ ID NO: 21055 - DNA, 1232 bp, Homo sapiens
ggacccggtctatagactctgaccttagccctcagaatccctcattcagagcttagggatcgccaggccagaaggtggctgggaaggcaccagggagaagacagcctcccgcccccagttgagggaggtggtgaagagaggggagactgaaagcagtgggggagggtgagagaggggagccagcagagactcaagtggcctccagacttccaagtgctggccttcatctccccgcaagatgcgccccctccaactctcagccttcatcttcctactgtcactgtctccttcacaaggagagcagcaagagaaagaaagagagaggcaagcgaaattcctgaatggatagacagatgctacgtcatcggagctgcatcctccactccacaagaggctaggagctggggggagagaggcagtccagccgcaggggccacccgaacagtctctcctcctcacagaagcctggagctgggcatccaagaagaagcagcctcatttgttttctggtgtcatcgtaggtggccacctatggcttttgggcttctcacctggggcgggtgggttctgcaccaccctcccaccctccttcctccgtgtggacgatagagccacatccagcaccacggacagctcccgggcgatcccatgggagtagaagaggtgtgagcaggttgcccagctggttagcggaaatgccaagatccaggctcctgaatttcagcctggccctttctatctgtctgatacctcctttacgagtctctctgcctgcgttgtgtggagcgggcctgctgctggttgggggagtttgcaggttgcccctatgcaaaaaaggacaggatgcatgactggcatgtaaggtgttcaggaaaaccaggaaaagaccaaaaagaagaatgtacttcatctggttgggctggattccctctgataagccttcccagttgactgaaagatgaggctaggctctagcaagttgaagtcaaaccagctccttcaagaagctttgagcagaatgaagtggggaggacccagcttccagcccaggaagcccactgtacctggagccatctgggataagactttgacccatgactcccatatccacagcctgtccatcctagcccatcccagtttatcctgtatcatttgagctgggattcccacatcctctgagttggaagtcccatctcaagtcttcaataaagactcttgaatattgaatcaca

SEQ ID NO: 21056 - DNA, 2833 bp, Homo sapiens
aggaatgccacctagctttagttacttcataaaggttcctggactccagctattagaataggaaaactgagacttgtctagcttggtgagaggtctgagtgccccttaaagacttgggagcccccacccaaaccttttgtttacagaagaggagtaaatgccacagaatgctttgaaattccccctctgtgccccatcagcaccccagaaagaggagccggagaccatggaatagcaatagtctctcaggccctctgggctccccctttggaagccagtctcccagctcctgccctggggggaacgttccaacagggtctcagagacatcctgggataatgagggtcccctccttctggagcccaactggaaggcagagaatggtcactttgacctcgaggggcatctataaggggcactaagcagaggccagatttgctgaggaaatcctgaatgaggagcaggtggagagaaaaaggaggccattctcaactgaggaagggtgggctgggagggaggggccagggataatttatgatatcattgctcccccgccgcacttacttcccagccctctgctactgtaccgttgctaggagagcctggctctgtctggggctgggagggtgtaacaagcgggaggctgttccatctgcactcctcctcccccacccaggggagggcaccgcatggagctgcatccaccaccccttcccaggccctgacagacaccagtctcttctgtcgttcccccaaatctagccactcaagggatagcaggactcccagttgggctgaggatctagagcaaggaatgggcaagagagcatggaaggagacacactggcagacttagaggggcactgaggaacagacagcccaccttgagtcctggcagccagcccgggtcaggaagagggccagagggggtcagggaaacaggcctggcagagatcaggtttggagaagacagggtcgttacatttgaggggctcctgatatgatgggcaaggcagacttctcatccccactcctccatactgtcaagatccaggttggagagctggcaaaggtagggggaggaggagctggggaagggaggagggatgtgagctgggagaggctgcgaagagtctaggaagaagaaaggccacactcgtctgagtggagctgggccatgcagggccgtggccgagatcccctcctctttctgaaactcttctcagatcttaaggctcttggagaagtcaagggaggtgaactttgggggtttccaaagcggctggctcccaaccctggatgggacaggaaaggaaggctgtgcccacagctgtgcctgacacctgattcctgtgcagcccctactgggtttatttgcctttcctggacatagcttccccagcccaggaaggaaggagctgaccctgatttgtgcccatttggttgtgtaagccctttcatagccattatctcagctaatcttcccaacagccctgaaaaccgggtgatattgtccccactttatgaaggaggaatcaaagcctcaggaaggctaagacactttcccagagtcacaggactggtaaattgggctgggcttcaagtgggtcttcgtagaccccaaagcatatgtccccttcctcccctgtgctgacttctgaaacacaaatggagggaccgagagaagagaggaccagataggcaggtggaattcttggcatgttctccagtgtaggggtaaagtctgagggatgataaacatcttgcaggttgaagacaggattggggaagaggccatgggagctgtggaagcgaccaaagtcttccaggctggtccttagcccaagtgcatcctgcaccctgccttcctgaagcaagtcccctgggctctctgcctaatctctcccgttcttgggatctgagtttacgccttaggcatttccctcaccccccattgccttggatggagcacctggaagaggtggaagaggtgcctagactcaagccactgtcatggtggatccctttgtgatgaccccttccctagctcctcaccttgcctgatggaagtgagctccttccaagatggctggaagtttgtcctctgcctcctcctaaagtctccatccgaagtgtattttttggctggacgtggtggctcacgcctgtaattccaacactctgggaggccgaggcaggtggatcacttgaggtcaggagttcgagaccagcctggccaacatggcgaaaccccgtgtcttctaaaaatacaaaatttagccaggtgtgatggcatgcgcctgtgatcccagctactcagaggctgaggtacgagaattgcttgaacctaggaggcagaggttgcagtgagccgagatcatgccactgcactccagcctgggtgacagagtgagattccatctcaaaaaaaagaagtatttttctttacgcttgacaatttttcttttcagaccaaaaagaagaatgtacttcatctggttgggctggattccctctgataagccttcccagttgactgaaagatgaggctaggctctagcaagttgaagtcaaaccagctccttcaagaagctttgagcagaatgaagtggggaggacccagcttccagcccaggaagcccactgtacctggagttctctccctggcatatcctttttgcctatcacctaaccaaatcttaagtttagtacaaggatgtaactcagtataatgtctctgccatgcaaatactctaactcatcctcacttctagactgaaaccacctgccctccttgttcgccaaccgggggattctttaaaatctcgcccgc

SEQ ID NO: 21057 - DNA, 1168 bp, Homo sapiens
ggacccggtctatagactctgaccttagccctcagaatccctcattcagagcttagggatcgccaggccagaaggtggctgggaaggcaccagggagaagacagcctcccgcccccagttgagggaggtggtgaagagaggggagactgaaagcagtgggggagggtgagagaggggagccagcagagactcaagtggcctccagacttccaagtgctggccttcatctccccgcaagatgcgccccctccaactctcagccttcatcttcctactgtcactgtctccttcacaaggagagcagcaagagaaagaaagagagaggcaagcgaaattcctgaatggatagacagatgctacgtcatcggagctgcatcctccactccacaagaggctaggagctggggggagagaggcagtccagccgcaggggccacccgaacagtctctcctcctcacagaagcctggagctgggcatccaagaagaagcagcctcatttgttttctggtgtcatcgtaggtggccacctatggcttttgggcttctcacctggggcgggtgggttctgcaccaccctcccaccctccttcctccgtgtggacgatagagccacatccagcaccacggacagctcccgggcgatcccatgggagtagaagaggtgtgagcaggttgcccagctggttagcggaaatgccaagatccaggctcctgaatttcagcctggccctttctatctgtctgatacctcctttacgagtctctctgcctgcgttgtgtggagcgggcctgctgctggttgggggagtttgcaggttgcccctatgcaaaaaaggacaggatgcatgactggcatgtaaggtgttcaggaaaaccaggaaaagactgaaagatgaggctaggctctagcaagttgaagtcaaaccagctccttcaagaagctttgagcagaatgaagtggggaggacccagcttccagcccaggaagcccactgtacctggagccatctgggataagactttgacccatgactcccatatccacagcctgtccatcctagcccatcccagtttatcctgtatcatttgagctgggattcccacatcctctgagttggaagtcccatctcaagtcttcaataaagactcttgaatattgaatcaca

SEQ ID NO: 21058 - DNA, 1578 bp, Homo sapiens
  misc_feature (1179)..(1179): n is a, c, g, or t
  misc_feature (1187)..(1187): n is a, c, g, or t
  misc_feature (1191)..(1191): n is a, c, g, or t
ggacccggtctatagactctgaccttagccctcagaatccctcattcagagcttagggatcgccaggccagaaggtggctgggaaggcaccagggagaagacagcctcccgcccccagttgagggaggtggtgaagagaggggagactgaaagcagtgggggagggtgagagaggggagccagcagagactcaagtggcctccagacttccaagtgctggccttcatctccccgcaagatgcgccccctccaactctcagccttcatcttcctactgtcactgtctccttcacaaggagagcagcaagagaaagaaagagagaggcaagcgaaattcctgaatggatagacagatgctacgtcatcggagctgcatcctccactccacaagaggctaggagctggggggagagaggcagtccagccgcaggggccacccgaacagtctctcctcctcacagaagcctggagctgggcatccaagaagaagcagcctcatttgttttctggtgtcatcgtaggtggccacctatggcttttgggcttctcacctggggcgggtgggttctgcaccaccctcccaccctccttcctccgtgtggacgatagagccacatccagcaccacggacagctcccgggcgccttcatctcctcgtcctccaggcagcacaagccattgtggaatctccaccaggtgtacagaacggtgcctctgcgtcctgccactcaggacctctcaagtccccgatgtgatggctcctcagcatgatcaggaaccaaaaagaagaatgtacttcatctggttgggctggattccctctgataagccttcccagttgactgaaagatgaggctaggctctagcaagttgaagtcaaaccagctccttcaagaagctttgagcagaatgaagtggggaggacccagcttccagcccaggaagcccactgtacctggagccatctgggataagactttgacccatgactcccatatccacagcctgtccatcctagcccatcccagtttatcctgtatcatttgagctgggattcccacatcctctgagttggaagtcccatctcaagtcttcaataaagactcttgaatattgaatcacaaaaaacaacaaaaacaaaaaaaaaaaaaaaaaagaaaaaaaaaaaaaaaaaaaaanaaaaaaanaaanaaaaaaaaaaaaaaaaaaaagagagggggggcggggcgcaaaaaaaaaaccccccggggggggccccaaaggcacgcccccccatttttgaaaaagggggccccccaatggggggggcttaataaaaacaccgaggcagcgggggggggcggatctttaataacaaacaggtgtgtgagcgggagaaaaacttgtgtcgtgggggagacattgggtggagaaagaccacccaaccttggggggggggagacaataattggggaacaaactccacctatagaggtattagacccgcctcgggaaaataatacattgcaggtatgttagggtggacaaccgctattatttgcggggaaaaaatttgctagggtatatagtgaaacttcc

SEQ ID NO: 21059 - DNA, 675 bp, Homo sapiens
ggacccggtctatagactctgaccttagccctcagaatccctcattcagagcttagggatcgccaggccagaaggtggctgggaaggcaccagggagaagacagcctcccgcccccagttgagggaggtggtgaagagaggggagactgaaagcagtgggggagggtgagagaggggagccagcagagactcaagtggcctccagacttccaagtgctggccttcatctccccgcaagatgcgccccctccaactctcagccttcatcttcctactgtcactgtctccttcacaaggagagcagcaagagaaagaaagagagaggcaagcgaaattcctgaatggatagacagatgctacgtcatcggagctgcatcctccactccacaagagactgaaagatgaggctaggctctagcaagttgaagtcaaaccagctccttcaagaagctttgagcagaatgaagtggggaggacccagcttccagcccaggaagcccactgtacctggagccatctgggataagactttgacccatgactcccatatccacagcctgtccatcctagcccatcccagtttatcctgtatcatttgagctgggattcccacatcctctgagttggaagtcccatctcaagtcttcaataaagactcttgaatattgaatcaca

SEQ ID NO: 21060 - DNA, 1503 bp, Homo sapiens
ggacccggtctatagactctgaccttagccctcagaatccctcattcagagcttagggatcgccaggccagaaggtggctgggaaggcaccagggagaagacagcctcccgcccccagttgagggaggtggtgaagagaggggagactgaaagcagtgggggagggtgagagaggggagccagcagagactcaagtggcctccagacttccaagtgctggccttcatctccccgcaagatgcgccccctccaactctcagccttcatcttcctactgtcactgtctccttcacaaggagagcagcaagagaaagaaagagagaggcaagcgaaattcctgaatggatagacagatgctacgtcatcggagctgcatcctccactccacaagaggctaggagctggggggagagaggcagtccagccgcaggggccacccgaacagtctctcctcctcacagaagcctggagctgggcatccaagaagaagcagcctcatttgttttctggtgtcatcgtaggtggccacctatggcttttgggcttctcacctggggcgggtgggttctgcaccaccctcccaccctccttcctccgtgtggacgatagagccacatccagcaccacggacagctcccgggcgatcccatgggagtagaagaggtgtgagcaggttgcccagctggttagcggaaatgccaagatccaggctcctgaatttcagcctggccctttctatctgtctgatacctcctttacgagtctctctgcctgcgttgtgtggagcgggcctgctgctggttgggggagtttgcaggttgcccctatgcaaaaaaggacaggatgcatgactggcatgtaaggtgttcaggaaaaccaggaaaagccttcatctcctcgtcctccaggcagcacaagccattgtggaatctccaccaggtgtacagaacggtgcctctgcgtcctgccactcaggacctctcaagtccccgatgtgatggctcctcagcatgatcaggagtgagcgtaattcagacctatttagatccgtcagcccacggaccagggggaccttgagcaggacagtcttttgtctccaagcagtcattccctgttatacaagcaagagtcaggaggaggaatggttttggcatcatcccccacagacagcaatggggcctttaggcctggaaggaaggacccaggctgcggctggcatatggaggttgagccctgggcacggggcatcagcttcacccggctggggatgccttctgctgggtttgtccatctggcaccagctggcttcccagcaccgcccccacaaccaaccagactcctccttctgctgttgccatggcaattggctgccatattgtacctcagagcactagctcctatctggattttcccgcggggttcctagagggtgggagatgggtctccagggatttatccctttcccctgatatctatccaataaaaattcataataacatatga

SEQ ID NO: 21061 - DNA, 1264 bp, Homo sapiens
ggacccggtctatagactctgaccttagccctcagaatccctcattcagagcttagggatcgccaggccagaaggtggctgggaaggcaccagggagaagacagcctcccgcccccagttgagggaggtggtgaagagaggggagactgaaagcagtgggggagggtgagagaggggagccagcagagactcaagtggcctccagacttccaagtgctggccttcatctccccgcaagatgcgccccctccaactctcagccttcatcttcctactgtcactgtctccttcacaaggagagcagcaagagaaagaaagagagaggcaagcgaaattcctgaatggatagacagatgctacgtcatcggagctgcatcctccactccacaagaggctaggagctggggggagagaggcagtccagccgcaggggccacccgaacagtctctcctcctcacagaagcctggagctgggcatccaagaagaagcagcctcatttgttttctggtgtcatcgtaggtggccacctatggcttttgggcttctcacctggggcgggtgggttctgcaccaccctcccaccctccttcctccgtgtggacgatagagccacatccagcaccacggacagctcccgggcgatcccatgggagtagaagaggtgtgagcaggttgcccagctggttagcggaaatgccaagatccaggctcctgaatttcagcctggccctttctatctgtctgatacctcctttacgagtctctctgcctgcgttgtgtggagcgggcctgctgctggttgggggagtttgcaggttgcccctatgcaaaaaaggacaggatgcatgactggcatgtaaggtgttcaggaaaaccaggaaaaggtggaacagactgctacctctgtctgaagtggtttggagggaaggcctcagggacagggcatacctagcagtagctggcaagcccatgggagaaaaggcaagggggcaaccatctgccagggcacagaggccaggggatgtccacaaggagtctccagaggccagtgggagtcatgcaaactggaacggggcctgggaaaggcccttctgtgtgcccaggcctgcctccccaactccgtgagcctagttactaagagccatccatttcttagtatttagcatgtatccaggcactgaactaagtccgtgtacaaccgtatcgttatcgtatggttcatatgaatcctgggaaggtagtatgactagtagtaccatttc

SEQ ID NO: 21062 - DNA, 1701 bp, Homo sapiens
ggacccggtctatagactctgaccttagccctcagaatccctcattcagagcttagggatcgccaggccagaaggtggctgggaaggcaccagggagaagacagcctcccgcccccagttgagggaggtggtgaagagaggggagactgaaagcagtgggggagggtgagagaggggagccagcagagactcaagtggcctccagacttccaagtgctggccttcatctccccgcaagatgcgccccctccaactctcagccttcatcttcctactgtcactgtctccttcacaaggagagcagcaagagaaagaaagagagaggcaagcgaaattcctgaatggatagacagatgctacgtcatcggagctgcatcctccactccacaagaggctaggagctggggggagagaggcagtccagccgcaggggccacccgaacagtctctcctcctcacagaagcctggagctgggcatccaagaagaagcagcctcatttgttttctggtgtcatcgtaggtggccacctatggcttttggggtatttattttcttatttattgtttctgatggtggagtgggtgggggaagaaaaggaaaactggccctgtctcacttatgttttctcctgttctctgtacccctctacccctctccctgtctcttccagctttcggcccctgattttggtctactccaattgtagaaagacctacatagtcaatgataggccaccctgcttccagttctgtgatagagaggaaaggcattggggatacagggaactctttccccttctccaatgggctcctgagggcaaagttggaggccaattgaccttgggggagatgattggttggagaagggaacagagatacttgtacctgggtgacagaggtgagaaagaagaggagcatggggtatggtaaatggggacccaaggagcttaaataactgtgagtgggtatgtatgccagggtatacaactgcaagcactgggaggtggtactgctgggagtatcagtggatttgtcattgcattggtctgagttgataagtttgagtatgtgtgcatgtgtgtgtgtgtgcgcacgcgtgtatgtgtgtgcgtgtgtgtatgtgtatgtgtgtgcatgtgtgtgtgtgcgtgtgtgtgtgtgtgatgcgcagcacccttgcatactcatgcttatgccccttaaggaggccatttgctgatggttgagggtcttgtagaaaggactcagtctggacgaaccagccaaccctctaccatctctgccaccttgttcttacctcccagacacataaggttctcaggcaagtgagcaatgtgtgggctcaagaatagaactgggagcaggcaaggaaggcagtacttacacaagcccaaggaattctcaagctggcccctcaataggaggaacataccactctctcgtggggaagaagtgtgacatccttagggacgatatcctccagattatttctccatacctcctaccttttctgcccacatgaatagatattttgtatatatatatttttttcacacagcctcagtattttttattgctaattcttgcttttatttgtgactatcccatagacaatgcagatttctatagcaaaaaatgtatgatattgttcataatgatgcacttataagacaaataaatatctgaatccaccctttccc
